United States Patent Application Publication US 2004/0214272 A1 - sequence listing, part 25

SEQ ID NO: 103267 - DNA, 2194 bp, Zea mays
  Clone ID: MRT4577_25685C.1
gccggccgggtttcgggaaaaaaaaacaaaaatatttacagattggctcactcattgcctggcggtctgcctcgtccccttcctcccgtttcttccctagcctccccctccccgtcgcgctgttcaacgttcaaacccttgcagctccctctcccttggtcgcgcagtcgccattcacgaccccgaccccgaccccccccgtccccctctcttaaatcccacctctccccgtctacgcctcattcgctccagctcgcatcccacagccaagccagttagcccgggagatctccaagaaaccatcttggaatccgagaacgcccagcattcttggtcggccaaggattcgaattccgacgaacggcttctacggccgaaaaaagtccgataatttccgcggggagctcaggaggtgtctcggtctcgggaaccggaggaggaggccgtgggggattgacgagggggcaagatggtgaggctgccgtacacaacggcgctgaccacgctgttcagctacggcctgctcttcgccttcggccagctcagggatttcttccgcaagttcgtcgactggttcaaggccaagaacgtcaaggggtacgcgccgatctgcctgggcctggaggatttctatgtgcgacgcttgtacttgcggatccaggattgctttggtaggccgatcgcaagtgcgccagattcatggtttgatgttgttgagcggacctcaaaggacaataacaagacactacagcgtacctcgaataccaccagatgcctcaacttgggctcctacaactaccttggctttgctgcagcagatgagtattgcacaccacgtgttattgagtctctcaagaaatactcagcaagtacctgcagtgttcgtgtcgatggcggtacgaccaagcttcacaatgagctggaggagttggctgcgcgttttgttggaaagcctgctgctatcctatttggcatgggttatgttacaaactctgccatcattccatgcctaattggaaagggtggactgataattagtgactctctgaatcataactcaattgttaatggcgcaagaggatccggtgcaactgttagggttttccagcataattcccctgctcatttggaagaggtcctgagagagcagatagctggtggtcaaccacggacacacaggccatggaagaagatcattgtcattgttgagggtatctatagcatggaaggggagctgtgtaaactccctgagattatagctgtcgccaagaaatacaaggcctacacatatctggatgaggcccatagcattggtgctgttgggcagtctggccgcggtgtttgtgagctccttggggttgacccagctgatgtagatataatgatgggtacttttaccaagtcttttggatcatgtggtggatatattgccgcatcaaaggagataattcagcaccttaagcatagttgtccggcccatctgtatgctacttccatgtcgccaccagcagtccaacaagttatttctgctattaaagttatccttggggaggatggctccaacagaggtgcccaaaaacttgctcgcatccgcgagaatagtaatttctttaggtcagagctcaagaagatgggttttgaggttcttggtgacaatgactctcctgtcatgcccataatgctctacaatccggctaagattcctgcattctctagggagtgccttagacaaaaggttgctgttgttactgttgcgtttcctgcgacacctcttcttcttgctagggcacgcatatgcatttctgcttcacatactagggaggacctgatgaaagcccttgatgttatcagcagagttggcgaccttgtgggcatcaaatacttccctgcagaaccaccaaagattgctggagctgatcatgataagctggagtaggaatcaacccttagttgccccatgagtgattgaagttgttagaatcccttggagttgtcaacaaatcattatggaaagaagcacatattgagccatttcatttggatcttgtcaatacacaagagtccaggatccgtcatattaagctgactactgtttgttgattgtacaactattcttccaattgtgtatagctggttgaaattcagttgttctgttgttaatccattcccaatatgtaatacaattagaggcaac

SEQ ID NO: 103268 - DNA, 2545 bp, Zea mays
  Clone ID: MRT4577_25686C.1
caccgcacacgggaagggggcatagccgacgggccgtcagcggcgagacccaagccaacacattggttggctgtctgtgtccttcctcccgttcttcccttgcttccccgtcgcgctgttcaacgttcaaacccttacacctcctcctcccttggccgcgcagtcgccattgacgacccccctctcactctcccctcccttaaatccctcctctccccgcgtccttctccccatcaacgcttcattcgctccagtctcatcgaatccaattcacagccagccagacagggcgggagatctccaagaagctatcttggaatccgagaacaccttgcattcgcggtcagtcaaggattcgaattctgacggacgagctctccggccaaaaaagtcagataattttcgggatagctcgggtggcgtctcggcaaccggaggagaccccggggggattaaggaaggggcaagatggtgaggctgccttacacaacggcgctgaccacgctgttcagctacgggctgctcttcgccttcggccagctcagggatttcttccgcaagttcgtcgactggttcaaggccaagaacgtcaagggctacgcgccgatctgcctgggcctggaggatttctatgtgcgacgactgtacctgcggatccaggattgctttggtaggccgatcgcaagtgcacctgattcatggtttgatgttgttgagcgcacctcaaacgacaataacaagacattacagcgtacctcaaataccactaaatgcctcaacctgggctcgtacaactaccttggctttgccgcagcagatgagtactgcactccacgtgttattgattctctcaagaaatactcagcaagcacctgcagtgttcgtgttgatggaggtacgaccaagcttcacactgagctggaggagttgactgcacgttttgttggaaagcctgctgctattctctttggcatgggttatgttacaaactctgccatcattccctgcctaattggaaagggtgggctgataattagtgactctctgaatcataactcaattgtcaatggtgcgagaggatctggtgcaactgttagggttttccagcataactcccctgctcatttggaagaggtcttgagagagcagatagctggtggtcaaccacggacacacagaccatggaagaagatcattgtcattgttgagggtatctatagcatggaaggggagctgtgtaaactccctgagattatagctgtctgcaagaaatacaaggcttacacatatctggatgaggcccatagcattggtgctgttggacagtctggccgcggtgtttgtgaactccttggggttgacccagctgatgtagatataatgatgggtactttcaccaagtcttttggatcatgtggtggatatattgccgcatcaaaggagataattaagcacctgaagcatagttgcccagcccatctgtacgctacgtccatgtcaccaccagcagtccaacaagttatctctgctattaaagttatccttggggaggatggctccagcagaggtgcccaaaaacttgcacgcatccgtgagaacggtaatttcttcaggtccgaactcaagaagatgggttttgaggttcttggtgacaatgactctcctgtcatgcccataatgctttacaatccggctaagattcctgcattctctagggagtgccttagacaaaaggttgctgttgttactgttgcgttccctgcgacacctcttcttcttgctagggcacgcatatgcatttctgcttcacatactagggaggacctgatgaaagcccttgatgttatcagcagagttggcgaccttgtgggcatcaaatacttccctgcagaaccaccaaagattgctggagctgatcatgataagctggagtaggaatcaacccttagttgccccatgagtgattgaagtagttagaatcccttggagttgtcaacaaatcattatggaaagaagcacatattgagccatttcatttggatcttgttaatacacaagagtccaggatccgtcatattaagctgactactgtttgttgattgtacaactattcttccaattgtgtatagctggttgaaatttagttgttctgttgttaatccattccaaatatgtagtacaattagaggcaatataaactttcagtagagcattactgagtttcccctcgcagaccactgacgacaatgaaggcctcttgctttcatgtatttttctttctttctttttgtaatcagtctgttatatgggatcagtaggtgtccctttccatgaagttataggctactttgctaagttatgaattgtttttttttttgtgtgtgtgtattcagtggatgttaaatgcggccaatgacaatggttatttcttagcattcttgtgggatttgcatacttgtagatgtagacagttgtaagactcataatcctgtcaaagatatatcatatgctcaacattcatccacaaaaaaaaaaaaaaaaaaaa

SEQ ID NO: 103269 - DNA, 674 bp, Zea mays
  Clone ID: MRT4577_25687C.1
cattgggtacctcgaggccggccgggaacttttgtccccctccctcctcacacctctcgttctctccccctccgcctgctccctctcaggagcgcgcgcgcgcgcgcccagatctagggtttcgtccgcggcaagatgagcagcccgcatggcggtctcgacgaccagatcgagcggctcatgcagtgcaagccgctcgctgagcctgaggttagagctctttgtgagaaggcaaaggagattctgatggaggaaagcaatgttcagcctgtaaagagtcctgttactatatgcggtgatattcgtggacaatttcatgatcttgctgaactcttccgaatcggtggaaagcttttggtggctttaaaagttcgatatcctcagaggatcaccattctcagaggaaaccatgaaagccggcagattactcaagtgtatgggttctatgacgaatgcttaaggaagtatggaaatgcaaatgtctggaaaacctttacagatctatttgattacttccccttgactgcattggtcgagtcagaaatattttgcttgcatggtggattatcgccatccattgagaccctcgacaacatccgcaactttgaccgcgtccaagaagttcctcacgaaggtcccattgtgtgatcttctgtgggctgatccagatgatc

SEQ ID NO: 103270 - DNA, 365 bp, Zea mays
  Clone ID: MRT4577_25688C.1
ctcggtctcatctaaagcagcctttgttgcctccttgtgcttgccccaaggtttctttgcaaaaatgttggccaaggccagggccataacggatgatgatgtgccaaaacaaagggccgatttaacctggcccatgctaatggccatgtacttcaagctgtccaaagcgcaaaagtatggaacattcttaaaagctgcggtgtctatgatcagtgccttccatttaccctggtaactggggctcttgattatgttctggaaccatggtccccttgtccctggcccgggattggtatgggcaggccactcaccatattccttattttgccgcacctctggcttattaaccttagggactgggaatt

SEQ ID NO: 103271 - DNA, 1492 bp, Zea mays
  Clone ID: MRT4577_25689C.1
aattcggcattcggctctcgacccgcgtgtccgtccgggtttccgcctgtgcgttgcctgctgcctctgatccactgatcagtggcctcgcctccccgtgttccgctcccccctcccgccccctgatcccgcgatcggcggggcgcccgccctctctctctccgtgagcgtagcagatccggcgacccgcaggccctccgccggccgccccgccggacgatctagatccaggggaagcatctgctatcattttgttttcttcgaagtaatccaagaaaagttgcttccagatgtcaactgcaaaagtgttagatcctgcttttcaaggggctggccaaaaagttgggacagaaatatggcggattgaagattttaagccagttccgctgccaaaatctgattatggtaaattctactgtggagattcatacatagttctgcagacgacctgtactaaaggtggtgcctatctatatgatatccacttctggattgggaaagattcgagtcaagatgaagctgggactgcagcaatcaagacagttgaacttgatgccatccttgggggtcgtgcaatccaacatagggaactccaaggttatgaatctgacaaattcttgtcatacttcaagccttgcattatacctttggagggtggtttcgcctctgggttcaaaaagcctgaagaggagaagtttgaaacacggttgtatatttgcagagggaagagagctattcgggttaaagaggttcccttcgcccggtcatcattaaaccatgatgatgtgtttgtcttagatgctgaaaataagatataccagtttaatggtgctaactccaatatccaagaaagggccaaagcgttggaagtaatccaacatttaaaggagaagtacctcgacatcctgaacctgttcctctccatcctgaacatgctcaggagcatgcaatccgacaactagcctcttgatcgaacacggtatacccccatggtaaatgcggtcctgtgctctggttgttagaggacgggatcgacgtgcgacatatgtattgtgtgagcccactcgtgtcaacactgcaaacaattgtggtcatgtcaccttgtatgttcttggtcactttgcaaacaattgtaagtacctcaaaaaaaaaaaaaaaaaaaaaaaaaaaaaaaaaaaaaaaaaaaaaaaaaaaaaaaaaaaaaaaaaaaaaaaaaaaaaaaaaaaaaaaaaaaaaaaaaaaaaaaaaaaaaaaaaaaaaaaaaaaaaaaaaaaaaaaaaggggggggcccttttaaagaaccaaattttactccccggtgtttgaaaagaaaaattttttttttggggcccccaaaataaaataactgggccggtttttaaaaacgggggaatgggaaaaacctggggttacccaaattaaatgcctttgaaaaaaacccctttttcccaagtggggtaaaaagcaaaaagccccccacaaaccccctttc

SEQ ID NO: 103272 - DNA, 408 bp, Zea mays
  Clone ID: MRT4577_2568C.1
ccggccgggatctccggaacgtactccacccgaagacgtcatctgctctgctaccacatctatctgcggagtggcgactcgctcatatatgacaacggataggacggcggcaagaacaacaagaacatggatgtgtgcaccaacgactagggaaccgacaaggaaagactctacggcatgaattgcctcccctagataggatgaccttgcatttgcatgctttcgtcttccgtatcgcttttccatattctattgggtgccatctaggcatcatgtgtcttgcggaatatatatatatatctctactacttatcacgtactacaaaccgaaagcataaagcggacctccagctccgcctattgatccctttaactcagattaattgcgcggttgtcactgtcctgttt

SEQ ID NO: 103273 - DNA, 1798 bp, Zea mays
  Clone ID: MRT4577_25690C.1
ttgggtacctcgaggcagtgcgggcctcaccgcggggccggccggcgtccgcccgtccgtccgcttgccccctcctcgcaataagcatcgtcccttgcctttccgaacttttgtccccctccctcctccacacctctcgttctctccccctccgcctgctccctctcaggagcgcgcgcgcgcgcgcccagatctagggtttcgtccgcggcaagatgagcagcccgcatggcggtctcgacgaccagatcgagcggctcatgcagtgcaagccgctcgctgagcctgaggttagagctctttgtgagaaggcaaaggagattctgatggaggaaagcaatgttcagcctgtaaagagtcctgttactatatgcggtgatattcatggacaatttcatgatcttgctgaactcttccgaatcggtggaaagtgtccagatacgaactacttgtttatgggagattatgttgaccgtggttactactctgtcgaaactgtcacacttttggtggctttaaaagttcgatatcctcagaggatcaccattctcagaggaaaccatgaaagccggcagattactcaagtgtatgggttctatgacgaatgcttaaggaagtatggaaatgcaaatgtctggaaaacctttacagatctatttgattacttccccttgactgcattggtcgagtcagaaatattttgcttgcatggtggattatcgccatccattgagaccctcgacaacatccgcaactttgaccgcgtccaagaagttcctcacgaaggtccaatgtgtgatcttctgtggtctgatccagatgatcggtgtggctggggtatttctcctcgtggtgctggttataccttcggacaggatatatcagagcagttcaaccataccaatagtctaaggctaattgctagagctcaccagttggttatggagggattcaattgggctcatgagcaaaaagtcgtgactatatttagtgcacctaattattgctaccgctgtgggaacatggcatcaatcttagaagtggatgattgcagagagcatactttcatccagtttgagccagccccaagaaggggagagccagatgtaactcgtaggacacctgactatttcctgtgacgcaaaagtgatgcggatcatgcagagcgaaggtttgatagataggcgcagtttcctggttgcagatatatatatatatatttatatatgtttttgctgggacccctccgtgtgctattcttattatttttgccctggctcgccggccgtcctgggccgctctgccgcgtcgtgattcaagtgtatacctacagcctgctacagctggaaggactggactgtgttctcaccttttctcaaactggttggtgcttttggctcggtggggggccgcagtggtgtggggggttgaagcatcaagcagcgatttgtgttatgggaggaaactgttcccgctgtattgttcattttattcccccttctctttctcaccgcctgattttcttcccctttgttccctccttgctgtgattcttgtagagttctgcacttgtatggttctatgttgttgggccattagttttttttccctttctgtttttgactacctcgatttgccatatagatttttttaccatttaagcgcagctagtcaatctgtagcattgtttgcgtcgtgtccctaaggtctgatgtgctcttggtgtaccactcgtatttgctaattggaaaggatcttttgtgggtttacaagcgtttggcactaacgcccccgctag

SEQ ID NO: 103274 - DNA, 272 bp, Zea mays
  Clone ID: MRT4577_25691C.1
gtctacacacatacccaagaacatcctttagattatccataccataactaacaccatggatatgttctacactaacatttacacttccattaccattcttatctctgttctcacctcttacaattctatcttcattgtcataattattttcgttccaccttttgctctacctttatctctttactaatccttttcactttcctcaacacttaacataatatttcctacaatcttcactcataacataaattaactaaaaaatttacataaaa

SEQ ID NO: 103275 - DNA, 295 bp, Zea mays
  Clone ID: MRT4577_25692C.1
tcttcctttcgccctcaaattcgttccgtccaggcggggttgatatcgagcagggaaggagaggtgaagatggctcgtacgaagcataccgcccgcaagtccaccggaggcaaggccccgcgcaagcagctcgccaccaaggcggtgaggaagtcggcgccgactaccggcggcgtgaagaatccccacaggtacaggccctgcaccgtggcgctgttcgagatccgcaagttccagaagagcacggtgctgctcattcggaagttgcccttttcagtgcctggttcgtgagatc

SEQ ID NO: 103276 - DNA, 649 bp, Zea mays
  Clone ID: MRT4577_25693C.1
ctacaacacatgcttaaccctctctgaggtgctgtgtgcagtcaggtctgctcttaactgtttctcctcccagccgtatgttataaaggaaggcagaatccaggggctgctgcgagctgattacgtagcggccaacagcatctcacgctactgtgcctacctgcttgtaaaagaaccagatttgctacctgacagctacttggctgctgatgacctattccgaagcaccatccacgaggctaattcggacgtactgagtggctgtgacaccctgcaaagcatatacagagctctgattagagaaggaggagatcagcggcagcaacaaggcggcagcgacagtaatactacgacacttgagaaagccggccagcttgctgggtcactgattcaccagttcacggatgaaaaggctcgttggaagtttctcgcagaggtgtgggccgacatactggtacacactgccccctcttggaacgccgcggctcacaagaagtgccttgcgactggtggcgagtttataacccacatctgggccattctttctcactgcaacgtccagagcagcaggcgctggccacgtcaggaatccccgcaagatgacgacgaggtagtagcagagaatcatgcactgtcacaacaggtagta

SEQ ID NO: 103277 - DNA, 311 bp, Zea mays
  Clone ID: MRT4577_25694C.1
catttttgaggttgggaaagaaactggggccgctagctgatgccaaaacaaaacaaaaaacgtctgctgcgatataatggacgggtgtacctgccgtatataagaatatatatgggcggagcacaacatgaatcaaaatttcttgaataacattgtagaccatagggtacacaacatctatgccgtggctgcaatgaaatgcgcaatgtcatgaaccccagcctgtgtgtcacattcaacaatccgatccacaagctgattccaggtaccatacacggacgctcaatgcattaagaatgccgcactaggaa

SEQ ID NO: 103278 - DNA, 426 bp, Zea mays
  Clone ID: MRT4577_25695C.1
cttctcctcgaaccccccgaacgcacacgacgattacggagaagggatacaataccgcgacgaaagaacggaactggaaaccatggagaagcaagaacacctcccgagaggagaacgactacgacatcaactcgcaactactcaaggagcgagtcgaactgcatacatggacccatcaccgacgacacgggactccctcgacgccgcccagatgctcttcctcgagaacgagaaccccgccaagcccggtcacctctacattaactccccggggggcgacgacacggagggcctcgacatctacgacacaatgcaggaacatacgctccaccgccaccaccctctgcatcggacacgacgccgccatggcgtccgatactccacgccgcggcgcgccagcggggagagaccggcggctgccgaacg

SEQ ID NO: 103279 - DNA, 1853 bp, Zea mays
  Clone ID: MRT4577_25696C.1
attcggctcccatttgatccgagcccacagtctctcctcgggcccaccgcgtccgaccggcgatggcaaagaccccgtcgttcgcggtggcggcggtcgccggaggccgcgggccggttcacaaccggacccagctcctcctcctcctcctcgtggccgtcgcagcctccgcatccacagcagggttcctcctccgcggtgccctgcgagacccttgcgacggccgtggggaccccgccgccctcaacaccgccgtcgccagcgggagtcccctcgggttcatgaggtccaagctcgtgctcctcgtctcccatgagctctccctctctggtggtccacttttactgatggaattagcatttcttctgaggcatgttggctcgcaagtggtgtggataacaaaccagagatcacaagaaacaaatgatgtcacatatagcttggagcataggatgttgaaccatggagtgcaggttttaccagctagaggacaggaggcagttgatattgctctaaaagctgatctggttatcttaaacactgctgttgctggcaagtggcttgaccctgttctgaaagatcatgttcctaaagtccttccgaagattttgtggtggatccatgaaatgcgtgggcattactttaaggttgaatatgtcaaacatcttccctttgttgctggagccatgattgattctcatacaacggctgagtattggaatagcaggactagcgatcgcctgaaaatacagatgccacaaacttatgttgttcacctggggaatagtaaagaactaatggaagttgctgaagacaatgtcgcaagaagagtcctacgggaacatattcgtgaatcccttggagtacggagtgaggatctcctgtttgcaataataaacagtgtatcacgaggaaagggacaagacttatttcttcaagcattttatcaggctttgcagctcatccaacacgagaaacttaaagtgcctagaatacatgctgtagttgtgggaagtgatgttaatgctcagaccaaatttgagactcagttacgtgactttgtggtgaagaacacgattcatgaccgtgtccattttgtgaacaagacattggcagtggcccccttacttggcagcaattgatgtgcttgttcagaattctcagggccgtggagaatgctttgaaaggataacaattgaagcaatggcattcaagttgccagtattgggcacggctgctggagggaccacggagatcgtcctggacggctcgactggccttctgcatcctgctgggaaggagggcgtggcgcctcttgcaaagaacatcgtcagactcgcaagccacgccgagcagagggtctccatgggggaaaagggctatggcagggtgaaggaaatgttcatggagcaccacatggctgagaggatcgcggcggtgttgaaggatgtcctgaggaaatcacaggagcactccaggtcttgagctttgccgtgcccaccagcttgcgctaacatgttgaattagattttacgagctacgcctatgtgtttcaggctgtaaactgtagattccactctcttggtctaccttttcacattcatttgtctttgttttacctattaggctatgtctggttctactccaatccatatagactgagagggattgaggatgtttcaatccttagtaaatcaaaatatctccctatccatatcaatctcttccaatctatatggattgaaaataaccgaatgaagctcttagggataggactaagataggaccgagggggtgtttggtttaagaaattaaatcatctaaaacgatgtggtgtatcataggtttatttc

SEQ ID NO: 103280 - DNA, 637 bp, Zea mays
  unsure (1)..(637): unsure at all n locations
  Clone ID: MRT4577_25697C.1
gcgtccgactagtntctaggatcgcggagcgnngccgtccttnnttttttttttttttatttttttatttttgttttattttttttatttatttttatttttcttatttatttttttattttacatataactgtaggccatagatagaagcaaggaagggacaggcgcgccgctatactggagggggaggtaagaaaaagaaggggcggtgggagggagggaggaagcaagaagaggaggggaggcctaccataacaagggaggagagcaaaagagggagcgggcgggagaaggggcgggcaccaacaaacaagcaggcaggctgccaaggaaggggcatgcatcatggaagaactggcgtcaacagacagacatctgagaagaaagcgtcgcgcgagggacggccagataatggtccggcgcggaacaaagaagcaagcccactcatcaacgcgcgagaagcaggcacaccgtgcggcgcctcctcccacgagaagaggtcaaaaaacacgccgtcgaggaaagaaccgacgccgccagcttgcccagcaagaagggagcatgctgcatccaccaaggagataggaggcccccccttacaacaagggttcgtcgaggggtccaccacccccccccc

SEQ ID NO: 103281 - DNA, 458 bp, Zea mays
  Clone ID: MRT4577_25698C.1
tgcctatatgcagacactggcgggcgctccaacatgcgtggagagggcccaactgaacctataaagagaagtatgacttgtcactgtatgcagaactacactcttttgcttggggaaacacctagtgtgacccgcttaaaccaacgcaaggagagcttactttagcctttatttcttttgtgatatgaggttccttattgatccatctctatgtaatccccacttcccttctttttgattggacctctcattgaaatatgacataaacctaattcttatacaaagaaaactctatcgctacactttgactcactatctctataatctctagaaaatagaactgctctactctctatttaatgatagtcagagactattaactaaaagagaaaatacttactactaacttggattagaacctaattagcataagatgatcccgagtacctgcccgggcg

SEQ ID NO: 103282 - DNA, 797 bp, Zea mays
  Clone ID: MRT4577_25699C.1
ttttttttttttttttttagaatagaaacaacattatcccctgtatttatcagtattaataatacagcatgtcgtgaaaggtagagaagatagagagaaaagaatatcagcagaaactgtaaaaagcagtccgatttcagtagctcagttgacgcccccccgtttctgtgttggttctgttcttagcatgggcggcaatactgcgatatcagcagtgccgtgccgcaatgaaatgctgaatcttatgaacaaagatgtcgcgcagaattcagaaattacccttgcctttcgtaataggtacaagcatcaatcaagtgtccgaaagcatcccattcgtctgaagcaggggagggatgctctgctcgctccagaacacctggtcgggatccacctcggccttcaccatggccagcctcctgaagttgcccctgaagtacatctccccccacgccctggccgcctcgtagctcgtctccccctccaagttctgccccaggtccaggtccctgaagttgacgtacgccgcccggggcctggcgctcgcgtacggcgtcatgaaccggtgcacgccacgcacccacgccaggtgcgcgtcctcgtacgacacgttggcgtcgccgccccacttgacgaagtactgcacgttgtacaggtacccttgccggtgcgcgtacggcgtgtccgactccggcgtctcgctcatcgcaccgccctgcgggtacacgtcgtctgacccgacgatgtgcttcacgaccctggcgaggagcccgcccagcctggacgcggtgatcggcgac

SEQ ID NO: 103283 - DNA, 4163 bp, Zea mays
  unsure (1)..(4163): unsure at all n locations
  Clone ID: MRT4577_2569C.1
gggtacctcgaggccggccgggcctnttcncaattcggcacgcccgatcccctcgcgatttccacctcctcctccacccccacctccgtaacccacttccgggtgggccccccacatcgccgccggtgacacgcacctccctccctgcctcccccgctaccgaccgccacgtccacgcccccggtcatgacgacctcgccgccgcccgccgagcaggaacagcaggaggaagaggaggtgctggtgccgcatggcccgcaccaggagctgcccaatggagcgcagccaatggaagttgtgcctgctgagccagctgctaccgtggagaaccaacagatagaggatccaccaatctcgagatttacttggaccattgagaatttatcaagagttagcacaaagaagctctactctgaaatttttgttgttggaggctacaagtggcgaattttgattttccctcgggggaataatgttgaattcttatctatgtatttggatgtagctgattctggagtcttgccctatggatggactagatacgcacaattcagcctctctgtggttaatcagattcacaacaagttcacaataagaaaagaaacacaacatcagttctctgctcgagaaagtgattggggtttcacttcatttatgccgctgggtgaactctacaacccaagtaggggttatcttgtaaatgatacttgtatagtggaagctgaagttgctgtgtgtaaagttgttgagtattggagttatgactctaaaaaggaaactggctatgttggtcttaaaaatcagggtgctacctgctatatgaattctcttcttcagacgctctaccacatcccgtatttcagaaaggctgtttatcacatgcccaccactgagaatgatatgccctcaggaagcatccctttagctctacagtcactcttttataagttgcagtataatgacagcagtgtctctacaaaggagctcacaaaatcattcgggtgggacatgcatgattcatttatgcaacatgatgttcaagaattgaacagagttctttctgagaagttggaagataagatgaagggaactgttgtagagggcacaatacaacaattgtttgaagggcaccacatgaactacattgagtgtatcaatgtagatttcaaatcaacaagaaaggaatccttctatgatctccagcttgatgtcaaaggttgtcaggatgtctacgcttcatttgacaagtacgtagaagtggagcaattggaaggtgacaacaagtatcatgccgataaacatggtctgcaggatgcaaaaaaaggagttctttttatcgacttccctcctgttttgcaacttcagctaaaacgttttgaatatgattttatgcgtgacacgatggtgaagataaacgatcgttatgaatttccactccaattggatcttgatagagataatggaaaatatttatctcctgatgctgacaggaatgtgcgtaatctttatacccttcacagtgttcttgtccatagtggtggtgttcatggtggacattactatgctttcatacgacctacactttctgatcaatggttcaagtttgatgatgagcgtgtgacaaaagaagatgcaaagagggcactggaagaacaatatggtggtgaggaggagctacctcagacaaatcctggcttgaacaacactcccttcaagtttactaaatattcaaatgcataccccacggtgtacattcgtgaaagtgacaaggacaaaattatatgtaatgtggatgagaaagatatagcggagcatcttcggattagattggaaaatgaccgtgaagagaaggaacgtcggaagaaggaaaaagcggaggcacacctctataccataatcaaggttgcaagggatgatgacttaaaaactcagatagggaaagacatatattttgatcttgttgaccatgataaagtcccaagcttccgtatccaaaagcagatggcctttgctcaattcaaggaggaggtagcaaaagagtttggtattcctacacagttccaacgattttggctgtgggccaagcgacaaaaccatacttaccgacctaacaggccattgtgtcctcaagacgaagcgcatactgttggacagctaaaggaattggtgaacaaggcccacaacgctgaattgaaattgttcttggaagttgaacttggactggaccttaaacctcttcctcttccagacaagactagagaagatatatttcttctcttcaaactctatgaacctgaaaaggaacagctacggtatgttggtaggctctttgtaaaggcttcaggaagaccacaggacattctgccgaagctaaagatgttggcaggtttttcacaagatgatgatattgaactttatgaggaaattaagttcgaacccaatgtgatgtgtgaatacattgataacaggcttctgttccgatcttgccagcttgaagatggggacataatttgttttcaaaaatcttcaaaggcagatagtgctgaccgatatcgatttcctgacgtcccatcctttttgacgtatatacgtaaccgacaggtggtccactttcgttcactggagaagcccaaggaggacgattttttcctcgagatgtcaaagattttcacatatgatcaagtcgtggaaaaagtagctgaaaaacttggcgtggatgacccatcgaaaattcggcttacatcacataattgttattcgcagcagcctaagcctcagccaataaagtacagaggcgttgaacgtctactggacatgctgattcattataaccagacttctgatattctgtactatgaagtattggacataccacttccagaattacaagcgctgaagacattaaaagttacataccatcatgccacaaaagatgaggtgtcagttcacagtataagattgccaaaaaacagcactgttggcgatgtgctaaacgatatcaaaacaaaggttgagttatctcatcccaatgctgaactgagattacttgaggtcttttatcacaagatatacaaggtgtttgcaccaaatgaaaagattgaaaacattaatgatcagtactggacactgcgtgcggaggaggttccagatgaggagaaaaaccttggtccctttgatcgattgattcatgtatatcattttacaaaagatactcaaaaccaaacgcaagttcagaactttggagaacctttttttatggttattcgtgaggatgagaccctatcttctatcaaagagcgtatacagagaaagcttaagattccagatgaggatttctcaaagtggaagtttgcatacatttcacttggtcgtccagactattttgaagattcagatactgtagctttaaaatttcagagaaacatgtatggagcttgggagcagtatcttggactggaacatccagacacagctcctaggaaggcacacacaattaatcagaatcggcattcatttgagagacctgtaaaaatttataactaggcatgatagaaatttgagcaatgagctgccaagcaagggctaaaattgctgtcctgaaataaagcgtgccggggcatgttgctcaggtttttcgtggagctggtgagctagttcatgagactccaagtatgatcggggggcggcttctcatctttccctgcttttccccggatacatataaagttgtgcagagatgaccccaccgaacaattgtctttagtagataagccagtacttcccgttagatgactttatacagtcgaatagccggcattttagtcgatctttccgttctccagttgctgttggtgctaggaggccttgagctgttgagggtacttgccctgctgtatattatgacgtagagtgtacaagtctttgttgttgacaattacacggtgttttgtaatttcagtgatacacttccaggtccttcagtacgtacttgcctggatggtgtcaatttggcattctatgttagatattgatccatctgttctaaattaaaattataagacagtttgacctttttaagatatactgcctccgattttctattagttgtcgtttagaatagtgacacggtctccatattataacgtgtctccatactataactt

SEQ ID NO: 103284 - DNA, 2138 bp, Zea mays
  Clone ID: MRT4577_256C.1
tggccgggatggaagctgaagatgtagcgtggatttgtcatctcgcgctgccacgtttgactttggacttgctgccacgtttggtagttgctacttgctacaccggaggaagaagaacaagtagtgcttttcttctcttgtcacgttcacggggcggccgatcgaccgttcacctcgcccgacggcccaagcagcccatgtcttcgtcgggcccctccccggcgacgggaatccacgcgtcgccgccgttgggccttttgccggcgacgggaacccatcacaccaggtcatggggcaaaacaacctccacaagttttactggttctaccaccaaacatgagcagagcttgcatggaaatgttaagccgttgcaattggcggcaaatgaatcctctcgtttggcttacagaagtccagcacttaaaaaccagtggaatcttcctgctagttcttcctccactaatgtggttaccacctttgatgataacgaacacgtgtcttccagtgttattgaagaaaaagttggagtactgttattaaaccttggtggtccagagacacttgacgatgttcaaccatttttattcaacctatttgctgatccagatatcattcgactccctaggctcttcaggtttcttcaaagaccactggccaaacttatttctacttttagagctcctaagagtaaagaagggtatgcttcaattggtggtgggtcgccgttaaggaaaattactgatgaacaggcgaatgctttgaagattgccctggaaaagaaaaaattgaacgcaaacatatatgttgggatgcggtattggtaccctttcacagaagaggccattgatcaaattaaaaaggataagattaccaagctcgttgttcttcccctttaccctcagtactccatatcaacaagtgggtcaagcattcgtgttctccaagacattgtcaaggaagattcatatttttctggcttgccaatttccattattgaatcatggtaccaacgtgatggctatgtgaaatcaatgtctgacctaattgaaaaggagctctccgccttctccaatcctgaagaggttatgatattcttcagtgcacatggtgtgccacttacctatgttgaggatgctggagatccttacagagatcagatggaggattgtattgctttgatcatgggggagttaagatcaagaggaatcttaaatagtcacactttggcgtaccagagtcgggtggggccagttcaatggctgaagccatatactgatgaagttttagtagaacttggtcaaaagggtgtgaagagcctcctggctgttccagtaagctttgtgagtgagcacatcgagacattggaagaaattgacatggagtacaaggagttggctttggaatcaggcatcaagaactggggtcgggttcctgcccttgggatcacttcaacattcctctccccccttgctgatggcgtcctcgcagcccgcccctctgcttcgactcccgcatccagaaagcctgatgactcaccatgctgctttgtccctcaaccttgccatttgccctgctgctttggcccaagcttggttcttccttccggagcaccatgctttaaatttttctccaacccactaactttgcgattgagtttgagatatttcattttgatccattttttcctttttaatagtatgatctgcagttcttcttctcgttccagagaaaaaaataactgctaggaactgatacggaaggaaaaaagaactaaagggattagtaatgctgtagtgattgacaatgtgaatttaaacagtgctgaggacctctgttttataaaaacaaaaaattcaggaattctgtattttaaaaaataaaaattaaaattgatactcggatattggtttttgggcaaattatcctaagtaatacaacaattcagattatttccgagagttccagagaaaaaaagaactgctaggctccccccacaaggtagtaggggattgcaaaagggatgtgaacagctgttttgatcgaagttgtctataaataccgtgctcacggactctgtattttaatggtttcttgtgctcgactaattttgttgttcttgtccaaaaaaaaaaaaaaaa

SEQ ID NO: 103285 - DNA, 747 bp, Zea mays
  Clone ID: MRT4577_25700C.1
aattcggcagcagcgtcacaagcaaaccgaagctagtcagtcacacacagctctccagcttccatccacaaagaagaaggaaacaagctaaccatgatgatgagcgccaagaagattgctcatctcgccaagaaatggcagaggatggccgcgcaagggaggaagcgcctcaccttgggggcggcggcggcaaaggaagtcgacgagtgctgcggctctgtggcgagcaagggccattgtgcggtgtacacggccgacggggcacggttcgaggtgccgctggcctgccttagcacccctgtcttcagggagctcctgcagatgtcacaggaggagttcggcttcgctggcggcgatggcactggcaggatcacgctggcctgcgacgcggcggtcatggagtacgccatgtgtttgctcaggagaggagcctctgccgagctagagcaggcgttccttagcaccatggccatgtcatgccactgtgccagctacatggcgccgtatgttggacgagccaggcagcatcagatcgttgtttagttagttgctgttccgtgtatgtagacgtgtagtgtagagcgatgattttaactaggtgggtgctattcaaagccttctgatccagcaaccgatcaagtgaggtgttgtaagtacaagagaataaagagacgtgattcttgctttgaaaaaaaaaaacttaactgaggaaaagctggaaaaaagtatatggacagtaagaatatt

SEQ ID NO: 103286 - DNA, 760 bp, Zea mays
  Clone ID: MRT4577_25701C.1
cactccatagggcgattgggatcctcgaggccggccgggccccgcctcccctccgctcgcgcccgccctcgttcccctcacccagcctttcgcacaaacaacccatccgctccatctgcgagcaagctctagcgatctagcagcatgcaggccctatgacgctcgccatcctcatccgggagcgtggccatgcctccgcccgcctcttcccccacccccggtgccccttccacacacccccgcaccgctgtcctgcccctctcccctcgcacacccactcccttctaccatctccatgcttggcgccctcaccacctccccgaccgcctctgagctcatcgccttcccccatagcccgaacgagatatttgcgtccgacccgcccatcgacgtggacgccatcatggagaacgagctacggaagaaggacggcggtgcggatgtggaacatctcagatctgtcactctatctccggcgacctgggtcgggcgaggcacttcttttatgtgatgcctgagtggaacttggtatcctggaacaaaatgttggccgcgtatgcctgtggcaggatgctcaccgaggcgcgggacctgttcgacgcaatgcttgcccaggaacagcgccacccttccgataattattagatcggctaccttccccatttctcagtacaaactacctcaatggtgttggtgaatgatcagacaaaatccttctatcaagtccccccaatgacaacaaaaggaaaaaagaaccctg

SEQ ID NO: 103287 - DNA, 249 bp, Zea mays
  Clone ID: MRT4577_25702C.1
ggccagtaatccaaaatcatcaaccccacaattttacaagtctttccaggaacctggcccaacaggatattgaacacggttaccaaacaccataccgtcttaccaattgagtttagattgcgcttacccacctacagccatgcatagcgagctgcacctcaatgatttaccaacagaaactgattaacaaacacaacccaccgagcttcatgggcaaccatggaatttgaacagacgcattatcataca

SEQ ID NO: 103288 - DNA, 798 bp, Zea mays
  Clone ID: MRT4577_25703C.1
aaagctactcgagtcattattgcttcacttcaacacgcgtgcgaggaagcagagaagaggggatgatggagaagcgacacggcggcgacggcggagccggagctggaggcttcactgtgctccacctcctcggcgccggtgtcttggcgttcctgctgccgcgggccgccggagcgaccgacgatgccaagtggcacgcccatgcccattccgccgctggcagcaacggcgccgtcaccgtcggccacggtgcccccgcgccccacgtgcacgcggccggtctcccgccgctctcggcaccggcgcccacagcgggagctgacgacctgccgccaccgcccgcgcccgtgccgacgtccgtgtcctcaccgccgagccgcgagcccggcccgcacttcggcttcccgctgcagccgggcccgggcaccgcgtccgctgcggcacctgggctgggacccggcggcgaggggtatccgttcatcggaagcaacccaacggtgccgttgcccaccggcacgaccaacaccgccaccgtgctgccgctgacggacaccggggacgccgccgccgccaccaccaaggtggtggggttggcagcgtcccttggtgctcgcgtctccatgattgggcttgggatttccctcgccaccctgtccctgtccaagatctaattaatccaaaatgtgtactactgagatactgatgctgctgccgccgctttcatctaaaatgtgtactagccttgagtttttgtcatggacagatctagagatttactggcagtttctttccaatcat

SEQ ID NO: 103289 - DNA, 271 bp, Zea mays
  Clone ID: MRT4577_25704C.1
acgcgtccggaaatattcatctcattcttgaattattgcatccatttttgggtttcaagtttgaaaatgaaataggggggaattgagggaaaacaaagggaaataacatacactaacaaaaaatatatataacttgcgtctcatattggggttttgacatgtactagtctaacatgtgcttttaaactgattcaaaattcactatttacaaaatacaagagctggaattcgaattaaacacagtaaggtctactataggcaccaaaggggg

SEQ ID NO: 103290 - DNA, 415 bp, Zea mays
  unsure (1)..(415): unsure at all n locations
  Clone ID: MRT4577_25705C.1
aagaaccgcaggaggcgcggccacgagaccgccgggcacggccgcancggcaagcacaggaagcacccggcaggcncgcggcacgccggaggcacgcaccaccaccggancccagccgacaagcaccannccgggggtcgtacggggaggttgtcatgcgttacttccataagctccgcaacaagatctactgttccgtgttcatatcgagcgcctttggtcgatggtgctcaccgacaaggcgtcggaggccggcggctacacggccccgcacatcgacgtcccgctggtctgcttcttcaaggtgcttggcaaggctgttgctgcctgcaaaccccattgttgctaaggcccagcttatctgcaacggcgccgcgaataagatcaaggcatcaggcggcgcccgtgtgctcac

SEQ ID NO: 103291 - DNA, 181 bp, Zea mays
  Clone ID: MRT4577_25706C.1
atcaccggggacctttcctttttggggttttgaaatggaaaccctcccaagggacctggtaaaacccgggaccttttaccggggggggtttaaaaacaaaaccccctccccaaaaacaatgaaaagggccccgtcggggccccaaattcccacaacgcccaaatttgactgaccaaaagag

SEQ ID NO: 103292 - DNA, 511 bp, Zea mays
  Clone ID: MRT4577_25707C.1
gattggaatacacattacgatcattttgaagttccacttacaattagaactgggacaggctaaacaagattcaataaagcacggcccgccgcaacaatacactgcaattaggagcccatacacagatcggcagataaccccatatactcttctcctgagctgaggggctacggatcatcctgggaccttctacagtatcaacatctggttgctttcaaagaagggcttatgccaccacgcttgcaagcctaaccctgatagcccaacacacgctgaataagtaactagacaagccattcttgaatattcattgcaggttccatgctgcttacactattccctttgactaagatcaaacacttgtacttgtttaaaaaaggtagattcatgaatcttgaagaacacctactctctgccatatctctttgcctgcttgaggacactaagatcatacttgtggaaaaaaccgatcctccagtgcaaatcgaacccgctggtcaacaatggcctg

SEQ ID NO: 103293 - DNA, 666 bp, Zea mays
  unsure (1)..(666): unsure at all n locations
  Clone ID: MRT4577_25708C.1
aattcggcacgaggctaaagtggattttgacactaatctgtgtaaatcagtagaagcacatccctatgtgttctttttttgtggacgtgcatataaaatctgatcgcaaaattatgcaacctgaaattttggatctttcctattgggttcttcatccgtttgttcttcctgcattcctgatcctgccatttcatttactattatgtttcatgtaagaactatgcattttagagctcagttctccgaattaataatgtatctacattaagtaaagagctttattgatatttgatttggttttggcttgtaggtgaacatcaagattattgatgaagcaatattaattggagctgccctcagtaacttcatctgcttttgttctccatgtttgcattctatttacaaattacatcagcaatcattctttaaagtattgagttttgccatgctttcacgtttgtagcatgtctattttgggccaaatagagtaaactgacttattttatgtcaaatggttgatcctccgaggaaagctacgttcagtgtgtgcatatgtattaattgtacctcactttntagctgccagtcatacttangcataatttacatatacatacgcacgcctaagcctggcaagtttctgaaatggcaagctgagtaactgag

SEQ ID NO: 103294 - DNA, 344 bp, Zea mays
  Clone ID: MRT4577_25709C.1
aagagaagcatcgcatctctgagtctggagccgtatccgcctgttttgggggccggtctccactcgtccgggcgacgagacgacgacggagggtttctgcgggggatttgtttgtcgctgactcgccggcgaccaagatgaggccggttttcgtggggaacctagactatgatacccgccactcggagctcgaccacctcttctaccgctatggcagggtcgagcgcatcgacatgaagtcaggaactaccagggcaaaacatagctccccagggctcctcaactcctgaaatttcttccattcactgacctggccacctttttttcatttgaaaccatctgtt

SEQ ID NO: 103295 - DNA, 255 bp, Zea mays
  unsure (1)..(255): unsure at all n locations
  Clone ID: MRT4577_2570C.1
agcagtggtaacaacacgaaatcggggtttttttttttttttttttttttttttggccacgcctgagtcttaatgtaaccctattgcaattgacatgcaatttaaaattagcttgccctcagttcatcactttagttaccactcaccccccattttccaagtacagaggggggggggggtctcatatcccctaatcnaattcnaanccttacaacnatcnacccacccaatnncacaacaancatctcnacactc

SEQ ID NO: 103296 - DNA, 634 bp, Zea mays
  Clone ID: MRT4577_25710C.1
gtgctagctccgcgaacattattgcgtactacccacctccatcgcaccattctactagcatcactatgctcgcccaactcctgcacggaataggaacgaataccgagcgtgctcgttgcctacgcctgttcgcatctctcacggctcggcagaccagctgcgcggagaatgcatcagagcgtacttacctacgtggtggtcgcgcatccttctagcctcgtgcgcatggttggcgggattagcgtgcgtgctggaactggtattggtggctcgaggcagtggcatagtataggtacatctatctctgactgatacggatcgacactatcctttagggagttggtgggatgcaatcagttctatcagagattacttatggatgattgcatggctgcagctagctaggccctgctttgctgggtggaaagatacatcatggcaccactcaggacggctccatctagaaggcctatatggttcattgacttgggggcctgtgcctgtctagaagccatgggagcctatctatatactccacagcaatacacagcctgttatgtggtaccattagaagccagcaattatcggcctcctgcaaaccctgctagggtatacactgaagatgagatagctg

SEQ ID NO: 103297 - DNA, 293 bp, Zea mays
  unsure (1)..(293): unsure at all n locations
  Clone ID: MRT4577_25711C.1
gcatgcacgcgtcgtaagtcttgtacctctagacggncgggctggggggtgtttttgattgaacttaaatgtttattggtcacacagtctgacgcacacacacatacactgaatgactgagttcaagttgaagttaaaaatgagaaacggtgaatctggggaaagagcacattctttgactgagaggttttttatgggggggggttgggattgctcttgcgtgggttgggctcgtgggagaggtgcttggtgaagtgaggtggcggctgtgggtgtgtgcggtgactctgggg

SEQ ID NO: 103298 - DNA, 152 bp, Zea mays
  Clone ID: MRT4577_25712C.1
ttcataactttctgtctatcattaatcctaaacctccttatatatagccctgcttcaatttcaagcccccctctcctacaactactttttactcatcaacattctacctttcaccatattatcattaccccattttctatattaacatcccc

SEQ ID NO: 103299 - DNA, 223 bp, Zea mays
  unsure (1)..(223): unsure at all n locations
  Clone ID: MRT4577_25713C.1
aacatttttgttgctgaagtggattctctaaggatgaagatggcattttgcgaaggtgtctttccgaagggactgtactaagagggcaactcaactcactggaagaaccacttctacgtttgaatttgagttnagtttgtaaatttggtttttctctacctggagataatgtaatgcatataagatcatgttattgttactcccatataaaattattgtatac

SEQ ID NO: 103300 - DNA, 368 bp, Zea mays
  Clone ID: MRT4577_25714C.1
cttttcctagctagccctaacacgctccatcactgaagcagcagcagcggtgcctgcacacacaccggatcaccatcaataccagtgaaaaatgaggaggtacagatcccactacagccctaccaggagacaacatgggggtaggggaaggaacccacctcccactaaaggatttggcagcagaccaaccaaccatctttgtcccacatctcacaaacctcacaattacgaaaatatacacacctgctgaactacgatgtacctagagaactgacacaagccctcccaatcaatgggtacacacaccaagcatattatcacacattcatagaccaagatgatagcaggccacgccgaccttgaccgct

SEQ ID NO: 103301 - DNA, 454 bp, Zea mays
  unsure (1)..(454): unsure at all n locations
  Clone ID: MRT4577_25715C.1
acgcagccgagccgggaccggcagccgcggcgacgagggacaggcgggcaggcccgggcncggcgccggcaagcaggcccgcccccggggccacggngcagaaccaccgccccgccgcccgcggcgaccgccgcaccacccgagggaacgggcagcgaaaaaaaaactcccttccctggacancaccatctccgactaccgcgcccagcgcggccgccgcancgactgcttcctcgccgctgaggcctacctcgccgacgcctgctcccgccgcgcgcgcaagctccgggccgcccgcggctggccagcaagaacctccagggcgccggcggcgactacgacgagggcgccgacgacggccccggcgccaccttctggggggacgcgtccgcgctgcgggccaggccgcagggcatcaggcccgacccgggcgaggacgagcgccgcctgtacc

SEQ ID NO: 103302 - DNA, 253 bp, Zea mays
  Clone ID: MRT4577_25716C.1
cttggatcattgtaccagtacaatggatgcacactgttctaataatggccttctactcttttggattggaacatcaaaccttgcagtatcatctactttccatgatgccttagttggtgtggactgcatactgaactgtgacagcacgtcgaagctacctgctagttcatcagaaaattcttaccttgagctatctattgtgggctcaaaggatgaccgattttcattgatgagaaaccttccaaaagcagtt

SEQ ID NO: 103303 - DNA, 299 bp, Zea mays
  Clone ID: MRT4577_25717C.1
gggggggaaatttctggattattccaggggaatgggggaacatatacaaaagcacaccttgggggctcaatttacatggcaagcaggccccaaaggggttggcataataaggttacaagggaaatacaaaggtggacacacaaggtctaagcagcaattcttttttaacattccagggaagggtacattcacaaatcggggtgcacaaaacatggaactggattttgaaggagatacaaccttactttaaaatgggcctccttcgcacgggaatgagccaacctttatgcctttttttt

SEQ ID NO: 103304 - DNA, 311 bp, Zea mays
  Clone ID: MRT4577_25718C.1
aaaggttaaatcccaggtataaccaatgacctgaatgcctacaaacaagtacatatgctataacacaaggacaaaccattgatgctgcagacccatgagtccagaacaaccgaaaggcgagagtgaatccaactcatacccaaccgtgccgtatattttattacaaaaagggaagcagcaccattaataggcgttgagcaccgatcaacttgaaaccaaaaccagaggtgcggtgggcatcaaagattatcgcagaacaagcctacacgaaagttctgatgcccaaactcctgacttgaggcatctcctca

SEQ ID NO: 103305 - DNA, 3005 bp, Zea mays
  Clone ID: MRT4577_2571C.1
ttgcagtataatgacagcagtgtctctacaaaggagctcacaaaatcgtttgggtgggatatgcatgattcatttatgcaacatgatgtacaagaattgaacagagttctttccgagaagttggaagataagatgaaggtttgacatctggaactgttgtggagggaacgatacaacaattgtttgaagggcaccacatgaactacattgagtgtatcaatgtggatttcaaatcaacaagaaaggaatccttctatgatctccagcttgatgtcaaaggttgtcaggatgtctatgcttcatttgataagtacgtagaagtggagcgtctggaaggtgacaacaagtatcatgccgacaaacatggcctgcaggatgcaaaaaaaggagttctttttatcgacttccctcctgttttgcaacttcagctaaaacgttttgagtatgatttcatgcgtgacacgatggtgaagataaacgatcgttatgaatttccactccaattggatcttgatagagataatggaaaatatttatctcctgatgctgacaggaatgtgcgtaatctttatacccttcacagtgttcttgtccatagtggtggtgttcatggtggacattactatgctttcatacgacctacactttctgatcaatggttcaagtttgatgatgagcgtgtgacaaaagaagatgcaaagagggcactagaagagcaatatggtggtgaggaggagctacctcagacaaatcctggcttaaacaacaccccattcaagtttactaaatattcaaatgcatacatgcttgtgtacattcgtgaaagtgacaaggacaaaattatatgtaatgtggatgagaaagatatagcggagcatcttcggattagattagaaaatgaccgtgaagagaaggaacgtcggaagaaggaaaaagcggaggcacacctctatactataatcaaggttgcaagggatgatgacttaaaagctcagatagggaaagacatatattttgatcttgttgatcatgataaagtcccaagcttccgtatccagaaacagatgacctttgctcaattcaaggaggaggtagcaaaagagtttggtattcctacacagtttcaacgattttggctgtgggccaagcgacaaaaccatacctaccgacctaacaggccattgtgtcctcaagacgaagcacatactgttgggcagctaaaggaactggtgaacaaggcccacaacgcagaactgaaactgttcttggaagttgaacttggactggaccttaaacctcttcctcttcccgacaagactagagaagatatatttcttttcttcaaactctatgaacctgaaaaggaacagctgcggtatgttggtaggctttttgtaaaggcttcaggaagaccacaggacattctgctgaagttaaggatgttggcaggtttttcacaggatgatgatattgaactttatgaggaaattaagttcgagcccaatgtgatgtgtgaatacattgacaacaggcttctgtttcgatcttgccagcttgaagacggggatataatttgttttcaaaagccttcaaaaccagatagtgcagaccgatatcgatttcctgacgtcccatcctttttgacgtatatacgtaaccggcaggtggtgcacttccgttcattggagaagcccaaggacgacgaattttgccttgagatgtcaaagattttcacatatgatcaagtcgtggaaaaagtagctgaaaaacttggcgtggatgacccatcgaaaattcgtcttacatcacataattgttattcgcaacagcctaagcctcaaccaataaagtacagaggcgttgaacgtctactggatatgctgattcattataaccagacttctgatattctgtactatgaagtattggacataccacttccagaattacaagcgctgaagacattaaaagttacctaccatcatgccacaaaagatgaggtgtcagttcacagtataagattaccaaaaaacagcactgttggcgatgtgctgaatgatatcaaaacgaaggttgagttgtctcataccaatgctgagctaagattacttgaggtcttttatcacaagatatacaaggtatttgcaccaaatgaaaagattgaaaacatcaatgatcagtactggacactgcgtgcagaggaggttccagaggaggagaaaaatcttggccccttcgatcgtttgattcatgtatatcattttacaaaagacactcaaaaccaaacgcaagttcagaactttggagaacctttttttatggttattcgtgaggatgagaccctatcttctatcaaagaacgtatacagaaaaagcttaaggttccagatgaggatttctcaaagtggaagtttgcatacatttcactcggtcgtcctgactattttgaagattcagatactgtagccctaaaattccagagaaacatgtatggagcttgggagcagtatcttggactggaacatccggacacggctcctaggaaggcacacacggctaatcagaaccggcattcatttgagagacctgtaaaaatttataactaggcatgttagaaattgagcgatgagctgccgctcaataccaagccagggctgaagttgctggcttgaaatagagagcatgttgctcaggtttttcgatggagctgtggaactagttcagaggagactgatcgggcgacttgtcatctttcctgtttgttttgctgccccggatatataaagttgtacagagatgaccccaccagacaattgtctttagtagataagataactttttacagtcgagtggccgacgttttagtcgatcactctgttctgcagttggtggtggtgctaggtggccttgagctgttgagggtacttgtctttcgactctttctgtatattattgacgcggcggatgtttgtaattccaatgatacatttctttacttgctggtt

SEQ ID NO: 103306 - DNA, 1211 bp, Zea mays
  unsure (1)..(1211): unsure at all n locations
  Clone ID: MRT4577_25720C.1
gaaaaacgttccagcaaccacttctgctctgcatcccgtctgggcctctgcatcccgtctgggcctctgcatttgcttggctgctgctcccttctcccaccgaccaactcgatcccgcgccatggatcgcgccgaccccgcgcggggccgccttgccgtgctctcctcccacctccgtggtgcaggggccgaggaggcggcggggctggagaggtcgccggtatccgcgccggcgcccgggccccgcgccggcgcgcttgccgtggtggacgggaggaccgggaagcggcacgaggtcaaggtctccgaagacggcaccgtgcgcgccaccgacttcaagaagattaccactggaaaggacgacaagggtcttaagatttatgatcctggttaccttaacactgcccctgttcgctcgtccatctgctacatcgatggagatgagggaatccttcgctataggggttatccaatcgaagaattggctgaaagcagctcgtttgttgaggtggcctaccttttaatgtatgggaacttgcctactcagagtcaattggcaggctgggaatttgctatttctcagcattctgctgttccccaaggactgttggatatcatacaatcaatgccccatgatgctcaccccatgggtgttcttgccagtgcaatgagcaccctttctgtctttcatccagatgcaaaccctgctctacaaggtcaagatctttataaatcgaagcaggtgagggataaacaaattgtgcgagtacttgggaaggcaccaacaatagcagctgctgcctacttgagattagcaggaagacctcccgtccttcctttaaatactctatcttattcagagaacttcttgtacatgctggactctttgtaagttgtttcatattgaatgcatgtttcaactatgccatgtatgattatttccatgcattcaaataagcaaacagttcaactgtgactgtacattgatttatgttttctaagaatataaagaaaaatcaatttggcaggggtgacagaacatataaaccaaatcctcgacttgctcgagctctagatattctttttattctgcatgctgaacatgaaatgaactgctccactgctgctgntaggcaccttgcttcaaggtaaatcactttccgattttacctccaaacagtaaggaacaaacttctaatgaggtatattat

SEQ ID NO: 103307 - DNA, 424 bp, Zea mays
  Clone ID: MRT4577_25721C.1
taagagcacatacgtatacagcagagcaaacagtttacgatcgagcaccaaatagcaaatagtagtagcaaggaagagatcgatccaagacgatggccggcgaaggagatgtgaagctgctgggcacggtggtgagcccgttcgcgatccgcgtgcgcatggccctgcatctcaagggcgtgagctacgagtacctggagcaggacctgttcgacaagggcgagctcctcctcgactccaacccggtgcacaagaaggtccccgtgctcatccatgtcggcaggcccatctgcgagtcgctcgccatcgtcgagtacgtcgacgaggtctgggccgacggcgcctcgctcctccctgccgacccctacggccgcgctgtcgcccgtttctgggccgcctacatcgacgacaagctattccccgc

SEQ ID NO: 103308 - DNA, 524 bp, Zea mays
  Clone ID: MRT4577_25722C.1
ggtaaccgggcccccccctcgagtttttttttttttttttttttttttttttttttttttttttttttttaaaattgaactaagggggccattaaaaatgacaataaaacttttccgaagcaaccaagttattactttggacaaatcaataaaacttcaactggtagcgtgacaaaaccggggattattcaagcgcgcgcaactttaccggggacctccaaaaattcccatggcgaaaaggccttcttcttttttaataatttctgggcgggcaaaacaagcaaaaacccgctcccgcctcccgcgttgcaaaaacaacgccacaaaaaccacgtctgactgatttccgcgcgccaaccgggggcacgggggcgctcccgctccatttccagttctccgccacaatccgcaaggaaagaaacatcagcgcatcaagtcgtaatgggacgaagaaccgccctacaaaggcggcggcctggggacctggaagaactcctgcgccgtcgccatggcggcatcaaaaa

SEQ ID NO: 103309 - DNA, 449 bp, Zea mays
  Clone ID: MRT4577_25723C.1
taagagcacatacttacacagcagagcaaacagtttacgatcgagcaccaaatagcaaaaaagaggtcgatccaagacgatggccagcgaaggagatgtgaagctgctgggcacggtggtgagcccgttcgcggtccgcgtgcgcatggccctgcatcttaagggcgtgagctacgagtacctggagcaggacctgttcgacaagggcgagctcctcctcgcctccaacccggtgcacaagaaggtccccgtgctcatccacgccgacaggcccgtctgcgagtcgctcgccatcgtcgagtacgtcgaccaggtctggactgatgcagcctcgatcctccccgcggacccctacggccgtgccgtcgcccgcttctgggccgcctacgtcgacgacaagctgttccccgcgtggataggcatcctgcgcgccgccacggaggaggaca

SEQ ID NO: 103310 - DNA, 114 bp, Zea mays
  Clone ID: MRT4577_25724C.1
attctgttcgcttggctctcgcatcgatgaagaacgtagctcaatgctatacctggcgcgaggtgcacactcccgcgtttatcatagtctctgtacgcaagttgatccccaagg

SEQ ID NO: 103311 - DNA, 563 bp, Zea mays
  Clone ID: MRT4577_25725C.1
taacaattgtgcagagtctatacagaaaggagttgcagaatgagggaggatttactgatattgaaaaacaagtagaaaaacaattttcttcctggtttaaaaattatattggaacactttggcatgagcgaggagaagatctctgttctgatctattagctttgtcatgtgaacctgatctgcgaataagagtttattcagcatgtattgttgatggtgttcgataccacactgtcgaccgtgagaaatataggaggacacaaaatagtggtgtaatggcacaaggcacacataatggtgaagatattgaattctatggttccttaagagaaataattcagttgcaatataatgcagacaagagtggacaccggtcagtggttatttttcgatgtgattggtttgacacagaaagcaagaagggaagaataaaagatgatggattattgaaaagcatcaaccgttctagttcttggtacaaaaatgatcctttcattcttgcgccacaggctactatggttttttatttgcaagacacccaatatggaggtagctggagtgta

SEQ ID NO: 103312 - DNA, 525 bp, Zea mays
  Clone ID: MRT4577_25726C.1
ggccggcgggttcctttataccatgggtggctctcagactgtagaaaacccaacttctttaaccgctactgtgatctcaacaggcaaatctgaagcgtaggcgctctctacctatgatgagccctgtgtgtgcctgccacaatgcatgagccgtattacaacggtgacctttggggcatttatggggacaaagacatgagggcgcaacagctacgaccactggggctagcaaaccttgctgcctgactgtgagcaacagcagtttcttgcattcaaccaactaggttcattgaactctgcttcttatttgcaacaacaacaactaccattcagccagctacctgctgcctacccggagcaatttgttgcatgcaaccaactagcagctgggaactctcctgctgatgtacaggcgcatcaactactaccattcagacagctagctggtgtgagccctgatcccttcttgaccaaccacggggtggccggtctacccgcgcggtgggcctaacgctgccacgctgt

SEQ ID NO: 103313 - DNA, 330 bp, Zea mays
  Clone ID: MRT4577_25727C.1
caactagccatggtgaaccctgtcttcctacgtacaacaacatcaactgctttcatctagcccgctcgctgcgggcaatgcacctacatacctgctacaacaattgttgcaacacattgtaccatctctgactcaactagctgtggcaaaccctgtctcctacttgcaacagctgcttgcattcaaccaactgactttgtcgaagtctgctgcgtacttacaacagctacatcagtcacttaatccattgttagtggctataccactgattggctgaataccactgcgtcaactattgctgccatacaagcagttctctatgatgaattc

SEQ ID NO: 103314 - DNA, 368 bp, Zea mays
  Clone ID: MRT4577_25728C.1
acgggcgaataggaatacgggaagcgaatgatgttggagctacgccgacccccagcagcagcagcttttcatcggcggctgcggcgctgctggtggccacagcggtcttgcttaagcttatcctgcgctaccgctcccggggcggcaagcgcctgccgcccaccatacggggggcgtgggtggacggtgggctggtcaagtttatgcgcgggcccatagggatgattcgacaacaacacgcccgtctcggcagcgtattcaccggccggatcatgactcgtaggagcactttgctagtcggacctgaggcgtccgcgcactcctttaatggcaaccaagccgagatgagccaactggaagtgtacagg

SEQ ID NO: 103315 - DNA, 784 bp, Zea mays
  Clone ID: MRT4577_25729C.1
ctgatgtacaaactcaaccaaattcagctgttaatggtgttggtgtgaaaccacgagtaagggctcgtcgtggacaagcaactgatcctcatagtattgctgaacggcttcgcagagagaaaatttcagataggatgaaaaatctgcaggatcttgtcccaaattccaataaggcagacaaggcatccatgctggatgaaattattgattatgtgaagtttcttcagcttcaggtcaaggtcttgagcatgagtagggtaggagctccaggagcagttcttccccttctcacagaatctaagactgagggttaccacggccaacctctgccacaaggattactggacgcactagactcggaagacagcttcgtcttcgaggaagaggtcgtgaagctaatggagaccagcatcaccagcgcgatgcagtaccttcagagcaaggggctctgcctgatgccagtcgcccttgcttccgcaatatccacccagaaaggtgtgtccgctgctgcagtccctcctgaacggtgagataaagacacgctcctcccccatgagcacgaggaaacagccgcagatgacagaactcagacggctgaagaatgcagcaatgcaaagcccgtagagtgcagcataggaagttagtctgtgaccagagcgcatggcctcgtctactaatttcgctctcagaatcagctttttttttcgtacctattgcgcatcagttgattttgcctttttgccttctctcttttctttttggccgatttcatcaggttgcatat

SEQ ID NO: 103316 - DNA, 321 bp, Zea mays
  Clone ID: MRT4577_2572C.1
aagagcaagcacgcggcctgcacgcttgcaaaagctctcgagctgggtctgggactccacctttaatgccgtgcgtcacgacgcctgacggtccgcttcttctcggaactgtactactgcgaaaccggataatcttaatgggccactatattatgtgccaggtggaccaacgcgtcatagtatatctgctaacactcgctgccatcgatgaacaggctgacattctgacacatcttaactgccctgggggaagtctttattcgaccttcacgacttatgcatgcatctccggtgtagggaccaaagccagcaccgtgtgct

SEQ ID NO: 103317 - DNA, 294 bp, Zea mays
  Clone ID: MRT4577_25730C.1
gggggcaaaacccaaacccacttgaaggggaaaatcaaacaaaacccgcttaagcccagcatttaaaaaaaaaacaaaatgccccgggcaggtaaaggaccgtctttaaggaatttgaaagatttatccaacaaaaaccggtggggggcctaagggacatttaaataaaaaaaagggccaaaaaaggccaccgaaaggggttccatgattaaaaacgtccaaaggcaaaaattggggttaaaccccaagtgcaccttaaaaaaaaccattttccccaaaggaaaaaaaggggac

SEQ ID NO: 103318 - DNA, 245 bp, Zea mays
  Clone ID: MRT4577_25731C.1
ctgccgagggggacaggttccacagagaaaggccgtgcttgtcccggagggagaccgtgcaagaacagatatcctcgtcattcatggactagccgccgcccgcggaccttgatgccgccttattgggcgacgatgttatactctaaagactgctccagcggatgcgcgggcggggccactgcccctgaggactcgaggaagagataaggatgtttcaaacaagagtgtttctgggaggaatgaac

SEQ ID NO: 103319 - DNA, 541 bp, Zea mays
  unsure (1)..(541): unsure at all n locations
  Clone ID: MRT4577_25732C.1
gcctgatcaaagatcccattattagccgaacgccagaaccagtagatcttactttttttatatgcaacctgatgaaatacggccaaaaagaaaagagagaaggaaaaatcaactgatgcgcaataggtacgaaaaaaaaagctgattctgagagagaaattagtagacgaggtcatgcgctctggtcacagactaagaggctgtttggttcgtggctaaatgtgtcacactttgcctaaggttagtcgtttgaattgaagaactaaacttaggcagaaaagttaggcaaagtgtggcaagttaggcatcaaaccaaacaggccttaacttcctatgctgtactctacgggctttgcattgctgcattcttcagccgtctgagttctgtcatctgcggctgtttcctcgtgctcatgggggaggagcgtgtctttatctcaccgttcaggtgggactgcagcagcggacacacctttctgggtggatatggnggaagcaagggcgactggtataaggcagagccccttggtctgaaggtact

SEQ ID NO: 103320 - DNA, 786 bp, Zea mays
  Clone ID: MRT4577_25733C.1
gtatctctatctatctatccatcatcaatcatctcttcctacacagcgctttggtagctgctgctagctactgctgctatagcagcagtcagactggccgtcggcttgcttagcttagcttagcttgttattaaaggagctagcatggacatggatagcagcagcagctggctccatggctacgccaccaccaacggcttcatgtgcggcggctacgctgctagccctgcggaggtgcagtgcgtggaggacgagcagcagcagttcctcatcagctcgcagattcagcaccacctcaaccagatcagcatgcgcatgaacatggacgacgaagcagcggcggcagtcgacatgcacgatctcctcgaggacctcgacgacccgcgccgcgccggcgccggcgcctgcagcttcccttcgtcgtcctcctcctcctcgctctcgctctcgctgcccgcgtccgcctccctctcctgcggcccggagagctcctcgccgtcgccgcacatcctcggcgccgtcgcggcgccggccagcggcggctgcaaccagcagtacccggaggtctcctcgcacgtgccactagtaccaccaccgcctaccgtgctgccatcttacagcaaccttcacgcgccggcggccagagccaccggtggcgcgttcaagcactacgcgcggcacctcggccccacgaggacgcctactaagcccggcgcgtgcgggcagaagatgttcaagacggccatgtcggtgctgtccaagatgcacgtggcggccaggtacagc

SEQ ID NO: 103321 - DNA, 530 bp, Zea mays
  Clone ID: MRT4577_25734C.1
gctcacactggcaaatacactgaacttgcgtgctatccatccaattacaataccaatcccaccagagtccagtgctgggcgaatcctcacagttactgaacacaagaagccacaacgacaagcccgatcagcacacagcaggcatggcgctcgcgagaggccaacgacggctcggtggtcttcggcgaggagcaagaggcgcttgtactcaagtcatgggccttaatgaaaaacgacatcaggaacctgtgcctgcgttttttactgaaggtcttcgaaatcgcaccgacggcgaaatagatgtccttgttgctgcgcagactccgacgtgccgctggagaagaaccccaagctcaagacacacgccatgtacgacttcgttatgacctgcgaggccacggcgcagcttcgcaaggcctgcaaggtcaccatgagggagaccacgctcaacaggctctgcgccacgcacttgaggctcagcgtatcagactgacacttcgaggacacggacttcgcactgcttgatacta

SEQ ID NO: 103322 - DNA, 541 bp, Zea mays
  Clone ID: MRT4577_25735C.1
cacaacacataacagatcttacagcacgttgcagctgcctaccacgacgatggtgtccggcacgcatcagcgaggagatcggcggggccggcccggcggagcgcatgtggaaggtggtgcttcttcgagacaactcgttgctcctgccctaggcctgcgccgtctacgtgaacgccgtcgacgacgacgggacggcgggccctgctgttttaccaccatgaagcttatcccatcgatcgcgtgagaacaagacactcaagagctgcttggcgccgttggacgccgctgcgcgcgtgttgaggacctacgtgctgcagggcggcactgtgagcgcgcagctcaggacgcacttaggcgagatcagtacggacgcccgcggccacggcgcttgcccgatcacagtcacgggagaatacaagagcctcaaactcgcgtcggtaacgcccgaggacgaggccaggcatcagcaagagaacgacctgctggacgtgatggagaccgtgtacctggagctccacgcgagcatttcttctgaggcggc

SEQ ID NO: 103323 - DNA, 645 bp, Zea mays
  Clone ID: MRT4577_25736C.1
ccgtagaatgcctgccttccccatccgcacctccgcgtcgtcgacaacctcgccaaaacccgccaccccaggctcatcaggaacgccgccgccgtcttcaccacaaccccctccacccttgtggccatgggcgacgccgtggagcacctcaagagcgggttccagaagttcaagaccgaggtgtatgacaagaagccggagctgttcgagcctctcaaggccggtcaggcccccaaggtacgtgactagtactactcgccctgtagctctctctctatcgtcaccggcccagcattgccgcgttctcccatctttctgaactgcaaggacgaccctgccgcacctacggcgctgctccatcatccacacaccccagctgtgtcgctgggtgcgcaactgcattatttgcgcgtgtgacgaggtcaacgcgttgcggtagacaaacggaaacaagtagtagtctgttggattggatatgatatgcgtacataactagcttatacatatttggttcgtactttatttgttatattttagttcaaaataaactagcgggtgataaatattcaaaagtgcatgtagcgccggatatttatacgcgttcgtgcatgaaccgtggacactaacgtgcatgctcaccggtcg

SEQ ID NO: 103324 - DNA, 711 bp, Zea mays
  Clone ID: MRT4577_25737C.1
gtggtacgcctgcaggttccggtccggaattcccgggtcgacccacgcgtccggaaagaataatctggattttaactatcaaaaagcaccgagcatacaaagttaacagatggcctcttagcatttgaataactccaaaggactgattcctttttaaaaaatgaaaagcagatagaagaaatcaagtcacagttccccaaagagaaggtgtccattggtttttctatgatctgagaaggagacaagcttcactgatgatcagagagacaacactttaaattaattgccaaaattgccagctcctcggactagatggagaggctcttccaggtagcagcagccctggaatgcaccacacgcatgcactgtgggcacggctgcacgtcactgcacattagagagttccaccggcgttggacacagaaccccagctgaccccacagcccacagagccttgggactgtggtgcacactggagttctcctgcagcactctccagggttttcttgcctctgcctgtcagctgctagacgccgccccctgtcaaagaccaagtcctgttcacagctcttcagaagctgcccacgagacgaggcagacactgtgcttagcacagaacacgagtggagaccaaaaaaaaaaaattctgttaggcccacaaaacaatcggacataattgtcagtttgatgaacagcgtcactgtgatgttg

SEQ ID NO: 103325 - DNA, 369 bp, Zea mays
  Clone ID: MRT4577_25738C.1
cccacgcgtccggcgcgctggagccccacgcgccgcgttcccgtcgagcagcgcgttcagcgccctcacatcgggccccaccgtcatcttcaatccaacagcagcatcctgcagcccttgtcgcagcacatgatgtcgtgtgccggagcatcgctgttcgccatcgtttcgccatgagcgcagcattcctccagtcatcctcttcatctccaatgagcattttctcttctcttttctttctcagtttttcgttactgtgcatccttcggccttggcaagcgcccatgccccttgcggtcagcccacaacatggctccgtccaacccctagcagccccgtcgcaccctcgctgtcgtgcgattcgacact

SEQ ID NO: 103326 - DNA, 1919 bp, Zea mays
  Clone ID: MRT4577_25739C.1
ccgggaaggagtccagtggggtctcgagccggccgggtcgacctcgaacctccgaaaccctgaccaaatcgcgaggcaaagccgcgtcggcggcggatggcgccgtccttggtcgtctcggcgaggcatgggcatgcccacgctgtgccccaccggagaggtcgcaggcagcgtgtggtcgtcgccagttccggtggcgccggtccgccgccgaagctggtgaccttcctcgggaagggcggctccggcaagactaccgcggccaccatcgccgctcagtattatgcaagtgaaggcttcaagacatgcctggttgttcagtcccaagatcctactgcggagcacttgatgggtagtaaaattgggaattctctgaccgagtgtgtggccaatctctcggccataaagctggagactggtaagttgctgcttgaacccctagaccgactgaagaaggtagacgcccaggtcaattttactcaaggaatccttgaagggattgtaggagaggagcttggagttttacctggaatggattcgatctgtttagtcttagctcttcagaagctccttaatttcttttcatctggaaggagtaattcacaatcagaatttgatgtgatcgtgtatgattgcaacaatacagaggaaattctacggctgataggtgctgctgaccgggcaagatcttacttgaggtatgtgagggaccttgctgagaagactgacatcggaagacttgcttctccttcattactgaaactaatatatgattctgcaaggccaaatggcaaaattagtgaggggagacttagtacagagatatggaatgaaattgaacaactacttgagaaaatctcagtatggtttgccgatccttcaaaacttgcatgcttccttatcatggatcctaggacatcaatctctgtatcctctgcattgcggtattggggttgtaccactcaagctggcggtcaaatatgtggggcatttggatacactgaagacccttctgaaatgcaccgagaagttgctcaaaagttcgtgccgttgtctttgtcttttctgccatttctcccgaatgattcttccgtggattggagcagagcactaagctcattgagccaaaatacaaaggaacagctgaggaatgcgtccacctgggtgtacccttcagtcagttttgattctgttcagaaatctgtaaccctcttcatgccaggctttgataagtctgaaatcaagctatatcaatatagaggtggatcagaactgttgatcgaagctggagatcagaggcgcgtcataaaattgccacttacgatgcagggaaaggtccaaggtgccaaattcgttgacaggaacctcgttgttagcatccggtagcagaatcgctggcgccggctgccggctgggattggagcaccccacttcagattggcagtttactgccgactaatgagcaggaccatcgggattgcatgtctgtttctgttcgtagcctgaattttgtggtgctgttcgtttcaactttcaaccagagtgaagctgcatagtcctactatttttgaaggggttcgcgatactcgagtaaatagtaaactggcagttttttgcactgcttttgtgatcaggagaagggttttaggggccaagctggccccggaaccaatcgcctagatcgtagccgtcaccacttgcagcccaaatcttagttttggtgtgaactcgctgccgcgtcgaggacttcgactggaaatctgcaatgttgctctggggaacagcaatgatgctgtgggtaaaagctttgagctgaatatatctattgtaaaaattaaagcctttgtcttattagagcgtggttctgatatgttgtaatgcactttcctttattctaaattgtaagacgttttggaatt

SEQ ID NO: 103327 - DNA, 293 bp, Zea mays
  Clone ID: MRT4577_2573C.1
caactgccgaacaggacatgtgcccggtgtgaagcacataaaactgtacttggacaccgggcacgaccatagcgaccaaagaagcgaggagctaacgcacaaggaagcagtttctccttttgtggtgttggaaccaccaaaaagttggggaacaacaaaagcacttccatgttgcaacatttgcggctaccctaagatctgggaatagcctgagggggggtgctgcccagtatctggaaccgttgctcgccatgaaggtgaacgcaacggataggagctctaccacgacaggg

SEQ ID NO: 103328 - DNA, 470 bp, Zea mays
  Clone ID: MRT4577_25740C.1
aacccccgggcgcgccgacgccgtctttcgccgcttcgccccgcacctcgcttcatttcgtgtcgcccagagacgaagccctaagaagcaggaattggtggcaaatatggaaccagggatggggctagcttgcgttagcaacaagaaaatgagggatctcagcattccaagtacttttgcccagttctctacggaagtttgctggggagaggaaagcactttgaatttgggggtgccaggactgtgggaaggggaaagctggtggtgctttcaccatgaacactgctagtgcgggcaccggcaggagcaccatcccccgcctgggggggcaggaccgaagcatgatatagctctttatattattgggggttcctgtagttgctcttgtcaagcatgttgtggggggcctatttagtggagaccccccttatttaaagaggtacaccatgaacactgctagtgcggtcacc

SEQ ID NO: 103329 - DNA, 156 bp, Zea mays
  Clone ID: MRT4577_25741C.1
taggaaaatgcggagaggaggagcagttacactgctgacggacttgggacatggagggccagtcccaggctgataaggaggaggtcatccaagcatggcacatggacgacagtgaaaaggaccagacgcttcgtgatcatggtgaggccaacgaat

SEQ ID NO: 103330 - DNA, 2230 bp, Zea mays
  Clone ID: MRT4577_25742C.1
gggacctcgagccggccgggaaaaaaaagatccatgcttccattgacgccacgaccacgctacatataagtggcgtctgcggtgcctctcctccgaccctcgtcctcgtcctcgcgcagcctctgcttccatataactcgctcactgctcgcgcgcctcggtgggtgcaaacgcgcacagggacagaaacagagacagagccacccatgtcgaccaccaccctgcagctggttccgtggccgccggagccggcgcgcgccgccgtgcttcttgttgcggcggtcgtctgcctgtgggtgcttctgtcacgcaggcgggccgccggagggagcaaggacaaggagcgggcggcccggctcccgcccggcagcttcgggtggccgctggtgggcgagacgctggacttcgtgtcctgcgcctactcctcccgcccggaggccttcgtcgacaagcgccgcctgctgcacgggagcgcggtgttccggtcgcacctgttcggctcggcgacggtggtgacgtcggacgcggaggtgagccggttcgtgctgcacagcgacgcgcgcgccttcgtgccctggtacccgcggtcgctgacggagctcatgggcgagtcctccatcctgctcatcaacggcagcctgcagcggcgcgtgcacggcctcgtcggcgccttcttcaagtcgccgcagctcaaggcgcaggtcaccgccgacatgcagcgccgcctcgcgcccgcgctcgccgcctggaaggttcggtgcgcctccgcgccgccgctccgcatccaggaccacgccaagacgatcgtgttcgagatcctggtgaggggtctgatcgggctggaggcaggcccggagatgcagcagctcaagcaccagttccaggaattcattgtcggcctcatgtccctccccatcaagctgccggggactaggctctacaggtccctccaggccaagaagaggatggccacgctgatacaggggatcatacaggagaagaggcggcggcggagggccgcccttgaggatggcggagagggcgagggcgaggccggtcccccgcgcgacgtcatcgacgtgctcataagcggcggcgacgagctcaccgacgagctcatatccgacaacatgatcgacctgatgatccccgccgaggactctgtgcccgtgctcatcacgctcgccgtcaagtatctcagcgagtgcccgcttgctctgcaacaacttgaggaggagaacatgcagctgaagaggcggaaaaccgacgtgggagagaccttgcagtggacggactacatgtcactgtcgttcacacaacatgtgataacggagacactgcggatggggaatatcatcaacgggatcatgcgcaaagcggtgcgggacgtggaggtgaaggggcacctcatccccaagggctggtgcgtgttcgtgtacttccggtcggtccacctcgacgacaagcgctacgacgagccctacaggttcaacccgtggaggtggaaggagaaggacacgagcaccatgggcttcaccccttttggcggtgggcagaggctgtgcccaggcctggatctggccaggctggaagcttccatctttctccatcacctggtgaccagcttcaggtgggtggcggaggaggaccacatcgtcaacttcccaaccgtgcggctcaagcgaggcatgcccgtcaggctcaccagcaaagactagctagctagtcactacgacctgcttgtgcatgccatgcatgcagatttcagtcacgtcatatgcaatatatattggaccctggaggttgcacgtgtacagaagagaggatgcaggagctagcagatgatcggaggtatttaggcagactgaaattgaatcgaccgcgaagagtagcacactactataccacgagtatgatctgtagtagtagtaataagaggaatataatatcattagtgtggtagtatttacttattatactactctctcttttcgtttttatttatcgtgttttagtttaaaaatgaactagcgaggttagtcaataggcgtgcatgcatggcccatcatggtcatggatatataggccttgatggttatactagtataagcagtagtgttatgtcacaagggattactgggatctgggatgatgatccacaatcccatctaaaacgaaaagagttaataaagattgttaagtttactgctgggagcctgggactttgact

SEQ ID NO: 103331 - DNA, 811 bp, Zea mays
  unsure (1)..(811): unsure at all n locations
  Clone ID: MRT4577_25743C.1
gaccctcgggttggccgggtgaacaggatttaaatatgaggaaaataccgttaaggcagtacaatgcttgaacgatatagtgacgaatgcactgattcatgccgaagagtgccttcagtacatgtcagccttgaagaaccatgccatcttccgtttttgcgcaattccccagataatggcaattggaacatgtgctctttgctacaataacgtgcatgtctttagaggagttgtaaggatgagacgtggtctcacggcacgaataattgacgagacaaattcaatgtcagacgtctataccgctttctatgagttttcttcattgatagagtcaaaggtacaatatatggagcactattgttgctgcagcctacatggagtctgagttgcctgtatataactgaacattcatactatttatagcattcctttgtaataacactaggaaatttgataggatgtaggtcgatccgaaacccactcaacttaattgattgtttgcttgccaccactcatttggtttgtggtcagtaaatcatgagaactgtgtttgaaacaaaagtaaatgatgagaactagggagtagggtgaattaatcagtcaacccaacctgagctacttgcaccactacaaaatttatgatatccatcagtattattntattgggattctatcatgttcccattgaattacactaataactacgtaaacattagtctaaaacttgtctgtcgggtgagcagcctattattatactacatccagtcgaaaatagttgctgtttcagatactactattattatatcttgct

SEQ ID NO: 103332 - DNA, 1474 bp, Zea mays
  unsure (1)..(1474): unsure at all n locations
  Clone ID: MRT4577_25744C.1
ggtaccctcgggttcggccgggaattcccacgcgcgcgccttattacatgcccggttgcctctgccccggtgggaggtggacattggacgacacccccggtgcaccccaacacacgcgcgcgcgcgcacacacacacacagaaataaaaaaaatgtgcttggcagctgcagcctagtacagttgagaccactcggatcctttcttgcacttgtgctgtcaaacaaagcgctcgcccaggacagtaggaagagctagagaggctcaggctgctcgtgatggcttggctcgcagacagacaggcagacagagagatatcaaaacatttgagggaaatgttatttgtgtatcactgtgcatgcagtacgcagtgagtaatgaatgaattctggtgtggccagcagatcgtgttcgagatcctggtgaggggtctgatcgggctggaggcaggcccggagatgcagcagctcaagcaccagttccaggaattcattgtcggcctcatgtccctccccatcaagctgccggggactaggctctacaggtccctccaggccaagaagaggatggccacgctgatacaggggatcatacaggagaagaggcggcggcggagggccgcccttgaggatggcggagagggcgagggcgaggccggtcccccgcgcgacgtcatcgacgtgctcataagtcgaggccggccgggcaccgtgccctctctgtttcggtttctttctcttcagggtccgggggaggggggaattagagatagaattaaccatcagtggccgtttgctgcaacgattcactgaacgacgaactgcaatggccaggaggagaacatgcagctgaagaggcggaaaaccgacgtgggagagaccttgcagtggacggactacatgtcactgtcgttcacacaacatgtgataacggagacactgcggatggggaatatcatcaacgggatcatgcgcaaagcggtgcgggacgtggaggtgaaggggcacctcatccccaagggctggtgcgtgttcgtgtacttccggtcggtccacctcgacgacaagcgctacgacgagccctacaggttcaacccgtggaggtggaaggagaaggacacgagcaccatgggcttcaccccttttggcggtgggcagaggctgtgcccaggcctggatctggccaggctggaagcttccatctttctccatcacctggtgaccagcttcaggtgggtggcggaggaggaccacatcgtcaacttcccaaccgtgcggctcaagcgaggcatgcccgtcaggctcaccagcaaagactagctagctagtcactacgacctgcttgtgcatgccatgcatgcagatttcagtcacgtcatatgcaatatatattgnnacccttggaggttgcaacgtgtacagaaagagaggatgcaggaagctagcagatgatcgggggtatttaggcagactggaa

SEQ ID NO: 103333 - DNA, 375 bp, Zea mays
  Clone ID: MRT4577_25745C.1
cggacgcgtgggcggacgcgtgggcgcaaagcaggccgacctgtacacgatgctgaacaagcagagctccagagggcagaatggcagtggcattacagatggcaaatcgcacggacgagcctatttctggccacactggccagtcctttcttagattgatggcactccactacaacaagttcctaggccgcaccctaagtacaaccgttggatgtgtcgccttcacgaaaccgtgagaactctcattgttttgtttgctaccgttatcctgacattttgttccacaggttttttatggctaacattttataaggcatttctgaagtattacgaacttgggctttgaataatattctctttttaatcattattcct

SEQ ID NO: 103334 - DNA, 135 bp, Zea mays
  unsure (1)..(135): unsure at all n locations
  Clone ID: MRT4577_25746C.1
cgggtccacggcgctgttcgtcgcggtagactacgccttcctgctacgcnttnnccggcttcntcgcctgacanacanancagttcncagatcatccaccncagacgtcagcncnatactaaacagncacnngtt

SEQ ID NO: 103335 - DNA, 338 bp, Zea mays
  Clone ID: MRT4577_25747C.1
ggatacaaacagcgggaaacaaaatttgttgtgggggtggggtgaaactacttttgattttaactgcaatcaaaacacaacaaagggggcaatttttacaagttcacatgaaacaacagtttttaaaacacactggggggaagaacaaagcaggaactacattgctttttttagcaactacaacttgcagaatgtttcactaaaagttgatggaataaaaaggtgctttttgactaatttgcaaggcataattttctttgccttcaaattatggttctggggctcacttggccattatgaccttgacaaactctttgttgttgatttggccataacca

SEQ ID NO: 103336 - DNA, 711 bp, Zea mays
  Clone ID: MRT4577_25748C.1
gccggaacttttgggtacatggctccggagtacatcgtccacgggcagctcaccgagaaggccgacatctacagctacggcgtgctggtcctcgagatcgtcaccggccggaagagccacaactcggtggcgtcatctgcagaaggcctctccctcatggcactgatatggagacactacaccgcgggcaccctgacggagctgctggacccgaacctccgcgagcagtgctcggaggaggacgccctccgggtgttccacgtcggcctgctgtgcgcccaggcgtcgccgaaccttcggccgcccatgtggaaggtggtggagatgctgagcggcagggatcacaaggcggtggcgcttccccggcccacccagcctcccttcatcaacgtcaaggggtccagcggcaagagcgacagctccggcgggtcggcgtccaactccgacaagtcgcccttctcgctgaaccagctgtcagtcagtggggtgcaggccaggtaaaagctagctagctagctgcggatatcatgtgtttgggctagcggcattttttttcaagttttgtaagtcgtggcgtggatatatcataggtttgacttcgattttctggcttcgttgatctggtaacatactctgattattgctagtatgtgcaagtctttggaagaaagattcatgtttgcaaataaaacatccagaaaatgttgcccc

SEQ ID NO: 103337 - DNA, 327 bp, Zea mays
  Clone ID: MRT4577_25749C.1
ggaaaaaaaccctttcaggggatctttttggggccttcatcggtaaaaagggccctagcataatccaaaacttggcgggccaaaacagcttcccggacaaaacaaaccccaaaatcgcctccggcgggttttagctttaatataaaccccccttttaaacaacccccccccggggggggctttccactaaaaccattctaagccttttctggttaagggggggccttaagcccaaggcccttggggggctttgcccacagggcggggtactggtggaacggggccctggaaaacttggtttggctcccaaattcaggggggggggag

SEQ ID NO: 103338 - DNA, 405 bp, Zea mays
  unsure (1)..(405): unsure at all n locations
  Clone ID: MRT4577_2574C.1
aagggccccacggncnncagggggcgcaacannggggaagacccccggggccaggacacaggggaccagganngccccnggagggccgaagcacagaggccnngagggnnggcnagcggggcggcagggngaccaggancaggcnnacaggaaaaacaggccccgcgccgaagaagngcaaggcaggaangggcccacaaaccccnggggcangaannnnaccaccgacaagcgcagaacccnaggaaagaagnggcagacacngagggaagcccacgnngagggcaagacaaccgacaacnacangcngcgggngnncngcangggnggnaccaagaggcgcccaaaccagggcaagagaaccngcnnngcncaggcanccccagancggcagaaacgccgcaa

SEQ ID NO: 103339 - DNA, 206 bp, Zea mays
  Clone ID: MRT4577_25750C.1
ttactgacatggaacaaactgtggaagcggggagccataccacagggtgtgtctaccttgactatacgcacacgcgcctaccctccgactgaaagcatactgcctgaaggaagaagcgaaatattagcttggtcagcagccagacgacaccaagctgtaacgcactaatacatttaggaggatgcgtgttcaggcacgcaatgtga

SEQ ID NO: 103340 - DNA, 434 bp, Zea mays
  Clone ID: MRT4577_25751C.1
tgtaccgccgtcgaggatgtcaaggacgcactggtatactttgtacggcctcctcagaaccggagagagctccgttggcagtgatacggcgagacctgcagcactggatggggctgatccactctctgacttcacacatatgcgaagacattgttgatgcttactactcctccaagctcggatatgagggaagaagctatgatcaaatgcatctctatgtggatctttatccaatcccatgattatggaaggttacgatgcagtcataagacgagatctaccagggagttgctacacacgaggtcaaatttaccgacgcagtatcatttcatctcacatatgaactcattgctagatcatgaggagaagcgtacgacatcatatacaaattgagtacatcagaattggcttcagtgctacagaattggaacatc

SEQ ID NO: 103341 - DNA, 579 bp, Zea mays
  Clone ID: MRT4577_25752C.1
acccctctccctctccctcacagcttccccaaagcttacctttccccacacccaggcctcaacagcttgctccgcgctcttcttcttgcttggtagcccggtcgcctcttgcttcctcgagcccctctcctcctcccccaagtttctctctctgaaccatactagtccacagccacaggaggttcttgggttgccggagaagagccatgcttcacggtggcaggccgctgtccctcaggggctccctcaaggccctcgaagccgatatccaccacgccaacaccctggcgcatgctatccacagggcctacgggggtacatgcgtgcagatgaggctgtcctacagctccatggctccaatcatcctcaaccttatccagtggatggactgcagctgctccctctcctacaccctccccagctacctgggccttctcgaggttctcgtctacaaggtttatgttgatggggatgcctccatatccaccatcgaaaggcgagcgagcctcaaagaattctacgccataatatacccctacttgcaacaaattgaggagaacgtcatggcgagagactgca

SEQ ID NO: 103342 - DNA, 592 bp, Zea mays
  Clone ID: MRT4577_25753C.1
caacaggttgtgctggaagaggcgtagatgtaggcgtggcgacacatcaggatcctgaatttacatggcgggagagccacgacgcgtaggaaggtcctcgacagcgccactgtagcgcgatgacgatgcttgaagttggcgaagaactcgaagacgaacgtggtgcagaccaacgatgggtgtgccgacggagctcgcaggtatcgaacaactcatagaccgtgcgcaggagacatgcaccgacagaattgacaacgatgtagatgcaacggtgggggtcgacgacgaacgacgacgctgctgcccgaagaggtgatacaacgacagggatgacgataagctgcgctgctgctgaggaggcgttgcagtggcagagtggacaacaggtcgcgctgctgcccgaggaggcgatgcagcagcaaccctcatgcccggcaaagaaactcgtgacagacgacaaatgtcacgggagggtgaggtcgcgcacgctatcggttggccagaccgacggcgtgcggggcgaagacgacgatggtgatgtcgatggcgaggagacttggcaccggcttcctgccttatcgcactcacgaca

SEQ ID NO: 103343 - DNA, 456 bp, Zea mays
  unsure (1)..(456): unsure at all n locations
  Clone ID: MRT4577_25754C.1
ggaatncggctcgaggcggcagcctgtcacttaaagacgttcttagtttttttgacaaaagtcaacacatcnagaagacaagttcatattaagtaacctctttgataccctaacaaggcttgtcaggtcctacgcatatgcatttctatattcgtttgaagacccttagaagattctagaccatacattttctggagatgaatgattacttgacaaagatgctgcattccactgcacatgttttggtattttaaaagcggcttgagaataaaactaaagctgcagaacaagcttctgttgattggtatcggagggctcaactttctctttaaaaagttgactatgatcttgcttgggatacccttaatctgcttaaatcatatgctgacaatgcaagctccttaagatcctatcttgaacagtaaaatgtgtattttaaaatctgattttcaaatc

SEQ ID NO: 103344 - DNA, 110 bp, Zea mays
  Clone ID: MRT4577_25755C.1
gtaatttccatgttggacaaaccgggtgcatgggtgcttttagctgacctctgtcgggattcaaacgccgttaagggtacaagccactatagaccacgcctatagtgggc

SEQ ID NO: 103345 - DNA, 295 bp, Zea mays
  Clone ID: MRT4577_25756C.1
agcattcaataacaaataccacagggaaagatgggccccattcttgacgacaaaacatctaatacaactccatggggggttttggtcgttcaaaaatcccgtattggcttcacttaacgcacaaaagcgctgaagcaagtaacttatctgcgacgaatataacaaatcccgtgagaaaggctatgctttatagtgcatgtgtgggggaaacagcgtctagccgcgcagtgatacaccggggggccaaacgtgaggacacgtaaggctttcagaacctgaattaccacagccggct

SEQ ID NO: 103346 - DNA, 605 bp, Zea mays
  Clone ID: MRT4577_25757C.1
cattgggtacctcgaggccggccggggcgcacaacacctcgctttttgtactcttccgtctttgccctcgcgttatcgcgctcgtctcgcctggcctagctagttgcctgccttggcttgcttgctacgtcgtgtacacagcgagaggaaggaggagcaagaaaagaaagaaaagagagagagagagtcgtttccttttttcgagcttattccatggagacctcttctcacaaacgggcgcgggaggcggtcgacctcgccgccgccgccgccgccggagaggccgtgtggccggagtccgcagccaggggattagcccctatcttttttttctcgtttttatttttaccttttggctaacctgaatgtaaagtttcttaggatgggttaaaacagagccgtgcaaaacttgggaagataagattcagagtaggcggaaggttctggaaatggcctccctttttttttgtttgccctcggaatctacctctcgcttaatagaaaaaggaaataagaggaagcgagtacatacataaagctattaaaaataataaacagtgaagcaaaagatagatgccgccaaaaaaaaaaaaaaaaaagcggcc

SEQ ID NO: 103347 - DNA, 387 bp, Zea mays
  Clone ID: MRT4577_25758C.1
atgattcacatgcttatagcctggaaacattagacattgaaaacccgagcggtgaataaaggatgcccaaggtagaaaaaaaaaaaaaaaaaaaaacaaaaaaaaaaaaaaaaaaaaaaaaaaaaaaaaaaaaaaaaaaaaaaaaaaaaaaaaaaaaaaaaaaaaaaaaaaaaaaaaaaaaaaaaaaaaaaaaggggggggccccaaattaggaagcttttcaacccggaaataaattcggaaccggtccttgaaggctaacaaattttccttatagggggtttattaaaagttgggggaaaaaatggaaaaagttgtttcctggggaaaattgttttccgttaaaatttccaaaaaaaatacaagccgaaaaataaaagggtaaag

SEQ ID NO: 103348 - DNA, 859 bp, Zea mays
  Clone ID: MRT4577_25759C.1
gggtacctcgaggccggccgggccgggcttcccaacccccgcctgtctccgctcccacgatgccccaggctcaaacggcgccgcgatggtagctcatcacgcccaccgatcccccacaccagttcacacccgcgccccagctctcccgcctcaccgcgcgtccgtgcccccagcatcgttgtctcctcctctcccgctcttccccctccagctccgcctcctccacatcgttgtattcatcgcccccaccctcggctgcacctacactccggctccccctccgcggcatgagctcctccttgagcacctccatctctgccacctaaaggatggagcacacgacagttgcgcccccttcaacacaggacaccagatccccttcaacaccggagacgtcgcccttcccaccttccccactggatccgtggtgggggatccacgacgcccaccagacacgtcgcccttgcccctttcaacaccggagatgttgcccttcatagcaagcctagcacgccgcctcctatcctctactgcttcctcctcccccctgatgcaaccaccccgcgtcgctccctccgatggcgaggagttcgatgtggaagaggcgacatcaaactcgccacacagccaggtgatgaagctgttgcgctcgtccatgagccaggctgtgggctcggccacttcgacgccgggggccgatgatttgatgacggcggcggcagcgaaagccaaatcacactggttgaaagggcatctcgaatgggtgaggaggtgaatggctgttgtgtttgtgaataaggaggatagaaggattttcaaagagcttgttctggttctaaactgcaggagcatcgatacc

SEQ ID NO: 103349 - DNA, 321 bp, Zea mays
  Clone ID: MRT4577_2575C.1
gcccaagttgtagaatactagtttcctcgcacatgcttctttgcgctgctctatttgccctgtgtttgggttggaatgtttaaaaaaaaaaaaacaaaaaaaaaggtcccccgctcaaaaacaactcaaccacacaaacgcccacatgcaactacaaaacatattctaaagcccaacctaaacacaaacaactaaagcggcgtccttctaagagaacccaagttaaaaccccgccgcttcccaacttaaatctcttttaagggcacccccaaatcaaaaaccggggccgtcatttaacaagcccgaacctagaaaaccccc

SEQ ID NO: 103350 - DNA, 1897 bp, Zea mays
  unsure (1)..(1897): unsure at all n locations
  Clone ID: MRT4577_25760C.1
attgggtacctcgaggccggccacggttttatataacactttcggggttcagctctgctgcctcgaagcagggtccagatctctctcccccggctccggcgatggcttcgccttacgccggcggcgtgcagcctccctctcccgctggggcggtgcagcagcagcagcagaaccactctctggcgttccgcgtgatgcggctgtctcgcccctcactccagccagacctggccgctctgctccgcttcgacccacgcgacgtcttcctccctgaggacgcgctcaccggctccgacccgtccgctgccgccaaattcctccacggcctcctccaccctgcggactccgccactgccgtccctggagacttcaccttccgcgaccgcttcctcctccgcgacccagccgacgcgctcgctctgccgggcctcctcgtcctcccccagtcgttcggtgcgatctatctgggcgagaccttctgcagttacatcagcatcaacaatagctccagctttgaggccagggacgtcgtcatcaaggcagaaatacaaacagagagacagagaatacttcttctggatacatcaaaatcccctgttgagtcaattagatctgggggtagatatgatttcattgtggaacatgatgtcaaagaactaggagcacatacgcttgtatgtactgctttatataatgatggtgatggagagcgtaaatatcttccccagttctttaagttctctgtttcaaacccattatctgttaggacaaaggttcgcaccatcaaggacatcacatatctggaagcctgcatagagaaccatacaaaatctaatctttacatggatcaagttgattttgagcctgcccaacaatggagtgctacaagactggaagctgatgaacatccctcaacagtgaagtctgcaataggggatctctgtaaacaaccgatcctcatcagagctgggggaggaatatacaattacctttatcagctaagatcatcatctgatgaagctggtcaaacaaagtctgagggaagcagtatacttggtaaatttcagataacatggcgtacgaacctgggtgaaccaggccgtttgcagactcagaacattcatagcactccgactgcaagcaaagatgttaatctccgtgctgtgaaagttccacctattatatatgtggaaagagcatttatggtcaatctgtgccttacaaatcaaacggacaaaactgtgggcccttttgaagtatttctggctccaagcatgtcgggtgaagacagagctgttctagtcaatgggccacagaagttgattttacctttggtggaggcttttgagtctatcaaatttgatctgagcatggtgaccacccagctaggagtgcaaaagatttccggaattacaatgtacgccgtgcaggaaaagaagtactatgaacctttgcccgacatagagatttttgttgatgcagaatagcaacaccaaattgggacccatttgacgagctgaagatgcatttgtacttttcattaccatgggaggtctacatagtttacataaagcactggctgatgtatattgatacatgcgattgtcatattgatatcaaattgacttctgtcggatgtcactcaaccttggattaccacattctcactcaaccttgagctgcacattgatcatgctctgctaaagactgcacggattacaattcttcaagctgggaaagttttggcccaaaattactgctgaatgtggccggttgctcttgctggttatctcgtgattttctgtcaagtacaaaattatcntggtgtgtaactacgaaatgacgggtgttgacagcattgtagtggtaatcccaaatggcatgtgatgctttgctt

SEQ ID NO: 103351 - DNA, 658 bp, Zea mays
  Clone ID: MRT4577_25761C.1
aagcaacttcaaaagggcactttcatcagtcaaacgaaatacattcaagacatactcatcaagtttgggatgaaggatgtcaagccgatcaagacactcatggaaactaatgtgcatctcgacctcgatacgggaggtaaatccatagatcaaacgggtaaatcaggctaatctagggccccaatgaaacaaaggaccctaaaaaatatggcttcgcctggcctggtctcatgggccatcctggtccatgcatccatgcagccatacagtccctcatccgactctggctcttaatgaactttgtcaaactgtcacttgaataagaaaaacgaatcctgaaataattaatgatcagccaggcccagaatttgaaggagcatatgcactgccttgaacaaccggttgtctctgctgatgctgagactgcaattgctctctgccatgttggttccactggtcaccaacaccatgagcctgtatagggaagccacctgaaaacttgcctttgtagcatgtcttggctacccaaaagaagtatctttaggagacctaagcaggttagacggcgaggtaactgaagtctgattgagcgatggctcacgcttctgctggtttacagatgacagtacagggctacacgaatctgcactctgtggca

SEQ ID NO: 103352 - DNA, 1327 bp, Zea mays
  Clone ID: MRT4577_25762C.1
agacgaccttcttcccatcccttcccttccctctgctagtctgcttcgttcctcggccatggtggtcctcgccaagggtgagctcgagcagatcgccctcccggctgcagagccgcccccggccgacgtgcggtcggtggacctgtccgccccggcgggccccgcgcgcgaggccgcggcgcgcgcgctggtggcggcgtgcgaggagcacgggttcttccgggtgacgggccacggcgtgccggccagactcgtgcgcgccgcggaggccgcggcggccgggttcttcgcgcggccacagggcgagaaggaggaggagggccccacgctcgggtacggaagcaagcgcatcggcggcaacggcgacctcggctgggtcgagtacctcctgctcggtggcacacccgccgccgccgcgtcctcctcggcattattgccctgcgccgccgccccgtcgccgtccgcgccggccgggccgttacgggaccttctggacgagtacacggtggcggtgcggcggatggcgtgcgcggtgctggagctgatggcggaggggctgggcatcgccggcggcgccggggacgcggtgctggcgcggctggtggcgcgcgcggacagcgactgcatgctgcgggtgaaccactacccgccgcggccggcgctcaaccccagcctcacggggttcggcgagcacaccgacccgcagatcatctcggtgctccgcgccaacggcacctccggcctggagatcgcgctgcgggacggcgcctgggcctccgtcccgcccgacggggacgccttcttcgtcaacgtcggcgacaccctgcaggtgttgacgaacgggaggttcaggagcgtgaggcacagggtggtggtgaacagcgagaagtcccgggtgtccatggtcttcttcggcggcccgccgcccggcgagaggctgggcccgctgccgcagctcctgggcgacggcggccggagccggtaccgggacttcacctggagcgagttcaagaccagcgggtgcaggaccaggctcgcggaagaccgcctgtcccgcttcgagaagaagtagctagaggctacgtcatttgcatgaccgccggcggtaggatcgattaccatgtatgcttctctgtatatgtcagttgcattgccacagctctagctactggcgcccgtacgtgtatattagtggccatgctcgtattgtacgtgcacgtgtatgcacgcatatggtgcaccacatacagggtatcatccaatgctatctatccatggagtaccaaccatgcatatgcatggtcctgttattagcttttacaattac

SEQ ID NO: 103353 - DNA, 278 bp, Zea mays
  Clone ID: MRT4577_25763C.1
aactaaactttttggttggggtttttttttttttgtttttttttttttttttttttttttaaaagaaaaattttagatctgcccctggttataaaaaaacatatttgggccccaattttgggaacacattttccgtgggaatacgtaacaaacgtaacaatcgggggattacccaaatttttgtttttttttttaaggcacaacacacaaacaattttcccccttttataattccgggaccgcactaataataaaatcacatgcctgccttagggtgg

SEQ ID NO: 103354 - DNA, 334 bp, Zea mays
  Clone ID: MRT4577_25764C.1
gtttgttgctgctattttcacaatagctttaatccccttcatgtgacgctatctagtttttcttatcctagtgtgaattaacagtcatcatagaatgaactaattattatgtgcaatcactgtcaaatgtcatgaaaaaactaggttgttattagatccatatttgcagcacattgctcgattttcatgcccaagttgattggtcctcttatcatcatgaagcacaaggtcacttctgatttatgatgcatgttttttttattaattataattcatgatgacatcttgaatacgcctctggtcattgtatcacgacgtttcagacaacaaagta

SEQ ID NO: 103355 - DNA, 1392 bp, Zea mays
  Clone ID: MRT4577_25765C.1
cctcgaggccggccggtcgaggggccggggccgtgacgtctcctctcctctcttcgtctcatccccagcccacccacaaccaatgccctcctcccttcccacctgacctgcgccgcgccgcgccgcgctgcgcagccatccttgttctgtcccgggtacgccgccacacacatcagttcaagcgcttctctccctccctcctcttcgtggatcggaatcgacgcctggaagtggatgacgatggcgggttcttgcgccgcggtgcccgttgccggtctcccctcgttgaggacgccgatgccaactcacctcagacttggcggctttatgccctgttcctcggccgcgcggagtcgcggcgccgccgtgctgggatgcgctcttggggccaggaagcagacgccgggagttctgaaccagttgctctgcagatacatgcgaagagatgggcatgaaggtgatgtgagcaatcaaggaagggatggtgctgttatgtttgggccagatgatgatggtgtaaagattcctactcaggtagagactcttgtaaagggcactgcagcggttgctgaaccagaatacaagcagatcccagatgtagattacctacaggagctgctggctattcagcagcaaggacctcgtgcaataggtttctttggaacccgcaacatgggatttatgcaccaacagcttattgagatcctgagctatgctatggtcataacaaaaaatcatatattcacatctggggcttctggaacaaatgcagctgttattaggggcgctttaagagctgaaaagccagagttgcttactgtaattttacctcaaagtctaaagaagcagcctcctgaaagccaagaactgttgtctaaagtacaaaacttactcgagaaaccacagtatgatcatttgccactaattgaggctagcaggttatgcaatatggacatcatctctaaggtccaacaggtaatctgcttcgcgttccacgacagcaaactgctgatggaaacatgccaggaggccatgaaccttcggaagatcgtgacactcttctacttggattagctccggtagggatctagtctcctttttttttgggtccgtggcgtaggctaacgttggggggataaaaagcaagctgaacagtttagttagtttcggaatatattggataggtggtgcggtgaccttctattggaggagaaagtcattttgtttcgcccattgttttgattcttgtcacaaagaaaccaataatcttgtcgatatgcctaattcgtcattgaagggaataagattattagctggagtatatttgttgttgacctcaaggattatagttagttcgtgctccagtttttccatcaaaaaaaaaaaaaaaaa

SEQ ID NO: 103356 - DNA, 725 bp, Zea mays
  Clone ID: MRT4577_25766C.1
aggccaccgcgcggatcagggtggagcacatcatccgggaggagaacatgatggccgcgcaggagatcctcgagctcttctgcgagctcatcgctgtgcgcctgcccatcatcgagacccaaaggttcgcccctctggccctctatctgacttcaattttacagcctgtaattgcgatcactgtttgcttgttcatgaggccacggcccacgggtgtgctttgttgcccctggatatggcaaactgtgctggaccaccagctcccttgaggccttgagatttccagtaactggtttttatagcgaacataaccttgcttgactgctatagtggactatggctgtgtttgttccattccaatgtgttcttagcagagacttggaccctaaagataaccattactttaagggtgtttcgttccagcgactaaagttcagtatatgtcatatcgaatgttaaatatgagtattaaatatagtctaattataaaaataactatatagatgaagactaaataataagacacaaattttaatcctaattaatctatgattagcaaatgtttactgtagcatcacattagcgaatcattgactaattaggtttaatatatttgtcttgtcgtttagtttttatctatataattagttttttgattaaattatatttaatacttataactagcatctaaacatttgatgtgataggtgctaaaatttagcata

SEQ ID NO: 103357 - DNA, 1301 bp, Zea mays
  Clone ID: MRT4577_25767C.1
cggccgggctccccttcccatgaccagcgccgcgccgcgcagccatccttgttctgtcccgggtacgccgccacacacatcgcttcaagcgcctccctccgtccttcctctttgtggattggaatcgacgcctgaaagtggatgacgatggcgggttcttgcgccgcgccgcccgttgcctgtcttccctcgttgaggacgctgccgccaactcacgtcagacttagcggcttcttgccctgttcctcggccgcgcggagtcgcggcgccgccgtgctgggatgcgctctggggaccaagaggcagacgccgggtgttctgaaccggggctgtttttattgtgctcgtatagttgttctgtggatacatgcaaagagatgggcatgaaggagatgtaagctgtcaaggaagggatgacactgttatgtttggaccagatgatgatggtgtaaagattcctactcaggtagagactcttgtaaagggcactgcaatggttgctgaaccagaatacaaggctagcccagatctagattacctacaggagctgctggctattcagcagcaaggacctcgtgcaataggtttctttggaacccgcaacatgggatttatgcatcaacagcttattgagatcctgagctatgctatggtcataacaaaaaatcatatattcacatctggggcttctggaacaaatgcagctgttattaggggcgctttaagagctgaaaagccagagttgcttactgtaattttacctcaaagtctaaagaagcagcctcctgaaagccaagaactgttgtctaaagtacaaaacttactcgagaaaccacagtatgatcatttgccactaattgaggctagcaggttatgcaatatggacatcatctctaaggtccaacaggtaatctgcttcgcgttccacgacagcaaactgctgatggaaacatgccaggaggccatgaaccttcggaagatcgtgacactcttctacttggattagctccggtagggatctagtctcctttttttttgggtccgtggcgtaggctaacgttggggggataaaaagcaagctgaacagtttagttagtttcggaatatattggataggtggtgcggtgaccttctattggaggagaaagtcattttgtttcgcccattgttttgattcttgtcacaaagaaaccaataatcttgtcgatatgcctaattcgtcattgaagggaataagattattagctggagtatatttgttgttgaacctggcttataattagttcgtgtccagtttttcc

SEQ ID NO: 103358 - DNA, 1393 bp, Zea mays
  Clone ID: MRT4577_25768C.1
cctcgagccggccggaaccagccaagttgcgttgcggcctcagcccaactggtaccgtgccgtgccgtctcctctcctctctcctctcgtctcatccccaggtctcagcccacctagcaatgttctcctcctccccttccacatgaccagcgccgcgccgcgcagcgcagccatccttgttctgtcccgggtacgccgccacacacatcgcttcaagcgcctccctccgtccttcctctttgtggattggaatcgacgcctgaaagtggatgacgatggcgggttcttgcgccgcgccgcccgttgcctgtcttccctcgttgaggacgctgccgccaactcacgtcagacttagcggcttcttgccctgttcctcggccgcgcggagtcgcggcgccgccgtgctgggatgcgctctggggaccaagaggcagacgccgggtgttctgaaccggttgttctgtggatacatgcaaagagatgggcatgaaggagatgtaagctgtcaaggaagggatgacactgttatgtttggaccagatgatgatggtgtaaagattcctactcaggtagagactcttgtaaagggcactgcaatggttgctgaaccagaatacaaggctagcccagatctagattacctacaggagctgctggctattcagcagcaaggacctcgtgcaataggtttctttggaacccgcaacatgggatttatgcatcaacagcttattgagatcctgagctatgctatggtcataacaaaaaatcatatattcacatctggtgcttctggaacaatgcagctgttatcaggggtgctttaagagctgaaaagcagagctgcttactgtaattttacctcaaagcctaaagaagcagcctcctgaaagccaagaactgttgtctaaagtacaaaacttgatcgagaaaccacagtatgatcatttgccactaattgaggctagcaggttatgcaatatggacatcatctccaaggtccaacaggtgatctgcttcgcgttccatgacagcaagctgctgatggaaacatgccaggaggccaagaaccttcggaagatcgtgacactcttctacttggattagctcctccgacatggatctattctccttttttttttgttcgtggcgtaggctaatgttggggggataaaaagcaagttggacggtttagttagtttcgaaatatactggataggtggtgggatgaccttccattggatgagaaagtcattttgtttcgcccattgttttgattcttgtcacaaagaaaccaataatcttgtcgatatgcctagtcgaagggattataatctggacattatttgttgttgatctcaggcttataattagttcgtgctccagtttttcc

SEQ ID NO: 103359 - DNA, 555 bp, Zea mays
  Clone ID: MRT4577_25769C.1
ggtgcctaaaaatcccaaggcaccgacccctgcggctattcacaggcactcctttcgcctcatagagagtaatcaccatggggagagaaggtagaagggagtagaggtctagggcgttgccgacgtcgtcttctgccatcacgtcatccagtgctcgtgtggaggtcctggggaaccaacgtgccgtaagggacctgggcgaacctctctcgtgcaaggattcggccgggctcgccgggaatttctcactgacgcaagccactgccgtggatcgagctctgctgtggccggagcgctacgcgacagaccctctggtgaagagcaggtggcctcggaggaacactactacgaggagtttgacgaggtctaggagtcatctcccagtcgacttaatggcgtcaaggaaataatattagttcattttatttttatcagttattttgtaagacattctcgttatgtaataatgtttgtgacatttatctctatacacttggtcattgtatgtgttcttcttctttggcacatatgagacgcacccgagtttaccccctt

SEQ ID NO: 103360 - DNA, 211 bp, Zea mays
  unsure (1)..(211): unsure at all n locations
  Clone ID: MRT4577_2576C.1
atccccaaaccctatctccctatctttattgctaacccttncgtcttcttctacatgagggtctactggggccccggctgacctgatcttaatttatctttactccaactatgttcccaatacctctgataacttcctctctctgtgcactggcaataatgtcttatgcaattcctttaagcctctccactacaagggcttcacctttcac

SEQ ID NO: 103361 - DNA, 541 bp, Zea mays
  Clone ID: MRT4577_25770C.1
aattcgccgaggcataccatcttcccgatcaaatcttgaagcctctgcagctaggcccctccaaggctcttgggtagctggccactgtcaccagtcaattttctgtctgttctcgcattcagatccaatgacttagacccttactcagccaagctggggctctggtgcgggagggggtcaaggacacgtaacgtgcgcatcagcatcttaatggtcgcaagacctgactaccgcccaggcatgaagaatgagttcatctacagcaagatcctcaaagaactaaagaaagaattctgctggaatggcacaggggtccaagacccagaacttggacatgtatttcagctgcagggtgatcataagaagaacgtctggagtttactcgtgcaggccggaattgtgaagaaggagcacatcaagaaacatggtattctgagctaccgccaggtccatagcaaaccaaccctgcatgcaggggccagcttattatatataaaatctgggggtggagcatatctatccgggcggggggactacaagc

SEQ ID NO: 103362 - DNA, 727 bp, Zea mays
  unsure (1)..(727): unsure at all n locations
  Clone ID: MRT4577_25771C.1
cctacgcgtccgccctcgcgtccgcccatgcgttcgcccacgcgtccgcccacgcgtccgatcgagaggacgccggggccgattctctgcgtgacttggggcgtcgtcgccgagttttctccggccgagggcggcgcgaccggacaaccagcgtgagcgcgaccggcgacatgactcgcggcaaccagcgtgaccgcgatcgtgagcgcgcggcggcgcggaagcccaacgccaagaacccccaggacgggctcaccccggagcagcgccgcgagagggacaagaaagcgctggaggagaaggcggccaagaaggcgcagcaggcagcggccggcggcaccgggacctccacggacaacaagaataaggcaggtggcaagaagtaggccgcagcggcgagcggcgccacctctgtacgattatcgatccatgcctttagcttgtaacctgttcgcatcctcgtagatgcgatgcttgttgggtcataaactcgttttctgttactctgatatcaaaatttggtgatgagaataatacgtggtgttctggttttcgtgggttaaaaaaaaaaaaacataaaaagtaaacggaaagcccatcacggncgnctggttggagaagatgctccattcagccccggcccacggcaggctcccggagtgcttcatcttcccggccgacaagctcccgcaggccaaggccacctaagcgacggtctccctgccca

SEQ ID NO: 103363 - DNA, 471 bp, Zea mays
  Clone ID: MRT4577_25772C.1
gacaccacacaactccatctttcacaccgtgtttccggcggctgccagtccgggtgaggtggaagggcaccgatgctgtaccgggttgatcagtcactgcgcatgacagcggtgactacgcgcgcgctgtctgacatgcttacaactacacgctctgcagggcacgtactacatcacagtgacgccaacgaggactagcaccaccatagcgcgctactgcttgagggtgactactgcacaactataagaccaatgcgcacgccagctgaggagaactctagctgaggatgaggtgactggataaccacaacactcacattggccatctgtgagaagagaaccatggtcattaaatgtcaatgaccgctatgactaataaggtcaactctggaccatagagcaaatcctcatgaaactatgaggaatagaatactaatttggcaagctacagcaagacaggcaggagagccg

SEQ ID NO: 103364 - DNA, 2205 bp, Zea mays
  Clone ID: MRT4577_25773C.1
aaatcgaaacaaagaaagaaaaaatcgagaggacgccagggccgattctctgcgtgacttggggcgtcgtcgccgagttttctccggccgagggcggcgcgaccggacaaccagcgtgagcgcgaccggcgacatgactcatatccttcccaaaccccgatcatggatctgcgcatagggaaactcttgctctaatccatcttttgcttgtatacgatctcgatctgtttcgttgtttcgattccctgttcctccttccttaacttgcgcgcacgcggcaaccagcgtgaccgcgaccgtgagcgcgcggcggcgcggaagcccaacgccaagaactcccaggacgggctcaccccggagcagcgccgcgagagggacaagaaagctctggaggagaaggcggccaagaaggcgcagcaggcagcggccggcggcaccggtacctccacggacaacaacaagaacaaggcaggtggcaagaagtaggaggcagtggcgcgccgccacctctgtacgattaatcgatgccttgagcttgtaacttgttcgcatccttgtaggtgcgatgcttgttgggtcataaactctgatgatatcgagatttggtgatcagaataaaaaaaaaaaaaaaaaaaaaaaaaagaaacaaagaaagaaaaaatcgagaggacgccagggccgattctctgcgtgacttggggcgtcgtcgccgagttttctccggccgagggcggcgcgaccggacaaccagcgtgagcgcgaccggcgacatgactcgcggcaaccagcgtgaccgcgaccgtgagcgcgcggcggcgcggaagcccaacgccaagaactcccaggacgggctcaccccggagcagcgccgcgagagggacaagaaagctctggaggagaaggcggccaagaaggcgcagcaggcagcggccggcggcaccggtacctccacggacaacaacaagaacaaggcaggtggcaagaagtaggaggcagtggcgcgccgccacctctgtacgattaatcgatgccttgagcttgtaacttgttcgcatccttgtaggtgcgatgcttgttgggtcataaactctgatgatatcgagatttggtgatcagaataatgcgtggttttctggctttctgttctgtcccattccttgaatggctgaatcatctagagttaggatgtggaggaacttttgcttgctgtcaacacatgtatgctgtcagttaacttttttttagattaaatagtgaatcatgccaattgccaaccaaaaaaaaaaaaaaaaaaccccggagcagcgccgcgagagggacaagaaagctctggaggagaaggcggccaagaaggcgcagcaggcagcggccggcggcaccggtacctccacggacaacaacaagaacaaggcaggtggcaagaagtaggaggcagtggcgcgccgccacctctgtacgattaatcgatgccttgagcttgtaacttgttcgcatccttgtaggtgcgatgcttgttgggtcataaacatgatatcgagatttggtgatcaaaaaaaaaaaaaaaaaaaaaaaaaaaaaaaaaaaaaaaaaaaaaaaaaaatacgtggtgttctggttttgtgggttaaaaaaaaaaaaaaaaaaaaaaagaccagcagcggctcatctttgctgggaagcagcttgaggacgggcgcacgcttgccgactacaacatccagaaggagagcaccctccacttggtgctgcgcctcaggggaggcatgcagatcttcgtgaagaccctgaccggcaagactatcaccctcgaggtggagtcttcagacaccatcgacaacgtcaaggccaagatccaggacaaggagggcattcccccagaccagcagcggctcatctttgctggaaagcagcttgaggacgggcgcacgcttgccgactacaacatccagaaggagagcaccctccacttggtgctgcgcctcaggggaggcatgcagatcttcgtgaagaccctgaccggcaagactatcaccctcgaggtggagtcttcagacaccatcgacaatgtcaaggccaagatccaggacaaggagggcatcccaccggaccagcagcgtttgatcttcgctggcaagcagctggaggatggccgcacccttgcggattacaacatccagaaggagagcaccctccacctggtgctcc

SEQ ID NO: 103365 - DNA, 2326 bp, Zea mays
  Clone ID: MRT4577_25774C.1
attgggtacctcgaggccggccggggacttggccaggtgccccagctatggtcccgcggcttcccgactcttccagcaggaaccgagcgacctcggactcagcggctccgcctgtcggcgagcgcacgccgcgtgcctgcccgcggtctctcgtcgtctccagaagatgcgccccgatactcatctttccacccttcttctacctccttccacccccttctccccacgccccatcggatcgcacgcgccctgcaattgttgtgttgttcatcacctctccgaagaagcgtcacagagcaccgcccggaggttccccttcccgtcgccgtcgccgtcgcttggccaagatggctgaacaattctataccgtggcatcggatagtgaaaccactggggaagacaaatcacagccttcattccctgatgttgctgttggcattgacattgggacttccaaatgcagtgttgctatttggaatggccaccaagttgagctcttaaagaatacccgtaatcagaaagggatgaggtcatatgtcatgttcaaagatgatactctttcagcaggagttactggaggtgcagccaaggaaaatgcacacgaggaaagagacatcttgtcaggaagtgccatattcaacatgaaacgcctgataggaagaatggacactgatgaagtggttcaagctagtaagaccctcccatttcttgtgcagacattgggtatcggtgtgagaccattcattgcggccctggtgaacaacatgtggcgatctacaactccagaggaggtccttgccatctttctacttgaattgaaggccttggtggagatgcaccttaagcatcccgttaggaatgctgtgcttacaataccagttgcgttcagtcggtttcaacagaccaggattgagagagcctgtgcaatggctgggctgcatgtgttgaggttgatgccggaaccaactgctgtggcgcttctgtacgctcagcagcagcagcagcttgtgcatgacaatatgggaagcggcatcgagaaaattgctctgatatttaacatgggtgctgggtactgtgatgtggccgtggctgccacagctggaggtgtttctcagataagagcattatcaggatgcacagctggtggggaggatatactccagaacataatgcgccatgttcttcccaattttgatggtatatatgctggccagacaatggatagaatcaagtcgatgagcttactgcgaattgctactcaagatgcaattcacaggctcgttagtcaagaatccgtggagatcaatatagatttggggaatggccacatggtgtccaaagttctagaccattcagagtttgaacaagtcaaccgggcaattttcgacaagtgcgaaaagatcatcaaccagtgcttggctgatgcgaagttggtaccagaggacatcaatgatgtcatactggtcggaggttgttcgaagatccccagaatcagaagccttgtcctgggtttgtgcaagaaggaggtctcttacaagaacatagatgctctagaagctgctgtttcaggtgctgcgctggaaggagccatagcttcgggagtgaatgatccttcggggagcttggatcttctcacgatccaggcaactcccatgaacctgggaatccgtgccgacggtgatagcttcgctgcgatcatccctaggaacacgacggttccagcaaggagggacatgctgttcacaacgacacacgacaagcagaccgaagccctaattgctgtgtatgaaggagaaggggaacgtgctgaagataaccatctgttagggtacttcaagattactggaattccggcagcccctaagggagcagttgatatcagtgtatgcatggatatcgatgctgccaatgtcctcagggtgttcgcaggggtcgtcaagcctcaaggcccagccattccaccgttcatcgaggtgaggatgccaacgctggacgatggccatggttggtgtgggcaagctctagcaaagatgtatgggaggattctcgaccttgctgttcttccgaagaagctgcagccatgatatgtggccttccgaggcctcgtaagtagctggtgcgttgtgcgaatgtagcggatgctcagtgttcagtattcactgtgtcactgtcccccgtcttgtgtgggcgctgtctatgtgctgttggtgttgggcagtcttcagaactgaactaccagtttcatccttgtgcaataatgtctcgtacatgtgaaatgaatgttgcggatgtttgtacttcatagttttcaggatttgttgactgc

SEQ ID NO: 103366 - DNA, 430 bp, Zea mays
  Clone ID: MRT4577_25775C.1
caattatgatttacaaatatcataggggtatcatcatctttctcttcattcttaccgctcaagtcttggacctcttccccttcgtagttttatgcacgaagctcttcttatgccgaagctggctttgcaccatcgtggcttgtaacttcgctgtacgtgcattcaaccgaagcttctttatgctactttggtcgaagttcatcttagtccgtactttgcttatatggttgaaacacattttcttacatcgagagtaagtcattttgaagacattcggcaaggtaggccccacaagttattaagcatgcatatactataggataatcatatcttagaattgttttgtttagtttatacccttggagtaaacctacatggtttaaaatgattagaagcacgaaacataggttgtctaaaattccactatacc

SEQ ID NO: 103367 - DNA, 535 bp, Zea mays
  Clone ID: MRT4577_25776C.1
ggggggcccccccagctggcaaccgctgcggcggtccaggtccaaccctcggggattctactacaggtcacagcattaggtcgcccctcgcccctacccactctcaccagagacctcaggcccggtcagtggcgaggcccgggaaccttaccatagctaccctcacgtcaccggccagcacaatcggacgggggaaaaagggtatcgacgtaagggtaaaagaactggggtattcggccgggttcttacacgagggcacccacctcactgtcacaattaaatgtcgaaagaagggacacacaagtgcggtaagtctgtgtcgtcaggacatgctaggaggagttctaactacggattcaggtacacgagctaggggtaccccctttcgagaacgttggcgcgctgttacactcgagagcgacttgacactgttacaccgaaggaaggatttacggggaagtgaccagagtaaccggagtttttttttaactcggcgtgtgtgtcaaagtaaaatgccactcaaacgcttccactt

SEQ ID NO: 103368 - DNA, 177 bp, Zea mays
  unsure (1)..(177): unsure at all n locations
  Clone ID: MRT4577_25777C.1
gacctttattttttatcaaaaaattnggccctccggccatgcatgtgtcgtcttgcatgaacgattcattattacaacagtagtaacttaacagaggtaggacagtttatacaaaacgcaccaccctgttagtgctagctccttttgtaacaagaaaccaanctgaagtttcacaag

SEQ ID NO: 103369 - DNA, 149 bp, Zea mays
  Clone ID: MRT4577_25778C.1
aaaagagacaccacgccggccgcgaggaatgtcgcttgaaggccgacagacgcggcgggtgcgactatcgctctgagccgatgataaatgcccatgtggctctaacttcctatcatcaattgcaccctgccgatagcccattcagcaca

SEQ ID NO: 103370 - DNA, 426 bp, Zea mays
  Clone ID: MRT4577_25779C.1
aaaacagaaacgggccccgcctttgggaaaatttaagggaaaaccccccaattatgaaaagggcccccacaaaaaaggggaacaatggaaaatcaaaggaacaaagggggccttgtcacccacgggggacccccttgccaaaaaatccccaatttttatggggaactgggacgggggggaaaaaacacttcgttgggggtccacaaaccccgggaaactttgggtgggaaaagccaaaaaaaaccaaatgggggaaagggggttctcaaaccaaaaaaggaattttaggggaacattaaaaaagctttgaaaaaattttcacccaaaggcctttgttaaaagggtccaaatatgaaaacaaaatgcccaagacgagagggttttggttcaaaaatttaaagggggcccccaaaaattttttaaagg

SEQ ID NO: 103371 - DNA, 360 bp, Zea mays
  Clone ID: MRT4577_2577C.1
gggaagaatggggggccgacccgccggcggacgacttgtttgattgattcttcaaaaaatcgagcttcttttgcaccacaaggtccacgatgttttgccgctacagctcaagcttcagatgatgctccagctgcttgagcggatacaactaccctgacctggaggacactagcaccgtcatgcagtccaacatcatacttggagtggccccgaggaagaaagccattcccaagtttgtaaacgactttgaccactctcgaaaaggcgatcaccggtgcactttcgagatcggtttggagttcgaccccttcaactgctgatcacatcgatccgacgaccatggatatgactatgatctat

SEQ ID NO: 103372 - DNA, 666 bp, Zea mays
  Clone ID: MRT4577_25780C.1
cccacgcgtccgcttccaaataacagtgtcattttttcttcttgctgagttctgtgttgggttcattgcagaaaaacgccaaggttgttgctatcgccagctatgaagatgtaccagcgaacagtgagaaaagtctgcagaaggcagttgcgaaccagcccgtcagtgttgcaattgaggctggtggcagagcatttcagctctacaactcggtaactgacactaaccttgctgctgggttcatctgtggaccatctcgttaaattcggagatgaattatggaatcagctagtatctgattatcagtgggtgggaatcagttgatggtatatccatggccatgaaagaaaaaaaaagatgtgccttgaacaagacatgcacatgattgctcgagtcgagtcacctaattgcttttttttaaaaaaatctgccttgaacaagtacataacatctgtacactgaaggttattttcactggaaggaatgattctgttggcactccgcaagttgcaactactacatgaattatgataccttgttcatagttcataccccgacttagtttactacaattcacattacgtattggcaacttttgcgatacaatagtgcttcagtacccccaccacttctcacgaatcatgctcctttgtttttgtcaaagac

SEQ ID NO: 103373 - DNA, 586 bp, Zea mays
  Clone ID: MRT4577_25781C.1
caccgacgtcgcggagctccccagtaatgggcaacagcgggcgtctgctttgttgttctactactactcctcttactacttactgaacgaaagacgctgttgaggcagccgcggcagcccggtcgtcgatcgccgcgcgcgccggggtggattccgacaggaacgatctggttccccggcagcacccttccgccgtggctcgacggcaagattccctgcagacttaagctttgatccctggggcctgggatctgacccctagagcctgtggtgaaacgtgcaagctgagcttgtgcactgccggcgggcgatgctcagcgcggcgggtatcttcatcccagcagttactgacacaagatcggctttctcaacacgcccttatggtacaccgcatgttatcagcagtacttaacagacaccaccacactgttcatcatctagctcaatctaatgggctgggccgagggcctcatttacactgacatcatcaatccctgaagcatcaacaccgatcccatgttccccagcaacaagctcaccggcaccgacgtctggtaccctggtggcctgtggtttgacccgctcg

SEQ ID NO: 103374 - DNA, 430 bp, Zea mays
  Clone ID: MRT4577_25782C.1
tggcagctgtgctggacagcaggaagacaccccacgcggaggtggacgcgctggcggcggccgggctgctggcttcctccgcttacgcggcaatcacctgcgggcagttaggagtcggcacttgcgccgtgcagggggggggcgactggaaaggccatcgcgctcccagcatcacgcttgaacacactcaagagcctgaacagcgctgagcggaccaccgcggaccgacaggctgcgtgccgctttctcaagagcctactcaacaccgtaaagtagcgtgaacatgggcaccgtgtgcaccatcccctggacgagcggggcatccgtgtgcttccccatgagcatgtgcacccactgcctcaagatcagctgctgtactacgcaccaagctaataagcctaccgaacgtacacaaccgtaacgcccgctg

SEQ ID NO: 103375 - DNA, 284 bp, Zea mays
  Clone ID: MRT4577_25783C.1
gcgtctcgaccacgtcgcagttcgatgacatcttcactaaggggctatcgtcgagtgtattcattgagtttcgctgcagtctcaacatcggtacatgatagagttgagactgcggggagggggtgttagactccttgttagacatctgtacatgatacctgatgacccatattgtaatgggcttggctcatctaacttctctatataataatactcccaaccctggattagggttagggtttcccacattctaactacgcaaactgacatatttgttatttttc

SEQ ID NO: 103376 - DNA, 605 bp, Zea mays
  Clone ID: MRT4577_25784C.1
aaattctatcatcaccatcggcagcatctttccatctcactgctcctgctcctgcttcttgatgccgccaaagcagccatatctgtgccggactcaggaagatcacaatttcaaatctctcgactgcggcgtagcgtctcacgacctacactattcaatgtgtgaccgtgctgaaaaactagttgatcagattcaaaaaccggccctgcaaggttgaggaggtttctacctcacagactgggaaccatgaacatgccctgtggcactttgttgacatatacatattccacgtaaaaaagattggacatattgctccttcatcaaactactgtgatattccgcatgcgaaccgtattgagcaccaggtgattgatatatcagaggatggatttgtgagccttcttacttcagatgggaacactagggatgatcttagactcccaactgatgagactcttgtggcccacatcaaggaaggctttgaaagcggcaaggatcttgttgtgactgtccagtctgctatgggagacgagcagatatgcccgctgaaggatggtgctcccagtcacttacctgccgtggaatactgaatctctaaatctaaa

SEQ ID NO: 103377 - DNA, 822 bp, Zea mays
  unsure (1)..(822): unsure at all n locations
  Clone ID: MRT4577_25785C.1
ctcgaggccggccgggccgggaggaactgattcacatgtcggtaggtcacatgcggtcggatggtgagagcctgagagggggtggcagcaccatggcgcgcgcttcaccgtccgtcccgacgcgtcggtcgagtactcgagtcgtcagcggtcggtcagcactcggcacccgattcttccaaagccgccacttatgtcctcgcgagcttggttaataacgccgcgtgagctgggtggggtgggggagtttgtcagctgggtggcgcgagcgtcaggcgatggcggaggcggaggagaaggcgaggtcgtggtgggtggcggcggcgtcgccggctccctcctcgccaagactatgcagggccacgccgacgtcgtcctcctcgacccgtaaggcttcttcgcccgctccctccctgcgcctgctacccgtttgcggaaatcccgagccgaccggctgcttgctttctctgactgggtgccgggtgcgtgtgtcattgagtggctgtgcgtgcttccacggcccatgtntggtgattcggtcgccttggctctccaccggtatggcggccccgaatcattgcggccctagagatatgaccggatctagtattgcatcnggngaggggggtaaaaattgggggatggactttgagttttcttttctacagacgtacttcaagctctgaatctaattgcctgatccatttctgtgcttatgacagcttancttaatagcctgatgttgaatgcatcacctggttcacactaaatcattattagaaagtcccttcatacatgctatatattctcctctgatgatga

SEQ ID NO: 103378 - DNA, 367 bp, Zea mays
  unsure (1)..(367): unsure at all n locations
  Clone ID: MRT4577_25786C.1
acgcacggcccgccaccggggcgttcatgcgccagctccacacgtgcacgcgcaangccgccgacaccgncgactacctgctcaccctcctctccgtcgccggcgcgcgggaccaccgccccggcgtgggccggagcagcgaggcggagctgcgggcgccggcgccggcgcccgcgcaggccggccggagctgcgaggcgcagctgcaggcgcagccggaccacgcggcgcggagccggaacctgtcgtgggccacgcacccggcgtgcgcgccgcgcgggtacgtgcactacctgcgcctcaactactgcgccttccgcggcgcgccgtggctcggggccgccgcgctcgcgctcaggctgctgct

SEQ ID NO: 103379 - DNA, 930 bp, Zea mays
  Clone ID: MRT4577_25787C.1
cattgggacctcgagccggcctcaccgtcgctctctaccgacgagcatgtcctctcctctaactccggatccgccgaggaccacccgcaggctgccgcttccggctccgtcagcgcgtcggcgtccggcgacacgggggaggaaaacgagcgcctccggcgggagaacgcgcggctgacccgcgagctcgggcagatgaagaagctctgcaacaacatcttgctcctcatgaccaagtacgcctcctcccagcagctagacgcctctgcagcgctctcctctgtcgtcaactgctccggcgagtcatcggaggccgtacccgcgcctccgcccctccccccggcgatcctcgaactaatgcccgcgtgcccgggtcttgccaccgcggccgcgggcctcgtcgccgaagcggatcctgaccaggcctcgaggctgttcggcgtctctatcggcatgaagcggatgcgcgacgacgacgacaccggcgaggaacaggcggaccacggcgccgcagcggatgtgaagacggaggcgtcggatccgcagcatcgcatggagccgtcgccggagtcgccggaccagcatccgtggcccatataccggcctacgcccgtgtaccattcgatgcggccctgcaacgggccggaccagggcgccgggtccgaccaagacgggtccaactccaggtgattgggcccaccgcaccttgtagaagcttctagttctaattaatcaattgccatatcggcaactaattattatcctagagaaacataataatactatattttcttctgtttttcctttgctagttggggattggaagcttctctcccttgttgtaatctgtgcttataaatcagcggttaaaatccatgaacgggcggctctggtgtattttattttatatatatgtgcttgttgttagat

SEQ ID NO: 103380 - DNA, 558 bp, Zea mays
  Clone ID: MRT4577_25788C.1
ccggccgggaatcgagtcgtcgcccaatcggttgaatcggggagcagaggcatcgcccccaaatccccagaagcacccacccctccgcgcgcgagatcccacgcgcctccctcccactaccaccccggggacgcggactccctcctccgtcctcctccccaccgcggtcccagcccagcggtggccctgcgacgaccgatggacgcggcggcgaagaagatgacgcggagcatctcgcggcagctctcgtcgggggcggcgcggctgtggcgccagctgtcgctggacccgcacaccccgcgccgcggcggcccgggcccggtcccagcggcgggggccgggcagacgcggttcgcgatcgccaggcagtcgtcgctcgacccgacgccgcgcggcgggccggacgggtcgtcggcgcaccagcagctcgcggtgccggagaacctggacgccaccatgcgcctgctcttcgccgcgtgccagggagatgctgctggggtcgaggagctgctcaggagcggggtggacgtcgacagcatcgacctcgacggacgtacg

SEQ ID NO: 103381 - DNA, 485 bp, Zea mays
  unsure (1)..(485): unsure at all n locations
  Clone ID: MRT4577_25789C.1
acgaaaagagcaggnanaaagngaccaggcaaacggggcgagcanagnncagacaaggacgggaacaagacgaagaanggnaggnnnccaccaggnancccgcaagcaaacacagaaccagccagacggggggggggggcnnngcggcagccccggncaccggggcnnccaggggggccggcngccccacacccgggaggaccccgacagccaccgggggccccagggcacggacagcaaagcgaccaagaggagggaanncagaaaagggccccaccaccaggggccaagggggaaccancnncaccanaccagcancaccaggcgcgagaaaaaggggcgccnncncaagccccgggccagaccgccgagcaanccggggaaggagccccgcaaacccgacagcaacgggcgaggggggggccgccaccgccggggcagagccgcngccaancggcccaggggggggcagggaggagacccgg

SEQ ID NO: 103382 - DNA, 376 bp, Zea mays
  Clone ID: MRT4577_2578C.1
ttttttttttttttttttttttttttttttggtgttttttttttttttttttttaaaaacaaacccccaacctttttgggaaaccccttgaaaattttaggtttaaaagtttgggaaatccaataggattttgggggaacccctcttaaaacttccaaaaatcaacctgccttcttgcaaaaaaaaacccccccctcctttggtatcacttggcaagccccccaatcattccatggcccccataaaacaacccatccttttgaagtaaagacaaaattcccccaagcagccttttttgaaaggattttttaaacctgcaggggcaacccgatcttgctgttcttaaaaccttggtggccttcaatctgccaatatc

SEQ ID NO: 103383 - DNA, 1340 bp, Zea mays
  unsure (1)..(1340): unsure at all n locations
  Clone ID: MRT4577_25790C.1
ggctggtcgaccgggtngatcgagttctcgagcagagctggagcacggatgcatgccagatgtcatcacatacaccacagtgatcaacggtttctgcaaagaagggctcatcgacgaagccgtcatgctgttgagaagcatggccgcctgtggatgcaggccgaataccgtaagctatactatcgtgctcaagggtctgtgcagcgcggaacgatgggtggacgcagaggagctcatgtctcagatgattcagcagggctgtcctccgaatcctgtcacgttcaacacactcatcaatttcttgtgtaagaagggaattcggctggttgagcaggccattgaacttcttaagcagatgctagtgaatggatgcagtcccgacctgattagctacagcacagtgatcgatggacttggcaaggctggcaagacggacgaagcactggagctgttaaatgtgatggtcaacaaagggatgagcccaaacacaatcatttattcgtcgatagcttctgctctctccagagaaggcagaattaacaaagtaattcaaatgtttgataacatccaagataccacaataaggtccgatgcagtgctctacaatgcagttatttcttcgctttgcaaaagaggggaaactgaacgtgctattgagtttttggcatatatggtgtccagtggatgcgtgcccaatgaatcgacctacactatacttattcgaggtttagcaagtgagggatttgtaaaggaggcacaagagatgttgactgagttgtgctccaaaggtgctctaagaaagcacttgatgaagcattttggtattgtatgaagtataaactgatagttactgtttgcaaatgtttgagaacatccaagataccacagtaaggtccgatgcagtgctctacaacgcagttatttcttcgctctgcaaaagaggggaaactgaccgcgctattgagtttttggcatatatggtgtccagtggatgcgttcccaatgaatctacctacactatccttatccgaggcttagcgagtgagggatttgtaaaggaggcgcaagagatactgactgagctgtgctccaaaggtgctctaagaaagcacttgatgaagcattttggcattgtatgaagtataaactggtagtcactgttcgcaagtgctggtgttatcaggattggttcctaattagcctgaaggtgtcatccgcattgttttgctcctggaccacccaacccgtggtggttaggcatgatgtatcacgctgctcaaatgtaggctttgacagatggacgcacaaagtcaggctcaaaggctttcatatacattcct

SEQ ID NO: 103384 - DNA, 431 bp, Zea mays
  unsure (1)..(431): unsure at all n locations
  Clone ID: MRT4577_25791C.1
atcagctgctttcttgtatgtcagccttagatccttccaactcttttgcttcttttgatgcacacaaggtacgaaagctagctgatttatatcctaatgacatgtcaagcattgacttgttaaaacttgacttgcaacttgacaattatattgatggcataagagaagatgatagattcaaagacataactaatcttgtggacctctcagttaagcttgttgaaacaaagagacataaggtgtttgatatggtttatttgcttctcaaattggtattgcttttgccggtggcgacagcaagtgttgaaagggcattttctacaatgagtttggtgaagactaaattgagaaacatgatgtgtggtagtcttttggatgattgtctngttacatacatcgagagggattatttcttcgaagtgaatgaagaa

SEQ ID NO: 103385 - DNA, 356 bp, Zea mays
  unsure (1)..(356): unsure at all n locations
  Clone ID: MRT4577_25792C.1
ttttaggactttttctagatcgcgagaagggcgnnntgtgggttttttggttgcccaggcctaacccggnctgacccgtttttatacaggcctaggtctggacagaaaactaatcacggtgaactcgttcgacacagtccgtttacctctaatcctgtcaaacccgcttttttgcactaaatcgtacttactggcccgttttttggctcgcttttttcgtgcttaccagactggcccagccgtttagggcccgcagcgggccggactcagataggggaacgagcccacgggcttagacggcctggcccggtttttctaaccgtgtctagcgggccgggccaaaaacgggtcgagtc

SEQ ID NO: 103386 - DNA, 358 bp, Zea mays
  Clone ID: MRT4577_25793C.1
ggccgcttttttttttttttttttgagcggaggggtttgtcactcatttgattctagcaggaaggcaaaaaatgaacggcaaattgaacaacatggacggacggcaaactagacacaccaaatgacaccgcaatgggaaaccgatggcccactccaaattacacagtaccaaaggttgtgatatcagtgggtgcgaccaaaacggctgtcgcaaagataaatcaacctaaccaatcaattccatcgggtaagaaaggcgaaaacttcgccataacctccccagaaccgggccgccgcccgaacggctccatttccatatgactgttctatatccaagcagcgtcggctgccggacccc

SEQ ID NO: 103387 - DNA, 289 bp, Zea mays
  Clone ID: MRT4577_25794C.1
ctgggggttttttttttataatacatccttgagctcaagatgcaaagcaaatcttctacctccaactcggttgtcagacatgaaacatacttaaaaataatcctatagcttcgagtctagagcaactataaatatccactagtactattgtttccacaaggctgcatgtcctatagtagctcaccaaacttaagaaggaggcactttcctgtaattggagctttatagctgaccaagaaggttgttgttctgttccatcaacctcttcatcctataaataggggccggt

SEQ ID NO: 103388 - DNA, 161 bp, Zea mays
  Clone ID: MRT4577_25795C.1
atgccaagctatctgtcttctcgcactagctcttggtgctgattcagagatggcggggacaatccagtccgtgatggcgcgccagatctttgacagccgcggcaaccctacagtcgaagtggaggtgttgtgatcatatgcaacctttggaagggcatctg

SEQ ID NO: 103389 - DNA, 754 bp, Zea mays
  Clone ID: MRT4577_25796C.1
ccgggtggtactaaggactggtgcaagaaggctgttaatgcgctcattactgagattggcgtgatctgtatccaaaaactctagattcatccattcatgactttgctaatgcttctatggccactgcttatgaaaagaaatggccattgtatcttcgtaccaagaacactattttgaagaaatatgatggcaagttcaagtatcttcagtttcttgttttaccatatccaatctaacttgtgcatgggccttcgacgacgccatggtgatcaaggtagacagcgtcaatagccatgacacgttgctcgccgtcgtccagttcatcgccgacctcaacctcatcatctataaggcatacttctcctctgatggcagctggttcatggacgtgttcaatgttaccgaccgtgaaggtaacatggttctcgacgcctaccatcttacgtccagaagacgttggaggcggatgactggtactacctagaggcacgcaacacggtgggcatcgtggcgttggaggactacacctccattgatctcacaggcacagacccgggcctgctattcgaggtaccgcgaacatgttgtatgaatcaatagagacaccaagttgaaacttttatgcacccaagaattaatactttgaaggtgaccagcagtacacacaatagttccacacgtccagctaagggtgttgatggctaggacctctttcaaatggagcatgacctcagtaaatttgggtacttttcag

SEQ ID NO: 103390 - DNA, 1232 bp, Zea mays
  Clone ID: MRT4577_25797C.1
ttgggtacctcgaggccggccgggatcgacgtcgtcccgaccttcttttcaatcccgtctcggattcgttccgtcggagctaccgcgaccacgacgccgacgcgagagggcagggaacacagccactcgccgacgagaccccggcgcgcgcgagagaaagagaagagaggaggatcttttgttcgtgaaaaatattggaggcggagggaaggtgaaggagggggatcggagatgaacgtgttccggctggcgggggacatgacccacctcctcagcgtggtagtgctgctcctcaagatccataccatcaagtcctgcgcaggcatatctctgaagacacaggagctgtatgcacttgtttttgcagcacggtacctggacctgtttgttcattttgtgtctctgtataacactgtcatgaagctggtcttcttggcaagttctttctcgatagtttggtacatgaagcggcataagattgtgcggaggacatatgacaaggatcatgacacctttcgccattacgttttagtgttgccttgtcttcttctggctctcctcattaatgagaagtttacttttagagaggtgatgtgggcattctccatttatttggaagctgtcgcgatatttccacaacttgtgttgctacagcggacaaggaatattgacaacctgactggccaatatgtcttcttcttgggtgcctaccgtgtgctttatatccttaactggatttaccgatacttcactgagccccattttgtccactggataagttggatggcaggaatagtgcaaactctgttgtatgctgacttcttcttttattacataatgagctggaagaacaatgtgaagctagagctgccagcttaaggttgctgctcctgtccccaagatatagtagggtaatatatcagataggcaggccccatacacagcatgatcattgctatcgccaactgggttatgaaaaaagcattttagttgcgtggcttgtatcgccttgtatctctctgctattgttggaagaacaggaaagtcaggctcaccatgtaactttttacaataagctgcgtaagatcagcactagaaggttgtgaattgtgatcgtccttagggaattttgtgctgatgtaaccctttcggcaagtgattctcatacaatataatctcagactataattggtaataattaaaaaaaaaaaagcggccgctgttaaggtcag

SEQ ID NO: 103391 - DNA, 750 bp, Zea mays
  unsure (1)..(750): unsure at all n locations
  Clone ID: MRT4577_25798C.1
cattgggtacctcgaggccggccggggttctttctcgatagtttggtacatgaagcggcataagattgtgcggaggacatatgacaaggatcatgacacctttcgccattacgttttagtgttgccttgtcttcttctggctctcctcattaatgagaagtttacttttagagaggtgatgtgggcattctccatttatttggaagctgtcgcgatatttccacaacttgtgttgctacagcggacaaggaatattgacaacctgactggccaatatgtcttcttcttggggttggatggcaggaatagtgcaaactctgttgtatgctgacttcttcttttattacataatgagctggaagaacaatgtgaagctagagctgccagcttaaggttgctgctcctgtccccaagatatagtagggtaatatatcagataggcaggccccatacacagcatgatcattgctatcgccaactgggttatgaaaaaagcattttagttgcgtggcttgtatcgccttgtatctctctgctattgttggaagaacaggaaagtcaggctcaccatgtaactttttacaataagctgcgtaagatcagcactagaaggttgtgaattgtgatcgtccttagggaattttgtgctgatgtaaccctttcggcaagtgattctcatacaatataatctcagactataaattggtatttgtttgatatccttggctnaaaaaaaaaaaaaaagcggnc

SEQ ID NO: 103392 - DNA, 1542 bp, Zea mays
  Clone ID: MRT4577_25799C.1
cattgggtacctcgaggccggccgggagctagcgcgaccacgacgccgacgcgagagggcagggaacacagccactcgccgacgagaccccggcgcgcgcgagagaaagagaagagaggaggatcttttgttcgtgaaaaatattggaggcggagggaaggtgaaggagggggatcggagatgaacgtgttccggctggcgggggacatgacccacctcctcagcgtggtagtgctgctcctcaagatccataccatcaagtcctgcgcaggcatatctctgaagacacaggagctgtatgcacttgtttttgcagcacggtacctggacctgtttgttcattttgtgtctctgtataacactgtcatgaagctggtcttcttggcaagttctttctcgatagtttggtacatgaagcggcataagattgtgcggaggacatatgacaaggatcatgacacctttcgccattacgttttagtgttgccttgtcttcttctggctctcctcattaatgagaagtttacttttagagaggtgatgtgggcattctccatttatttggaagctgtcgcgatatttccacaacttgtgttgctacagcggacaaggaatattgacaacctgactggccaatatgtcttcttcttggggtaagagatctatatatggcagtatctaaaaatgcataaaaaacgaaaacaaatgtaattttcttagaaacaatgcattgaacaaaagttttgtatgaacaatatttgatcggcattgcctatatagtgaaatagacaacatggatgaattttcttattccgccttctgatattcgatgtatcatgctaggatcagtcttatccttttggacagagccttaatttgtctctagtttatatacgctattactaaagctgattcacttggttacgatgcagtgcctaccgtgtgctttatatccttaactggatttaccgatacttcactgagccccattttgtccactggataagtatgaattccttgtgccatccatttttattccttgaatgtgattcggagccgcacattatttcattaaagatgtttgcactccccattatggtaggtgtaaccgttattcatgcagccattttctttgtgtttttcttaacccaggttggatggcaggaatagtgcaaactctgttgtatgctgacttcttcttttattacataatgagctggaagaacaatgtgaagctagagctgccagcttaaggttgctgctcctgtccccaagatatagtagggtaatatatcagataggcaggccccatacacagcatgatcattgctatcgccaactgggttatgaaaaaagcattttagttgcgtggcttgtatcgccttgtatctctctgctattgttggaagaacaggaaagtcaggctcaccatgtaactttttacaataagctgcgtaagatcagcactagaaggttgtgaattgtgatcgtccttagggaattttgtgctgatgtaaccctttcggcaagtgattctcatac

SEQ ID NO: 103393 - DNA, 1596 bp, Zea mays
  Clone ID: MRT4577_2579C.1
cccacgcgtacgtcaaactattgttagctcggtactgatacattcatgacattatcttgagacattggaggcaccaaaacttaagaaaggcaggcatgcacaatggatatagtggcggaggaaggaaatgctgatgttggcaatactgctgaaccatcgtatgaggttgtgtctagaagtggttgttcagcacaattgtcaactaatgacactaatgaacatgaattggatatagagagcgaggatagtaaggtcagtgttggtaatgctgcaaaacaatcacacgatgttgtgggagtagacattgactgtattttcaatcatgtaaaagtgtcaactgaagccgatcttgggacacaaccggatgtgatacacctgacatctttggatgttccaaatgaatcaagtcaaataagttctgatgcggatatggtagagcagaacaaacaagatgctttggacacacttattagaatatcacaacataagaaaccaaagaaattgaatgtagctcgagttgtctctgaagattataagtgcaccccagaagatgttcagcttattgaatacattaaaacattaccggggaaacaagttgtggtggacatcgacagcgcatggttaaatagaaatgatatggaatgtctttttcatggtgacatccaagtgtctggcgaagccctcagtgcatatatacactgtattagggatgaagagcatttacttcatagagaaggtggaaaggtcttcttggagaacacattcatttccagtctgcttaagcgtgatggcgaccctaaggtgctcttaaattgtgttcattccaatgaatatagaaaattttcactggtacctggcagttctgaatgcaaaaaaaatgaggtacatgtacttgattctatgggacaacaaataacggatcgccgagacctttatactacattaaaaggtatagaaagacagattaaacttgcagcagaacataaagagctttaccaaggcaagtggtcgaaccttgatgttgcatcatggccagttatagagaagatcacaacacaaatgcaaaccgatggggtatcttgcgggctatggatgataaactatatggaatactggacaggatcctccctatctgataacgtaactcaggatgatataacaatgtttaggtttaagctacctgcaatattatgggactcgagattaaacacaaagaaaagacatcaaaatcttgaccacaatgtggatgaagatggagagagttcaagtgatgttcaaataattgatactccattaacatcaacaaacacgcaagaactgatgtttgtattatgcacatatatcatggggatagacaacgacaaatatttaaagaaacattggattcagagcactaaaccttatccaatttcgttaagtcttcaaaaacttaaagatatattggatgtaaataagccgatggataccgattgttttaacatggctgttcggatgatcgcatgcaatgatgccttgttcttgttggaagacaaataccactacatggatctacagttttgtgtatatttgtaccttcgttttagcagaaagcaataa

SEQ ID NO: 103394 - DNA, 263 bp, Zea mays
  unsure (1)..(263): unsure at all n locations
  Clone ID: MRT4577_257C.1
acaagaagaagcancagncnngngncnnaccacngncaagaacgagganaagcnngagnncagcaagaacnnggaggcnannaaggcaaacggcaacgacaagnnncgagaggncaggaagaagnggggaggnggcancanggganccaagncgcaggccaagaccaaggcccgggaaaagcngcncgccaaggaggcngcgcagcgngagacccaganngncnacngcngngncngcccngnagnnngacggggaagaaccg

SEQ ID NO: 103395 - DNA, 462 bp, Zea mays
  Clone ID: MRT4577_25800C.1
attcattattctttcttaaacacccacaaccccaaaaaaacccaccacaggaaccacccaaagggggcccccccaaaaacgcccctcaaggcagggggggggggggggaacaaaggcaggaattgaaaaagggggccaagggggcccgccaaaggcgccgccagcgggaagaaccgccccctctgagaacgggcccaaaagggacccccacccacaccggctaacgggcaaaacggggggcccccaaaaaggtcctaagaggcccgcgcggacaatgccgccaaaggaaaaaaccgccaaaattaccccgcgaaaaacacccggagggggcacaacggggggccggcctaaagggcataggaaacgcggccaattcggccaatgggaaaaaccggaaaaacccctaaaggaaaaaaaggcagcgaaaaaaaagttgcccaaaggggtgcccccccaggggcc

SEQ ID NO: 103396 - DNA, 1032 bp, Zea mays
  Clone ID: MRT4577_25801C.1
aagcagtggtaacaacgcagagtacttttttttttttttttttttttttttttttatttttttttttttattttttttttttttttttttttttttttttttttttttttttttttttttgaagcctaatgctatatataaagtctatttcaaacttcactcaatagacagtgtggtctactgtttacatgaccatatgcatgctctgctaagagcagcctaaccatagccaggttagactcagggttgctgcgtgctcggcgttcccttcatcaaaattaaaagtaaccactagccccgaccgtgagtttcctcagttgcatattttgggccactttgtcgagctttcccaacaactaacgctgccaagttaatgacacacttaaatatctggcttcattggccaagacatgccttcagtctctggacttcacctacgaggttggagttcatctcacaagcatccttcaagatttcaaatctccggtcaagctcactgctcttggaatcctgtgcgatgccttgctgaacgaagcacttaagcataacctcatgatgccgcttctgtgcatagcaccggataagcgatttgaccagtttttttcgcagcattgtgccagaatcgctggactggaagacaaagcctgaaaggtgatgctttgccaatgtgaaggccatggaatcacgctgtaaagctttgtccaggacaccagacgtccatgatttagcataagattccaaaattttttcatcatcctgcagaagcgctgcgaaaattcgttaaggtgagactgtcctttgaacatggaaaagcagccaacaaaagaagttcatcatactaaatggtggatggatttcatacataaagaaaccaaaataaatgtcagcaaaatagtaatgcatcatgatgtgcctattgcatattctaggctctacaacacacagagacaagagtacatggtcaagttgcaaaataaatcactcacatagttactccatgaaaaggtttctcggaagagaaatgcaaaataa

SEQ ID NO: 103397 - DNA, 143 bp, Zea mays
  unsure (1)..(143): unsure at all n locations
  Clone ID: MRT4577_25802C.1
aagcggacgntagaacaaggatctagggcaacgtggcgaggcactcccgagggggaaaggcgactttgcttccagtgccacgaacgagtgggctatataaaggcgctcgagatccagatctgggccgatgcgccgccctcgct

SEQ ID NO: 103398 - DNA, 361 bp, Zea mays
  unsure (1)..(361): unsure at all n locations
  Clone ID: MRT4577_25803C.1
tccgccctatcgtgatcgagtccctcgttgagggaggtggtccggtacgagccgaaggacaggcacgtcgacgtcgccgacacgtcgccgacacgcgccagctctgcctcggagcagggaagcaagggccacccgaggcggtcgtccgtgtccgtggggcgccgcctcaggacgcgcgtcagcagcccgcggctggcgtccgccaggtcgaggaagaacagcaagccgacaagcgcgggggcgtcgccacggaagacgaagccagcaccgncgacgcctctcgcggagagcttcgcggttggtgaaagtcgtcggccgaccccaggcgggacttccgcgagtcgatggaggagatgatcgc

SEQ ID NO: 103399 - DNA, 605 bp, Zea mays
  unsure (1)..(605): unsure at all n locations
  Clone ID: MRT4577_25804C.1
ccggcccggcccgtttacgaccgctgcgaaccaggcttggacagaaaattaagcccgtctggcttatcaggcccggcccggtttttggacgatcttcaccgggtctggctcgtaccggttcgggaggcccggtatgacatctctatttgcagttgcacatgcgattaaagcatccatctagctaaagaactcgagattctntctgcatgccgacgaaacatagccgcatcgagacctgacgccctaagtatatccgacggaaatatgattggggacaaatgcctggatcctctattcacaggatccggctttcgacggacggcggcatgcacttctcccgccgctgggaggacttggcgagcaccttgtcgccaagatgaagtgcaaaacatgtacgtgaatcgccgcgctgatgtagcccgaccctgtgagtgactgccggccatatcccaaggcccgatactctccaccaaaccggtgcagcggctgtgggaagagcactgcacttacgcacattactgtgccggcgtgcgaacttggtctgcgcagtccaccgctactccgacaagcacgactgccagttcaactacgggagtgatgacagc

SEQ ID NO: 103400 - DNA, 1016 bp, Zea mays
  Clone ID: MRT4577_25805C.1
gagctatgacgtcgcatgcacattcgccactagaaaatcgtcagatgctttaacagctgaactctctgatgaaaggcaaagtcatcaggacgacttagttaaatacagagatctcgaggagaagatggaaaggtatgagatggagaggagttcaatgcttgtggatggggacccagacaccaagtcaaagcaggataaagagataggggctgcagcagagaaactggcagagtgccaggagaccatattgattcttggccgtcagctgcaagctatgcgtcctccagccgagtcactcggctcttcacctaatcggcaaggcacggagaactttctacaggacgtggtaggaacaaccgcaggagaatattcccagaagccttcaggccaacctgatacagaccaggatatgcttgggacaggaaatgtctctccggtcaatggatacaagacacacatgatcccttctgatgcagacggaagccctttcctttctccgaacagctccaagcgcccgaagcatcgatcgagatcctcttcgtcttcgtcattcaccaaccaccagttgccagacaaacagagccgaggattcagtcggttctttgcgaagaccaaagagtgaaacttctcccgattgggtgggatggtggaggacatgaatttctgtagagcttattgaggcaagccttcgtgtgcgttctctcaggtcaggtgatgctttgggttgctggaataatactcagcttgcagtcgagcgggtcgtgggccagagtgttgcggaatgtatgttatcagtctcttctgctagagcttttctgggttgctgtgtgtttgaaacctcactgtacatgtgcttacatgcatgaaggagcatggttgttggtttgtgtttaatcttcttgtgaattagcatgtgtattttccttgtactggtttcatgtacagttaacctgcgctaatttcaagggcattgatatacctagtatattgtgttgatcaatttacaggtccgggac

SEQ ID NO: 103401 - DNA, 3919 bp, Zea mays
  Clone ID: MRT4577_25806C.1
gcgccgggagcaaaagggtaggcgaggtgcggagggggaaaagcggcagtgggcagcggggaggagtccagtccaatccagccggatcacggccgacgcggaagcgcaggtgtgactggctggaaggcaagtgtgctcggcaagcgacgcacgccaccgacacctctcccgtggcgatcggagccgcgcgctagatccaacaccctcaccggaatcgcggcggattccggcgccggcggccccgctccggatctgcattccgcgcaggggcttctcctgactgcctcgcgccctcgtctctccaaatactctgcaagcaatggatcggcgcagctggccttggaagaagaaatcatctgatagatcatcaaatgcagatgcgttgcagaattctaatcatgctgaacaggaagataaagctccaaagtttgtgcaaatttcacctcaaacatattcacatcttactgagtcagaggaaaaagtaaaagttttagaagaaaatgtgaaggtcttgaatgaaaaactgtctgctgcacaatctgagatcacaactaaagatgctcttgtgaagcagcatgcaaaggttgctgaagaagcagtatcaggttgggagaaagctgaagcagaggcctccgcactgaagcttcagctagaaactgttacattgtctaagctagcagctgaagaaagaggtgctcatctggatggtgcattgaacagaatgcatgaagcaagtaaggactgttaaagaagaaggtgagcagaagctacatggatgtagtatttgcaaaaaccaaacagtgggagaagataaaggccgagttcgaagcaaaattacttgaatttgaacaggaactcataagggctggtgctgagaatgatgcactcacaagatcacttcaagaacgggcagaactattgatgaaaattgatgaggaaaaaggtcaagctgaagctgagatcgaaattttaaaaagcacaattcaatcaggtgaaagggagataaattcgctaaaatatgaattgcatgttgtctccaaagagcttgaaatccgcaatgaagaaaagaatatgagtgtgcgctcagctgatgtagcaactaaacagcaccaggaagatgtcaagaaaatatcaaaactcgaagctgaatgccaaagattacgcggccttgttcgaaagaagttacctggccctgctgcactagctcaaatgaaaatggaggtggagagcttgggtagagaatatggagaccacagagtacgaagatcccctgcaaagaattctagttttcatcggcctatgtctcctgttcctgattatgcaatggagaacatacatcacatgcagagagacaatgagtttctgactgctcgtttattaacaatggaagaagaaaccaagatgcttaaagaggcattggcaaagagaaacagtgagctgcaatcttcaagaagcatgtatgctaagacaacaggaaagctccgaagcttggaagttcaaatgttgactggaaacaaacataagagtccatcaactccaaacatggatattcactttgatggtgcatttagccaaaatggaagcaacccacctagcatgacttccatgtctgaagatggggtagatgatgaaggaagttgtacagaatcttggaccaatgctctggtatctgagccctgtcagttcaaaaaagagaaggcagccaagagcagcacgacagaaagctccaataggttggagctcatggatgacttcttagagatggagagattagcatgtctgtcttctgatgttaatggcaatggcagcactgttgacaaaatgaaggtagatgatgttggggctactttggctgactttactgaaagagatggtgttaaagatttgcagtcagcttcaccaatgtcagaaactccatctaataaacagtgtttgtctgagaaatctccgcttttgaatttccagtcaagaatatctttcttactggattctgaatcaccagagaataatgctggaaaggtacttgatagcatcagaaacattctaaaggatattgaagatgaggcagattcggtgaatgtaaatgggactcatccttcagatgggaccttaagttcagagagcaaatttgccatggatcaagatcttaagaatgccatattgaaaattctagactttgtgaagttacttgatcaagaaatctccaagtttcaaggccagtcacctgattatgatggactatgtgagaaaacacaacagttctctgcattagtcgataaagttctgtcaaacgttgatgttctaaatgatattgtcatagcactgtctgttatcttgtcagaaactagccagattaagttcacattgttgagagacaatagcaatgaagcagaaagtaataacttagattgtgttgataaagtgactctacttgaaaataaggtgcagcttgagccagtaaaagacaatgttcctggtatctgcccactgttgcctcattcatcttctgatcctgagtttgaggggcctgctgatgctagattcgatgttaagactgcagtgaaggtgtactcgccggaggaatatgaacaacttaaatctgagaaggcaaatttggagggagaactagcaaagtgcaacaaaataatagaagaaacaatggctaggttaagtgatatggagaaaaaactggaagacctgacatctaagttggctgacagtgagaaatcaaatagcttgaatgagacacagttgaagtgtatggctgaatcctacaagtcacttgaatcaaggaaaattgaattagaaaatgagatagaagcgttacggtccaaaatagatgctctaacagctgaactctttgatgaaagacagagtcatcaggaggacttagttaaatacagagatctcgaggagaagatggaaaggtatgagatggagaggagttcaattcttgtggatgaggacccagacaacaagtcaaagcaggagagagagatagcggctgcagcagaaaagctggcagagtgccaggagaccatattgattcttggccgtcagctgcaagctatgcgtcctccagccgagtcgctaggctcttcacctaatcggcaacgcatggaggagtttctgaaggatgcggcaggaacaaccgcaggagaatatttccagaaaccttcaggccaacctgatacagaccaggatatgcttgggacaggaaatgtgtctccgatcagtgggtacaagacacacatgatcccttctgatgcggacgttagccctttcccttctccaaacacctccaagcgcccgaagcatcgatcgagatcctcttcgtcttcctcattcaccaaccaccagttgccagacaaacagaaccgaggattcagtcggttcttcgcgaagagcaaagagtgaaactattccggatcgcggtgttaggtttgttgatttttggcgccaattgggtgggatggtggtcatgaatttctgtagagctagtgagggatgcttgcttgtgcgttctctcaggtcaggtgattcctttgggttgctggaataatactcagcttgcagtcgagcgggttgtggcgagagtgtgtgggggaatatttaagttgtcagtctcttctgctagagcttttctgggtttctgtgtgctcgaaacctcactaaaacctcactgtacatgtgcttacttgcttgaaggagcttggctgttggtttgtgtttaatcttcttgtgaattagcatgtgtattttccttgtactggtttcatgtacagttaacctgcgctaatttcaagggcattgatatcttccctcggttctaaaaaaaaaaaaaaaaaaaaaaaaaaaaaaaaaaaaaaaagggcggccgccgactagtgagctcgtcgacccgggaattaattccggc

SEQ ID NO: 103402 - DNA, 378 bp, Zea mays
  unsure (1)..(378): unsure at all n locations
  Clone ID: MRT4577_25807C.1
ccctctttttttttttttttttaaggtcctttaattgatcggaaggagtagtacgaattttatccatagctgcctttgcatgaaaggctatatttacaacagagtttaagagaaaaaagcagatacgcaagatacaaagacaggttgatcnctgttgcctgaagccagtgcatttcacgagaagaaaacgcgcacgtggtgtcttgggctggtagccgggcgccttgcgcggatcgcgttatcggggtaacatggaccgtggttggtgccgcatgcggcggggagccgaggaacgatctgtgttggtagcggggcacgggcagcgaacggggtgcctttgagtgggtgtacccctgacactgtcgcccaggggcaggc

SEQ ID NO: 103403 - DNA, 939 bp, Zea mays
  unsure (1)..(939): unsure at all n locations
  Clone ID: MRT4577_25808C.1
cattgtaccccgggtgcccggccggggtccgtccgttgctgcagacccaccccgcgctccatgtgatgtgtagtgttttctccctctgctttccccactcgtccgctcctgcttcccgccgccatcgcccatgacgccggcggcaccggcatccgccgcggacgcgcttgcgcagatcctgcaggacctcctgccttcggttctgctggccgcggcgtcggtcagggcgctccactcgcggtggcgcgcgctccaggcctccctcctcgcgttgcagtcctcgctcgtctccgcgcccgcctccgccccgtcccacccgctcttcgccgacctggtggccgcgcttctcccagccctccgttccctccacgcgctctctgtccggtgccaggaccctgggctccccggggggcggctgcggctacagagcgaccttgacatggtggcctcctcgctctcgctcctcctgcacgacctctcgctgctccttcgctcggggctgctctccgtcgactccgagctgtccattcccactgacatcgtactgcaggtgcctgcgtcggcggctccgcacgcagacaagtccctcttcgtccgtgacgcctttgcccgcctccagatcgggtcgctggacctgaagctaaaggcgctagtgtcgctgctcgacctgctgggtgacgaccctactgcggaggccgcgcagatcgtcgccaccgaaggggacgttgcggcgctgctccgtttgcttgacgcgtcgtcccactcggcgctgcgggaccgtgcggtcacggccgtggcccaccttgcgaccgcctgcgctncgtccccgggagggtggttcttcgacgaaggcggactcggcccacttctgcgcgtgctcgactcaggctcacgcccgccacgcgtgagcggtctgctgcggccattgtggccatcact

SEQ ID NO: 103404 - DNA, 284 bp, Zea mays
  Clone ID: MRT4577_25809C.1
tgttcctgctgatgttaactctcctcaaccccttggtttgtcctatcccagcgccttgcatgccatgttcctgcgtgtggtgaccaaatccatttgttcttgacctcaccgtggccagggcgcttcaaagaatttcatgccgaaggaaatttgttccgtgatctgcatagaacatctagaaggagtggtatttgaaggagtctactccagtgtctgttgatcaagtgtaggagccatctaactgggtatttgatagagggatctggaacctcttctctgcaaca

SEQ ID NO: 103405 - DNA, 333 bp, Zea mays
  Clone ID: MRT4577_2580C.1
aaaaaaaaagggaatcaacttttttgatgaaatgcctagctttacaacatttggcagtctgcccaacccacttttccctttcctttcccaaaagggttctgtattttttaaccccatgtcagtcctagtccaatatccctctccctgttttactcccaagccctaccgtttcaaagccacaaatcaaaaaccacttccttccccaaggcatcaagtaaaccatcccacaacctaactcccaccctttcagttttgccctcaaaatccagcccccacccactgtcccaagctttaattattaccctttctaaaggcgtggggaaattctttccc

SEQ ID NO: 103406 - DNA, 391 bp, Zea mays
  Clone ID: MRT4577_25810C.1
aattcggcacgagggctctctctctctctctctctctctctctctctctctctctctctctctctagctctctaacgcgctaatgcccatctcggtctccatccctctccatcgcccctgcgcccgaaagaacgaaaaaaccagacccatatataaaaatataaccataaacgggcgggggggggaccaacctttttttttcacacgcacacacccgacgaaggctaactgggagtggcactccaacatgaccccgaacaggagagcctcaaaagctcaatcacactcaaaaactgcactgacctcatgcacacacgctaaacacatacagagagacaccaatgatcacacaaacacatacccctacccactctatacccacaacaagaac

SEQ ID NO: 103407 - DNA, 716 bp, Zea mays
  Clone ID: MRT4577_25811C.1
gaaaacgatgcgaatttacagaattttaaacagtatctgaatctttagttgcagcttgcagtgctgatactgctactcatacagttcatgggcagtagtagtactaaatacacatgggatcgacacagatcaacgttttcgtttacgtcgtgatgggtggggtcggtccattgcttcgagggaagagccgcaccggtgggtcagtcccggcgcgccggctcgtgcctggtggagacggagacggcggtggacatcacgagcatgtggctcagcgtcgcaacccaccgcttgtagacgccgtagtcgtccgtgcggagctccaccttgcccttgttcgtggagacctccactgggtatgtcgcgccctcgtgggggctcggcttctccggggagcacggctgcacgtcgtggatcacgctttcttttgcgtgggagaaggccatgacgaggttcgtcttcttgatccgcagcacgatctcgccgcgcttgttcgacgccgccgacaccgtgtggagcttccacttcccgtccggcatcgcgacgaacatctcgtcgcccttggccagcgccgccctggacctcgcgtggttgaagtcgaagtcgaggtcgtcctgagacagagccggccccgcgtgctccgccctctcgttctggccgtgcccgccgctgccgctgcgccgtcctctcagcgtcgcagcgccacgcagtgaggtggc

SEQ ID NO: 103408 - DNA, 285 bp, Zea mays
  Clone ID: MRT4577_25812C.1
cggacgctgggcgacgtccggctgctgccgggcggcggcgacgcgctgtcggcgcccaagttgcgcatgattctgctggagatcacgttcagcgggttccggcagggcgccggcgcatacaccgcggcgagggccgtgttctcggagggggccctgtgctgcccgtacctgttcggcaacggcggcgacccggccgacccgttcccgctgtgggagggcgagtccgacgggctgctcgccgcgcaccgccgcggcaacgccagtaccaccggcgactgggccgag

SEQ ID NO: 103409 - DNA, 278 bp, Zea mays
  Clone ID: MRT4577_25813C.1
aagaccatcagctttatgtactacagagcgcagaatagcccgatcgacaccatcagggagttgctcgctgccgttcctctcctgtctgtcgctgcaagcgccacctccacgcatacaagcggctgatgcgcttgccatactcctccgcccgatcatctaccgcccaccgtgcatctgacacctgatgtctacctcccaccacgtgcgcatttcccaccgctagtccacctggcaaaggcggtccaactgctactacccgcacatgtgctgtcgaccga

SEQ ID NO: 103410 - DNA, 2094 bp, Zea mays
  Clone ID: MRT4577_25814C.1
tgttggccagcgcgggcacgccgtcgaggcggcgcgtctttggctgcgctggtgcgccctatacgcgtcggcgtacgtgccgctcccactcgctgtcgactgtcgagctttgctgtcatctccctcccctgattctccgccttcccctcctcgccgcccacaatgcttgtcccggccgtcgccgccagccgcctggtcctggtcccgttccggctctccgccgcccggcgcatatcctccctgaaggtcccgtggaagcgggaccccgccctcgacgctgccatcgcccgggaccgccgcttcctccaagcgtcccgcctcgtccgcgaggtgctcctctcgccgggtcgccgcctcctcttccgctacctcaccaagcgccgcgagcgcatcaagctccccgtccacgtccccactttcctcaggcgctaccccaccctcctcgccgtctccgctcccccggagcccgtcgcctcgccctccccgcacctcctcgctttcctcgacttcgcctcccgcctctacgagcttcatgcccctctcctcgcctccaggctcaccaagctcctcatgatctcctccacgcgtgctctgcccgtcaccaagatcgccgccgccaagcgctacttcggcctccccgacgacttcctggcctcgctggtcccgaggtaccctggcctcttccgcctcgtcggtgaccccgggcctgacgcgtccgggaacgcgttcctcgagctggttgcttgggacgatgagctggccaagtcggtgatcgaagctaaggctgacaaggaggccgatgtcgtcggaattaggccgaggccaaacttcactgtgaaattgcccaaggggttttacctcaagaaggaaatgagggaatgggtgagggattggcttgagtcgccatatatctcgccgtacgcagatgcatccggtctgcatccggcatctccggaagctgagaagagatcgattggtgttgtacatgaggtgttgtccctgacagtagagcggaggatggcggtaccaattatcgggaaattttgtgatgagtataggctgccaaatgcatttgctaatgcgttcacgaggcacccaggtatcttctatgtgtcacttaagggtggcatcaagacagcagtattgagggaagcatatgatgagaatggagagcttatcgatagagacccaatgcttgagctgaaggagagatttgtggcaatcatggaagaggggcataagcagtatctagaggacttgaagaggaagagagaggcactgcagaaagacagggaggatgcaggtcgccaggatgcaaaggcagagattgaggatcgggttgaggaggaatggcacagtgaggcttcagaaggagatgatgacacagatgatgcttataggcagtaggaggccatgggaatgcagtgttgttagtggctcttctgcttgtagttccatttgtccctggtcaagtgttgcctggagaactggcagagaaatttggttggtttgcctatgttctttctttaacctgctggctgttaatacaagatatattggaatttaacacactcttagggctagggatttgagtttccaaactggcacttaaggactggtgagatccatttgacctaacaaacttggaagattttcttgtcagcagtcttcatggatgcctttgttgttgttagttgactcactggggctgtggagggtacagctggcttttgtgctgtgacctttgccatccattcggattcagaaattattgtcaagttgatcagtgcaagtctattcctttttatgggattttcttaaaaaaaaaaaaaaaaaaaaaaaaaaaagtcaagagctcagtctagtattcggcaccgttcaagcaacaaggcgcctgaatgatgacgaacaatcccacctgtgataccgtctttaatgctttgggataactgggggctggtagaggatcaggcagcgagagatatgaatggacgcttggaacctttttccccctttttttccggggcatgttggaaggttaataattgtctctattattgctcgggggagatgatagcttttttttgcctttta

SEQ ID NO: 103411 - DNA, 645 bp, Zea mays
  unsure (1)..(645): unsure at all n locations
  Clone ID: MRT4577_25815C.1
cccagcgtccgcccacgcgtccgcggacgcgtgggctttagggtaatatacaaataaattgcatatacaaatatacgaacttaattagttaatgtctaaattatgattattggaatcaaattcaattccaacgaaataaacgagaccttagcatttttacaagccaactatcatcaatttttttcacagctcacaactagaattgtatttttagaaatataagctaactaaatagatagcttctccgtatggataatcctaatatatcttctctatgttaagcgtgtgtttggtttcatttaggaaccatgtggattgtgttggctttggctccatccctcatgtttggtttgtgttgtactcatttcgtattgggttagaggggtagggttatcccatgtcttatgtttggttgagaggttacaaatgtgtaggggtgaaaacgggtcggtatatccgttgagtatcgaatactcgtttttttggaaattcagatatttttatacccgggccttatataggtagtacccggatattacaactttagattcgcgtcggatacaaagtgaggactaaccgaaaaaacctagatgtttgggtcggatacaaataccttggttttcggngcttggtatttctttttct

SEQ ID NO: 103412 - DNA, 382 bp, Zea mays
  Clone ID: MRT4577_25816C.1
atctataacttagtattaggttctagatgcgcgctgttgttcccgactctacaccgtgccccacctgctaggagaggagacttcatcgcgaagctcaccatgatctcacccgagaggagctcgtgacaaaaccagcggtctggggtggcaccagctccagacctggcaatctgcgtcacagctcccgtgaagatgggtgccggcgtgcagttctacatgtcctaccgcgttatcagcagagaccaaactcttgaatttcacggaccaggcgaatttggtactcggcgctatacagaatgtcgatggttgcatcgtcggcttgctgggaggtacaaaggcatggacctaccccacactactgagaagaatgcttttgcagaat

SEQ ID NO: 103413 - DNA, 189 bp, Zea mays
  Clone ID: MRT4577_25817C.1
gtctgtagtctctattttatatagatgctaacaaccttgagatacagatcgcctacaggggcttttggggcataagaccatacatcaccgaaaccgaactcgtcctccacacggttgcttagccatctcggttgtttagtattttcagtttttttttactgttcttttttgattttaatttatttttta

SEQ ID NO: 103414 - DNA, 184 bp, Zea mays
  Clone ID: MRT4577_25818C.1
gtgacaggtgcaggtacgggactcgaaggcccgggaacgcgtacgcgctcgattagtatcgactctattactatcgacttcctcaagtacattcacataggctagaaagaacccagggtgtacacattatatctgcgatgaaacatattcactagctcaagcgtactccttttgatacataatg

SEQ ID NO: 103415 - DNA, 138 bp, Zea mays
  unsure (1)..(138): unsure at all n locations
  Clone ID: MRT4577_25819C.1
ggggacgctgggcacgtcggcgaacgggcgggggtgcctgacncaggtgttccacatgcggagcgcggacgcggggacgctcctgaacggggctgacggagccaccagactggggcccatcgtggggggctacctctg

SEQ ID NO: 103416 - DNA, 374 bp, Zea mays
  Clone ID: MRT4577_2581C.1
ttaaatacttataaaatcataattttacacaacttaatagccttaaacataatgcgtatttcctcagctgccttattagtgaactaactcacattaaattgcctcttgcaaaatttccgctttctaaatggcaaatctaccctccctgttgcattaaataaaccgccaacgctgtggtagatacgcttagcgtaatcggtacacttgccattgctctatcactgactcctttagctttgttgctttgctttgtcgagacgtttcacctctctcaaagtcaagctttaaattattcactcaatttagggataacatttaaaacattagtgacctaaagccaaaaaaagccattaacctataaagacgtattgctc

SEQ ID NO: 103417 - DNA, 266 bp, Zea mays
  Clone ID: MRT4577_25820C.1
aaatttgtggcaccttatccatgagggtgacacttttggaagatccagcaaatgagccaaaagaagatatgtatatgatgtctgtttctccagaaaatgcaccttcaaaacctgagtatctggagattggtatagttgctggtgttcctacttctatcaacggtaaagatctctcgccagcaactctcctcgccaagctcaacgaaatcggcggaaagcatggcatcgggcgcatcgacatggtggagaaccgcctggtggggatg

SEQ ID NO: 103418 - DNA, 484 bp, Zea mays
  Clone ID: MRT4577_25821C.1
gatgagtttattatttttgtgttcgttcttttttttttttttttttttttttacccgaaccgggtctccaaagggtttttaaatatgggctgtgaaaaaaagaagtgattttttttttggcaaaaaagcccccccaaggggtttttttttttggtgggcccaaaaccccaaaatgtgttttttgggcgaaaagtcccggccccttaacttttccatttagagggaacaggggggcggggggggtctaaaaaaggatgtgaccaaaaataaaaacattgttttaaaaaaacgttttggggagaacccccgagttgttttaaatttaaacgtcctcggaaaaaattttgcgggtaaaaaaaagggggggaaaaaaaaaaaaattttggggggttacaaccccccctcccccggaaagaaaaaaataagggtccgcaaaaccccagaaaggtgggggggcaaaaaaaaaatttttttttggggggat

SEQ ID NO: 103419 - DNA, 699 bp, Zea mays
  Clone ID: MRT4577_25822C.1
ttctcaccgacgccagtccgtcgtcagctgatattctttccgacggacacacaagcatatatacatacacgccgacatatggatgacggtttcctctaatcctcagcgggcagccatggccaacggcaccgtggcgctgctggtgccaagatagacgacctgcgctcatgacaggtcctggggcagctgaccacatactactactacatgtgcatgctcgcaaaccctacaacatctcgtaacaggtcctgatacgaggaagcgcaacagacggacgtgcgcatatgacaccacatcgtgcacctgatctccaaatactcgacgacatgcttacaaaacagatgctgcctatgtgctcgagagctcctgagacaccgaatcagagcgagtgctgcgccaaactctcactcgataagctcgtgcagactggatctagacaacaactgctgggcgaggagcatacccggaaggagtacaaaccagaagtgagatcatggatgacatcagcccccactacctcgcctgcgtctacatcctctaccacgccgcaaagatctcgagggaactgtatcggaggaccccactcctcagtgcttattgcgatgatatacagctgagaacgccgatcttctagtatcccaagaatctgtgcgtctgcgcattacaacctgacgatgctgaagtaaaaattcgacaacg

SEQ ID NO: 103420 - DNA, 195 bp, Zea mays
  Clone ID: MRT4577_25823C.1
tttgagggcgggggagaggaaaatggctacaacgaccgagaccgaggacgacggtgtctacggcgacgagcgccggcgcgagctgtaggcgttcaacgacacgaaactgggggtgaaaggtctggcggactccggcggcgaagccatcccgtccatcttccaccacccggcggaagccctgagcgacataatttc

SEQ ID NO: 103421 - DNA, 334 bp, Zea mays
  Clone ID: MRT4577_25824C.1
ctgacacgtgctagaatgcaatggcctctttaacgaacaggaacatggatgctcaccatggagaggttgaccgggttatggctactatgcaaccaaagcatctgttctctgagaaactcacttttagaaagacacgcatgctataagctaaactccttactgcatctcttaataaaggactattgcactggttgttagatcaattgcatgaaacggtactgtgttcagtgttcatcctgcacttatacatgctactatgtacaatatttgacttgatatatctgatcctcttgatatatagcattaatgtctacatttcattaatgtgacaaag

SEQ ID NO: 103422 - DNA, 155 bp, Zea mays
  unsure (1)..(155): unsure at all n locations
  Clone ID: MRT4577_25825C.1
tnctacatgtgtctttgtaacgcgctgacccatgtggcggagttgataggctaactccgtgtactacaaaaactatggctacaggactgccgctgatgttacaacatatgacataaaattcatacaactgcataacctgctataagaggacttaa

SEQ ID NO: 103423 - DNA, 322 bp, Zea mays
  Clone ID: MRT4577_25826C.1
tggatgtgcaagctccggccggagcttcatgatatgaacctcgcggtggtaggcaattggtggtgggactgcgagcgggcgtgcaatggcatccctttccccttccctccacctaccttgcaattcaagaactgtggttcttatggataagaccacgtgcggattacgtccttgtggtttccctgctggaagagttggatttgttagaacagtattggatcgcatgggatctataaaaggaaagcatcccatcgaagttccatcaaatgtgtctcttcacattagaagagcagttttttaaagataaggtccggtgggggga

SEQ ID NO: 103424 - DNA, 349 bp, Zea mays
  Clone ID: MRT4577_25827C.1
gtccttttttttttttttttttttttttttttttgttttttttttttttttttttttttttttttttttttttttttttttttaggcaaaagggttttttttttttacaaaaaatgtcgatgggggcatttgcccggccggaaggaaaaaaccccattcaaagtctaacaaaaactatcttttggattaacaggagggccaaccaaatttatttttttgtttggccggctcccttttttttacaccccacccttggattttattcaaggaactattttttgtgctccggggggggtttttttcttcacaactcttagagacccctggatttttacaagtttgataaaag

SEQ ID NO: 103425 - DNA, 470 bp, Zea mays
  Clone ID: MRT4577_25828C.1
acgggctgctccacagagctgcccccgtccacagaatacatggaggccgaaagcagtggggctgcggtgctctgcgccgtcaccggctgtgaccaccgcgcgtgtcatgagggccccttctgggtcgtctttgtctacctggaccaggatgagggcgagggtgtttgtgttgcatccgcagccgtgctcttgtctgattccagcaagcggtccaatggcaaatggtgtgagccgtgctctcgtcttgatcttgtggatgatgcattcattgaggcaagacccccagtcctcatccaagacgcacttcacttcatgcttaggcactatgaggattatcgccgtgtaggaattctcaagtatgacctgaactctaactgcttatcactaattgatgcgccattggaggggcctgtcattgacgatgccgctgtactcatgtgcgatggaggatgacagcttgagacttgcac

SEQ ID NO: 103426 - DNA, 265 bp, Zea mays
  Clone ID: MRT4577_25829C.1
gaatgtgagtgagaaaagtgttggaaaaaagtacattaaaattttggcgtgtaatgctaatataaacattccaccaaaacattgagtgcgtgcttggcattatttggaataaaattcgccagcgcttatggacccacggggttcctggatgctgatgcggaactggaattattaccaccagattggatctgaacaagctttcctttgactagctttacaggaacactttatttaatttggatggaaaaaaatttcttgaggtgag

SEQ ID NO: 103427 - DNA, 410 bp, Zea mays
  Clone ID: MRT4577_2582C.1
ttagaagcggactggtacgtccccggaggggaagaagaacgggacatctccgggaggggaagaagaaccgagagcctctactgatgcttgacttcctgtacaagtggtagctgaatgctcctcaaaatataagattaactatttctgtaactctaacacccttttcttggggtggggctaataaactgtaaggccatgtttggtacacatctcctaaagcctagggacttgaggggagatgttcaaggaggtaactcaataacaccttcttaaataggacattatagggactgatgattagttcctacgatttacgagatcacttatggaacccaacctagttcactaagccttaggaaaccgtgtcaattcactgcccctcttgtgtggcggccatttttatgtctgcc

SEQ ID NO: 103428 - DNA, 819 bp, Zea mays
  Clone ID: MRT4577_25830C.1
atgccaccgaagaagacagcagggccaggggctgcactgcagccactggacgttaatcaggagacgctacatgaagctaggagccagaagaggaaggctaccagcccaacacctcaggaggatgaactggaccaagaaatcagggacctcgaagctatccatcaacagaggaagattgatgaggccaccgaggaaatgcgtcacctcacccaggatgaccaagaccgaaggccccaacacagagagctttgtcaggagaattcatacaacgatgatgaatggtatggtgattttcatcatggcaattttgctttcgatgatgcttcttttttggcagtagaattgcaggctaccccatggcccccatcatacaaaccacctcagcttcctatgtatgatgggcactcagacccgaagcagttcctgatgagctacgaagcaaccatatctttatatgggggcaatactgcagtcatggcgaaatccttcgtcatggcagtcaaaagcgtagcacaaacttggtactattctctcaggctagggacaatcacatcatggcagaagctcaaggatatgctagtcactagcttccaaggctttcagacgaagccagtcactgctcaggctttgtttcagtgcacgcaagaccatgaggagtaccttcaggcatatgtccgaaggttcctacgtctaagagcacaagcgcctacagtgcccaatgaaattgtcattgaggccatgatcaaagggcttcggccaggacctaccgctcaatattttgccaggaagcccccacaaaccctggagaagctcctttag

SEQ ID NO: 103429 - DNA, 291 bp, Zea mays
  unsure (1)..(291): unsure at all n locations
  Clone ID: MRT4577_25831C.1
tctcnctntaccccaccaantcntcgactctcactccttggatcaccatcttctgcctccggaatttcccggccggcgctgtgtccttctgatcannctanctccngccncccngcggtcaacctcgctccgcgcttcaaggagagggggaggagcgtacatacatacacgtacgtgagtgtgcgagtacaattggcagcttctttttttttttttttttttggtccgtgctagtgcttggcgcatggacccctctagtagcctgatcaacagctccgcggtaccattccc

SEQ ID NO: 103430 - DNA, 311 bp, Zea mays
  unsure (1)..(311): unsure at all n locations
  Clone ID: MRT4577_25832C.1
tgatcagcgtagtaagtcggaatcggctcgacggatgagggagggcgacacactgctttcttctctaactacaaacctcagtgtcactngaggactgctgatgtcactggaaaagtagagttgcccgaaaatgttaacatggttatgcctggagacaatgttactgccgtgtgtgaactgatttcagcagttccacttgaagcaggacaaagatgtgcctcgagagaaggtggaagaacagttggtgccggtgtggtgtcaaaagtactgagctagtgcatttgccatgattcaaagtttagtctacccat

SEQ ID NO: 103431 - DNA, 198 bp, Zea mays
  Clone ID: MRT4577_25833C.1
gagtaattttttttttttttttttttttttcaggagaatcttttaggtctaaaacgctggagaaacagtggaatccgaaacggatacaagtcaaacgaatttttacctgtatagaacgcttattctcccgcgcaagataataaatagcatttgagcctttggggctttgaacttcaatcaaatttggagaaggagtgg

SEQ ID NO: 103432 - DNA, 418 bp, Zea mays
  Clone ID: MRT4577_25834C.1
gttcaccgaggcttgccggaggatcagggtcatgaaaagttcagatgtagttgggcttggagttacaagggcaggggttaagtccaagaataagaactaaaacggtcgctgcccacggtttgaagacgaggtcgcacatgccgtctgtactactgcatggttttcctatcccacaagtaaaatcacccgttactctaccgtttaagatttgcgacatctcctagagacttatgctctatattttgttgtgcccacgttgttgtacgcgtgttatttccatccgtgtaaatggttggtaagcagtgcgagagctactgctgtgtttgatgactcctatgtattttgccactcttgtcctgaaccggtcgttcgtcgtaaatgtgaaggttgcaagactattatttaaaaaaaaaaaaga

SEQ ID NO: 103433 - DNA, 328 bp, Zea mays
  Clone ID: MRT4577_25835C.1
cttacgcttagactcaaacgcacctttctctatcccaagccgcacaccgagaagagtaagcgctcttcctcctatgagggctccgcctacctacacatcagcgtggttatgacggcgtcaaatcggcacgcaaagcatgctatcaaactatgatctcagacagagattacaccgagttctagaacttctcaaaatggcagggcgtatctcagtaatttatgctctacacttaaaaaattatggcagacaactcatcattatcacttttgttttaatgattttgacatgttatatgttgactgcctgatagaataatatcatttatctt

SEQ ID NO: 103434 - DNA, 367 bp, Zea mays
  Clone ID: MRT4577_25836C.1
tcggttacttggtacaccaatctcttcaaacacaactaacttaccgctgttttttacttcttgtcctttgaagtatgtatgccagtcctcgtccttttaagtatctgtgttgcaacaaaaatttaaggccttgttttgatgcataggctcactttaagatttaaaaaaaaaaaaaaaataaataaaaaaaaaaaaaaaaaaaaaaaaaaaaaaaataaaagaaatttaaaaaatcattaaatttaaaagcaatactacaatgaaaaaaatagaggattattaaaatattgggggggggctcttttaaaggtctcaagttttccttcgcgtgttggcaaagtatatgttttttttttgtgtcccctaa

SEQ ID NO: 103435 - DNA, 318 bp, Zea mays
  unsure (1)..(318): unsure at all n locations
  Clone ID: MRT4577_25838C.1
aggaacgctaaaaactgggaatgggcctacagccaagtacgacgagctanggggctcgtttctgtccaaaaactactactgtgatttcgtaacaagccaggctgaattttatgccgtttcagattcgtggagaaatgcaagtatcctgaggatggttcaccgcctagatccttgagatatatcggaagtatggttgctgatgtccatcgcaccttactatacgggggcatatttttgtacccagcagaccagaagagtccaaacgggaaactacgcgttctgtatgaagtcttcccgatgtcattcctgatggaacaa

SEQ ID NO: 103436 - DNA, 306 bp, Zea mays
  Clone ID: MRT4577_25839C.1
gggaaaaaaaccattccaaaccaacttatgggaaataaaaactaaaaaggggggggacatgaaagcttaaaaaatccgggggccaaaagggacccccagataaggaaaagggggggggggcccaaccccagaaaccctttggacgctataaaaaaagccatttaaagccaggggaatgtttcgggagaaacccttgggggaaacactttttttccgattaaagggggaaaccagggggggtccgtctccaaagccaaggaagttattgggggccaaaatttttaaaggggcaaatttggtccttcc

SEQ ID NO: 103437 - DNA, 283 bp, Zea mays
  Clone ID: MRT4577_2583C.1
attttctgtgctagaccgggagcccgccaccagggcggaatctagcaaaagctggggtggtacattaacaccaatgaaacatggcaccactatgctgcttgccattacgacatgtgggagctagatgcacattgtggctgagagtgacaacgcgatacgtttacctggggaggataactactggcacattgtctgatgataacacggacacattcctgtattaggacacacccgatatgaccacccatgcttccaccttgctaacactcctctgtcctgtggc

SEQ ID NO: 103438 - DNA, 351 bp, Zea mays
  Clone ID: MRT4577_25840C.1
tcgagccggccggagcacatcgtagcctgtagcttatccgttgcgctgcgcccggttcctcgcgcagtgcggatttacatggccgtgccggaggtggtggtcgacggcgtcgtcttcccgccggtggcccgcccgccgggctccgccggctcgcacttccttggcggagcatgagtgcgagtcctcaagatatgagtaaagtacatcaagatcacggccatagtctagtaactgcagaaaaaacaatatgacggaatagataataagcttgaagatcaaagaatggataaattatatattaaacttttttttttttatctaatttttttattttataatatattttttttt

SEQ ID NO: 103439 - DNA, 240 bp, Zea mays
  unsure (1)..(240): unsure at all n locations
  Clone ID: MRT4577_25841C.1
ccccccccncccgctttcccggggccccccaatgggtacctcaagacggacgggagacagctcctcattcgtcagattcagatcagatcgttgcagccaaggattccgcgctacgggggtgacatgaaactgaagctcctctctccctgccttctcctcctcgccttctttgccaccgcggcgcacgcggcgtccgagtccccgtcgcgcgcgcccgccgccccccggggcgcgggcgcc

SEQ ID NO: 103440 - DNA, 863 bp, Zea mays
  Clone ID: MRT4577_25842C.1
cctcgagccggccgggaacgtatagatccagcagcatgcagtgaaacacactaccgcagcatgcagtgaaacacactgccatcacctagctagctacaaacctacctacaacgaggactcgaccgatcatcgttctcgagagtgagctactgagctacgatgaggtgcacactggtggtatggctgtctctggtcgtcatggccgcggccaccgccgccggcgatggtaatacgccggagccgaggccggtgatcactccgaagccgaagccaccacggccgtaccagccgaaaccgacgcctcaaccgtaccagccgaaaccgacgccacagccctaccagccgaagccgcagccagagccaggacacccaaagcccacacctcagcccaacccaacaccggaacccaccaaaccgaagcccacgccgcagcccgacccgaaaccaaagccacagccacagccgcagccgatgccggagccccagcctggccccggcaaacccaagccgaagcccccggcgtactccccgggcacgcccggtccttgatcgtgtcgtgttcgtacaaacacgcaggccgcatgagcttcgtataatgcacagttgcacacgatgctttgtttcttcatgcatgcacagttgcacttgcacacgatgcatgcacagttgcacacgatgcatgtatacgtgtaaggaatgcaatgtttcatcacactactgactactgtactgtacgtgtgtaaaagagtatgtttgtttttgtgcctaatggccactggcctgttgtacgtgttgttaatgtggagtcgagtcacctgtactcactgtattgtaccgatgaataaaaagagaacgtgcatgcc

SEQ ID NO: 103441 - DNA, 855 bp, Zea mays
  Clone ID: MRT4577_25843C.1
gatccagcagcatgcagtgaaacacactaccatcacctagctagctactacaaacctacctacaacgaggactcgaccgatcatcgttctcgagagtgagctactgagctacgatgaggtgcacactggtggtatggctgtctctggtcgtcatggccgcggtcaccgccgccggcgatgataatacgccggagccgaggccggtgatcactccaaagccgaagccaccacggccgtaccagccgaaaccgacgcctcaaccgtaccagccgaaaccgacgccacagccctaccagccgaagccgcagccagagccaggacacccgaagcccacacctcagcccaacccaacaccggaacccaccaaaccgaagcccacgccgcagcccgagccgaaaccaaagccacagccgcagccgatgccggagccccagcctggccacggcaaacccaagcctaagcccccggcgtactccccgggcacgcccggtccttgatcgtgttcgtatataaacacgcaggccgcatgagcttcgtataaataaataagcgggcgccatgcatgcatgcacacgacacgacgatgctttgtttcttcgtgcaaggtccgatcatgcgtgctcgtgcgtgacactactacctgcgcacgcacgtgtaaggaatgcaatgtttcatcacactactgactactgtacgtgtgtaaaagagtatgttgtatgcgttgtttttttgtgcctatctaccgtacctaatggccacctgttgtacgtgttgttgtggagtcgagtcacctgtactcactgtattgtaccgatgaataaaaagagaacgtgcatgccattgcgcgtgttcact

SEQ ID NO: 103442 - DNA, 809 bp, Zea mays
  Clone ID: MRT4577_25844C.1
aaacacactgccatcacctagctagctacaaacctacctacaacgaggactcgaccgatcatcgttctcgagagtgagctactgagctacgatgaggtgcacactggtggtatggctgtctctggtcgtcatggccgcggccaccgccgccggcgatggtaatacgccggagccgaggccggtgatcactccgaaaccgacgcctcaaccgtaccagccgaaaccgacgccacagccctaccagccgaagccgcagccagagccaggacacccgaagcccacacctcagcccaacccaacaccggaacccaccaaaccgaagcccacgccgcagcccgacccgaaaccaaagccacagccgcagccgatgccggagccccagcctggccccggcaaacccaagccgaagcccccggcgtactccccgggcacgcccggtccttgatcgtgtcgtactgtcgtgttcgtataaacacgcaggccgcatgagcttcgtataaataaataagcggccggcatgcatgcatgcacagttgcacacgatgctttgtttcttcatgcatgcacagttgcacttgcacacgatgcatgcacagttgcacacgatgcatgtatacgtgtaaggaatgcaatgtttcatcacactactgactactgtactgtacgtgtgtaaaagagtatgtttgtttttgtgcctaatggccactggcctgttgtacgtgttgttaatgtggagtcgagtcacctgtactcactgtattgtaccgatgaataaaaagagaacgtgcatgccattgcgcgtgttcact

SEQ ID NO: 103443 - DNA, 680 bp, Zea mays
  Clone ID: MRT4577_25845C.1
ccctcttcctcttccgccgccgccgccgccgccgcccatttcgtgcgcctcccacaacccgagagcgaggagttcaggccgcgtcgccgctcaccatggagccgcccaagaattaccagggcaccaagtacgtccgagctggttgttccacgttttatccggagtttccagatgactggtataacatcgaggaccctcccatgcccaaggacacttcccgcaagaagcgcaatcagacttacagggcgcataaaccgactcgcaaattgctgtttgttctcagtaagaaggtgaatgtgaaggcatgtggtactgatagcaggaacacgtaggccaaggggaaagcagccaggcgtgctgctgcagcaagttctgagtttgcaaactattctactgataagctctttgcaagatgtgatgtcgagggtaagtcagaagagtagctacttgctcgtcaagggtcaattacttaggtcactctgctggtcgtccaaattgaaatcgtcaagtcctttgtgctcctgtcaaataaatcctgtttgtcgggctttgattcaaacttgtgatgttataatgcatacaatgcattacaatgcacttgatgattgactaatgccaccactatccgactacatgtaatgtggtataagatggtttctgataagctgtgtaatatttcc

SEQ ID NO: 103444 - DNA, 650 bp, Zea mays
  unsure (1)..(650): unsure at all n locations
  Clone ID: MRT4577_25846C.1
cggccgggnaaaaaaaaaaaaaaaaaaaaaaaacgaaaccgacgccacgagccctacacagccgaaaccgacgccacgagccctacacagccgaagccgcagccgcagccagagccaggacacccaaagcccacacctcagcccaacccaacaccggaacccaccaaaccgaagcccacgccgcagcccgagccgaaaccaaagccccagccgcagccgatgccggagccccagccaggccccggcaaacccaagccgaagcccccggcgtactccccgggcacgcccggtccttgagatcgtgttcgtatataaacacgcaggccgcatgagcttcgtataaataaataagcggccggcatgcatgcatgcacattgcacacgatgctttgtttcttcgtgcaaggtccgatcatgcgcgcgtgcgagtgctcgtgcgtgacactactacatgcgcacgcacgtgtaaggaatgtaatgtttcatcacactactgattactgtacgtgtgtgtgtgttgtttgtgcctatctactgtacctaatggccacgcctgctgtacgtgttgttgtggagtcgagtcacctgtactcactgtataccgatgaaaaaaagagaattgcatgccaaaaaaaaaaaaaaaagcggnc

SEQ ID NO: 103445 - DNA, 232 bp, Zea mays
  Clone ID: MRT4577_25847C.1
gccggcctggtctcgattacctggacggggtcgacgagcgatcatcaaggctcgtggcctaggccaatggcccacattgcacttggtgggtgcgttggcttaccatctccccaagtgggagagtggacgtcataatttgtgatagagggggtatgcgttcgcgcggccctgccaaataaatagagcaagaacaagaaataaaaaataaaaaaaaaaaaaaaaaaggccccta

SEQ ID NO: 103446 - DNA, 489 bp, Zea mays
  Clone ID: MRT4577_25848C.1
gccggccggtccgggatacttacctggacggggtcgacgggcgatcaccaaggctcgtggcctaggctaatggcccacattgcacttggtgggtgcgttagcttaccatctccccaagtgggagagtggacgtcataatttgtggtagagggggtacgcgttcgcgcggcccctgcttaaaaaataaagaaaaaaaaaaaaaaaaaaaaaaaaaaaaaaaaaaaaaaaaaaaaaaaaaaaaaaaaaaaaaaaaaaaaaaaaaaaaaaaaaaaaaaaaagaaccaatgcaacccccccgaaaaaaaaaaaattggaacccaccgtattgcaaaaattaaaaataaaggggggcccacaccgtccacctctaccaaaaaagcgtgaacccaaaccccctgacagtgacgcttaataacccccgtttagaaggacaaaaattttgaaggtacccaaatgaaaaaaccctgcaggtcacccaacttattcccc

SEQ ID NO: 103447 - DNA, 428 bp, Zea mays
  Clone ID: MRT4577_25849C.1
ccggccgggatacttacctggacggggtcgacgagcgatcatcaaggctcgtggcctaggccaatggcccacattgcacttggtgggtgcgttggcttaccatctccccaagtgggagagtggacgtcataatttgtgatagagggggtacgcgttcgcgcggcccctgccaaatctaaaaatattaattttggtccttgtttgatgtacacagtgtttctcgcagccctgccaaatctaaaatttttaattttggtcctaggttgctgtacgcagtatttcgagtagccctgccaaatctgatgcagttttctatgcgctgggtttcaaaggaaatatttgtagtggctgacggctggctagcttgtgcttcttgcgttgagacttgcatatatgcatctagtttcttcaagcaatctgtttttttt

SEQ ID NO: 103448 - DNA, 316 bp, Zea mays
  Clone ID: MRT4577_2584C.1
attaaacgaacatatttccttctgaattctgatacacaggtccaagttcattgcataatatgcagggatttacaacagcactatattctccttatatcttaaaaaaacacaaaatctatctggtaagaatcgactccgctacatttttgtttcagacagaccttggttgcattgcatggcagcgtcggattgcattggtagtccaacagcaaccaaaaaaaaaatgcagaaggctacactgcaccatgcatgccggacggggagtgtatcttcgtctcagtttcgcgcccatttgctgctgctgtatttcgcccac

SEQ ID NO: 103449 - DNA, 244 bp, Zea mays
  Clone ID: MRT4577_25850C.1
ttagcaagcggagagatacaactatttttcacaacagggacattaaatctaagaggaccattacaacccggcgcgcaggatttatagagcaagcaagctagctactatgcgaatagggtgaaggactgcggaaaggacacatcaaagaacccttctaacatatccgcggatcccgcatggcgctcagttggtggagaacttaaggacaaccttggttccctaagagacggcgtgcttggcgaac

SEQ ID NO: 103450 - DNA, 268 bp, Zea mays
  unsure (1)..(268): unsure at all n locations
  Clone ID: MRT4577_25851C.1
cggcctctaagacccggggggggggggcatcaaaacatactttctatattacctaaatcattcactgggcgcgttttacaactcctgctgggaaaagcctgcgttcccaacttaatcccttcacacatccctttcccagggggtgggggggaananccccacccatccccttccaacggtcgcacctaaatggaatgggaccccccttacggccattaaccggggggtggggtaccccacgtgcgcgtcacttccacccctaccccct

SEQ ID NO: 103451 - DNA, 296 bp, Zea mays
  Clone ID: MRT4577_25852C.1
cgtgggtgagttacattgttaccgtagcaatctttttgggcaaaaaccttacttttttttttgggggcaccccctcaaaacctttgggccccctgcctcccatgggaacccccttgtaaagattttcaaaaccccaaatggtcttccctcccatgacttgcaaaagttcatgcccgtagcatcccctggcacaaaaatttgcccttccaatttttttaaggggagcaacccccggccaacgggcccacccttaaacaacctggttttttggtgtgaacaaacaacccccgtgggaa

SEQ ID NO: 103452 - DNA, 147 bp, Zea mays
  Clone ID: MRT4577_25853C.1
tcgttttaaccctgaagggaggcctgcggaaggggggatctttaaagatctctccaggcatgccaaagacacaggctcagattaacatgaactcatatagaaagcgggaggcatggaactaattaaggatcagatttgctatgaagg

SEQ ID NO: 103453 - DNA, 749 bp, Zea mays
  unsure (1)..(749): unsure at all n locations
  Clone ID: MRT4577_25854C.1
ccggccgggccgggagtttgtttccaaccatggccaatccccatgaaaatcgtctatcccagcctagaatcaatccatgaatgaacagttgtggaactcatcccggccaacggcgtagaagcaatgatggcgacgcgatttggaggaagtgacggcggcgacacaaggccccttccactgatgtttgccctcttcgttggtgatcttctctcgtgtgagttcgccattcctctgctttcttcctttctcctctcccatgtctatgtcctagggtttgggtttcttgcccgcgacggccacaaccgcccaaagagatggtagctcactcgtccctgccgagacatgccggatggcgttctgtagggcagaggcaaccttcagcgaggtcgaggagaagagcctaggctaggcagcatggatactgaactgcaccatggcatcgttcgacgaggcagtgatgagggagtcgttggagcggtgggtctgggaatcatacttcagatacatgggctacttgtcctctgctggcagcacggggatggtcatagaaagtttgccattgcaaggatatgtggtttcctttgttagtaagatctagtctttgagtttcagagtttcagtgttagttttcgtcagtttcgtcagtcactgattgtgccttggaatcgatcacgtcgcgtgtcggcanaactgtagccatggcagggtacttacttaaagaaaaaaaaaaaaaaaaagcccctagggcc

SEQ ID NO: 103454 - DNA, 600 bp, Zea mays
  Clone ID: MRT4577_25855C.1
tcgagtttttttttttttttttttttttttttttttttttttttttttttttttttttttttttggacccctttacaacgaatgggatttcccttaaaaaataccaaaattcctttccaggggggcctatacaatataaaatagctccataacgttccacatgatacagggggtttgctaccagatcacacccaaaaaaaatgttttcaaaaaccaaaagggggggtttcatcacagctccatgtcctttatttcaggaagaggaaaacgaagtttacccgtttttcctgtcagttgccccaactgttcccccgaaacatgcatggaggaaaatatgggtactgggccacttttttttttgacattttaaaccaacttaacgtacctttgccttgaaaaaatggcagcgttccaaaacaaagtttcagtttttaaaaaagtctggatagcaaactgttgcagggcaaactaaacatgcttgggtccataacaagcccgagctgactttttagtaagcattttgaagaaatcctgcaaagctcggacccccggggctgctttggaatcttttataagggccatcacacctggggggcccaa

SEQ ID NO: 103455 - DNA, 623 bp, Zea mays
  Clone ID: MRT4577_25856C.1
gcagtactgcttatgtgattttttttttgaaattcattatatttgcacattgttaactagcaattactcagttaatttcacttgtggctggacaaacttgtatattgcatagctcatatcatggacaaagacaaacttgtggctggccgctggcccttactgatttgtggttatatactcagttaatttcactctgtcacattacataaagtttatattgtgactccacgctatgatagtggcacaaagttttggaaaaaatctaatcaaggttatcattgtccatttcatttttagtgtcaactaattgagttatttctagtaccaagctgcaaggatgcatttactatttaggatgcatttactatttaggactagttactgtgtgacccacaaaactacgtatgtcttccatttccagttctgatgtaatagcagcatgtaaagtttaaagtttactagtaagttgagttgaaatgttattatactttatacgtagtgagtgatcatttatgtgatgcagtttagatacatttatataatgacttcatttattctctatcggcacacaatagtatgatttcgtcaacggggtttcctattttttcctataatttcccccc

SEQ ID NO: 103456 - DNA, 626 bp, Zea mays
  Clone ID: MRT4577_25857C.1
cggaggatcacttttactgtaaagaaatacatctcctatgtggttgtactggacaccctgccaagagatcttgccatgctgattttacccctgaacggaggccctgcgcgacacacgatctggcgagcgggctactacggttccaacttcatcacgaactgatagacagggccttagcataacgtcagcaagcgctccagcctggccccaaagtgttccggatctgttagttctactaacgacagtgaactgcttgtgatgcatgccgctccgtgcgcaacggggacataacgatggccagtgtcgatcactacatcaagcacttaccagagagactcatatacatctacgtactttgactctatgctgtgatcacaatcgcagtgcctcggacgaggacattgactatactacctacaaagtacgtgcggctgtttatcaagaactactcttcggtctactgtttacttggttatcatacctggactgccattatgaaacttgacgaactgcaacgaatttacatgtgtatgaaaaaggttacataggagctctatcactactagctgtacaagaacgagcagtaccggctgaagctctacaagatcaacgatcagctgctggcg

SEQ ID NO: 103457 - DNA, 294 bp, Zea mays
  Clone ID: MRT4577_25858C.1
ccgggccgaccgacgcgtccgggcagcaacacaatcaatatccacacctcctttcttctcccgcaaaccgccccacctactgggggggcaaatgcaggggcgggggcagctgctcctgacgaaaaccaagcaaccgctgagcaatctacccagacgtggagaccgccgacaccagcagcatcaagaccacggtactcaacgcgccgaccaccaacgacagcaccggcggctacgaaacgaacaccgacgactgcagctgcgactgcaacaccagcaagagccgaaccagctgct

SEQ ID NO: 103458 - DNA, 362 bp, Zea mays
  unsure (1)..(362): unsure at all n locations
  Clone ID: MRT4577_25859C.1
acctaaaaccatctgcttcaacccttaaccaaccccaaatttaatccggccgttcattaacggaattattaatggccccggcaaaaagcgggacccccaaaatgccttccccggtggccccgaaccgccggttcgcccccgccttaatgaatgggaaaacctgtgcgccaaaggtcgcttccaacttcgtcgcaagcgcgaaccccttgaagggcaacggcggctttggaaccttcaggcatttaaacttcacctcattcatgccgttcagcttcatgaaggagcgtctcaagttcctcgacgcggacaagtgcaagtgcaagaacacgctcatcgagggaagcggcatcngcgtcgccatc

SEQ ID NO: 103459 - DNA, 116 bp, Zea mays
  Clone ID: MRT4577_2585C.1
cgctgccttatgggacccaggccctgaagctgcacgcctgcgtttccggtgcttccgctatgaggaggctacagggacccaacaggcactggctcagctccgatagctctgtcgcc

SEQ ID NO: 103460 - DNA, 379 bp, Zea mays
  Clone ID: MRT4577_25860C.1
agaaatatggcgggccaattccttagccaaaaaaattttccatgccacattatacagggtcgactaacgggaaacgggcctccccatagggcaaaattaaaggtcgttttggcaaacacagaagacaggaacccccccccgggggggcttgctttatgaggggccccccccaagagccgggaaatgggccccaaaaaaaacccctacaggcttttttcccttctaccggcctttttgggagggctgtcaagggggacccggggaaccccctcaatggggccgatttttattccaaaacaagcaaacgccctggggggaaactgggcaccaagtccggggggtttgggcttgttgcctccggggggaccaaacttaatgg

SEQ ID NO: 103461 - DNA, 443 bp, Zea mays
  Clone ID: MRT4577_25861C.1
cccacgtgtccgcccacgcgtacgcgaattggcaataatagaaaaggagtggatagaagaatatggtggcaaaggaaaaaagaatgagcagccaactgtgactgtcggcatatccaagtcacaaacaccaagcagtaatgttcagacctcgactatggctccacacagtacttgaagtggggactatggccgactgaaggtctacaactaggttgctgccagtgctagccagtcaaagtgccaatggagccctggagaacaacttgtggatctgtgtttttgtgactatttcactggaatgactgaatgtgtaatgtgttcccagtgttgtggtttgcatttgcatgccgcatttttaagtatcttcatgttagcccctgttaagtactcaagttgttagcccctatcaagtactcaagtcctttggggtctgcatgcactga

SEQ ID NO: 103462 - DNA, 481 bp, Zea mays
  Clone ID: MRT4577_25862C.1
ccccagtagtatcagaatcttgtgccactcatttttaatccgcaacctaagggtctgatctgatctttcatttactctgaaagacactatcatggtatattgatatattccctaaaagctgtgtgtctaaatcagctatgcaagctggtatacaatactacaataatttatttgatgaacatattgtgtcataaaaatatttcccaccaatgcaatatggaagatgcactttaccaataaaactgatcattacttagcgtgtggatcttgttgttagtgttgcatgagaagaaatactttccaaattatcatccttgcatgagaaaaatcactccgattaattacttaatttgaattccctgttggggtactactagatcaataatgcatttcccttacctggcttgtattatcattcattttagttccatcaatcatgatatttgtccttttcatgtcaaattggtcttatctagccatg

SEQ ID NO: 103463 - DNA, 268 bp, Zea mays
  Clone ID: MRT4577_25863C.1
cggccccgaaaatcccgggtcgcgcccgcgtccgggaggtggcaacgttatatgcgagggcggtgcgccaacagaccgcgctccgatccgctggggaagcagccccagtcctagtggctgacaagcccgcacccgtcgcatgggggccagccgtggctctccagtcctgaatgctctggtcatctcaccccagccatggacagcggggcggggggctgtccacactgtcgggatcgaaacccctgccatggggggcaatccaacgcgg

SEQ ID NO: 103464 - DNA, 606 bp, Zea mays
  unsure (1)..(606): unsure at all n locations
  Clone ID: MRT4577_25864C.1
ccggccgggctggggccacggcccggggcgcgcaggcccaaaaaaaaagaaattcgcagcccagaaggaacggaggaaccctagcctacccagaaggaacggaggaatcctagcctgcccgccagccgccacggcgccgctgccctcgccgagtcgccggccacgcatcctgcgctgcgcccctcgcccaatggccaacagcccaagcgcggtcgcgtcctgtgtcccaggctcctagcgccgccgcttggggacaaaccagtggcgtcctttgctgcgcgcctgtgcccctatcccagcggccagtgtcgtcggccgtcgcccaagcacggtctcgccgtctcgtcccaggctcccagcggccagcacggtctcgtcccaagcggcaagcgcggtgggctcgccctcggccggccggnggccggcacgccagccgctggtgacactcggtggggatcacaccacaaatcattgtgccggcttcattatacgtggaaagcagtcttggagtggcaacaacatctatggagagagctttctcatctatgaatatcattaaatctgagttgcggaataagataggagacgaatggcttaaccatcata

SEQ ID NO: 103465 - DNA, 303 bp, Zea mays
  Clone ID: MRT4577_25865C.1
aaattcctggggtcgccgaggctctctagtcggcggccgccctctttctttcgggtgattttcaacacaacatgagtaaatagctgcacatcttgagtgtatatggcaggttaactctcaaacctgctattaacctaacgttgacgaagctacatggagacatgaaaggaaccatcatccttagtctacaggtacagcttacacattggccagacgggactgccctttgcatgagtttcactagatggaggtggagggggatcgtggcctatacatgggcagcaagcgcattccacaccttga

SEQ ID NO: 103466 - DNA, 401 bp, Zea mays
  unsure (1)..(401): unsure at all n locations
  Clone ID: MRT4577_25866C.1
ttttggaacacttctggcaccgncttgctcgtcactattaacaacaacgccgcagataaaaaactttattnttaattccttnttaactctaaaggttagtatttttttttnttttttttaccgggttttattttttttttttttaatnnntatatgtaaaaaattttcaanattttataataatttgcctcttttttttcttcttttaaataaatcttttttttttttcttttacttttatttttttattcttttttttaattttttctgtttagtagtaggcgggtctgggttatctttattttttctatttttttattatctctttttttcttctttatattatatttttatattatttttttttttattttatttttttttttatttatatttctttt

SEQ ID NO: 103467 - DNA, 282 bp, Zea mays
  Clone ID: MRT4577_25867C.1
gtgtatagcccgaacatcaatacctttgatgtgaagctggggacctttgtgccgtcttaaaatgtcatcatctaaatgacgatatgttcggaagagatttcgagcagagcctgattccgtgcgggatctgctcaaggagccatattttgcagcccctgtttgtatcagtcggtcacctacctacaaaaccccggcctgaaccgtgtacagtgttatctgaagctgcagtgtttaagcagtgtgaagctatttggaagaagattatggaaatgtagtaatata

SEQ ID NO: 103468 - DNA, 634 bp, Zea mays
  Clone ID: MRT4577_25868C.1
cgccgcggggaggagcggcgcttccccgtagcggccgagcgaggtagatctctgtcgtgccgtgcagtgcagcggtgggatctacgcgcggcttcctcccccaccaacggcttcaccgtcgtgctgccactctggcccgacccacagctccgactatggttccgagtcccgctccacgcccaggcatcgccaccgttcccctagccttggcgtcgctccccacccgcctaggcccgtgggcgcacccccgaatcaaagcaatttggaaacgccggtatctgcgcccaccttccaacccacgatggcatcagtacctcttctcctgctcgatccgtctccgctcgcttggcttgactatcgctgctttgctccattagcgctaaacaactatctcatcttcttccaacttctcgtcggatcatgcaattttcaaatgggcaggtatgagctatgctgattaagatcccttggcattataccataaaatatttgtgaccttttatgaagaacggagactactttcacccccaaatttccataaaggaaatgtgaatggcatttagtgactaatttgatcagcccttaaggacacgtacagaaagtgggatggtatagtattcttagctaattaact

SEQ ID NO: 103469 - DNA, 319 bp, Zea mays
  Clone ID: MRT4577_25869C.1
accttccccagagaaaaatcaataattattacattaattattatcattacacaacatcaacaacaccctacatctacaaccctaatatcctatttttccccacaatctttaccattattttcacctacatctacaccctaataaaaatattttacattggcaatccaatcattttcccataaatcaaactctacaacatatttcacaaatctccctcatttaacaacatttccctgtaatcatatcccagctatctctttacatttaaattatttttacactacccaaaaaatttttacctattattttcaatacaaac

SEQ ID NO: 103470 - DNA, 927 bp, Zea mays
  Clone ID: MRT4577_2586C.1
ttgggaccctcgaggccggccgggttggattgaagggagctccagatccccaatccccaagaccccaacgcctcacgcacccctcaaccctaccgcagctgcgcaggcacacgacctccgtgtgcagcgcatcgccgccatgacgggtcccttacactccagctccggccacaacgccgccgccggcggcgggggcaagaccatcgaggaaatgtaccagaagaagacgcagctggagcacatcctgctgcgccctgacacctacattggctcggtggagaagcatacccagacgctctgggtctacgaggacggcgccatggtgaaccgctccgtcacctacgtccctggactctacaagatcttcgacgagatcctcgtcaacgccgccgacaacaagcagcgggatcccaagatggacgcgctccgcgtcgagatcgacgtcgacggctgctccatctccgtatacaacaacggcgacgggatacccgtcgaggtccaccaggaggagggcgtctacgtgccagagatgattttcggccacctcctcaccagtagcaactacaacgacaacgagaagaagacaaccggcgggaggaacggatacggcgccaaactcactaacatcttctccacggagttcgtcatcgagaccgctgatggacgtcgccaaaagaagtacaagcaggtgacatgttttggctgtatcttgcccttttgatttgccatatttccgctgtggatttgtttcgaaatggagtagatctggcaaaacatattagctacttgtttttgtactcgagattctatagttgatatgattattagaagtaagtgccttctgttatcagtttaaaatctggtggataaagcattcgagtgcacaatttttttcagagtgctaactgtgacagacctgataatttc

SEQ ID NO: 103471 - DNA, 521 bp, Zea mays
  unsure (1)..(521): unsure at all n locations
  Clone ID: MRT4577_25870C.1
ccttgatcatgcaggtaccatgccaacagaatgcttagcttttacgcaccaggtgtgttctctttaggatttgaaattgtcttgtgatttcttttcaatgaacagaattttgatttttcagacttcttttctggatgctaagttgtatatagagtagtttttagtgctcgcatgtgtggttaatcatacaacataggttcttcaagctcatattctggatgcatgctattgttactttgttagcgtgttcatagattttgtgttcagttgtgcaaataaccacctcatagccttatgccatgccacacctgttttagagaacatgaagatagcttgcctcacttcacagactgnnnagatgttcataangcgtaatgttttaccctagnncgttgtttctctaaactattttttagatgttttatgcatgtctattggatatctcagcttttatgactgggataatggaatcacattcatgtgtgctcgctagaaacatttgaagctgtttactagatgct

SEQ ID NO: 103472 - DNA, 247 bp, Zea mays
  Clone ID: MRT4577_25871C.1
cagacgacgactctgccatgggcactgaacgctactgcctgcaagggcctgttatgaggtacatgtgcaaaatgccgccaacctctgcgacacgtggagtctacgcgtctgaacgatacacatgctcactggtgtgcactggcctaaagggcagcagcatgcagcacaactatgcctatgggcatacggatgaccactacatgaagctgttcgagagaacactgtcgatgatggaccactacgtgga

SEQ ID NO: 103473 - DNA, 279 bp, Zea mays
  Clone ID: MRT4577_25872C.1
accgacggcgacattgctgctacacggactgctcaagctgatgatgaccacctcacgagagggatctcggatgccagacacggcggcggagcacgagcacgcgacagacgaggctacgggcgtaccaaacgtagccacaacactgtggaaactgcggcgaggaccgcggcaccaacagcacgaaacagagagagaagcacaagaaggagacgacatcaagagagcagaccaagaacccacgagaagcgactctagacgaaagccagcggcaataggaaa

SEQ ID NO: 103474 - DNA, 368 bp, Zea mays
  Clone ID: MRT4577_25873C.1
ggaacccacaatggctttttccccaaaatttttcccttttagaaaaacccccccggttttttttttttttttggggcttttttacccttttcccggccccaaaagggctttgggttttttttggccccaaccccaacaaacaaaaattgtccctccgaatttgggaacccaacccttttacttttggggatcttaatttggcggggaaattttttttacaagagggtgttgcaaatcgggggggggggctcccacaggaaggggggatgttcctacatccagctttccattttgggccaatgttttttcaaaaaataattttgcattttttgggcccgccttgttcaagcccccatttttttcaaagc

SEQ ID NO: 103475 - DNA, 272 bp, Zea mays
  Clone ID: MRT4577_25874C.1
gaggtcccgggccgggatttccggggtcacccaccgcctccgaagcccctatggcaattgcgattcctgtaagggggtatttgctaataaagggactacgcgtctatgaactttcctgccaacatttacttggaagggataattataccgacgctgtctattactctgtgtctaaccatcctgcccatgcctccaccaatattctaaccttatcagggaccccaaggctcttcaaatcacttccatctacacatatatcaactttacattct

SEQ ID NO: 103476 - DNA, 596 bp, Zea mays
  Clone ID: MRT4577_25875C.1
cgagggtaaggtttgcttagaatatattgtagcaactgatgagtttatagatggttatattacatgacaatacatagatattatatatagcatatcgagggtaaggtttgcttcatagaagaaggcacacataatatttatagacaaaatagtgaggaatatgcttcgtttgttgaagtttgggcgtgatgttcagaagtattccttactgtgttgcacacaacgtctactcttgttgattcttagggtcttgtttgatcctttttgtaggtgattcaagtgttgttgcaggagctctatttttatcagcatcaagagggtttgtctcaggtttatcctttgctggagaataggttagctttcgactcacacttggtgagtccgccgtggaaagtctagacatgactgtagagggagattgagcagctgttgttatcagtttgtttttggctggattgggaggaaggtgcacatcaagtttttcttgaactcttggtagtgatgtcattcttccatatgatgctacaattccttttatgagcaatgctttttctagaaatctgtatgattggttgttgaacactacaatgaatgtg

SEQ ID NO: 103477 - DNA, 126 bp, Zea mays
  Clone ID: MRT4577_25876C.1
atcagatctggggtaaccgtcggatcccgttgggcagatgagctgctgagatcaaagagtctcgcaagtgcgtgcgcgtctggctcggtacattcaactctcccgaagagcctgtgagggcttacg

SEQ ID NO: 103478 - DNA, 413 bp, Zea mays
  Clone ID: MRT4577_25877C.1
cccacgcatcctcaaacacgtgcgtgcaagcactgcaaacgcgaagctgcagggattccttattgaggtgggggctaaaattgatgcttttgacaagacataacaaacacctatcacccatgcttttatatgagagaacaaagtggttgttcttctgctaattagacatgtcagactaatgttgatgtctatgacagagccagatacactggccttagacgaacatgggacacattaagacctaaactgactcatcattagactatcctccaaccggtatatatatacactattaggacagcgaggagctgtagtttgatcctacagaacacaattatgtgcactgctgcatcatttgctacaacagattgatttctgatggtgtgcaacatcaattttgacatatccctaca

SEQ ID NO: 103479 - DNA, 2529 bp, Zea mays
  Clone ID: MRT4577_25878C.1
ccgaccgaccacccactcctctcctctcttcctcttcctcttcctatacgtcgcaccaccaccaccaccaccctccctctcctcgcctcccaaaaaaggcgcggcaccaaaaggcgcgagagagaggcacggggaccgcccgcctcgctcgcctgcgcaccggattcgtcgctgcggcggtggttgcagcggcggcggcctggcggggagatgtcttcgcgctcggggtccacgggcggagggagcaccggcggcggcagcagcgcggggggaggcggcgcggtgccgctggccgtgctgctcaggcgggaggtggccagcgagcgcaccgcgtcggagcgcccggagctgcactggggcctcttcagccaggccaagaagggcgaggacttcaccttcctcaagcccgaatgcgagcgcgtccctgacgtcccgtcctcctccttctccgccttcggcctgtttgatgggcataatgggaacggagccgcaatttacaccaaggagaatctcttgaacaacatcttgagtgcggtcccagccgatctgaacagggaagactggcttgctgcactcccaagagcgctggttgctgcattcgtcaaaaccgataaggatttccagactaaagcacgttcttcagggacaactgtgacatttgtcataatagatggattggtcatcactgttgcatcagttggtgattcccgttgtgtactacaagctgaaggttcaatttatcacctatcctctgatcatcggttcgatgcaagcaaagaggagtgggatgggatcttagtattatcagtccttcttagatccagacttcgcttacatgattgtaattgtcatctaaaatattctttcaagcagctgtgattcatcagtaagacattagttgtcatgtacaatgtacaaaatcttgctaacaagacagatctgtttcgtcattaggtataacaaaataaatcttcacatcagcttcgcaggactgcacttattttgctttgaaatcttatgccttaccctttcctcttgatctccaatattactaataaagttacagtttctccaagtctctcctaatatgtgtagctattcagcattatgtcaatatcttcagcattcagaccgtattctgcctcataatatgtgtagctatctactgcgggtggccgactcattattgcaagtgatggtgtttgggatgtcttgtctccagaagtagcttttaactgttcacgtgaacttcctccagtgcctgcagctgagcaaatcgttaaagtaacctcctttctatgtgcagccataaatcttgaacgatactcttatttacatatctgaaacttttgcagactgctgtgcaatcaaaagggctgagggatgataccacctgtattgttgttgatataatagtagaaaaaaacaactcttccatgccacttgctaaaaggcaaccaggaattggtgtcttcaaaaatatgttcggcaagaaaaaatcatcggattcatcatcccattcccattcagatagagaatatatggatccagataacgtggaggaaatatttgaggatgggtgtgcgcttctttctagacggctggattctgaataccctgttcgaaatatgttcaaactgttcatatgtgccatttgtcaagtagagttaaagccaaaccaaggtatatctgtacatgaagattcatcacaacctgggagcttgcgtcgctgggatggtccattcctttgccagagctgtcaggaaaagaaagaagcaatggagggaaagcgtcgttcacgagattcatcaagaaacagtgggtaagtgaatagttgacatgtgtagagtgatcaggtaactactgaccagcaacaccccagcaccaccattttgcagcatttcttctgttggcacttccttgatcacattcacatgtaatatctgggagttctgatctagaactagattgaagtattgaattgctactgtggaggtggctgctgcttatagctctcatcccaagtgaggagtatgccttgtcctcagcaaggtccttgcccaggaatgtaggcagctttactcagccctttgaccttgatggcacatacaggttgaaagattaacgatgccaaaatgatatggcttgtacattctaaggtccattgctgcgacgatcttcttatagagttctgacaaatagctatggcactgtttctgaattagaactaggcgcttacatcaattcttccccgttcgagctagccttaatttatggctagagaccttagtattatcagtccctgctgaggtccagccttcgctgacaccaatgtaattgtcatctaaaatattctttcaagcagctgtgattcatcagcaagacattagttgtcatgtacaatgtacaaaatcttgctaacaagacagagtcctacaatgtacaaaatcttgctaaaatattctgtttcgtcattacttggatgaaaatcaattggtgtctcaattggaggaaagaaattgttctaat

SEQ ID NO: 103480 - DNA, 1297 bp, Zea mays
  Clone ID: MRT4577_25879C.1
aaatgtgaaaaaatcgacggccaaaaaaaaataacgaagcttgcttctacgagaggatatagagaggaagaacagctcgtccgagaccatgaagagcagcccacacctggtgctgatcctgtgcctccaggccgctctggtcatgggcgtcttcgccgctttggctaaagaaaatgccctggttgagagcaaggccatcgacatcaacccggggcagctcaagtgctgcaccaactgcaacttctccttctcggggctctacacctgcgacgacgtcaaaaaggactgcgaccccgtctgcaagaagtgcgtcgtcgccgtgcacgcctcctactcgggcaacaacaagttcaggtgcaccgacaccttcctcggcatgtgcggccccaagtgctagctagagaggaagaacgcgcgctgctgctagctgctatagcttcgttcttccgccgccggccggccgccggccggtgcatggttcacgtactgtgtgttgtgctactacgtactggcttcttgtgtgttcggttcttgttgttctctcgacagtgcaccttgcgcgccaacaataaaccgttgtttgccatgaataaaaaaaaaaaaaaaaaatacctctaaaaaaacttgcttctacgagaggatatacaattggaggcccctgctcgtccgagaccatgaatagcagaccacacctggtgctgatcctgtgcctccaggccgctctggtcatgggggtcttcgccgctttggctaaagaaaatcgccctggttgagagcaaggccatcgacatcaacccggggcagctcaagtgctgcaccaactgcaacttctccttctcggggatctacacctgcgacgacctcaaaaagagactgcgaccccgtctgcaagaagagcgctcgatctgccgtcgcacgccgtcctactacaagcaacaacaagttcaggtgcaccgacaccttcctcggcatgtgcggccccaactgctagatcagacaggaagaacgcgcgctgctgctagctgctataacttcgttcttccgccgccggacggtgcatggatcacgtactgtgtgatgagctactaccatacacactgacttcttgcgtggtgcgatcttgttcttctctcgacagagcaccttgcgaggcaacaataaaccgttgattgccatgaataaatactactatgaagatatttgcgtcagatccttcctgtgtatgtatgcatccatgcatgcaggcaggcagctgcgcttgcttctacgataggatatcgagaggactaacttgtca

SEQ ID NO: 103481 - DNA, 259 bp, Zea mays
  Clone ID: MRT4577_2587C.1
ctagaccaaacaactgaaaaagggaacacctgcctccacatcgccgctctctgcggccaccagaacttctgcagcgaggtcctggcgcaggagtcgcgtctccatcgtcccggcccgtcgtctctgctctccaccaccaacgacgacggcgagacgccgctgctcgtcgccgtgaagagcggccgtgtctctctgggccttcatctgctcgaccagcactactcgaggcacgagttgctggtggagcatcttcttaagc

SEQ ID NO: 103482 - DNA, 413 bp, Zea mays
  Clone ID: MRT4577_25880C.1
cccacgcgtccgaaaaaaaaaaaaaaaaaaaaaaaaaaaaaaaaaaaaaaaaaaaaaaaaaaagggggaaaattaaaaaaaaaaaaaaaaaaaaaaaaaaaaaaaaaaaaaaaaaaaaaaaaataaaaaaaaaaaggggggaaaaaataaaaaataaaagggggggggggttttaagggtaaaaattttcgttcccgttgtttggaactaatttttttttttttggggggccttaaataaatttagtgggggggggtttaaaaaggttgggatgggaaaaacttgggggtaccccaattttttggcttttgggaaaattcccttttgcccggtggggttaaatataaaaaggcgcggcccgtttttgtttttcaaaaggggcgccccctttatggggaattggaacccccctt

SEQ ID NO: 103483 - DNA, 609 bp, Zea mays
  Clone ID: MRT4577_25881C.1
cgttcggctgattccaggtaggtcaggtgacgagcccaaatcatcttcaggagaagatcgagcttcttcatacactatcatcaacgataagaagctatcacatcttccaaagttaaagcaggtcttggcccaactatgcatgcaaccaacattgatcaactgggcggagtagaccaagttttttctatgcagatggaacataggttggagagacatcttggggagaattctagattagtagtcgtaaagaacgttgggcatgtggccagtctagagaagtccaaagtggtgtgcaagagcatcatcagctattttcaggaaccggcttcaagtgcttcaatcgggggaaaggtaggcaatggttgcaattattaagaataatttggtttggtggattttgtgtagccagctttagcgtccaatttgagtgccaaaagaaatagtcaaaggcgtcttgtttctttcccgttattcctttcatcctttggcaaggccgcacgggctttggaaagtatgggttttatgatgaaatacgctttactttcgatgtcgaataatctgggatgggttgttttaatttgtttatatacttgaatgttgtcgtagcgt

SEQ ID NO: 103484 - DNA, 1206 bp, Zea mays
  Clone ID: MRT4577_25882C.1
ccacgggccggagaacctgattgatatcgctgaagacttgttcactgaaatgaaaagactaggatgggggccatatgaattcacttacaatttgattcttgatgccatggggaaaatcgatgcggggtgaggaaatgtgaaaagtgcaaaaggagatgcggcgacctggagatgaatcaacatatgtgacttataacactatcatttcgggtctcgtaaaatctaaaagattggaacaggctatagacctgtactacaatctgatgagtgaaggcttctccccaacaccatgtacatatggtcctcttcttgatggcttattaaaatctggaaagatggtggatgctgaaaatctttttaatgagatgctagagtatggatgcgaacctaattgcaccatctacaatattctactgaatggacaccgaatagctggcaacacagaaaacgtttgtcagctttttgaaaagatggttgagcagggaataaacccagatataaaatcctatacaattcttattgataccctgtgcacagctggaagattaaatgatggtttgtgttattttagacagctacatgaattaggacttgagcctgatcttatcgtttataatttgctcattgatggtcttggaaaatctgaaagaatagaggaagcagtcagtctcttcaacgagatgaagaagaaaggaattatcccaaacttatacacatacaattcactaattctccacttagggaaagcagggaaagctgctgaagctgcgcaaatgtatgaagaactactgagaaaaggatggaaacctagtgttttcacatataatgcactcatcaggggttacagtgtttctggcagtaccgataatgcatacgctgcctatggtcagatgattgttggagggtgccagcctaattctagcacttatatgcaacttccaaatcaattgtgactgagaaattagctatagtatgtagttatttctgtacagttttgtccatagtgcgaaaatggtcaactgtagatagtagccaatacttttaacatatccgaggatcgatagatcttgttctacattccattgttactagcagaaaattatgtaatatacagataatgttaccatgtgctccatttcactggcatgttaaagcagcacctactaattcacctgtctgtcatgaaatagattgaggttttaccat

SEQ ID NO: 103485 - DNA, 290 bp, Zea mays
  Clone ID: MRT4577_25883C.1
tttgacacgcccacagcagaaaaggatcggggcagttggaacggctgtcggcgcaagaccagcaacacgcgacagattattatagcgagagaaacggacgtgaacaaggggggaaggtgaaatactataagggaacacgaccagctgagacaaggagagctcacaaacggacgagtgactacgagagaccacttggagcggcaggtgatctgcgcgagagcggcctaagaagggatgcaaggcaccggaagggatgaagactgacagaattgtgcgcaacaaggaccgag

SEQ ID NO: 103486 - DNA, 471 bp, Zea mays
  unsure (1)..(471): unsure at all n locations
  Clone ID: MRT4577_25884C.1
ccggccgggaatagagatgacgaggcccctacttancctacgggtaggtggggggaaagaagagtgggttagcgggcttccttcactagcaaaccctagcgccacccncccgnccnnccactcgcttcagccgcctccgccgcgcgtacgagcaggcggagacaggatgtcgcctggccacggactgcgctcgcggacattcgacctcttctcgcgccccttccgaaagaagggctacatcccgctcagcacctacctccgcacctacaagatcggcgattacgacgatgacttggtgaacggcagcgtccacaaggagatgacgcacaagttctaccacgatctttttcgttcgcgccaggaacgtcgccaattgcgtcatcggcgtcgtaggcatctggcatttcagtgtacgtatcatcatgaagagcatccatgtccgtgtgaagcatgtgtaattgtcccgatgct

SEQ ID NO: 103487 - DNA, 271 bp, Zea mays
  Clone ID: MRT4577_25885C.1
ttagctttagaacgagggtacccgagactgcctatgatgcgggcattaatgacgactctagtccaacagaacagggttgcttgtgatgtgagtgaaatataaaacattagattgggtttatagcgatgccactgtgtcattgacgtatgatgatgacatcaattaacttggcagggttcaggttttaataggtgaggggaactcacaacacacgtggattcaattgttgaggagggttacttaatgtctacattctatacatttattattg

SEQ ID NO: 103488 - DNA, 1214 bp, Zea mays
  Clone ID: MRT4577_25886C.1
tgaacataattctatagtcaacggagctaggggttcaggggccactgttcgggtttttcaacataacaatcctgctcacttggaagaggtattgagagagcagattgcaggaggccagcctcgcacacacaggccatggaagaagatcattgtaattgtcgagggaatttatagcatggagggggagctatgcaaactccctgaggttatttctgtctgcaagaaatacaaggcctacacatatctagacgaagcacacagtattggagctgttgggaaaacagggagaggtgtttgtgagctgctcggagtggatccagctgatgttgacattatgatgggtacattcacaaaatcatttggatcatgtggaggttacattgcagcatcaaatgagattattcaccatctaaagcatacatgcccagcccatatttatgcaacatccatgtcacctccagcagtccagcaggtcatttcagctataaaggtcatccttggggaagatggaactaacagaggggccaagaagctcgctcaaattcgagagaacagcaatttcttccgctcggagcttcagaaaatgggttttgaggttcttggagataatgattcacctgtcatgcctatcatgctttacaatcctgctaaaattcctgcattctcaagggagtgcctgaggcaagctgttgctgttgttactgttgcatttcctgccacgccacttctacttgcgagagctaggatatgtatctcagcttcccactccagggaagatctcataaaaggattggaggttatcagcaaagttggtgaccttgtgggtatcaaatacttcccggttgagcaagaaaagaccacggctgttgaaaatctgaagaaaattcaatgaacaatggcaagaactctgaagctgttgtagggtcatcttagtgtgcatcgcatgcctcagtttggcccttctgtgcacctctgggcccttttttgtccttctgtttgtggagaaatttagactttgtacagtatgtatcatccaccatagttgaaaatataacgggcagatagacattgtcatcgaattcggagaagtaatttttccggtcaccactttaaaccatttagactatgtgactgaaaccatgtagatattattatcgatcattaacgttgtttaagggcggccgctcgcgatcacacgtcccggacgagtggtc

SEQ ID NO: 103489 - DNA, 177 bp, Zea mays
  Clone ID: MRT4577_25887C.1
tgaatgaacctttacttttgtttccgctttttctatacccgaaatgggagtccattaacgaggactatctgaaaggctacgctctacaccccacccagccgattgtgcacattacactgtcctccggtacctactcggatccagtgatgcatatgtacagccccaatatcttgttcc

SEQ ID NO: 103490 - DNA, 1349 bp, Zea mays
  Clone ID: MRT4577_25888C.1
cccacgcgtccgaacttcccttcatactctccatcttcccctccccagctctaatcaagcctacaacataatcaacatgggtgtcattgagaagctcagccgcaaggccggtgtcatcgtcggtgacgatgtcctccgcctcttcgagtacgctcaggagaagcagttcgccattcccgccattaacgtcacctcttcctccaccgtcgtggctgccctcgaggccgctcgcgaccaaaagtcccccattgccctccaggtctcccagggtggtgccgctttcttcgccggtaagggtgtcagcaacgatggccaggccgcctccatcgctggtgccatcgccgctgctcactacatccgcgccattgcccccacctacggcgttcccgtcgtcctccacaccgatcactgcgccaagaagctcctcccctggctcgacggcatgatggatgaggatgagcgctacttcaagctccacggcgagcccctcttctcttcccacatgatcgacctgtccgaggagcccgttgactggaacatctccaccactgccgcttacctcaagcgtgctgcccccatgaagcagtggctcgagatggagattggtatcaccggtggtgaggaggacggtgtcaacaacgaggatgtcgacaacaactccctctacactcagccgaggatatcctggccatccacaacgccctctccgccatctccccctacttctctatcgccgctggcttcggtaacgtccacggtgtctacaagcccggcaacgtccgcctgcaccccgagctcctcaagaagcaccaggcctacgtcaaggagcagaccaagtcccagaaggagaagcccgtcttctttgtcttccacggcggctccggctcctccaaggaggagtacaaggaggctatcagctacggtgtcgtcaaggtcaacgtcgacaccgacatgcagtacgcttacctcagcggtgtccgtgactacgttctgaacaagaaggactaccttatgagcaccgtcggcaaccccgatggtgaggacaagcccaacaagaagttcttcgacccccgtgtctgggtccgcgagggtgagaagaccatgagcaagcgcactcaggtcgcccttgaggacttcaactgcaccaaccagctgtaagatggttgctggtgtcgtttgagccattgaaaagccaggaagggaaaacaagcttagcccccatttttctttggagacccgattggggtttgttggtgatattgttcgtatgtagcgatgtattttcgatacgtgataatgaaatgccatgtcctccggacgagctcacgctcgtctgaaaccgaatacct

SEQ ID NO: 103491 - DNA, 494 bp, Zea mays
  Clone ID: MRT4577_25889C.1
gctgtgtctgcggcacaacaccgcgccagcacaacacatacgcatacctcaccttcctttcctcctcccgtcctctatcaaaagaaggtagggaaagatctagatctggggggtgagaaagaaaggggagataacggagactacgccatctcactggcgcggcggcgaaccacgacctgacgtggtcctgctgcgagatgcggctctagttcggccctcacggggagggcctgatgctgaacgagtcccgacggttcagctggacgccgctctcgagcctgccaccgccgactgcgcgctcgccaagctcggaggctcctccgacttcgtggctcaggtcggcgcagacaacctgggagacatgctggggaacatccttaagcggaacccgccgaagtcggacgtctgcctgcttcacaattacgcgagcacgtggatgcccttccggacgctcctgcactacggtgagcgcgagttcatgctctacaggtacc

SEQ ID NO: 103492 - DNA, 299 bp, Zea mays
  Clone ID: MRT4577_2588C.1
ctttcgcgtgggctcacgcggcgagctcctcgagctcgctccccgtcgcaagctagctagaaaatggcctaggaagaagcagcctactgcgcgccgacgccgtggagctggtgctcaacatggactccgtcgccgacgcccggaccaggcgcggccccactccggtcctgatggccgaagccatggagaaccagggcatcgctcaggttctgtgcccaagaggcgctgaggaggacaccgaccatgcatagtgcgccacgtcggaatatacattgtgcacacagagcgcgtgatttggt

SEQ ID NO: 103493 - DNA, 214 bp, Zea mays
  Clone ID: MRT4577_25890C.1
gccaaatccacatcttcaagaaatcaggctgcggataggcgatatctaaattgagaatcactttttgcttatgagggcctatcctgaaaccacaagaaatgagaacgggattcctcggggaattctaaagccacattcaccaaaaataaggaggcaaaagtgtccatatatgaatcacaattctgtgctgtggtactacacctatccacaatcc

SEQ ID NO: 103494 - DNA, 615 bp, Zea mays
  Clone ID: MRT4577_25891C.1
atggagtggaatctgggcgtcgcggagggagggagtgcgtgggacgctgactacgggggagggagtgcgctaagggcatggcggggccgaggccgcacgtcttgtgggtgtcaatgtcagcgtggagcaacgggtgacgacgacccagcggtgggagtgggcgaaactattaggcatcaacagagatgtcaacctccttgcccatctagaaggacgccaccgtcttcttgtagaacacctagatctgcaaaaatggatctggaacatggagaagcggtcagtggcggcgacgccctcgacgagtgggacctcgtatggctggtcgtgtgggagtgtgacagccaaatccttggaggcgtcaaggcaacagtcggagcagaacttgtgcgcctcctagaggtcgtagatgtggggctcgcttgtggcgatttggaaggggggcctcgtggaggcggcgacggaggggagagggttgtcggatgtggggttaccgcaggagtttgcaatggtgcgcatggtgcgagggggtttgggaggggatgtaccgaggatctaggtgcacatggtgcgcatggacgcatggtgttaggggagcggttttcacggtgggaatga

SEQ ID NO: 103495 - DNA, 192 bp, Zea mays
  Clone ID: MRT4577_25892C.1
agtcacacgtccggagcctagccgtcgcgtacacaccatgccgcgtggaagccgaacccgcacctcccgcatggcccctccggccagccggacccctcagatgagagctgcacccaggccagcaccagtcgctcagccaccagcagcggcaccccaatctgcagttggctcttctgctgctgcgccccggca

SEQ ID NO: 103496 - DNA, 260 bp, Zea mays
  Clone ID: MRT4577_25893C.1
acaagtgcttggttatcagggcacttgttcaatacagagacatgcatactttttcctttatttgattttaaggtgctgaatagctagcagttgcttaagtaggagcgagtgaaccagtcagagtgattagctgtcctgctaatcttctgtattgtgatgaaatacatgctcctggttggtcctgttcaggggattatactacttcaagtcatatttatgctgggttacaggtgtactttttggaatgccttgtgattctt

SEQ ID NO: 103497 - DNA, 139 bp, Zea mays
  Clone ID: MRT4577_25894C.1
ctctccaaacaagataatactattatattaacaactctgttcattcgaccctgtgatactagtccagcccagaaggatagataattgtaagtcacgaccaaattcattaacaaccacatgttcctatgaaaagaatgcc

SEQ ID NO: 103498 - DNA, 403 bp, Zea mays
  Clone ID: MRT4577_25895C.1
ggacaggtatgtgcatgggggcatgggcagcacaatgtccccgtggcacccgagggatgtaaagttcatcccagcgcctatggctccgcccatggtgcaacaaatgtaacgcatggatcaacctatgccatctcctgctggatatgcaccagcaccagatgaagggcaatcgtatggtggcgtctccatctccttctgcccaacgttatgacggctcctgcagggcaaggtatatccgtcatgtgtatactcgtagggtggagcataccctacaaccgctcaaggttacccacatggtggtggataacctccacctggccaaggttacccccagggccagggtggtgcatatcctacgcctgattcttacccctcacaaggttactaccccccatgagggggc

SEQ ID NO: 103499 - DNA, 347 bp, Zea mays
  Clone ID: MRT4577_25896C.1
gcggcgcctcccgatccggtggtgggccaatgtcgccgcgcttggcatctttcttgcgggggccgcatctgctgacgcgggctttctcagcccggtccttattaataatgctggtgcacctattctttactgggaatcaataactttcatcagacccactgttgctctaatatgttttgagacaatcggcttattactaaatgattagtcacctccttctcccttcaagtcatcttgcatggatgactgtagcatatctttatggcttgctgataatcacagcggtgttgaacataagcaagcccgtgccgtattttatacgcactgcattgcactgcacgatacat

SEQ ID NO: 103500 - DNA, 255 bp, Zea mays
  Clone ID: MRT4577_25897C.1
ttttatattttttttttttttttttttttttttttgtttgaaaagcaattgtccgggcaatatagcgtctcgcggtatgtgcctacaatatgatggaccaaagttccacatgctgtaaattgccaacatctttttaacataagatgccattaccccatggttaaacccccaataaccatcgggggattttgctttgaatgcttactgcaaaaagagggacctcattctttttttggcatccagaaattaggtttt

SEQ ID NO: 103501 - DNA, 237 bp, Zea mays
  Clone ID: MRT4577_25898C.1
ggatcagggtgcggctgccgtgtgactccccggacgggcctcatggcggcggagaccggcgctgtcctgctgcggtcgtactcgtccagcgggcccagggatctgtggcccggcgtctccaactgcggcctgcaggtgctctcgcggggacggcgtgcccgcggcgacggtcacgaccacgacccggctctgctcatgtacttcctcgagtctggcggctggtcgtagaccgaggtg

SEQ ID NO: 103502 - DNA, 356 bp, Zea mays
  Clone ID: MRT4577_25899C.1
ttcgacccacgcgtgcggtctggttgaaatacgactggttttatctatgcaagctacgtaaatgcgtgccaagcttgtgggacctgttctgagccttccaggtcaaaagacgccacggaactaatcacattgatcttggatggcgtggaaagtagatcttaactccgatgttcgctgctgcagtgtatgtgccctaatatctctatgagaatgacatttaagctagttatggtcacgcgcgtgtacatgactgtaactgggcacaggcacagttcccttcaggaatagaaggacggatgtccctatgataggaagatactggccctaggcctgcagatttataacaacggaggcca

SEQ ID NO: 103503 - DNA, 625 bp, Zea mays
  Clone ID: MRT4577_2589C.1
actttctccaaaaaccatatcaaaggccagaattaggaatgcagcttccaacaggaaaataagatctgtagaccacaagtccggcgacaagtttggcaaaattggtagtgccgttaagtctgaaacaaaagctttttcatcaaacagaaccgaagggatttcatgcaatatcagcaaagtaattgctgatccagactccgagaagtccaacaaggatgtggtaagagaggtgtcggggctgttttgccaagattcttgcacgatagacaagcaaggatcatacaattctaagttgagaagcagcacaaggaacaaagctccgactccagatcatgaaaaggagaacagactaggctctagtgatctcaactctaaaccaaacagaactggcagtctgcgttccaaatctgatgcaaaatcgatcaagaaaaacacgcgtgtgctcagtaagcaccaaaggggaaatagaagtgaaccttgcaccttgatcacgagcaaacctgcattgtttatcttaagtggaaatagtgagcagagaaggggttatcgctcgatacttagacagctgaaggagcgagtttgtagggattcacatcactggtcataccaagcaacgcatttcatc

SEQ ID NO: 103504 - DNA, 520 bp, Zea mays
  Clone ID: MRT4577_258C.1
atggacttgagcaacaactacttgcacgattcaattccttaccagctgccatcaaaccttacctatctgaacctggcgaaaaacaacttctctggtaatcttccgtactccatatccaacctagtctcgcttgagtacctcaacctcagccacaactcgttgtttcaggaaatcggagaactgtttggaagcctcagttcactctcggaactagacatatctttcaacaacctcacggggaatcttccttcctcaatgggctttctgtcaaaactttctagcctctatatgcaaaacaatcagctgtcgggcacagttgatgtcatcagcaacataagcctagcgacactgtaagtagcttcccacatatatatatatatatatatatatatatatatatatatatatatatatatatctatctacctacctataaagatatgtcttgtgggatagatcacaaaccatatgtacatgttccctgtactacaaatagggttttctatgcctgtccattctt

SEQ ID NO: 103505 - DNA, 627 bp, Zea mays
  Clone ID: MRT4577_25900C.1
tgaaagttggttctttgtttgtgctttgagtcttatataagtttgaacaaactgcaggggccaacgcacaggaacaaaaaaggataggaaaaaaagtgcaatggcaccaacaccgttgacagaccatgatacgattatcactaataatcagcataaaatttctactcatgtttttgttagcttgtgattttgcacatgtggaggttcacccttgtctagtatgtaatgctgttataggaaaaggtccccagcatatgctaattccaccatattatctttgtgtcgtgataacttgtattattgacccatttcttaagctttactgcatttttcttaaaaaattgtttgatctatgttattacaaataaaaatagtctctcccatcctgtccaaagtgcctggaggcaaagcacaacctacaagacagatgcttatgtgtgctcaatcagaatttatgtgaacgtagtatcttgctagccaagccaactgaagaaatgtaatgagctaaatgagtaaaaactaaaaagataggcagtctacttcaaagcatttcttagctataaagggctttccttgaaaagaggtgtctgctaatatcacatattatattgctatgcatggttaatg

SEQ ID NO: 103506 - DNA, 788 bp, Zea mays
  Clone ID: MRT4577_25901C.1
ccggccgggattttcgcctcaccactctctcaccagaccggccgggaacggttcacacacaagccagcaaacatggcggttggaaagaacaagagactctccaagggcaagaagggcctcaagaagaagacggtcgaccccttctcccgaaaggactggtactcaatcaaggcccctaaccctttcaacgttcgagatgtcggcaagaccctcgtgaaccgaaccaccggtctcaagaacgccaacgacgctctcaagggccgtatcctcgaggtctctctggccgatctccagaaggatgaggaccactccttccgcaaggtccgcctccgtgtcgacgaggtccagggcaagaactgcttgactgctttccacggtctcgacttcacctccgacaagctccgatcccttgtccgcaagtggcaaactctgattgaggccaacgtcactgtcaagactaccgacgactacctcatccgccttttcgccatcggtttcaccaagcgacgaggaaaccaggtcaagaagaccacctacgccgcctcttctcagatccgagccattcgacgcaagatgaccgacatcatccagcgtgaggcttcaagctgcactctcacccagcttacctccaagctcattcccgaggtcattggccgcgagattgagaagtccacccagggcatctaccctctccagaacgtccacatccgaaaggtcaagcttctcaaggctcccaagttcgacctgggtgccttgatggctctgcacggcgagtcaggtaccgacga

SEQ ID NO: 103507 - DNA, 465 bp, Zea mays
  Clone ID: MRT4577_25902C.1
atgccctcaagtcccagctacaaggtgtatctcttcgtatacagactctgaaatcaacacaggcgatgggtgaacccatgaagtgtgtgacgaaagccatgtggcagatgactagccagatgaatcttcttgccttgtagaaaataatgcgagagtttgagatgcaaaacgagaagatggagatggttggtgaactgatgaacgatgccttcgatgatgccttggagggtgacgaggaggaaaagatggaatagaactcaaattttgatgaccgcataagtgtggagacttgaattcatatatatttagttaggctcaatattaacgcaaacagtcgatgatcaagtttttcaattagtattttagtctggatttaaagtacacttatgtatgagttatttgataatgcttatttattataaattgaatgatacttatttatattatattaattacaatgttatt

SEQ ID NO: 103508 - DNA, 186 bp, Zea mays
  unsure (1)..(186): unsure at all n locations
  Clone ID: MRT4577_25903C.1
gggccgcnggagcccattttttcccacactgctaaacgttagaagtttgcaggcttgcagaggtcaaacaaacacacgcccccccacaaattttgacacggttgcctgacttgtccacctgctccgtcttgctctccccggcgtcatccttcatagggggcctgttggtgtcggcctccggggcct

SEQ ID NO: 103509 - DNA, 346 bp, Zea mays
  unsure (1)..(346): unsure at all n locations
  Clone ID: MRT4577_25904C.1
cccactngtggttgtaattttttccagaaccccttctcaggagaagggccgcccgggggacaccaaagcaatggggacccatagctgacgggtgacggcggattccgtgaacaacgcgaaccccgacaaggggggcaacacagctggaggacccacttgctgactcccagcaagatgcatgaccaccacagctaggaaggatgacaagacctgcccacactaccaacatggtgagggccctcggccagataaccaccagggcgagggtggactactaaaatagcggccccgacaagggccaggagaacgactgcacaggccacaagggggagggcgacacccaccg

SEQ ID NO: 103510 - DNA, 332 bp, Zea mays
  Clone ID: MRT4577_25905C.1
gtgtatttccaattaaatttgtacgtatcttcttttttgcccgcgaaaacagttaaattataacgggttttttccttttcaattagaaaacatggtcccgcgtttcttttttggaataccaacctttcattttttaaccaacgctttccctggcgggatgaaattttcaacccgttaacctgaatcagatggcttttttttgactctgatgccttaaactataccccttaacctgacccaactgaacaaaacgtttttctgcccttaagtttcggaagggggaaaattaccttttgagcatcatcatgcaaaccccacttgtcccgttcctt

SEQ ID NO: 103511 - DNA, 203 bp, Zea mays
  unsure (1)..(203): unsure at all n locations
  Clone ID: MRT4577_25906C.1
ttaatatttaatggacggctaggaagaagggggcgatgtctacgacggaggtgatgtcattatagatcatcgtacacactcttttcttgttcacagaggtgtacacttaactgttcaatgcaggcgttcacttgcttaagtcctaggttctggacgctaaaatgatctgggttttcttttgancaatggtagctattaggtag

SEQ ID NO: 103512 - DNA, 274 bp, Zea mays
  Clone ID: MRT4577_25907C.1
gccaccatgggccgcgagtttgggaacctgacgcggatacggcatgcgatctcctacagcttgtcgccctttgagcagcgcgcgcttcccgcactagttcagcaaaggcatccccaacgtgctgcgccgcactcgcgagcgcatcctgcgcgtggcgccgccatgtgtactgttctatctgatctacacatggggcaaccaggagtttgcgcagtccaaacggaagaatccagctaagtacgagaatgacaagtgatcagcctgcacctggatg

SEQ ID NO: 103513 - DNA, 292 bp, Zea mays
  Clone ID: MRT4577_25908C.1
ggccaaggtcacttgatttttcacaccaaactgtgaaagcaggcaatgctacggccccagcccttttacataggtgcagacgatgtccatcgttatattatccaaggttgtcgacctagctggcgtgaccaacagctataagattgctcagtgctatgatacatgccatgctttactgtcacaaaaagaagtgcactaggtgtttaagcattcaaggtgtgctatgccaccccaaagatatagccgagagaaagaactatccaaaccaaagggagcgatttatttgctatca

SEQ ID NO: 103514 - DNA, 425 bp, Zea mays
  unsure (1)..(425): unsure at all n locations
  Clone ID: MRT4577_25909C.1
cacatacacaagcacaagcgcactctagcaatggcatctgaggttgtccgccctagcgacgccgagctactaaaggcacaagccgacatagggcggctcagcctctcctacctcacgcccctgtcactgaggtgcgccgtggagcttgacatccccacgggcatctaccgccatggcggggctgcctcagccgctgagctggccacggggctggttctcccctgcactaagctgccgttactgcgccgcgttctgggggtcctagccgcgtggngngtggtcaccggccacaagcagagctctgaggaggagcgtgaccgcatgagccccgtgtgctacctnctggtggacggcattcctcacgaggaccacatgaaccacaccgtnttggtgctcacctgcacctcgacgcgctacatcgaggc

SEQ ID NO: 103515 - DNA, 716 bp, Zea mays
  Clone ID: MRT4577_2590C.1
gtgctgccgagcgcactcatctggacagtggcttcggctgctgctatacccgaaatggaagtccagggacaaggacgagctgcaaggcttcgccgtggaccgccccgagcccctggtgcacttcgcactgtcctccggtagctactcggatccagtggtgcggctgtacagccccaagagcgtgttccagcagctggaggcggcgaaggaggagtacgtccgcgccaacgtgggcgtccgcgggcgggggcagcacaagatcatcctccccaaggccctggagctgtacgcgagggacgccgggctgggcgcgcaggaggtggtggccgcggtcgagtgccacctgcccgagggcctccgggacgccgtgcgccggagccagcagcaggccggccgggcgcgcgccgtggagtggaagccccacaacctggcgttccggtacctgctggccaaggagctggtcggcgggtcccccgcgtgcagccggcagctggaaccggtcagtgcgccgctgcgggctggtccgtgatccatcatcagatcgccgtgggtccgtggccgtgccgagccgagcgcgagttgagatgtgcggcggtggctggcggcggcacactgcgttcgggccttgggggcatttgtatgtacagagaagtcagagatagatggacggcgaaacagacatctgattttactagtactagtatgcgccctgctgt

SEQ ID NO: 103516 - DNA, 302 bp, Zea mays
  Clone ID: MRT4577_25910C.1
tcgctgccggcgactttttttttttttttttcgcacgagaagactactacgcacccacgaagtgctggactgtgtagtagcatatgccaccagttatggtgccagcttatgtacacagatgcggacatatggagagatatacatttctccgtggacttatgtgaaaaagggcaacgggtttcgccgtgtataggagagcactacgaatctcggggatgctttgtctgagggagggataatggcgctggcgtctacacaacgaacactgctaattgggtctctgagagagaccccattcggcg

SEQ ID NO: 103517 - DNA, 1670 bp, Zea mays
  Clone ID: MRT4577_25911C.1
cctcgagggggaggggatatgaccacgcacgcgcggcaccacatctagtagagcctgcctaccgccccactgtcgtcgtcattaattcaccaggctagagctagctagctggctctaccgccgttccccgatcgagcgtccgtcatggagattgatgagatggagagtggtgtcgtcaatggaagcggcggcggcgggcgggtcgttccggcgggcgaggtgctgggagctgctgtgctcggcggcgggcataggtcgtcgggttcgcccgcaagctgggcaggatcgcgagggacgacccccggcgggtggcgcactccatcaaggtcggcctggcgctcacgctcgtgtccgtgctctactacgtcaggccgctcttcaacaactggggggtctccaccatgtgggccgtgctcaccgtcgtcgtcgtcatggagtacaccgtcggtggcacgctgagcaaaggcctgaacagagcgtgcgggacgctggccgccggcttcatcgccgtcggggctcacaaggtggcctacctgtgcggcgacaaggccgagcccgtgctgctcgccgtcttcgtcttcttgctctcgtcggcggcgacgttctcgcggttcatcccggaggtgaaggcgcggtacgactacggcgtgaccatcttcatcctcaccttcagcctggtggccgtgtccagctaccgcgtcgacgagctcatccgcctcgcccaccagcgcttctccaccatcgtcgtcggcgtcggcacatgcctctgcaccaccgtcttcgtcttcccggtctgggccggggaggacctccacaggctcgccatcggaaacctcaacaagctggccgagttctttgaaggactcgagtctgaatgcttcagagagaacgccacgttcgagaatttggaagcaaaacccttcctccaagtgtacaagagcgtcctcaattccaaggccaccgaagactctttgtgcaattttgccaagtgggagccctgccatggcaagttcaagttccggcacccatggagccagtaccagaagctcggcgctctctctcgccagtgcgcttcctcaatggaggctctcgcttcctacgtcatcaccctcacaagaaccgagtaccctgaagcgcggcccgagctacgctcggaggttcgaacagcgtgccgccagatgagcctgcactcggccaaggcgctccgcgagctctcggcggcgatgcggacgatggccgtgccgccgtccccggccaacgctcacatgtccgcggcagccaaagcggccaaggacctcagggacgagctagaggacgcggacctggcgcaggcgatgcacgtcgctgttgtcgcgtctctgctctcggacctggtgaccaaggcgaagcagatcacggaatctgtcggtacccttgcgcgacttgcccgcttcgtcaagaacaacgaccatgagaacaacgctgacgacaaggatattgcggctatcgatgctgtgagctgagaaagctagcagacggtcctgtggcggcaaaaatatatcctaattaaccgtgcatccagacgttcatagctatctaattcgcacatatcgaagatcggatggctctgaacgtctagatgcatggctgcacaagttaatatggatgcacaatatatatgcgttgccggc

SEQ ID NO: 103518 - DNA, 467 bp, Zea mays
  Clone ID: MRT4577_25912C.1
ccccacacgtttatggccatagtacgcagaaccacctggggtcacttcacataatatacatacatacatgggcgagcgtcccaaaaacctttttttttatgtctaccctgacagacgaaaggtttgcctccccaacaccagaaaaactaaaaccggaaaaaaagaagagaccatccatccatccatggggctagggttccatacggggggtaaaaacctaaaaaaaatgccagcacaggggcggggctgccggccctgtgttcctaggggcaggccaaagggaaataacttcctccctttgccgttgccgtacagccggaaaaggttgaaccccgaaacaagcgaaacccccaccatgttaaggctggccgccaccgaacaggccacggggccacccgcctgggcgcaaaaacgcttggagagggggcacgttttcatccactggaactggtggaacccgtacttgc

SEQ ID NO: 103519 - DNA, 672 bp, Zea mays
  Clone ID: MRT4577_25913C.1
agcaaaggcttctgatacatgtattccccaccacgccaaatatttcatcactagtcaagtcccaccgaaaagattgccggcaacacatatatattgtgcactcatattaccctgtgcaactatgcatctagacgttcagagccatccgattcgcatacaggcatatcgcctgatgtggttttatgtaaaaagggtaccctatgtaaaatgtacccatcttcgatttcgatatgtgcgaattagatagctatgaacgtctggatgcacggttaattaggatatatttttgccgccacaagaccgtctgctagctttctcagctcactgcatcgatagccgcaatatccttgtcgtcagcgttgttctcatggttgttgttcttgacgaagcgggcaagtcgcgcaagggtaccgacagattccgtgatctgcttcgccttggtcaccaggtccgagagcagagacgcgacaacagcgacgtgcatcgcctgcgccaggtccgcgtcctctagctcgaccctgaggtccttggccgctttggctgccgcggacatgtgagcgttggccggggacggcggcacggccatcgtccgcatcgccgccgagagctcgcggagcgccttggccgagtgcaggctcatctggcggcccgctgttcgaacctccgagcgta

SEQ ID NO: 103520 - DNA, 449 bp, Zea mays
  Clone ID: MRT4577_25914C.1
gggggggtaaaaaaaattatttttatggcccgggccttcccttttggttttttttcccttctccaagggtggggctaacactttcctaatcctttcataaagctggttacgcgaacgcccgaagaaaaaaaaaaattgggaaacggggctgtttaaactggactggggattttgtttttttaacttatgacaaccgcttctttttattggcaggacaaagcaggccggaagccaaatttatgggtgggcaactcccgcagcggggcaagcgacggggggggggggtcctggccggagggggggctttggcggtgctccccctcgtaggggacaatcagcattgacgggtcgggggggtcgccctccacatgctttcggggggggcagccgcgccccgtactgtatttgtagtagccgcgtgggtagggcgaccccttgatgggtttttg

SEQ ID NO: 103521 - DNA, 496 bp, Zea mays
  unsure (1)..(496): unsure at all n locations
  Clone ID: MRT4577_25915C.1
cggtatatggtactagattaacaacacctacatcttttgatggtgatatgtaaacatcatcattgtaaagtacatgcaatccatctgttaaaatactgaccactattttttctgaaaaagattttatcatcaatagttcataacaaaaactattagggcaccaaggaaatacataagtttcacatgaatctattatttttacaggaagaatgtagggataaagggaaaaacctgcaatccagagaatctatatttctttttagaagcaggtcaagaccggggctaaaattcgtttctacaggtagttgaatttaggacaacgaggaccacctaattaacttagctagaggccgatttgcttttttaaagaagagggtcatatattactcatgtatatgttctcatatagatttgctatcatataatataactttaaaagaaacatggtnaaatgtgtactgaaaggattagtattaattgaagagttaaatgcatg

SEQ ID NO: 103522 - DNA, 483 bp, Zea mays
  Clone ID: MRT4577_25916C.1
atggagcgtagtggaacaccctggtgcgcccgccaacgtcgcctgcgccatcgccaagctcggcggctcctccgccttcgtcggcaagttcggcgacgacgagttcgggcacatgttgctgaacatcctgaagcagaacaacgtgaactcggaggggtgcctgttcaactacaacgcccccaccagcctcggcctgctcgacactcatgcacgggcacgacgtcggatgatatgacgatacacgaacgccgacgcatgcctccctgacatgtggcacgttgagcacccaggtgtcaagggtcttgaccgagcggctcaagtccaccgatcttgtgggacgacacgccaaagctgccgatgccatcataatagaagaggtgctccacatagacaacgatcggggccagaataacacctgtccggcctctatacacagcgattacaggcttgctatgtgcggcgcctgcaactatgtcgcggaaa

SEQ ID NO: 103523 - DNA, 567 bp, Zea mays
  Clone ID: MRT4577_25917C.1
gcggggaaatggaaaggaataatatatagggaaaaaggatgtttggaaaaaaaaaaaaaaaaaaaaaaaaaaaaaaaaaaaaaaaaaaaataaaaaaaaaaaaaaaaaaaaaaaaaaaaattaaaaaaaaaaaaaaaaaaaaaaaaaaaaaagtccctgcccggccggccccccggccaggtacccggtttattccacagttcctcccatcagttacataaatgggcatcaaacaccctattgggcaaccctataggctacaacaagcccttgcgggaagcgttttacaacaaccgtttgcccaattacaacaacaatccttggcacatttaaccatacaaaccatcgcaacacaactaaagcaacagtttgtccccccattgacccaactagccgaaggaaaccccgtttcctacttgaaacagaaactgtttgcatccaacccaaatgctttggcaaacacagccgcataccagaaacaactacagttgcaacagtttctaccagcttttattcaactacccatgggaaaccctgccacatacctgaaacagaaacaactgtttt

SEQ ID NO: 103524 - DNA, 321 bp, Zea mays
  Clone ID: MRT4577_25918C.1
aacaccaacaaacaacataaaaagtatcatccaataccaccacttgaacaacaatgtgtcagctatatattttccttgcttatgctccttgctctttctgtatctattacaaaccctacaattttccctcaatgctcacaatctactatagcttcccttcttccaccatacactatatcaatcatagctctattatgttaaaacccatctcttcaaccctataagctccaacaagtaatcgcagcacgctacatacctttatcacccttgattcaacaattgtcacacctatttttggtgcagtcattgctacagaccatc

SEQ ID NO: 103525 - DNA, 1376 bp, Zea mays
  Clone ID: MRT4577_25919C.1
gggtacctcgaggccggccgggtcgagaacttgcagacaccatcgtaccacacccggtcgtcgttgtcgcggcgtgagcgagcgagaggggaaaacccaaaaccctagcacccccgccccgtcgccgacggccgccggagtagagagatggcggtggacgaggtgaactcggtctacgtcggcggccttccctacgaggccaacgaggagatgcttcgcgacgccttcgggtactacggcaccatcgtctccgtcaaggtgattaatgatcatgctgtcaaaggcaagtgttatggttttgttactttcactcaccccagagctgctgagcaagcaattgcgggcatggacggcaagaaattaggcaaccgtattgttcgagtaaatgaagtgcgtacaagaggcccccgcgattttggccgagatggtttcagacgagatccaagaaggtatggtagagatccatactgggacagaagggacagggaacggagctatgatcgtgaaagagatccctaccatgacagggatagtgatagatcccgtgagcatgatagagaaagagattatgaacatggtggatttaatagagaaattgactatcccatggaccgagatcgtgaaggagatgagagacgtcctagagaacatgatcgtacagcagaaatgcataatgtggattcagataatgacaaagataaggaacatgtatcaagaaaaggttcagcccgccaaaaggtcatgatagcagagatttatcaagttccagtgatggtcttcaaaatgatgggaaacaccagttggataaaactattcagatgcgtgaggaccttgaaaatgaggttagccagattaaggataaaatctctgcgaaaggacaacacattgcagatttgcagaagaaagctcagaaattagaggacgaactggctgctgcacggaaagtctcttcagaacgacaattagctgttacagacattataaatgcagctgtacaaacattttcttcaactccaagactacaacgatagggtcaaaacagctgaacataggctgcagtctcttgttgacgctgccatggccgagcttgacatggccgaagatgctactaccagagatggctcgatgtatgagaacggcgtggtttgaacacccaaagggggctgccagctgtcatgtcacggcttgtgaggtttactaatttgttagatttgtagtttggatttgccatgtataatagaactgtactgtaactagaaacgggaaaatgttgtgtaaggatcagggaatgaatggctgcacagtgcacatttgctatgggtttcacagtgcacatttgctaaaaaaaaaaaaaaaaaagggcggccgcatggacg

SEQ ID NO: 103526 - DNA, 359 bp, Zea mays
  Clone ID: MRT4577_2591C.1
ccgcgaatagggcttagcataacagcaaaaaaaaataaaaggcgggggcaggaaagcaaataccagtatactgtgtaaaatggcacgcgtgatagtgcacgtgcgcgttagcgagagccgactactacctgaaatggagggtgcgtaccaatacacccccccaaatcttctggtatacgtgtaggttagtactggttagtcattaaacaaccgaccatttgaatgtaagggccgggccgaattgtagcaaggctagggctgaccgaattaatagggttgcgtcgaatattacttagctggagttgtttaggctcccgtagcgaaagcgccgaggtagggcggaaatccgtaatggcggt

SEQ ID NO: 103527 - DNA, 1717 bp, Zea mays
  Clone ID: MRT4577_25920C.1
cccacgcgtccgatgtcttacaatttggaaggggggagagtagttcaataagaatagggtcatattcaccaacggcatttttagtgatatttatatgtttccctgcattactctctctatccactcaattattttacgctaatatagtgaatactggctgcacaattagaatgatgggcatgtttgatgatttgtttgccctaacggtaaaaaatcttgtatgctgactagtggccttgcagattgcgtaaacttataaagtactacacagcatcattattatgctgaaactgggttcattattattttttgggttaaatgcatcggtagcccctgaacttgtcaatgaatggcactttggtccatgaactttaaaaatgcatttttaggtccttgaacttgttaaatgatgtatcacagatccctaaacttgaaaaaatggtgcatcacaggtctttttttagaccatgccaatcactgttatgtgccacttaacaaattcaagggcctaaaaatgtattttcaaagtccgtggatctaattgacatctctcgataagttcagggactgctcatgcatttagctctttttttaaaaggaactgggtacattattagagaccttgttttgttacccttattgtgaaatctacatcattgttaagtccaaattttaatgtactgactactgtctatttataaagaaaggttgtaccactatgggaaatatttcacgggtcaactatagcccttagaaaaaatgggcatttattttcctaatgttctctatgcagccacccaaaaggtcgtgatagcaaagatttatcgagttccagtgatcttcaaaatgatgggaaacaccagttggataaaactattcagatgcgtgaggaccttgaaaatgaggttagccagattaaggataaaatctctgcgaaaggacaacacattgcagatttgcagaagaaagctcagaaattagaggatgaactggctgctgcacggaaagtctcttcagaacgacaattagctgttacagacctgtacaaacattttcttcaactccaagactacaacgatagggtcaaaacagctgaacataggctgcagtctcttgttgacgctgccatggccgagcttgacatggccgaagatgctactaccagagatggctcgatgtatgagaacggcgtggtttgaacaccgaaagggggctgccagctgtcatgtctagggatgaaaacggtcgaaaacgatcgaaaaaacagttaaattgtttttgttttcatattttttggtcgaaacgaaaacgaatacgaaaaccaacggtcgaaatacgggatcggaattgtcggttattcgaaaacgataaactatagtcggaaagataactattttgtagttttatcaaaaacataataaaatgatgtattgcctaattttttagatttagaaatacacaaacaactctttttcatcattcatattagttagagtaattataacatttgcttttcgcgtattcattcacttaaacacaacaaaagtctataacttaaataaattatatgctagatctatctcatattatataaaacggtagaaaaacggtattatcacgactcggaaacgaaaaatacgaaaacgattgaaaaactagctaaatcgttttagtaccgtttctaatcggttcccgaacaattcgaccaacgaatccg

SEQ ID NO: 103528 - DNA, 436 bp, Zea mays
  Clone ID: MRT4577_25921C.1
ttaaaattcttcctcttttgcaaagaaaaccccattaaatggggggggttttattatgttatcgcgggaggtaaatacccacccgtccgcccaacggtccgggaaaacggggggccacccctaaaactccgaagcgggacccggaggggaaccaaattttcctaaaggggagcggaaaaaaaattgggggaaacaagggaaaaacgcggaccccgggggaaaatgttatcccccaacaaatccccaaaaaatacgaaccggaagcaaaaaggggaaaaccgggggggcccaaagagggggccaacccacaataaaggggggggcccaaacggccgcttttaaaaggggaaaacgggggggcccgcagattaaaaaaaaacgccaacccgcggggagaaggcggctgtcaatttgggcaccagggggggtttttttt

SEQ ID NO: 103529 - DNA, 210 bp, Zea mays
  Clone ID: MRT4577_25922C.1
gataggagcgtgtgttcttgttccagtataaggtctgcaatggcacgatgcttgtaccatctgtttcttcagtaacttgattttaccatgcagcgcatgtgacttgaaactctgtgatagccttatattgcttcctgccttctggcacctgtgttagtgaactgatgaacgaagtgcctgtgaactctgaaagctttgtttagagtgatt

SEQ ID NO: 103530 - DNA, 304 bp, Zea mays
  Clone ID: MRT4577_25923C.1
attttacttgaaagagcttagtgaatacgtttggaatttttttatgaggcccggaacacgaaacggggaggggtagtaggcagaagacgagcgcgtaaaaagaaaccgatcacccgtgctgatctgaagttaacatttgccaacccgaaagcagcgcacttccacaaccgctgaagcctgcaaagctacctgacagaatgacatgaagcatcacatgaaggacatccatgctaagctgtcaagataggtgcccgccaccaaaagccatattcagttcatagtatagcaatctggaaggatccat

SEQ ID NO: 103531 - DNA, 156 bp, Zea mays
  Clone ID: MRT4577_25924C.1
ctcgatgaacgtagtcagtcggaatcggctcgagcataagagataaaggaaaaccctgatatcctgagccctaaatgcgcagatggtcacttgagactactatgattcagatggtgttcgcctgacaacccggcgaagttcagtgggtaagattta

SEQ ID NO: 103532 - DNA, 523 bp, Zea mays
  Clone ID: MRT4577_25925C.1
gttcacatcctttttctaatggttcttttaactaaaagaaacgatgctcccggagagcacatacgtgcactacacatgggtcgggcttttcccagaaaccaacaacaggcatatatcaccactcgttcgtttcaataccgcacacttaagcgacattcactacaacacggactatgcgtgcccggacctcgacctgcagatcatttgattaaaagcgaacacacacactttacttatgtgcgcactccaattgaaacttataaaaagaaccgctctttcggaccccttactgtaccctgctggagacgcacactcagacacaagcagacttgcaatgaaaccaggcgcttgctaatcgacttggatcggctaccacaacaaataactgttctttccatctgcataagactgacttgatcggaagttacatgcagagacttgggaccatgtgtctcactcccactcacagagagcatttgtgatcggaactggcaccaatgtcctatctcatcctctggtgata

SEQ ID NO: 103533 - DNA, 222 bp, Zea mays
  Clone ID: MRT4577_25926C.1
acgtgaatacgattgattcacagacactttgatgctcttaagtcctggaccaaccacaggtgatcggtctagatgataccggactgcctgagacagcataccattcaagcatgaagagccacgtagatctcatgaaacacctatacctgaccatactgctcagtggatgatcaactgtcttcccaataatctcactgcgtctcagcacagagatcacttgcc

SEQ ID NO: 103534 - DNA, 593 bp, Zea mays
  Clone ID: MRT4577_25927C.1
tcttgccttgcccgttctcgcgcctgtgctgttcctgtgcgcatcatacagaatgaggagatcgtcgcaggggatgatgggcctaagctacgacgcggacagcgggagacgcctgctggctcgctacgccaaggcgaagccgaggccgtccaagtgggacgacgcgcagcggtggctctcctcctcccgtgcgcacgacgacgacgaccggcgccggagctcctgcgcggacgaccgcctcctgctgccgtcggcatcgcagaaggcgcgacactcgtggagcgccgcggacggcggcgccgccctgcccgcggcgctggggctcggcgcgcgggacgacgcgggtgcggaggcggagaccaagagggtggactccgttctggcgtacgggcagccgccccggtgcccctcgctgcgggacgtcggcacggagatgacgccggccgggagcaaagagccatccagggccaacaccccacgcgcaaccctaccggccacgccgccgtccacggcggggcgcgcgatccacgcaccgctgcgcccaccggatttgtctacggtcgacggtggatcgccaccaggcctagcggcag

SEQ ID NO: 103535 - DNA, 424 bp, Zea mays
  Clone ID: MRT4577_25928C.1
ggaacccaaattttaggcccaaaccgggattttttttccttttttcaaaaaaataaaaaaacagagccccgggggggggggcgggcaacaaagggggggtggataaggcaacagggggccaaattaccaccacaatttcggcattatccccccattaacattggccggggagggcccccccccttttggaattttgaaaacaaaaaaagaataaacctcccgcctccagggggggggcatgagccacccggggggagcccaaaattaatccggggggcgggaaccaacagggggacctttaatttttatgcgaaggggcccggttttggcttgggtttttgcccacctttggcccaaaaaaaccatacttttgatcataggcccccacccctgcagaaccaactaatgcagccagggttaaagc

SEQ ID NO: 103536 - DNA, 442 bp, Zea mays
  Clone ID: MRT4577_25929C.1
cggaatcaaaactgcaacatcaatgatttaactacaaaaaccatgaagctggggctggtggttatcgctggcattggttgattatcaagtgtaacttgtacacagacacgcagcttcatgtgtagctaacaccacaaccatgagcagcatcatcactacacaacaacatcgtacactgatacatccacgtcaacacactatacataactatcacttagacagcaagtaactaccaacaacatacatgccacactatgctgcctcaacagcatcagccattacaagaaagacatgttcaacaactacatcgtcaaccgcagcatcaacaactacatgcactactacagaaacaacatcatcatcattgtcaacgccatcatcaacattaccatcaatcacaatgtactgtgcagcagcacgaacagtaccatgagcaatacca

SEQ ID NO: 103537 - DNA, 344 bp, Zea mays
  Clone ID: MRT4577_2592C.1
ggataagagttattttccaattcccaaagaaagcaagacaaaattttttagggttgggttttttactagggatgaggaaacgtttcccattgtttcaagacgtaccccaaattgggacctcactgggttaaatgggcattcaaaccaaatgtgaaatggccattccttggtgggcttaagggtttacaaactgttaaatgggcatacaggttgggaccaggatattggggcaagataacattgcatgggaaacccaaccaaatttattgcccaatcttgtttttttaaaacatgggggcaagcttgaccctggaaaaaagctttttaaccccccggtagggggg

SEQ ID NO: 103538 - DNA, 259 bp, Zea mays
  unsure (1)..(259): unsure at all n locations
  Clone ID: MRT4577_25930C.1
acgcgtcacggcgggggactagccgtactacaaaccctaggcttgtgcgtgtcttctccgcagaaggcatggcggaggagagaggttcatncacccggatgccacatctaatataaaggggaacgcatcgcctttcattaatcaccggacagacacgcaggatctcctgcaaccctagaacagatacaccacactgatcgaggttgaacgcggcactcgagacgatgggatcaatgagagcaatcaaatgcagaagtga

SEQ ID NO: 103539 - DNA, 652 bp, Zea mays
  unsure (1)..(652): unsure at all n locations
  Clone ID: MRT4577_25931C.1
tggaaaatttagttgagacggatgcggatttggattaacaatcctcttaaaaaacctctacgccggaccgtccggttagatacggtgatcgttcggctatgtgcacggactgtccggccatatggccggaccgtccgttgttgtatgcggactgtccgtcactggatgcggacagttcgactggatagtttagggtttacgcagtacgtggtggctcggacgcaggtctcggtaattgtaatacccaactttggaatgtaaaagagaggaatagatcttcatgtgtaatgccttttcattcatgagaattattagaagacatatttaaggtgaataattcttcaatataatgtgcatcatgttggagtttatgtgttgttgcatctataaataataaatataatgaaaatatgttagtgcccaaatttggaattaagaccaaacttaccgcttagaaaataaaaagaaaacaaaaggtataaaagataagagaagtgctacataaaaataaagaaaatatatatagataaataaatgcacatgttcatactggtacttgaatttgagcacttcatctaagtatgaacttcgcaacaacatttgaattcaaatttgagatttaaaaataaaaggggaaagaaaaccagaanag

SEQ ID NO: 103540 - DNA, 400 bp, Zea mays
  Clone ID: MRT4577_25932C.1
ggccgccatctcccctgttcggttttaggagacctgcgccgcccctccggccacgcgagctcgccgaaatggtcgcccacaggttccatcagtaccaggtggtgggtcgcgcgctgccgaccccgaccgatgagcaccccaagatctaccggatgaagctctggggcactaacgaggttcgcgccaaggcgaagttctggtacttgctggggaagctgaagaaggagaagaagagcaatggccatatgcttgccatcaacgatagcttcgaggagcaacgcagccacgataaatagctaagggggaatgactgcgtaaccatgggaggacgggggaacacaagaaggagatggatgacggggagacgaccctaaatggtggcgggaggcagaggtacaac

SEQ ID NO: 103541 - DNA, 657 bp, Zea mays
  Clone ID: MRT4577_25933C.1
taaaaaagctggtagtggggggtggggtgtgcaacaaacagcatcagaagcatcagagatggggcgaggtgaaatcgtgtctgatgcatcgcaggctcctgcggagaaggggtgggtggaggacgggggccggcatcgcccgaggctggagaagccatctgccctgccccgcaagaagaaggacgaccgctccctcgcattcaagcggagagcttacggactctgctttcgttgcttggcggaggaccaatttgtcgccgattgccgagtccttgtcacctgcctgggttgcagccactctggccatcgcgagcgggactgtccgggacgccttcctgctagtcaaggtcgccaccgctgctccatgttgccgccatctgctcctggcctccccaaccaccagcccccagcttcctcacaacaattgcagcagcgctcgtgggccgccgtggttgcttctctgacgtggctcgttcaggaggccctttgtagcaacttcggtgtctctgggtcaggtctgtccgatcccggcaagactacctttgctgctgatctggggttgcagcaatccctttttgcagcacagaccgagacgctgcgagctgaactgcaagccctggttaccgcccatgtggaggagggcgttcaaccctctcc

SEQ ID NO: 103542 - DNA, 368 bp, Zea mays
  Clone ID: MRT4577_25934C.1
tgttggacgccagggccgccctagcacaatggggggcctttgaaggcagccggggttttttgcctccctatgcttcttggaccgaatgaccgagctgttacggccaccatgaaaccgcattgttcgaatgaacctatagccacctgacagattaaacaaacatgacccccacaaaccatagatagagaaggccaatgaaccaaccttacatgttaacaaaaaccacttacaatatgccaaacggcctggataaacccagacacaacggccttcacaaggcctatcacaagtgcaaccggggacaaaggtactgaaacgacccatcatgccacagccatcgactggaacttgaggtgataacccttggg

SEQ ID NO: 103543 - DNA, 312 bp, Zea mays
  Clone ID: MRT4577_25935C.1
cttcggtgccgggcttgttggttgtaggagtttttttaacgaaaactttgaaggccttatagttaaaggttgcatgggatctttactagcacatggaataagccgatcctaaagaacggaggaaacctgttttatagaacgaacacacacgttgctcgaaaaggaatcgggacaagatttcccgagccgagacgcggcagtagacagtgacgccaggaagtacatagacaccggcagcggcctaaccttgaggcatgttttctgcttaacgggccgccaacccttaaatcgggtaatccgcgagcaaggtcc

SEQ ID NO: 103544 - DNA, 492 bp, Zea mays
  Clone ID: MRT4577_25936C.1
ccgtaagctcggaattcggctcgaggcggttggctgcttcgtctcgcactgcggctggaactccaccatagaggccatggcgtccggcggcgtgcccatagtcggcgtgccggactcgtttgaccagcccacgaacgcgtacttggtggaggaagagtggggggttgccatcagaacggggcgaaacagcgacggcgtgttgtcagggacagagttggcaagatgcattgagctcgtcatgggcgacggtgcaagagcagtggcgataagggagaggatgaagggcttgaaaacgatggcgcaagcagcagccgacacaggcgggtctgtggagacaaaccttcgccactttgtcaaaacattccaagctcttgagctgtgacacattttgaagaagacggagtgtgtcaaaatcagtataatgaaatcctcttaaaaaggtgtttggacttcgaaaaaaaaaacagctgaacttcttttggattccaaaaa

SEQ ID NO: 103545 - DNA, 1555 bp, Zea mays
  Clone ID: MRT4577_25937C.1
cctctttccatttccgattgcgtgctgtagagccgtctagattcaggcaacacagaacgagagcaagttgctggccatggcggcaagaagcaggagcatggccgtggcggcgctggcgctcctcgtcctcgcgctgcccgcggccctcgccgtgacgtcgccgtacgtgcgcccgccgccgagggacacgctgtcgtcgctgctcgaggacgacgccggcgccgacaggcagacgccgcagcaggtgcatggtagggccagacaaggtgcgggtgtcgtggatcaccgcggccgacgcgccggcgactatcgactacggcacggccccaggccagtacccattctccgcgaccgggaacacaacggcctactcctacgtgctctaccgctcgggcagcatccacgacgccgtcatcgggccgctgcagcccagcacaacctactactaccgctgcagcggcagcgcctcgcgggagctctccttccggacgccgccggccgcgctgcccttccgcttcgtcgtcgccggggacctaggccagaccgggtggacggagtccacgctcaagcacgtcgccgcggccgactacgacgcgctcctcctcccgggcgacctgtcgtacgccgacctcgtgcagccccggtgggactcgtacggccgcctcgtggagccgctggcgagcgcgcggccctggatggtgacgcagggcaaccacgaggtcgagcgcctgccgctgctggagccgcgacccttcaaggcgtacaacgcgcggtggcgcatgccctacgactacgccgccgccgatagcgtcgccgccgcgccgccgtcggacgacaacctcttctactccttcgacgtggccggcggcgccgtgcacgtcctcatgctaggctcctacgccgactacgccgcggggagcgcgcagctccgttggctccgcgccgacctcgcggcgctccgccgccgcggcaccccgccggccttcgtgctggcgctcgtgcacgcgccgtggtacagcagcaacaaggcgcaccagggggagggcgacgccatgcgggacgccatggaggcgctgctgtaccacggcgcgcgcgtcgacgccgtgttcgcgggccacgtccacgcgtacgagcggttccagcgcgtctacgccggcaaggaggacccctgcggccccgtctacgtcaccatcggcgacggcggcaaccgggaggggctggccaacaagttcatcgacccacagccgtcgatctcggcgttccgtgaggccagcttcggccacggccgactcgaggtggtcaacgccacgcacgcgctctggacgtggcaccgcaacgacgacgaccaacccgtggttgccgaccaagtgtggatcaacagcctcgcggccaacccagcttgcaaccgaagcgacaagatgtagtaatgtgtctgtttactagtttggggttaatttattattgaaagcatatcatataagactctattgtatatgatttacacagtagcggatccaggattgatccaattagagggacctactaagttaaggct

SEQ ID NO: 103546 - DNA, 305 bp, Zea mays
  Clone ID: MRT4577_25938C.1
ggccgggagcctccttctcatcagattcagatcagatcgtagcatccaaggattccgcgctccgggggtgccatgaagctgaagctcctctctccctgccttctcctcctcgccttctttgccaccgcggcgtacgcggcgtcggcgtcggcgtcgcgcgcggcggtcgtcgtcaggggcgcgggcgccccgtcttagtcggtagttggatttccacccggacaacccgtgcgtgaacccggtgtacctgcggatggtgcgtatctggaaggtcggcctggcactcgaccatcggcgtgacgctg

SEQ ID NO: 103547 - DNA, 250 bp, Zea mays
  Clone ID: MRT4577_25939C.1
actcccttaacctcatgcaacacaccatattgggaaggttgcaggatagcaatgcggtgttgtcgcatttcaacgacttctctcagcactgctttgctgaaatttccggcgacatcgctaggaacacgcggtgtttggagtctgtcaagtccgaccttgattatatctttcagaagctcaggtattcttttttaggagggtagtttgtcctgaaaactgcatattttgtgagatgttttgtggatgtaag

SEQ ID NO: 103548 - DNA, 409 bp, Zea mays
  Clone ID: MRT4577_2593C.1
atcctcatgggttgccgcgttgccctcccccgtcgcggcgcccggccgccgcgagaatggtggtaagcgcaggatcgagtgatggcgccaccaccataatctgcggaaatggagatcacggggtacatgcccggtgtcatcgaccccctccacgccgctgctcaagaacgagctcgacatagtgatcccgactattcgcaacctctacttcctggagatgtgacagcccttctttcagacctagcacctcataatcgtgcagtatccataacctacctatatcttcaagatgcccgagggcttcgactactagctctacaacaggaaatacatcaaccgcatactcgacaccttggcctcctgcatgtcattcaaagactccacctgcccatgcctctgctacacggcc

SEQ ID NO: 103549 - DNA, 332 bp, Zea mays
  Clone ID: MRT4577_25940C.1
atttgttactcacaattgaaccatgtaagtatttttattgttaaataacacacatgaaaaaatgtgtgaggtaatttagtacaataataatttctccttttacatcatgatagtgtagttatttccatagtttattgcagcatgaatgtttgctttcaccaaatatgtgataacttaagtatttgctttctatgattcatgttattgattatagttactagtccattaatttgtgcttatgtatgggtacaatattggaaacataagtactattatcagaagttcatgtttaaaataatatgtccatttaattaaataccataactttgtct

SEQ ID NO: 103550 - DNA, 123 bp, Zea mays
  Clone ID: MRT4577_25941C.1
gacaaactattccctaccagttttaagacatcttcagtatattaagataacttggaagctgtgtgtatcagattactttgctctctaagtaacatggaagatatttttgttgtttttttgggc

SEQ ID NO: 103551 - DNA, 960 bp, Zea mays
  Clone ID: MRT4577_25942C.1
atggagctattccccgacggggccttcgtgcggctgcagagccgcgcgagaagaacgtacgtccacgccgacggggactgggcgggggtctccctacgcccgaacggacccgtcccacccctgaacgcggtgtggcgggtggagcatttggtctggtcggaccagggggacacattcgtcctcctccagaacgccgcctacggccgctacctctccttctcgatccaggaggcgccgcccggccaccgtggccgctgcaccacccagctcgaccgcaacgagccccacgcgctgagcccctcctccccgtggatgtggagggtccagaggttggacccgcccgaccatggctacgtccgcctgcgctacttcggctgcgacctccgcgccaacggtaggcaccgcacctggaacacctgcgtcaccgtcgacgtcaaccgaggccgcagggtctccaccatgatgcagtggacggcccacgtcgtcgcagcgagctcggtaccgccgccccttccagcctcacctcagcctcagttaccgcggttgtctagccgctccaatacttttctttccctaaacaaagtgttccaacagataggagtctgctgtggcctgttgttctggcggcgcaccggggtgcatcagcacccgccgcggacgatccggcacgtgcgggcgagcgacgaaggggacttcgaccagaatcctcacaactggccctcgttcgtttcctacgaccactccgtgatgaacctgaggatccagctggggcagctccaggacgactgggacggggagatgttcggcttcacgctgtgcatgcggcccggctcgcatggccggctaacgccactggtcaccgacctgcctcgcagcctagatcccatggacatcgtcgtcttcaggaccggatcaccaggtgactactcagcgtgcacttgttacagtttcagcatttga

SEQ ID NO: 103552 - DNA, 519 bp, Zea mays
  unsure (1)..(519): unsure at all n locations
  Clone ID: MRT4577_25943C.1
tctcacgccgtccgaaatcganctaccgcacgccgtggctcgctgcgggggacgcaatctctcagcgtctggtgacangcctcctacctccgtcagaattccgacgacgagggagacgcataatccatcgatggtagtgaagtgagccgccgaagtatgtggtagccggtgggaccggttgaagggtcgctgccgagcaaaagaacaatgttgccagcgtgcggtcggctgcccgaagccggaaacgtctgctggaccgggcgtgccgtgtgataagaacccgtgatnngcagcttaaagaaagggcttaatanncggcgcctannttccctaggtccgcttacccaatgaaataatacnttnaccagttgacgccatcntngcctccaagtgaatttcnntccaaaccctagcantnnactttanngcgatanntttgtgtnntggtgccgaatagcnnttgtcgcnctgggaagaagaaaggaaaggaggganngcagtccgaggtttaaatatcat

SEQ ID NO: 103553 - DNA, 322 bp, Zea mays
  Clone ID: MRT4577_25944C.1
ttttattttacacgacaaggcatatatataataggagaaatttattatgcgagccagcaggaatctacatagcaaccctaatttattggagatcgatagatacgacactattaacatattcctatctccaattactacttacataattaagccttcaatagaaaaagtaaacagacaaagctttcacctcaaaccattcacaaaagaatgactagaatttgccaactagctttctccaacaaacaattgccatcttttgacaaacatcggaacgaaatccaaaatattacactatagaccctctgcaaactgctttccaaaa

SEQ ID NO: 103554 - DNA, 569 bp, Zea mays
  Clone ID: MRT4577_25945C.1
ggattaaaaaggagggtatactggaaactcaggcccccaaacatgattaatccaagggcaaggcccttccaacccaaagggaaaaaaattaccccccgaccaggttaatttttaggccggggggggtggttaaaccatatgtataaccggggggcccggaaacaaacaagcccaatcatggaatggttcgatcattttattggaactatcccaacatttacaggctttggaatttttggaaaaaccccggggtttttaaggggccccggggccgccctggggttccccggaaaatctattaaaacctgccccatgatagggccggaaaaaaggttcggaatctcggggcctggcaaaacttggttcgggttttttggcaattcgcccgggttaatttccccttggggggccttggggatctggtaaacaccccttttaccccataaaccagttccgggttgggcgggtcaggcttaaagccaccctgggagggtttccacggccttggcatattttttcgggaagaaaggaatggcacttttcctcggatccccttgggggaagggggg

SEQ ID NO: 103555 - DNA, 588 bp, Zea mays
  Clone ID: MRT4577_25946C.1
gcgacaaagatgaaagttcagtgaaggatgatggggaaagatctcatagaggtagcagacgcgacaaagatgaaagttcagtgaaggatgatggggaaagatctcatagaggtagcagacgcgacaaagatgaaagttcagtgaaggatgatggggaaagatctcatagaggtagcagactcgacaaagatgaaagttcagtgaaggatgatggggaaagatctcatagaggtagcagacgcgacaaagatgaaagttcagtgaaggatgatggggaaagatctcatagaggtagcagacgcgacaaagatgaaaattcagcgaaggatgatggggaaagatctcatagaagcagtagaggtgacaacgatggaagggcctgaagatctttggagaactcgagtgctgttcggagcgctcatctgatatattaaaatgcttatgattccatgaagagttgttggagcacatttctgggatgacggttgaagatacacggaagcacacactcaagtaaagttcatatacaagactataaacagctcatcttctaggctcttgcatttgaactggaatgctttggctagt

SEQ ID NO: 103556 - DNA, 748 bp, Zea mays
  Clone ID: MRT4577_25947C.1
gccggctaggcgagagcagcatccaccgccgcgctctcatggcggcgcccaaaccgatctgggtgcgccaggctgaggaggccaagctcaagtccgaggcggagaccgctgccgccgccaaggccgccttcgaggccaccttcaaggccctcgctgccgcacccggcgacgacgacaaggacgccgaccccgccccgccctccccggccgaacccgcctcccccgagtccgatgacgatgccccggccccgccaggcccggtcgacccgtccaagtgctccgccgcgggccccggcatcgggggcggctccgccggaactccctccaccttcaccgtcgtcgccaaggaccgccacagccggaggctcaccgccggcggggcgctcgtgcgcgtgcgtgtctcgcctgctgctgcagtcggcggggatgatctcgagggtgctgtcaaagacaacggggacggatcctacacggtcacctacgtcgtccccaagcgcggcaactacatggtacacgtcgatctcgacggcgcccccgtcatggggagccccttccccgtcttcttcagcggctccaccgtcacaccatcagccgctttccccaccgcgctacccgcagtcagctctgcctaccccaacatggtcaaccagaccatgcctaatatgcccaattacacaggcgcgccctccagtgccttccccagcctcctcggggccatgccggttcgtcagcggttcctcgaaaaggg

SEQ ID NO: 103557 - DNA, 3506 bp, Zea mays
  Clone ID: MRT4577_25948C.1
aattcggcacgagggcatctgctccccctctaggcctctaccgaaccctagccggccagctgagcttattgaaggcaagctaggcgagagcagcgtccgccgccgcgctctcatggcggcgcccaaaccgatctgggtgcgccaggctgaggaggcaaagctcaagtccgaggcggagaccgctgccgccgccaaggccgccttcgacgccaccttcaaggccctcgctgccgcgtctggtgacgactacaacgatgtcgaccccgccccaccctccccagccgagctcacctccaccgactcggacgacgatgctccggccctgccaggcccggtcgacccgtccaagtgctccgccgcggggcctggcatcgctggcggctctgccggaacgccctccactttcaccgtcgtcgccaaggatcgccacagccggaggctcaccgccggtggggcgcgcgtgcacgtgcgtgtctcgcccgctgcgggagtcggcggggacgatctcgaaggcactgtcaaggacaacggggacggatcctacacggtcacctacgtcgtccccaagcgcggcaactacatggtacacgttgagcttgacggcgtctccgtcatggggagccccttccccgtcttcttcagcggttccaccgccacaccatcagccgctttccccaccgcgctacctgctgtcagctctgcctaccccaacatggttaaccagaccatgcctaatatgcccaattacacaggcgcgccctccagtgccttccccagcctcctcggggccatgcctagttccaccgctgggtcctcgggcggagtcatcctgccaggggttggtgcttcactgggggagatatgccgggactacatgaacgggaggtgcacaaaggtggagactgactgtaagttcacccatccaccgcaacagctgctgatgtcgttgcttgctgccacgacttctgtcagtgctctcgggcatgcgcccttggcgccctctgcggctgccatggcagctgctcaggccatcatggctgcccaggcactgcaggcacatgctgcacaggccaaagctgcaggtggaacttcaggctcaacaaacaaagctgatgaagctgatgccctgaagagaacagttcaaattagcaacctgagtccacttcttactgtggattatattaaacagctatttggattttgtggtaaagttgttgattgtgtcatgacagatacaaagcagattgtgtatgttgagtactccaaacctgaagaagcaactgcagcattggagctcaatagcaagagtgttggtggtcgtccattgaatgtggagatggctaaagctcttcctcctaaagcaaataataacttgcctatgatgatgcagcaagccgttcagttgcaacagatacaattccagcaggcactaatgatgcaacagtcaatagcagcccaacaggctgctgcacgtgctgcaaccatgaaatctgccactgaagcagctgcagcaagggctgctgagataagcaggaagttgaaggcagagggctttggtggggacaacatggaagaaaaggatgccaaagggaagtcaggatcaccatcgtcccctactcgtagatcaaaatctcggtcaagatcacctatcaagtaccgtaggagcagacgatcccgctcctactctcccccagttggacgctcaagggagcatcgatcacgatcaccatcaagatctcgccactcaaagcatggtagtgatcgatcgcatagggatgataaggataggtatagcaggtccgggagaagggagagtgaacgatcccgtgatcatcattcatctcgttcaaggaggaacagaagcaaaagtagaagtccaaggcataagaagccctccagagttgactctaggtcacccaagaaacaaagactcgaaagtttaagcccatcaaaatcaaggtcggctcgggctggttcaaggtcaccacgacatcataagggaagcaaatcatcgccaactagtgatcgtcattctcgccatagcaggcattcaaggtccagatctcttgacagaaagcatcatcacagtgataaaaaggacagaaagtctgagattcaggacgacagaagatctcatagaggcagcagacgcgacaaagatgaaagttcagtgaaggatgatggggaaagatctcatagaggtagtagacgcgacaaagatgaaagttcagtgaaggatgatggggaaagatctcatagaggtagcagacgcaacaaagatgaaagttcagtgaaggatgatggggaaagatctcatagaggtagcagacgcgacaaagatgaaagttcagtgaaggatgatggggaaagatctcatagaggtagcagacgcggcaaagatgaaagttcagtgaaggatgatggggaaagatctcatagaggtagcagactcgacaaagatgaaagttcagtgaaggatgatggggaaagatctcatagaggtagcagacgcgacaaagatgaaagttcagtgaaggatgatggggaaagatctcatagaggtagcagacgcgacaaagatgaaaattcagtgaaggatgatggggaacgatctcatagaagcagtagaggtgacaacgatggaaggtctgtaaaagatccagtggaagataaaagggtggatagtaatgctgtcgcacataagaggagctctgaagatgaaatcctgaacaacaatagtagtaaccataagaaacatagacatgaagttggtttggaagttgatgaaggaaatgatgtgtgccctgctgtagcagaccctaatgggaaacatgaaactggagtaggtggatctttagggggcgctgcagaatctgctatatgatagctgctgtatcattcagttggctgtttgcagattgattgatgatgatggagaatgctgaactggtgtttattatctccctttctgatttaggagttttatttgcagggcatgaagatcttcggagaactcgagtgctgttcggagcgctcatctgatatattaaaatgtattcctcattagcttgagattcgctccttggagcaaacttttaaatgtaacactggagttgtaaggcgatttcatacagtgaggtagaaaccaaccatgtatttgtcgtttcaggcttatgattccatgaagagttgttggagcacatttctgggatgtcggttgaagatacaaggaagtacacactcaagtaaagtccatatacaagactataaacaactcatattctaggctcttgcatttgaactggaatgctttggctagtaaaattgtccaaatatgcttgtccgccttctgacgcactttgtttgttagaagtcctgtttttgtatcttgtatcaggaatggttcaaaaagtttgacctgatataccatacttgtacactgtcttttgacagtcacatggaattgtgaattgtgatgtaagttttatatatcttgtcttctgctt

SEQ ID NO: 103558 - DNA, 525 bp, Zea mays
  Clone ID: MRT4577_25949C.1
cggctacaaagtctaagcctaagtggtgggtacatgacataggagacagtgatcagagcgcccatggccgagccttcaagatcacatgcctacattttgcgttcactgcttggcacgagctaaactgcgatggtctgtactctgtggcacacaccgatccgcttagggccgaaccaggctagcgctatagacatcaaggcgcatattggcctcaccgccaccttaagactgaaatcacccatggatcacgaggccacgacgctcgcagatgtgagggggcttgcacagcacttggatatccaagtcgatctctaggtcaacttgttcaaactgatgtccgaacgatcaagatgctcatagaggacatacttgaaatgaccgaaatagccatctaatacacatagctggctatatggggcggcaccgaataagatgccatactgaactgcttctgtaaaataagtacatgatcagaggagggaaggaacattatgcaactcaccattcatgcttgctgtacagtgc

SEQ ID NO: 103559 - DNA, 165 bp, Zea mays
  Clone ID: MRT4577_2594C.1
gtctcgcgttgcgttgcatgtagatccaatcagacaggcatcgcttgattggaagagacggattaaaatagttgatggtatagcccagggactcctgtacctccacaatctctcgagcgtacgcatcacccacagggactttgcagcgggtaacatcctgttaga

SEQ ID NO: 103560 - DNA, 530 bp, Zea mays
  Clone ID: MRT4577_25950C.1
ggttccaaacaaataaaattacattacatatatcagaccaaaaggtttgatccagagacaggggaacaacagctgatgctggacacaaccccagggctgggagtaagatcacaacacagaacaaaaattcacagcaactgtaaggatgaataaagaataggcttcctcagtaagtagggtagtaatacccagtgttgtacgccgcgggcatcccatagggcatgcccgggttgggcgcgaaaccattgtggtaagcctggtcgagcttgttcaggctcgattgcccttgcatgccgtccctctggtactgctgccacataatctgctcctgcgacaagagctgttgcttcttctccaaatctgcattgaaccatccggtgcgggcagagcaagcatctgagtcttctgtccaggagcaggcagggcgacgctgctggcactcccggtggtcacctgtgcactaacgtgctgacgcacaacaccctggtcatacataccattcagcagcagcgggtccataccacctgaca

SEQ ID NO: 103561 - DNA, 469 bp, Zea mays
  unsure (1)..(469): unsure at all n locations
  Clone ID: MRT4577_25951C.1
gggtaccctncgaggccgtccgggatcgacccgccggcgctacgccctttcagactgctatgtaccgggcgtgtgcgaagtcgctcatgccgcgctgatctacgctgcaaccaggtggtcagctgggcctcggcacaaccctgctttacagatgttacggtgcgatgaccaacagcgactcttgagaggcctatcgtctagcgctaattgtaatgaggcgcgagccatcgcgacattttatggatgcgccgtggccatgaggatcagcttaagcaccgaacttgtggcccaaagctcattgaccgctgataatgtagctctgacttatgttctacctcttgctcgcctactatttattaaccgacgtgggtagggaatttttggtgtccttgagtggacggcacttgccgatacactcttggtgacttagattaggggatctattggaggacacacatcactttgtgct

SEQ ID NO: 103562 - DNA, 309 bp, Zea mays
  unsure (1)..(309): unsure at all n locations
  Clone ID: MRT4577_25952C.1
naacactctcccgtcttcctcctccctccctccgcctcttcgcccaccgaatcgcccaaatccccccttccattcctataaaacatccatccatccgcccgcgaccaaatccaaatctcatcgtcatccccccacacccccaacccaaccccaccctcgtctcccccggatcggaggcgcgcgagcgagatggcgaacatcgacatggcggcggtgctggcggacatggagcgggacgcggaggcggacgcgcgcagcccgaggaccaagccggcgtggacggtcgggccggactcctggtcagcgcgc

SEQ ID NO: 103563 - DNA, 821 bp, Zea mays
  Clone ID: MRT4577_25953C.1
tcgtttcccttcaaatggtggcaacgaggtgacttcggcatggcagaatcctgcagctgaacctgggaaggctgattgggagcttgccctcgtagagacagcaagcaacttgtccatgcagaagccagcaatgtcaggtggtatggacccgctgctgctgaatggtatgtatgaccagggtgttgtgcgtcagcacgttagtgcacaggtgaccaccgggagtgccagcagcgtcgccctgcctgctcctggacagaagactcagatgcttgctctgcccgcaccggatggttcaatgcagactgttggtggtgacccctttgcagcgtcccttgccgtcccaccaccaatcctatgtgcagatggcagatttggagaagaagcaacagctcttgtcgcaggagcagattatgtggcaacagtaccagagggacggcatgcaagggcaatcgagcctgaacaagctcgaccaggcttaccacaatggtttcgcgcccaacccgggcatgccctatgggatgcccgcggcgtacaacactgggtattactaccctacttactgaggaagcctattctttattcatccttacagttgctgtgaatttttgttctgtgttgtgatcttactcccagccctggggttgtgtccagcatcagctgttgttcccctgtctctggatcaaaccttttggtctgatatatgtaatgtaattttatttgtttggaaccaaatgcggcatccgagagtagctatagtatattacataatctcaattgatctgtacactgtttctgctaaaaaaaaacaaaaaaaagcggcc

SEQ ID NO: 103564 - DNA, 536 bp, Zea mays
  Clone ID: MRT4577_25954C.1
gcacagaactattgatgcgagtataaatcatcttccagtcttggtatgtctgttgcaagctcctagatatatggagttgctggcaatggcaagcacattttaatcactgaaaattacaatgtaagcactaccctagtcgctgaactggttagcatcagtagttccagaaaacttggtttctcctatgctgcttcctgaggtagacgccgagcagcttgtagtacgtccagcgccccttcccgccggtggtctccagcagcacctcggagctggcgtggaagccgcccttgccgaacgcctcgaacacgattgggtccgtagccacgacgggctcggcgtcgccgtcgaggcggttgaacgcgaacgtgaggttccgcgcgaggcggcgctcgaggtaggcgtcgacgaagcagccgtgagtgacgaggtccggcacgacgccgtcgcagcgcatgtggtcggcgctgaggtggaggtcccagaacacggacgcgtgggcggacgcgtgggcggacgcgtgggcggacgcctgggtc

SEQ ID NO: 103565 - DNA, 279 bp, Zea mays
  Clone ID: MRT4577_25955C.1
gacggggcgcggcgatccctttatgcccgcctggcgtacaaggcccacagccaaggtcacccatgtcgggaccggtaggccggactctcggctcctatccacgagggcactcccgagcctcttcgcggagtccgcgatgacgaccagccccgtcggctgcgcgcccgagctgctgttcagggccccgtcgggcctggcggacgtactagtggccgaggaggccgactagcggaggtccttgttgaggaacgggctcagggtgctacgacgggcgcctct

SEQ ID NO: 103566 - DNA, 1674 bp, Zea mays
  Clone ID: MRT4577_25956C.1
ggtaccctcgggtctcgccggtcggtcggctgctagctgcagcttcctcgagatttcttcatcgatatggcagggatgcaatggggaccacagttcactgggaaaattggccagtacatgcacagcatggacatgagcgacgggggcaagaaacaggaggcggcggcggagcgctacggtgctgctggatacgtatacaacgtgcatgcgcacggaggagctgctgctgctggcggcggtcctccagcatatcaccatcaatcgtctgctggtggatacgcatacaaatggagcactcctcctcggaatcatccgccgccggcgtacggcggggcgtacgatgagtaccatgctcatcagaagccaccagcgtatggtggtgacattggcgccggcggcggcggcgggtatcctcaaaacccaccagcgtatggtggtggcggcggcggcgggtatcgtcaaaacccaccagcgtatggtggtggtggtggtgggtatcctcaaaacccaccagcgtatggtggcggcggcgacggcgggtatcctcaaaacccaccagcgtgtggtggtggtggtggtgggtatcctgctcctgaacgtggaggatgggacgatgggcgccctcctcctcgagagcagcagccgccgccaggctaccctcctgctcgtcccgtggagtgtgatgaacgacaccctccatcacagcagaagcctcctccttcatgccaggaagtggacaagaagccgcaaccagcagagaaccagcgggaaccaccaccagatcatgcaggtagcaaagagaccaacaagcaggacgtggctgcttggaagccgaaagcgagtcccaagcatgagggcaacaagcctccggccacagacgtacctcctcaaaaacagccgccgtatgggtaccctcacccgggttggggcggtggtgagggtggctactatggcggcggcggcggcggctatcctccaccgccataccaaggcggctatggcggctatcacggcgggggcggctatggcggggcgcacatggggtggccagcgccagcacctcccgccggtgcttatgctggctatggagcataccacggcggatacggcggcggccatggcggtgctggtagttacgcgggcaacggcaagtacacgctccgaaacgagggcaagtttaagcactacgctcacctccatggcaaattctaactacaagcatatatatataccatgacgcagtacgtacacgcccggcctgatgcatatatgcatgcatggatggctaatacatgcatacgtgcctactgattaaataaagtttgttacgctgcacatctgcatgcatggtgcagtacgtacacccttagctagcgtgatatgcatgtttaccagctacctactgtactcctcaattagcagcgtgatatataattatataccccttcttcatatcctagctagctacgaagacctagctctatcttgcaagatgcatgtaagcaagtatgtatgtaattatgtactctcgtcctcgttcttttttatttgtcgcgttttagtttaaaaataaactagcggacgacaaatattcaagaatggaggaagtatatatacgtatgtaaactaatctctagcgttctgctcgtaataagatacccatcttttttatgt

SEQ ID NO: 103567 - DNA, 417 bp, Zea mays
  Clone ID: MRT4577_25957C.1
ccggccgccggcgtcccgccggtcgtctcctcgctcctccgctccgcgtcccgcctgcgggccgctgcccgtgtcacgaccggcgccacgacagacgacaagcgcactaacaaaggaatagaaatgagctcacccttatgatgatcagctcaaggataaaactcccatgcagggggcgaggatttttttaaccgagagattctgcgggcgagggacccagacccatttgcccccacgccccaccttaaccaatgccgccccactacgctggattaggaaagataggaacacgtccagcaccctcaagaagaccttgccactctcataactagcacacaaaacactacgctcagcaacataagatccacacatcccctgaacgatctcaaatctgagagaagtatacccagaatacaa

SEQ ID NO: 103568 - DNA, 591 bp, Zea mays
  unsure (1)..(591): unsure at all n locations
  Clone ID: MRT4577_25958C.1
acgattggagtgtcaagcatggatcatatttcctctgttcctgtttatatagtaccatccgtgatgccgttatagtatttatggaagtcaaactttttttgctggactgcatacaggacaaggaagcgctgaaggtagccatggtctgcaagacacaaaggagcaggacataaaaaagggaaaggcggctcttgtttccactgaactgctgagggaggatctggttcagagtgctgttagttttctgaaacacccgaaagtagtagcctcttcagatggacagaggcgatctttccttgtaaataaaggactcaccatggatgaaatagatgaagcatttcgacgtctacaaagcccgtcatcgaattctgcgagctcaaatatgtgcacatctcaagagagggtggaacctgaagctggacctgtggcccctgtggtacctcgtcatccaaaatcatatatggagatcatggaaatgatacaaaggggtgagcggccagacgatatacaggatattaacgatgaccctncaaatnctgatcaaccaatctcagaacctcgtatggcaccgaaaccaaagccatgggaaaa

SEQ ID NO: 103569 - DNA, 1426 bp, Zea mays
  Clone ID: MRT4577_25959C.1
agcacacgttcgtcttgccttcctccgcccgggcccccggcgtccttatccccacacaagcgccgcttaccgcccgggacaggactgttggaagtccccagacggcagcgatggcggaattatcgacatcttcggatggattggtggacgaagaagcgaggcagcaggaaccaggacaaggaagcgctgaaggtagccatggtctgcaagacacaaaggagcaggacataagaaagggaaaggcggctcttgtttccactgaactgctgagggaggatctggttcagagtgctgttagttttctgaaacacccgaaagtagtagcctcttcagatggacagaggcgttctttccttgtaaataaaggactcaccatggatgaaatagatgaagcatttcgacgtctacaaagcccgtcatcgaattctgcgagctcaaatatgtgcacatctcaagggatgtttgatcattcatgcaggattactgagcaggaaattgaagtcgatagaaagtgtatggatggtttagagagggtggaacctgaagctggacctgtggcccctgtggtacctcgtcatccaaaatcatatatggagatcatggaaatgatacaaaggggtgagcggccagacgatatacaggatattaacgatgaccctccaaatcctgatcaaccaatctcagaacctcgtatggcaccgaaaccaaagccatgggaaaagcaaggtcaagggagtttggcctgtgatttgaaatcgccgccaagggaatccgacgtgctgaggtcagaagttcagcacgatggcaccaaccaggttacggagtccgccgatggcgccaaccaaacgcactcattgctgcaggtaggcgtagctgctggatctgaatctcctggggttccagatgacgccgcttcttcgcttgagtaaccaccgcgaaaataaatgaatgacgccgtaatcagacgcgaaaacaaacgacctcattaccacaacactgttctgatatttttgggtcctgagagagccacttgagttcacaataaatgtagtacccatcactggatgatcttttttagttgctggaaccatatgatatgagcattcttcaccacaataaatgtagtacccatcactggatgatctttttaagttgacggaaccaaaaaaaaagagcaggccccaaaaaaaaaaaaaaaaaagtcgacgcggccgctgatcgttcatgcaggatcattgagcagctccatgtgtgtccagagaaatgtgtgtgtatgagtgtaggtcgtctggcttttctagcgtatgtagatttggctgcgcaccccaccctatgcttacacccatagttattacgatctttgtatgcacgcctatataacgagcgatttgagacgtagtgagtacctgcccgggcggccgctcga

SEQ ID NO: 103570 - DNA, 326 bp, Zea mays
  Clone ID: MRT4577_2595C.1
gaaaaaaaataaaaaaaaaaaaaaaaaaaaaaaaaaaaaaaaaaaaatataaaaaaaataaaaaaaaaaaaaatataaaaatataaattaaaaaaaataaaaaaaaaaaaataataaattaaaataaaattaaaaaaaaatataaaaattggggtgggttttaggaaaaattatatatacacaaatttcctattgtggaaccttatttttttacatgtatgcaggtaatgattactttgttttgtcaaaacaaatggatgctaggagaaatgttgtgctaaaagatgtttaaatatacttgaaagagtacatatttccaaattctg

SEQ ID NO: 103571 - DNA, 1364 bp, Zea mays
  unsure (1)..(1364): unsure at all n locations
  Clone ID: MRT4577_25960C.1
ccctcgaggttcggccgggaaaagctcttagcaatctcggctctaaaattcactgcagcagcaggtcaaagttctttgcatactttgtgccttatctatctgctattcagttgtttgggttgtctaggaataacatgcatcacagttttggtgtgcaagggagggaattactgatatcatcaaatactgcaagctctatgagctctcatcctgtgcatgcaaaagcgcatacactgcttgaggaaagtaatgcatgcttgccagagtcatctttagttgtagaagatcctggagaactcatatttgagtactttgaaacagagcaaccttctctccggcctccattatttgaaaagatcaaggagcttgttagcagtgcaaatgtttctgaccaccgggtttttggggacactgaaaaattgcaaaatgcgaaattgtgtgagcttcatccagcttcctggttctgtgttgcctggtatcctgtttatcgtgtgcctcgtgggaatttccgtgcggcatttcttacttatcattcactggggaagttggttcataaaaaatgctccatggatacgaatgacgggcatacacaagtagtttcaccagttgttggtctccagagttacaacgacaagggagagcagtggtttcagctgagatgcccagatttgaagcaattgccaatagaagattctttaaaaaccagtcctgctgaagttcataaagagaggctgaggacgctgaagatgggtgcattggccatggcaagagctgttgtcccaaagggaagtggggagtcggtgaaccaccatcctgattacgagttcttcctgtctcgttgcgcctaggctaagcggttgtgatatgaaggaagaggggcttttctgcttctagctcctgaatgtagtagtgaccatgaaaatgaaaaaaaaaacccagagtagtgactaaccagagaccggctatagatacagtttatcttagagagaggagagcctggggtgatgcatatcactgactgtataggagatagactcgaatattagatactctaacctgattccggattaccaatgcaaaccaagttggtgagctgttgaagtatggcagtacccgcgggatgggtgctttattggggctgggggcaaagatgagaagataccacagatgagatgacgctgcaggtgttcatcttttgtacaaagaccacaccagaggagcagcaagaaatttgctaccagcaagaaatttgttaacacatttgcgaggttgggcttttgttgtggcttgtttgctttgcagacttgcagtgttgctgtttctaaatcaaactgtgctgcttctgtttctaatccnnnnnnnnn

SEQ ID NO: 103572 - DNA, 291 bp, Zea mays
  Clone ID: MRT4577_25962C.1
ccatgcctatatggatagaggacgtgtcatccatttgcaccacgggccgcgccataaaaaagcacgggccgagaggggtgaagtatacaaaccctattaccagtgaaggtcggggcgggaatatacagtgggattagttacctcgggcggtacttaatcaggggcaccacattccaagtaatttcaatttgcacgtgatgagaaataccatactactacacgggagtattatattacgtggccgtgagtccgcgacggctaaggtcacatggtattattgttcaggcaatc

SEQ ID NO: 103573 - DNA, 400 bp, Zea mays
  Clone ID: MRT4577_25963C.1
ttggcttggacctttgggctgatttagtgcttgtttatgtgcttgagtagtcctcgtccgtctcggggggaaggagagagagagagtgagagagagactcagcagagaggtcagtcaggcggcttctgaatgaagacgccggtggcgcctagtgggtaggcggcggaggcgttggtggagtcggcggtggtgggtagttggatgttgctgtttaagatgaaggtgctgtagtcggcggggtgtccttcggttgttcttgagttggttgcgcttgcgtagtctggtgattatggttattctgttcatctttatattaattaggtgtcttcttgttttaggctgcctgtggttaaagatgaagcgcctcgttcgcctgagggggcgtcggataattcgggct

SEQ ID NO: 103574 - DNA, 218 bp, Zea mays
  unsure (1)..(218): unsure at all n locations
  Clone ID: MRT4577_25964C.1
ttccgacagtcccttataatcttgggaaatttcatcgtgatggggatagatcattccaattgggcgtcgtggaactaggaatgccaaacacgctagaatcacaanttggcttttgctacatacctccccttttaacactgggatgttgacaattataacatgcttatttccaccgatgcttcaggacgcccttaagctcttccttgcttgaggtttaa

SEQ ID NO: 103575 - DNA, 574 bp, Zea mays
  unsure (1)..(574): unsure at all n locations
  Clone ID: MRT4577_25965C.1
gggtacctcgaggccggncgggactcgactccccacgactcgtgaagatcggagtcgactgcccggacgcctccctctccgcctcccgtccccaaggccaataggtttcaagtggtgatggcgaaccaggctaaccaacccactgtgcttcataagctcggcgctcactccacctgcgctcgacatctctgaaggcgtacgaggccgtaacatatgcccatctgtctcatcttatgaaaggagatttgccacaaggaactacatgacccatactcttttgggcccttcgatgtcagttagcgaaggtatcgatggcccagtgatgcgaaatccgttctgtgttaatgatcctgatgagaaagtgacaagaacttcgtgactcgatttcatgatattgggcgtgtaagactgtctgcatataattactgatgatgctccactgtagagtacgaagatgaacatatacaatcagcatgaatgattacaacagtcacactgctgtaggcagctgcagtagcgatagctctttcatggtgaaatagcttcaatggtaccttcaataaatcaataaccg

SEQ ID NO: 103576 - DNA, 604 bp, Zea mays
  Clone ID: MRT4577_25966C.1
tggtgaagctagatatggcagcgctggtcatcagctatcctgttgcctgttggtgaaggtcgtcggaaagcacgctcgactgaaatcatcggttgaggtggttgctgtcctgcagcgtgtacttgacgtcaggcagcgcctgcagcacgtcaggatgttcctgcaacgcggcgacctgcgccggcgtgagcttggcggcgaacccgctggcggcggccttgtagctgtagatcagggcctgcttggctttctcctcgctgccgagcgcggcggcgaggatgcccatctggtacgccttggagtcgacgccctcggccggtggcttcaccatcaccacgtacacgctcgcgcccgctgcttgctggccctgcttgctctccctgccggcggccgttgccagggacaccgcggcggaggagaagagcactagtagcaggaacgcggccgctgcgccggcgcaagggagcgtcgtcgtcgtcatggcacgccggcgaagagaggggtgcggagacgaagatggggtgggtggtggtggtgatgcgtgcgtacgccgttcgtgtgcagtggaacgaacgtatgacgcgccgccagcaacggaattcga

SEQ ID NO: 103577 - DNA, 146 bp, Zea mays
  Clone ID: MRT4577_25967C.1
ccaaacaccttaccttctccagaagaagacttttctttcaagaagaaaagacctccctacactgagcacccttaaatcctccccaaatcatcactatatttctcaactctttaaacatcccaacaattcacccctctacaaatcat

SEQ ID NO: 103578 - DNA, 642 bp, Zea mays
  Clone ID: MRT4577_25968C.1
gtcaaacggagagagaagtcagtgaaaaactggatggttgagagtgacactgaggatgaagatgaggatcaattggatgtaaggctttcatcattattctctctttttatttttccaatcctagcaatatcttcagcattttgtatagattataggatacaattaaacagaactaaaagtatgcagtacgtcaggtagtgaagctggaatttctgttagatgtgaaagggcaaataactaagtatctagagacacttcagaatattcagcaagttctttgttgtgataaggcttttatggccaatctctctttttcgctctgtctcagttatatcaaattaatctgtaattattgtatagaaaaaaatggttaacaatttgaagtaggggatatctttagaattgcagctaaaatttctgttagacgagaaagggaaagtaactcagtatctagagcacagaaaactcagtaatgatataactttttcagcaaatttcctgcctgaatttaggatcctgtttttggttgttacaatgtccaatattgtaagttttataaaccatatgctagtaaagatattattcttgtttagcttcaatactgatgttgttatatgcagttagaagattttgaggatgatg

SEQ ID NO: 103579 - DNA, 362 bp, Zea mays
  unsure (1)..(362): unsure at all n locations
  Clone ID: MRT4577_25969C.1
gtgtctaaggggnttgcggtgtttaaaccctncggttttttttttttttgaaacaaaaaacagggaaccccgggtggtttatttggggagaaacaaaaccggtttttttgggggggaaaccccctttaggtttaagtcccaacccccaaaggcctgaaagggttaggagggtccccgcttagattgggttaaaggggaccaaaactccccgaattttaaacaaaacagggttttacgaccatttttttttttagggcttaaaaaatcccggcagggtggaacggaccccaagggtttttttgccaacgcccttttgctaaaaatttttgatttggcccgggattttttttttgttaaaaggg

SEQ ID NO: 103580 - DNA, 282 bp, Zea mays
  Clone ID: MRT4577_2596C.1
cggacgcgtgggcggacgcgtggggttgaaatcttgctactggtatagcatatgcactgcagtacatcagggtatcgtattacactgataaacatgttctcaggcgtgctttgtttcactgtgcagagccaactttgtgggagatccgtgaagtgtgtagtagcaaaatatttgttgttaactttcaaacttggtgttcattagttacaacgtcatgattgataccttttaggacattcttggtgctatacaaccgtgcctttggtaggtttttggtgtgtg

SEQ ID NO: 103581 - DNA, 277 bp, Zea mays
  Clone ID: MRT4577_25970C.1
cttctgggtgggtttttttagaaaacagacccttccccaccccggcatggttattacaaaaacctcttattaggtcccaaagcttcacccccaattttttgagctgttggactattcttcaacatcagatgccaaaatgcccccggacgagttaccttcgcgcaaagcctctgtatctggtggctatccctctaaccataccagaacccatgtatccttccgataaaacctgggcgccctaatggcaacccgacgggctaagcccgatttactcaat

SEQ ID NO: 103582 - DNA, 149 bp, Zea mays
  Clone ID: MRT4577_25971C.1
gggagtggttttttgtttttgagccccctaactttattattaaccaacaataccctacttgttttcaatatgatggcataaactcctttttcaaccattcaaagatcatagtttgagaacccatgaagaacatgaaactgacaaaacca

SEQ ID NO: 103583 - DNA, 153 bp, Zea mays
  Clone ID: MRT4577_25972C.1
cacacgagcatatgacagtggcagacacgatggtgagcgccagaattgttgtcatcctcgccaaactcctatgcgctgccaacacagtcgcgtcgtcctagggaggacgcagccagcaccagcgcgggggccacaagtccgagcagtgcgtgc

SEQ ID NO: 103584 - DNA, 489 bp, Zea mays
  unsure (1)..(489): unsure at all n locations
  Clone ID: MRT4577_25973C.1
tttntttttttttttttttttttttttttttttttttttttttttttttttttttttttttttttttttttttttttaaaagaaaaacccgggggcgtccttttttaaaaaaaaattttttgttggaaagcttgtttttttttttgttaaggggaaaaactcggggcctttcctttgagggaaatgtttgttaaaactttttaccccccttccttttattcccgggcttgggggggggttcctccggggaaaaaaaaacctggccgtaattgaggggatcgggggcggggcaaaaaccccgcccaactttttgtggttaaaatatttttttttcccatgaaaatgatcttttggggggggggccacctttaaaatttttttgccaggggaaaattggctttataacttgctaaaagcggggtttgttttaaccccccccccgggaaaggcaaggccgggacccccgggcccgaaaaaaggggattcaaa

SEQ ID NO: 103585 - DNA, 556 bp, Zea mays
  Clone ID: MRT4577_25974C.1
aattcggcacgagggtcaacctcaaccttatcatgcacagttgacaccgaaaggagagagagacccattctatcctgctgcgaattctgtgccccgcccgcccaaccaagaaccgcacttgcatcgtccagatcgatcatcgctagcgcatatatgcaggcatatatggagggaggccagttgttgggggcttgctgccttcctggcttccttgtgccggatcactacgccgccttccctcttcctctcccgctacaacttcctagccagccaaacgataataggcttttccagatgccgtttgaccaggaagaagccgagaaccatggcgggatgctctactccgaccaatgtggactatacccgctgccggccttcggcagctgctctgctgccgccggcgcaacagcgaagcctactgctggtttcatgcccagtactattggcgctgagacgaaggtctgcacctcgctgactactaaaggttgcaacgagagtaatagcacatggtggaagggggcagcagctacgatagcggagaagagggaagatgaag

SEQ ID NO: 103586 - DNA, 730 bp, Zea mays
  unsure (1)..(730): unsure at all n locations
  Clone ID: MRT4577_25975C.1
aattcggtacgagggcgttccgatcgtcctgttgcggtctggctttccattctgcttgtttgcccttgaagcgtttgatgcaatacctcgagtcggtgcgtgctaaggggctgtcaatatagcaaattcagatgctcaagctaacacaaaatggcttagttttgcttataatgaagaagcaagctaagagttagcggctgcgtttaatttgtgctgcatttttgtattgagtgctttatatcacacattcgtccaacttttcctgctacttacctggtatgctcattacaattctttctttagctctccatgtaacaaaatggagggtgcagcccaaaccacgttcttacttaacataccaatttaaaatgaccaagatcttcctaggtgtttgttgttgacactgaaaaaatagcatctagagcaaaagggtgtcattgttattaaactaaagtaaaagaaaactatacagttagcctgacctatcaattcttgttgaacagctatctggatgtttcaagtaccacaaaaatgcaaattgatgtcaagttgttatctgaataaaaaagacgacagtacaaaacaacattaatcattagtgacaggcatggttatgatggcgtaaggcgaggtgacccaccccctttcagacacctacgccctgtggtgaggcaacaccacacatacattncaacctacagtggagcagcatgaacgaacttgttgatgt

SEQ ID NO: 103587 - DNA, 260 bp, Zea mays
  Clone ID: MRT4577_25976C.1
acaaaaaaaaacaaaccaaccgcattctttttaaccatctgatctttttcaaacggcccaacaacaacatttcatcagccaaaaaaaacaaaaaaatttttgtgtgctaatccaccccccccttttttacaaccaaccaccccttttccaataacagttcctaaccaaacaccccccattctgctgcttctaactagacttccaaaaacaaaccattttacaatcaaagctttactcccccgccaggtttaaggcctttt

SEQ ID NO: 103588 - DNA, 560 bp, Zea mays
  Clone ID: MRT4577_25977C.1
cccagcaacctttgggttttttcccccttttttccgggaaggcaggtcccaaccccgggggggaaaaatttttactaaacccccggggggggcaaaaaaaacaaaatttttttttcccccatttccttccctacagggattggaaaacaaggctcccagtcccggaaaatttgggggggggtattttaccagggcccccttgaaaacccatttgggggtcaaaatcccccgaccttgggggagttaataaaccccgtttccccgttgaaacacagaagcgccccccttcccaaaccttttgccaataaaaatccctccaacccggaattctttgccgggggtttttttttttttgaaaaaagttctgcccccccggccccttgtagcccccaaggggtgtccaaaaccctttgccccccctttaactttgtttttagcgggaaaaagtcccaattttttgcggaagaaaacatcctgggaggcaaaaccctttttgttttcaaaaagatcgttttcttccttttgagggccggcttttttcattgttggggggtttgcac

SEQ ID NO: 103589 - DNA, 230 bp, Zea mays
  Clone ID: MRT4577_25978C.1
agttaccctaaaaataaacaacagggatttacgattgagaggtgggcacccaaccgacacttatggataaccagaacacaactgacccatacaaaccaactcaatcaccatttacgacacaaaccataccaacacttacaaagaaacaccatccatcagcacagggagagacactatattacccagaaacagcttaactttcacggactgatgatttaataaccacccac

SEQ ID NO: 103590 - DNA, 708 bp, Zea mays
  Clone ID: MRT4577_25979C.1
gggacgccaagctctccggcaccctcgacgtcgtcgccaccatgaccggcctccaggagctctggctccacggcaacgacttctccggccccgtcccggacgccatcgccggctgcaaggaactctacaccgtcaggctcaacaacaaccagctcctcggcctcctgccgcccggcctcgccgcgctccccgcgctccgggagctcaagctcgacaacaacaacctactgggccccgtcccggcgctgaaggcccccactttcaccttctccgggaacgagttctgcgccgccaaacccggggaagcctgcgccccggaggtcatggcgctgctccacttcctcgacgacgtgcagtacccgaacaggctggtcgggacctggtccgggaacgacccctgcgcgggctggctcggcgtcacctgcgtccagggcaaggtcactatgctcaacctgccgggatacgggctcaacggcaccgtcagccagagcctcggcaacgtcaccacgttctccgaagtgaacctcgccgggaacaacctcaccggccgagtgacggacagcctcaccaggctggcctcgctccagaagctggacctgaccatgaacgacctgtatgggccgctgcccgcattcagtctcaccgtggacgtgaacgtcaccgggaatctcagcttcaacacaacggatacgcagccaacggatgcgc

SEQ ID NO: 103591 - DNA, 384 bp, Zea mays
  Clone ID: MRT4577_2597C.1
acggggttggcttcttctccccctacggttcaggttcagcttcgcgaggttcttcagaggacggtgtcggagtgagcggatcgatatggctatataagatgttaagtaccgatgcttccttgccgactcgtttgggtcataaagaccactcgcgtcaaaacaccttcaaaacctacggtgaggttctccgatccaaaatcatactcgatcgggagactcagaggtaccgagggttcagattagttaccattgtccaaagaggacgcgatgccgaacaaaaaaaaagggatgaaattgtaaggagctgaaagagaagatccatatttttttactagggggaacactgttggggccttgaatgttccaaaaaaaaaacctaccttt

SEQ ID NO: 103592 - DNA, 342 bp, Zea mays
  unsure (1)..(342): unsure at all n locations
  Clone ID: MRT4577_25980C.1
aattaaaaaatttaaaaaaaagaaaaagagaagaggagaggtcgcaatagtaaggggggggggcatacatgggcaaaaaggaaaaaaagcactggggagggggggggtattgttagcatgagccacaagaaaaaaggaaaaggagagaaggggggggccaggaaagaagtgaaaggggggagggtggaaaaccggaatgggggggcccgaccnttcggttanttgggattgtggggagggggggtttttttggccgccggatgctggggaaggaggggatcagggctcgggacatctagggcctccaacgatgttgcccacaccgagctcttggggtaaagg

SEQ ID NO: 103593 - DNA, 210 bp, Zea mays
  Clone ID: MRT4577_25981C.1
gtgctacaggataggatcatctcttgactgccatggaaccccctcagctgccggccggggagcgctcctgggctcacgaggtcaagcaggcctctgctgagaaactccggctctcctacggcgccgtctccgacacaccggtggccggtgaaccgagccgtggcgcctactgccacagctcgtccgcctaggaccctataaggagagtca

SEQ ID NO: 103594 - DNA, 199 bp, Zea mays
  unsure (1)..(199): unsure at all n locations
  Clone ID: MRT4577_25982C.1
ctgttcccttatgaatctcagggttgnttggcgtcnccgngacatagtggnnggntnngcttttgccgtcttatgctngcgagatctgngtntgatggtttggctgnttggctctttgcntctntccggcntnnggatccctcgctgcctgccgtgtgtgccncattttttcctttggttggggcctgctgccntggtg

SEQ ID NO: 103595 - DNA, 140 bp, Zea mays
  Clone ID: MRT4577_25983C.1
actatctctctcctaagtgcacgagtgtggttagagagatcttatgccatgtacctaagcgtctgatactcatgcttcatcagatgactccagctgagaaggaaatgttcactctccatggaaagcttgatttctacaca

SEQ ID NO: 103596 - DNA, 654 bp, Zea mays
  Clone ID: MRT4577_25985C.1
ccaatcttaggaacaacttaaaacacaaggcctggccttattgtgtacgcatgaaaccaccttctcgtgtgtccgtagaaacgacgacctcttttaattctctaatggcagcttgatgcgccattagcattagcaacagataaaagcgctgcgagttgccccacgaggtgtcagtgcagtcctgtagactccggcagtgcagggcaggaaagcattggcagctgcatgcccccaggcccgtatgcagttgcaggcctgtcgtctgtaggtcacggcttgcacgccttcttctgttcctgacgccctcacccaccaaagtcgtctcgctgccgacgcaggcaccggcacgcccgccagacgcaacgcaatggaccaggctagttgcgtgccagatccttgcgtctcacctgacgtgtacaggcagccatgcatggccactcctctatacaaatgtgaagcaggtgccactcccattgtcacgccacagtagcaatggccactcctccagagctgggcaaccgcgcagatgtatatacaaagatgaatccaccgtaccaatataggaaccggaacggaatgtcagacggaagccagccagccagccctttggctgcgccgggcatgtggaacgcgactgcgatgtgcgtgccgtgc

SEQ ID NO: 103597 - DNA, 1596 bp, Zea mays
  Clone ID: MRT4577_25986C.1
ccggcctatatatatacacacaccaagcaagcagcaatgcaagctgaaagagaagctacagccagcaacagcaagcaggctgaaccaaactccagcgagcaagcaagctatagctagctagtagccaagcagaagccaaatacccaaaggcgagcgatggcgcccggaagcatcgccagccggtggcgcgagctccagggcgcggactcctggtcggggctgctggacccgctggacatcgacctgcgcgcgaacctgatcgcctacggcgagctcacgcaggccacctacgacgggttcaaccaggagcggcggtcgccgcacgccggcgcctgcgtgttcggctactccgacctgctggccggctcgggcgccgcggcggccgggagctacgccgtcaccaggttcatctacgccacgtcggcgctccccggcgtgcccgaggcgttcctgctgctgccgctgccggacctgctgcccgagtcctggagccgggagtccaactggatgggctacgtcgccgtcgccaccgacgacggcgtcgccgcgctcggccgccgcgacatcctcgtcgcgtggcgcggcaccatgcgcggcctcgagtgggtcaacgacttcgacttcacgcccgtgtccgccgcgcccgtgctgggccccgccgccgccgccaacccgttcgccttggtgcaccggggcttcctctccgtgtacacgtccagcaacccggactccaagtacaaccagaccagcgccagagatcaggtcctggcggaggtgagcaggctggtggcactgtacaaggacgaggtgacgagcatcacggtgtgcgggcacagcctgggcgcgtcgctggcgacgctgaacgccgtggacctcgcggccaacggcgtgaacgcgccgccggccgggtcgtcgcagccgccgtgccccgtgacggcgctggtgttcgcgagcccgcgcgtcggggacggcaacttcaagagggcgatcgcgtcgttcccggacctgcgggcgctccacgtgaagaacgccggcgacatcgtgccgacgtacccgccgctggggtacgtggacgtggccgtgcagctgcccatcgccacggggcggtcgccgtacctgcggcagcccgggacgatcgcgacgctgcacaacctcgagtgctacctgcacggcgtggccggcgagcagggcagcgccggggggttcaggctggaggtggaccgcgacgtcgcgctggtcaacaagggcgaggacgcgctcaaggaccagtacccggtgcccgcccagtggtgggtcgccaagaacaagtgcatggtcaagggcgccgacggccactatgcgctccaggacttcgagcagatctgatcatgcatgatgcaggtgtcgtgcgtgctggtaaactactagtacctctctatcggtcgatcacgatgtacgaataatgggcgtcgtcgatacgcatgcgtgtatgatcatccagatccaggttgtgtgtgtgtgtgatgcttctcacctcttcctcctacgaaccggagattgtgatggggagtcagttataattataaataaaccatcctctgattgtgattgtgtctc

SEQ ID NO: 103598 - DNA, 554 bp, Zea mays
  Clone ID: MRT4577_25987C.1
aaaaaacccggcccaaaatatttttgttccccaaaaaagggttttaacggggttcccccgggacaaaaaaaataaatggggcgggggggggccccccccccccttggagaaaacacacaaaacctgacaaaaaccgtttaacccccctccttaattttggggccggggcccccttttccagcgggagggtccttttccttgccccggaaccctccattgggggccccccccccctggaacattttggaaaaaagggggttaaaaaggttttccacttttttttttttgaaaaaaaactcccccccctggggaaggtggtgggggcccacccaattgagggccgggtaaagggcccccttaattttttttttggggggggaagccattttaaaagcaatttttttttctttaaccgggtggcccatgttgaaggcgtatttccccagggagttttgggaccccactttttttttgggctcctggccccccaatttgaatttttccggggccggcacaattttttaaatctcctctttgaaaaaacggcccttggg

SEQ ID NO: 103599 - DNA, 227 bp, Zea mays
  unsure (1)..(227): unsure at all n locations
  Clone ID: MRT4577_25988C.1
nggccgcttttttttttttttttttgggggggcagagtgggagcattngaaaggtggttcattgatggttgggattacacacgctgccgttcgatatgacgagcatactcctatttattagcaccagctatatatatatagcccatgtgctgggagtctggactaacgggcatcccagatcgaggaggggggggtggattcatgggttggattaggcatgtctggtt

SEQ ID NO: 103600 - DNA, 362 bp, Zea mays
  Clone ID: MRT4577_25989C.1
acacgcatgcgtatcggcgacgctcattattcatacttcatacatcgtgatcgaccgatagagaggtagtagtagtttacgagcacgcacgacacctgcatcatgcatggcatgcagcggcgagctcgctctgaccactgatcagatctgctcgaagtcctggagcgcatagtggccgtcggcgcccttgaccatgcacttgttcttggcgacccaccactgggcgggcaccgggtactggtccttgagcgcgtcctcgcccttgttgaccagcgcgacgtcgcggtccacctccagcctgaaccccccggcgctgccctgctcgccggccacgccgtgcaggtagcactcgaggttgtgca

SEQ ID NO: 103601 - DNA, 231 bp, Zea mays
  unsure (1)..(231): unsure at all n locations
  Clone ID: MRT4577_2598C.1
ccgacagtcgccaccatacttccctgtccgggacctcctgggctcgccctctggaactctcaggggaatataattaaatacccanntctctatctatatacccgtatcatccttggtcgtcaagtcaagtgcaacccgnngtgtatgtgatgtatctaccgtattgggatttggtatccccatccatgggccgtattgccactattatatantatacacgtattaccagtt

SEQ ID NO: 103602 - DNA, 381 bp, Zea mays
  Clone ID: MRT4577_25990C.1
aaccagaaaaaaaaaaattttttggttacacccaagggggcacacaaaatttccccacaaccatctaagctatttggagtagaaccactggccccctgaagggcggattcttaattattaaaacagacccgccttgcgcaaccttcggtggctcacaacctcccaaacaaaaaattttcaaaacaaaacccggctttgtctcctccacagaaaaaccaaaccacaccccccaatttggaaaaagaaaaaaaaaacacctaagacccatattgacccgaaaaccccggttataaaagaagccgcccctactttccccccatggggatgcgctgcctctccccacgaaaaaaaataacccacatggcgccccttcttcatagg

SEQ ID NO: 103603 - DNA, 184 bp, Zea mays
  Clone ID: MRT4577_25991C.1
gtccagcgtcggctcaattagtggatcgaatgcttagcagagtatgaatctgctaagagcgaatgtgggcgaatggatataacaccgtcgcttccacaacatgcaccagaagccaatgctaacgaggtcacctagtaactgcaccagttgcgttgattgttttgtttcaggcttatttactgac

SEQ ID NO: 103604 - DNA, 260 bp, Zea mays
  Clone ID: MRT4577_25992C.1
atggaaacattaacagacaaaagaagacacaaaaacgtgaaaaaaccggccactccgcttgaagaaacgggagggggaagcaaaggctatctcacttccacaacttacaaacacggaggggagtcccgaagcgccagcccagccgcccaaaaaacagccgggaacgcgttgactcggccctggccctccccacacaaaggacgagccgggtaccccggtccggatccttaaaccggtccacctacaccaagagggggggg

SEQ ID NO: 103605 - DNA, 241 bp, Zea mays
  Clone ID: MRT4577_25993C.1
aagcagtggtaacaacgcagagtacttttttttttttttttttttttttttttttttgagagggaatgattctttattggctgagcatcagcagactcagggagtgagatcccgcgtcctctgcgctgtcaccactgcttaaggccgaatccccgcgccctgccggccggtgagggggggccacagctactctttgagccagccgttaacgcgtaaacctgctcaacacatgccttttccc

SEQ ID NO: 103606 - DNA, 772 bp, Zea mays
  Clone ID: MRT4577_25994C.1
cctcgaggccggccggggcctcacttctcctcccagaatctcaccttccctcgcgtgctccggctgctttatcccccgcgtgctccggctgcttttggccaccggtacgctctgccggcgctccaaagttccaggtcaggagaagctggagttccaaatcgtagtccgtgtgaaccagttgaatctcatcaatcttatcaagtcatctaataaaaaaaggtcaggagaagctggagttccaaatcgtagtccgtgtgaaccagttgaatctcatcaatcttatcaagtcatctaataaaaaaaggtcatgagaagctggagttccaaatcgtagtccgtgtgaaccagttgaatctcatcaatcttatcaagtcatctaataaaaaaaaggtcaggagaagctggagttccaaatcgtagtccgtgtgaaccagttgaatctcatcaatcttatcaagtcatctaataaaaaaagatgattgcttgtttgtagcacctctccatccatgcctcatgttatttttggagagaaccaatcacaggaacactaggagaaactgtgtcgaccaatatttcaaaagtaagtcataccttactcctaattctcactcatgtttattctattctctggctatctgatgtggctccatttgtgcagctcaaaaaattcgcactttgtctcatttatggttatgcttgctttgtctttttgatttaagtaattacatcatctatttctcaggcgtttcaatttttttttctttgcaaattt

SEQ ID NO: 103607 - DNA, 365 bp, Zea mays
  Clone ID: MRT4577_25995C.1
cccacgcgttctactaaacatgcacataaactgacttactttcagtcaactttatgaagtgtgacttattgttggtcaaatgtatgaagtttgagtttttaaaatctaatccgcctagtaaaaatgaactgaaggagtatctctgaaaaattgcagcttcaaaatcacgtactagatgttcatgagcttttcatagaagactactattcatacatattatgttcccatacttgtttcacgattatccttgcagccattcaaatgttgatgccctgtactctttatggaggttacaaaccgtatagtcaaacttatatgtgtcaagtttgtaagggttttcatggaaaatctgaattgtattgcag

SEQ ID NO: 103608 - DNA, 175 bp, Zea mays
  Clone ID: MRT4577_25996C.1
atcggggggaaaacttgaattattacctcggcaagcaccaacgaccgtcagcccgactggacacacaaacactggaacttgacagcacaggctatacacaaaagtccacttctaaacatggtaaagagcaaggatccaggacccgctaggacagcgtacaaaccgcagcagacgg

SEQ ID NO: 103609 - DNA, 291 bp, Zea mays
  Clone ID: MRT4577_25997C.1
gcgtccgggcgggcggcttaacaaaaacaaaaaacgaagaacaaaactaattttaaaaataaatttattttaaaatttaaaaataaatataaatttttttcataaaatctgttttttctttggccgtgccccccctaggggggatttttgcagatttccgtccccctgggggggcgggctgggcatgtttctggtatggcccggggcccccttttccgtgttggggcctgccattcaccggctcggggttttacattcactattcttggaaagacttggttctttcctcac

SEQ ID NO: 103610 - DNA, 125 bp, Zea mays
  Clone ID: MRT4577_25998C.1
acgcttacgctaagactgactccattgttcccgtgaatcaactatttcaaaaaccgggggtacggctcgaagcaaacgatcctcaggctctcactgtcccacccgatttccctcccggttatttc

SEQ ID NO: 103611 - DNA, 190 bp, Zea mays
  Clone ID: MRT4577_25999C.1
cagagcctacgctgctggggaaaggggcgttgcttgaacgtgctcggggtgctccaagcgctcagcctgaaaggcctcacctacgcttactgcccggggaacctgtgcgccatgagcgagtttcttgtcaactgcaaccccgtgctcaagagggtgcccgtgcttatccaccacggcaagcccgtctgcc

SEQ ID NO: 103612 - DNA, 181 bp, Zea mays
  Clone ID: MRT4577_2599C.1
ggctgatgggcggagattgaggactctcaacgccgataaaagggaagaagacgaggcaacacctgctggcacggagggcacccatgaacctgtagctgatcagcgccaagacacgagacacaccatggactactacaagatcctcagtctggaaaacgactgaagtgttgatgtacggcgc

SEQ ID NO: 103613 - DNA, 866 bp, Zea mays
  unsure (1)..(866): unsure at all n locations
  Clone ID: MRT4577_259C.1
cctcgaggccggccgggcacggggtggccgatcgaccgttcacctcgcccgacggcccaagcagcccatgtcttcgtcgggcccctccccggcgacgggaatccacgcgtcgccgccgttgggccttttgccggcgacgggaacccatcacaccaggtcatggggcaaaacaacctccacaagttttactggttctaccaccaaacatgagcagagcttgcatggaaatgttaagccgttgcaattggcggcaaatgaatcctctcgtttggcttacagaagtccagtacttaaaaaccagtggaatcttcctgctagttcttcctccactaatgtggttaccacctttgatgataacgaacacgtgtcttccagtgttattgaagaaaaagttggagtactgttattaaaccttggtggtccagagacacttgacgatgttcaaccatttttattcaacctatttgctgatccagcgaatgctttgaagattgccctggaaaagaaaaaattgaacgcaaacatatatgttgggatgcggtattggtaccctttcacagaagaggccattgatcaaattaaaaaggataagattaccaagctcgttgttcttcccctttaccctcagtactccatatcaacaagtgggtcaagcattcgtgttctccaagacattgtcaaggaagattcatantttttctggtttgccaatttccactattgaatcatggtaccaacgagatggctatgtgaaatcaatgtctgacctaattgaaaaggagctctccgncttctccaatcctgaaagagttatgatattcttcagtgcacatggtgtgccacttacctatgnntgaggatgctgg

SEQ ID NO: 103614 - DNA, 451 bp, Zea mays
  Clone ID: MRT4577_25C.1
aaaaaaaagaaggtcattttcattttctccatttgatttttgccgaccggagaaaatatgggcttgccgtcttcttcttcatttcaccaggaacttttatttgaaatcggtttgatttagccatggcaaacgcggcatcgggaatggctgtgcatgatgattgcaagctgaaatttatggaactgaaggcgaaaagaacattccgtaccatagtctacaagattgaggataagcaagtgattgtagagaaactcggtgaacctgaacaatcatatgatgactttgcagctagtcttccagctgatgattgccgatattgcatttacgatttcgactttgtcactgcggagaactgccagaagagcaagatcttcttcattgcatggtaaaagcaagatattgtcactcatgtcttttgatctgtttagattatggtcatcaatgtgtgttt

SEQ ID NO: 103615 - DNA, 246 bp, Zea mays
  Clone ID: MRT4577_26000C.1
gttagctaaaaatatacaagtagaattagctatttaacaaatagttagctaactattagctaatttaataaaaaaatagttaatagatgaactattagctagggtgtttgtatatctgtagctaattttagccattaaaaaaaaaaaaaaaaaaaaaaaaaaaaaaaaaaaaaaaaaaaaaaaaaaaaaaaaaaaataaaaaaaaagggtgtgtgggaaatcgtgggtttaattaaataggggtgg

SEQ ID NO: 103616 - DNA, 330 bp, Zea mays
  Clone ID: MRT4577_26001C.1
cctgcataccggattaattttggactcaactctgggtgctcatgacccgcccgtcgatgctggatgtttattctttttgttgtcttattaattacaaaatgatggtgtacttaccagggaaatgataatgagggtataatgcagatattgtcgtatctaacctcactttgttgactctcagcatctttgaatatttttatattttttgagaaaaggaaaggagatcctgatttgtgcctgaattttgaattctctgtgccctgtaacttttgttctctgttcctgtgctttatgattacaaggcaaatgcaaaaaagtttttaagttgat

SEQ ID NO: 103617 - DNA, 673 bp, Zea mays
  Clone ID: MRT4577_26002C.1
ccggccgggacgggccagtcccaacccagtgcccaccgcggcaccgcctcaccggcgagccagaaacctgagcccgccgcccgtcggacgcgacgccacgcagcgcggtgcggcagcaccgcagcagccatggagcccgcggcgatggaccgcatcgccacccgcctctccgccgtcgaggacctctacttcccgtcgtccttcctcggcccgtcccccgccggcaccggggccgcgccccctccctcgccgccgaggcgcagggcggagctccgctccctcctcgcccgcgacgcgccgctcttcctggagcggtacggcgcggcgctgtccgccgacgagctcgccgccttcgacgcgctcagcccggactacgaggtcgactggcacctccgccgcctgcgcgccgccgccgcgggggctcccccgcccgcgtcgcgagtgcggaaccggcgccgcgcgttcctcgaccgcctcgtccgcgagggggagtacttctcggaggacgccatgcgagagcgggagccctacctgcaccacgagtacctcgggaggttccaggacccgctcgggagggccatggggcggcccggggagaggggggccggacgctcatgcgccgcgcggaggaggcggtcatcgtggagaagatcccggggagcagattgggaga

SEQ ID NO: 103618 - DNA, 275 bp, Zea mays
  Clone ID: MRT4577_26003C.1
gtctgcacagccccgcctcatggagcctatctacctggtggagattcagtgtcctgagcaagtggtgggcggaatctatggtgtcctgaacaggaagcgtggccatgtctttgaggagtcccaggtcactgggacccccatgttcgtggtcaaggcctacctgcctgtcaatgaatcctttggcttcactgccgaccttcgatccaacactggtggccaggccttcccccagtgtgtgtacgaaccatggcagtcctgcctggggaccctttgac

SEQ ID NO: 103619 - DNA, 191 bp, Zea mays
  unsure (1)..(191): unsure at all n locations
  Clone ID: MRT4577_26004C.1
gccggncgtggtcgtaaaacaaggtcaatcagcagagagcccagcaactgaaaaaaccaaccatcgcgcgagcacggatgcggctgctacctcccgatcccgtccccccgcaaggcaagctctatctctccccctccccttcagcacgaccggcgcccaagtccctcccatccccaccccccccacagcca

SEQ ID NO: 103620 - DNA, 179 bp, Zea mays
  Clone ID: MRT4577_26005C.1
ctgacggtggggtcatgaatggctgtgcaactaaggcagagattatgatttcgcattaccacagacatgcatactaacttggatgcatgttgaaggaaaggtcctggtatgggtgagattttttcggcattggccatttattgggcgtgtaatagtatgcattgttgagcctccatact

SEQ ID NO: 103621 - DNA, 479 bp, Zea mays
  unsure (1)..(479): unsure at all n locations
  Clone ID: MRT4577_26006C.1
agcaagacgaagaagcacgcgggacgaagcaaggagcccgccagagcggccgcccaaaccttttccccnnnnnaaggagcaaacgccgaaggcngagcaaggaggacgaaggccggcacaacccaccccacaggggnnncaccaacgaacnccaccgaagaccagagaaggccagaacaggacggaccagacacaggagaggaagaaacaaaaacccagcacgaaagggaagaaaacccaccacaaagggcaaggaccacgccaaaaaaaaaagcaacaccccaagcaaaccaaccaggggcaacaagcccgacgaaagaagacaacccangacgncgccggacgagcaaacggccacccggcacccaccaacggcgngacccgggaaacccaggccgggcagagaacgngcggccgccggcnccaacaaaaggggggaagccaanacaaagaccggcccaaagaaaggacagcaccaa

SEQ ID NO: 103622 - DNA, 342 bp, Zea mays
  unsure (1)..(342): unsure at all n locations
  Clone ID: MRT4577_26007C.1
gatcataaagagtttngttttaacattgatttattgtcacgttgcatgtaatcttattacatgttatattattcaaaccccgagcaaacttcactctttaggttggctgaaaacaccacggaacagatacacaattgaggctctgtaatatgtgcaagcgcaaggcaaaaacacagactcagcagacatggatttaccacgacaccttgcagaccacatggatgaccaattgtaaggtggtcaacctcaacagaacaggataaaactccccagattctaaggtggagctttcgggtgggcaccacatcgaagccacaatttcgaaaacccagcaaaagctgg

SEQ ID NO: 103623 - DNA, 238 bp, Zea mays
  Clone ID: MRT4577_26008C.1
cacaacgtccttccacagagaccatctacgtctgatcttcgccggacagcagataggggatggtcttaccctagcagactacaagatccataaagagagcactctacagctggtactacacctccacggtggtcagctagccatgcttcacttatactgctgttgaacctatgtatcagcgtcgtcttgtgccaactggtgtacctatatatagatgtagtcctctaataaacatctg

SEQ ID NO: 103624 - DNA, 259 bp, Zea mays
  Clone ID: MRT4577_26009C.1
gcatgggtactgaagccgagtgtttgtttgaaaaagagaggggcgtctgaatctactgtgcacgcttgagtgtactagagacggctgcaccttcgacccgagccacacttaaaactccaagggactcatacatacagatatgcgtataacgctccggagaaatagcaacaagaccccacccacttctgtggagatctcggcgggtctcggctgtgccgactaagaacctgtgtgtcgaagaactgatcccacgcgtatg

SEQ ID NO: 103625 - DNA, 747 bp, Zea mays
  Clone ID: MRT4577_2600C.1
actcctatgggcgattgggttcctcgaggccggccggagctccatcaggccaacttggacatccgcagtcgagctcgagccccaccttccagaaactgctcgtacgatctcaagaacgccgcctccccggttcccgcacccccgtcgccgcgccggtagtctgcccgtcgccgtctcctcctccaggtgaaggcaaaggtgcagcagcagaatgggtcggaaggccggtgctttgtacataaacccaaagaagtttggtgctatggcgaagccctgcatgccggaaatggtggccttcctcaactgcctggccttaaacaaacagaacgatgacaagtgcatcaagcagaaagatcttttggttgcatgctctcaggctcagaatgggaggccaaagaacgcagccaagaccatcaattaccatctccagcgacttgggcgaggcaagttcctctaggtgctgtgtgagatcatttcctcatccagctttatgccttgtaccgaagtagaattgctgaaatggggcatcaatgtgtttgcttagattggacaatggtcagcaaataattttatgtcaaacagtaatgtatgagcagtatattgatactgttttcttctcatcctatgaaggcacattacagttacgttttccatcaaaaaaaaaaaaaaaaaaaagcggcctgatactgttttcttctcatcctataaggcacattacagttacgttttcaaaaaaaaaaaaaaaaa

SEQ ID NO: 103626 - DNA, 355 bp, Zea mays
  Clone ID: MRT4577_26010C.1
gacccaaatatgctaaacaggaataaaaaaaaatttaagggggtttgaagggattccgcacttgtttaacaagcttgaggggggggggggaaaaaacaccaaaaggggggggactgaaagggaaaggggccctgggcccatttaaaagcttttgggggaatgggggccaactaagggggtaaaagggaaaattagccaaggggtgaaaaaagggcaaaacaagagggaggggaggtctaataagcttggaacaatggttgggggtccaaaaaaaccaggggaaaaatgggaaaccggaaaagaatggaagggaaccggtgggggtttcctgaaaaggggctggttttgcgggggg

SEQ ID NO: 103627 - DNA, 328 bp, Zea mays
  Clone ID: MRT4577_26011C.1
aggggcacaaaaaattggacaggacaaaacccatacgggtgggggttattacaaatataaggacagatcttgccacccttcgttcccgggggggaacatgaaatttttctattagggggtggcgaaacttccattagatacaacaaaagggggggggtcccaccactataataaagtttttggggagcaaacgatgatcacaacgcgtttcccccccgaggacccgtacaacaggggaaacccgggaccagatttttagggtttagccattttttagcccgggggggaaactttgtgtcaaggggaaacaagagcccctttggttttt

SEQ ID NO: 103628 - DNA, 233 bp, Zea mays
  Clone ID: MRT4577_26012C.1
gccggtggaagattctggaatgccgtgaggatgaacttcagcgcccgagtcagtcccagctcatcctccccagtgtaccactttgttctaataggagatgggaacacgagaagtttgatggctttgccctgggctgggaatacctcacccacgcccagttccagaaaggcctccagctgagcagacggccccgatcccgccagatgcggcttttgcttccagccaaagaacac

SEQ ID NO: 103629 - DNA, 325 bp, Zea mays
  Clone ID: MRT4577_26013C.1
ggatttttagttttaaactgcccaatgggaaagcggaagaagccttgcttggtttgtgggttgtttgggcacaatgcaaagcagtgcaagcaggttggtcccccctatctccgagggattatcacttggtgacttggggtcaagactgtttcatctgcaaaaaaggagggcatatggcgaaggattgtcctgataagcacaagaggaatgatcatcaatccacattatgtataagatgtggagaaacaggtcatgatatgtttggatgtgccaatgattacccaccagatgatatcgagcaaataagatgctacgcgtgtaatca

SEQ ID NO: 103630 - DNA, 289 bp, Zea mays
  Clone ID: MRT4577_26015C.1
ggacttgggcatttggggagggctattctataattcgtatgatcttttttttcttgttcacaaagctgggggggggcctgccttccccagaaacaggcccaatttttaacatgaacgcccaaaccttttaggtcaactcgctcgcccctaaaataaaaggcctccagcgcgactggggaaacagggggttgggttcccccaaaaaaggaatttatgtaaaagggctggtttcaaaccttggttttaagaaaaattcaagcctcactcgggcgaaaaatttttattttta

SEQ ID NO: 103631 - DNA, 199 bp, Zea mays
  Clone ID: MRT4577_26016C.1
gttaaccgttcattccacaagtgtatgctcatcattttcgcgccaaatctgacgaggggatatagccgatcgaagcgtccacggcgacagcggcaatggctgtgctgtcgctacatgtgccgtgaatgcgagtggcgattgaggagagtgtgaggaagcgcagagaacgctgagtccacgattgacgccaagtacgtcg

SEQ ID NO: 103632 - DNA, 439 bp, Zea mays
  Clone ID: MRT4577_26017C.1
cccactcgttcggtggccgtcgtctcccgttcgtaactccaagccccccctaccgcgaaatggcccctaagcgaggcggcagggcgccaataccccccatgaagaaaaccgataaagtgacgaaccctctattcgagaagaggccgaagcagataagcatcagcggcgcgttgccgtccaagaaggacctgcacccgttcgtgaagtggcccacggtcatgcgtatacagcggcagcgccgtatgctgaaacataccctaaatgcaccaccaagggctcaaccagttgaccaccaccctatacaagaacctcgctacgaaccttcataagatgcttcttaagtaccggcctgtagaaaaagctgccaagaagagagtggcttgtgtagacggcccaacctgagaacgaacgtaacactgttgagtgaaaaaaaccaatt

SEQ ID NO: 103633 - DNA, 345 bp, Zea mays
  Clone ID: MRT4577_26018C.1
atattaaatacatttatttccattgatttgtaatatttcatgtcatgcgtaatgagaacaattgtcgtggcattacatttacatgcatgaatgaactaatttctgattactagactgttactttgcattctaccaatgtcaaacctgcactgccaaaagcattaaataatatttttcactctcttcataatcatttcaactacatcatctatacctaagttcttcttaacactactaataattacataataaccaattgactacttgaacctttccatctttaaggcatgtttacattatggtgaatatcgtcacttcaaattcttgtatactattctgatacta

SEQ ID NO: 103634 - DNA, 241 bp, Zea mays
  Clone ID: MRT4577_26019C.1
agcgttctccctctatcgtgcgcgtggcgacgacttggagggccgcggtgccgtcctacgccaggcgcccagatcatcggccgcgccgtcgacggtcccgatcaccatccatcagaagtaggatcacagcgctgggacttacagcgagatggaaagcgttagtacgccactagctcagatcgctccaggaagagcccggcgggggtgctgcataggctgggctccactcccattgatgact

SEQ ID NO: 103635 - DNA, 767 bp, Zea mays
  Clone ID: MRT4577_2601C.1
cattgggtacctcgaggccggccgggatggtccagctccagccccaccttccagaaactgctcgtacgatctcaagaacgccgcctccccggttcccgcacccccgtcgccgcgccggtagtctgcccgtcgccgtctcctcctccagatctgacccgcctgtcgacgtagcctgccgtgagccgggagtccatcactgtgccggggcgttactcctcaccgctgctgtgttgcctcttctgcggggttgaggtgaaggcgaaggtgaagcagcaggatgggtcggaaggccggtgctttgtacataaacccaaagaagtttggtgctatggcgaagccctgcatgccggaaatggtggccttcctcaactgcctggccttaaacaaacagaacgatgacaagtgcatcaagcagaaagatcttttggttgcatgctctcaggctcagaatgggaggccaaagaacgcagccaagaccatcaattaccatctccagcgacttgggcgaggcaagttcctctaggtgctgtgtgagatcatttcctcatccagctttatgccttgtaccgaagtagaattgctgaaatggggcattaatgtgtttgcttagattggacaatggtcagcaaataattttatgtcaaacagtaatgtatgagcagtatattgatactgttttcttctcatcctatgaaggcacattagcagttacgttttccactaaaaaaaaaaaaaaaaaagaaaaaaaaaaaaaaaggcccctaggg

SEQ ID NO: 103636 - DNA, 613 bp, Zea mays
  Clone ID: MRT4577_26020C.1
cgcatcttgaggcccgaaggcgccgtcataatacgggacgacgtagacgtcctgaccaaggtgaacagcctcgctctgggtatgaggtgggacacgaagatggttgatcacgaggatggccccctcgtgcgcgagaagatcttgtatgccgtgaagcaatactgggttggtggtaagcagacggctgtagcttgaagcaagcacgtttcatgaggctctaacatgaggaattctgcaaccaaaccttacccgacaaacaaggattagcttaaatgatcaacccttgtagggcttgttcggttacaacaattcagaagcggattggaggggattaaatccttttctagttaaaaatgactagaagaggatttaaacctcaccaatccccttatggattggtgtaaccgaatatgtccgtagggggtagcactgaagcagccaggataccgtgctcgctggtgatcactgcaaccacataatcttctttggtcgtgtactcttttcaaaaagcttgtatctttggaaatttctttacggtcctcgtacagattcgggtgtaacgtattaagtagactagctttatgtaagcgagaaatacatgttttctttggac

SEQ ID NO: 103637 - DNA, 273 bp, Zea mays
  Clone ID: MRT4577_26021C.1
ggaacaaatatgttcattttaatggacacataagtgatttttacatctaacaatgtatataagggacaatgtttttacatctaacaaatgaaatacaatctaattataatttaagcggggacaagaacccgacaggatttatccccgcgggaaacggggatgggaaagaaatatcccccgcaagtattggtgaggatcccgcgggaaaaaaaaaattgcgcggggagacagagatggggagctaaaacccgccggggagttcccgggtgttat

SEQ ID NO: 103638 - DNA, 795 bp, Zea mays
  Clone ID: MRT4577_26022C.1
agacatgtcaagggtttacttgtcacttgcatgcacgtgacgaacgccatggcgcttgcggttcgcctcatcggccgccgccggttcctcccgccgccgctcgccgccgccgttgctcacctctctgccgcttcccagagcccgtgccaccaccaccacccacttccgacccccgcgctcccgttgccccctcgtgagctccatcctttcgctctccactggcgaagcttctcctggtactcccgctccggctccgggtctgatagcagtcccggcaccgctgccgcggacgctcgcggagaggacgtgtacatcgagaaggaaagcgtgcacttggatggcgtgacaatcgttgatgacgggggaggggtcgtcagtgaggcgggtgctgcggcggatgccgtgggagatgccgccggcgccacggccgacggcgtcgggggagtgccggaattggctgttagcacagttttggacctcatggacgggatccatagcctcaccggactgccgtggtggatgacaatctccttttctaccgtggccatgagattgtggatacttcccgtcctcatagtgcagttacagaagactgctgaaaattggtgaagtgttccgaaaagtgtccacttcattaccccctcctcagcctggaagcaatttccgtgaacagtacactctgttccagaagaaaaagaagagcttggttgcccctctttatctgaaattttgctattttttggtacagttcccttgctttattctttgatgacgagtataaggagcatgtgcttg

SEQ ID NO: 103639 - DNA, 2343 bp, Zea mays
  Clone ID: MRT4577_26023C.1
catgatggaagttgatagggttctaaggccgggtggctactgggttctgtctggccctccaattaactggaaggtgaactacaagggctggcaacgcacaaagaaggatcttgaggcagagcagaacagaatagaggaaattgctgaccttctatgctgggaaaaagtctcagagaagggcgagatggcgatatggaggaaaagggtgaataccgagtcttgcccttctaggcaagaagaatcagctgtgcagatgtgtgaatcaacaaacccagatgatgtctggtacaagaagatgaaggcctgtgtgacaccccttccagatgtaaaagatgaaaacgacgtagctggaggtgcaatcaaacccttcccagccaggctcaacgcagttcctccaagaatcgctaatggtttggtcccaggcgtttcatcccaggccttccagaaagacaataaaatgtggaagaagcatgtgaagtcttacagcagtgtgaacaagtatctgcttactggtagatacaggaacattatggacatgaatgcacagtacgggggattcgccgcagcaatagagtccccgaaatcttgggtgatgaatgttgtgccgaccatcgcgaagatgcccaccctgggggctgtgtatgagcgaggattgatcggcatatatcatgactggtgtgaggctttctctacttatccaaggacgtatgatcttatccacgctagcggtcttttcaccttgtataaaaccaagtgcagcatggaagatgttctcctggagatggaccgcatcttgaggcccgaaggcgccgtcataatacgggacgacgtagacgtcctgaccaaggtgaacagcctcgaggcatgatggaaggtgatagggccggccgggaaccccttccttttgctctcccgttgcgcgcttctcctcctcctcacacccctctctttctgtcggcggcgactgggcggccgtcgctgccgtcctacgccagctgcccaggtcttcctcgcgcccttcgccggcggcaaccaccgccagggtaagccagccatcagccatggctttgaaggcgagctccggcgacaaccggaccaggagcacggtatccctgtgcatagtgattggcatgtgctgcttcttctacatcctcggggcgtggcagaagagcgggttcggcaagggggacagcatcgcgctggaggtcaccaagcgcaccgactgcaccgtcgtgccgaaccttagcttcgacacccatcattctaaagccagtggcaactctagcagcctggtctctccgtcgaagaagttcaagccgtgccctgatctctacacggactacaccccctgccaagaccagaacagggcgatgaagttccctagggagaacatgaattacagagagcggcattgcccggcgcagaaggagaagctgcactgtttggttccacccccaaaaggctatgtggctccgttcccgtggccgaagagccgggactatgtccctttcgcgaattgcccatataagagcttgacagtcgagaaagccatccagaactgggtccaatatgagggtaatgtattcagattccctggtggagggacgcaattcccgcagggagcagacaagtatattgatcagcttgcatcagtcgttccgatcgccaatggaactgtcaggactgcacttgacactagggtgcggggtggctagctggggagcttattctgggtatgaggtgggacacgaagatggttgatcacgaggatggccccctcgtgcgcgagaagatcttgtatgccgtgaagcaatactgggttggtggtaagcagacggctgtagcttgaagcaagcacgtttcatgaggctctaacatgaggaattctgcaaccaaaccttacccgacaaacaaggattagcttaaatgatcaacccttgtagggcttgttcggttacaacaattcagaagcggattggaggggattaaatccttttctagttaaaaatgactagaagaggatttaaacctcaccaatccccttatggattggtgtaaccgaatatgcccgtagggggtagcactgaagcagccaggataccgtgctcgctggtgatcactgcaaccacataatcttctttggtcgtgtactcttttcaaaaagcttgtatctttggaaatttctttacggtcctcgtacagattcgggtgtaacgtattaagtagactagctttatgtaagcgagaaatacatgttttctttggacaaccccaggtctatttgtgtactcccgaatgatcctgaagaaaagggctccttacggctccgcctgttgcaattgg

SEQ ID NO: 103640 - DNA, 514 bp, Zea mays
  Clone ID: MRT4577_26024C.1
gtccgcttttttttttttttttgggaccaagtctcacacatatgatgcatagtggcacaggatcgaatgtcacatctttactatataacaggagttctgtacaaaaataattaaataattacatcatatgaggaaacgatccagcaacccaaagttgactgggagacgacggcctagatctctcacgaacacatcacagcatccttcaagcgcctcatccagtggtacctgttcttgacctggcacttgagattctaggtaccatgatgatcttcaggtgactcgtaacctcgcgccagattaatgaagcgaagccggtcgaccacagccggggcggatacgcggctccggctgccgagctccacagatggcaaggccaggcgcgtgcggccatagagcacgcgggggcaccttgcacttgggttcgagagagtacacagggaaggttggaggctcgcccatggagggagccccgcccggcctccaaggaagaggagcaggggcgatggttgcc

SEQ ID NO: 103641 - DNA, 413 bp, Zea mays
  Clone ID: MRT4577_26025C.1
gcgcttcccaaatcccccaatcccgacgcccacccgaccccgtcgccagatctcgcgcctcgtccccggggctcgatcggatcagcggcggtcggcgattcggggacggggtcatctcgcctaggcttgggcggggctgggctggtgggagccgccgagccggggagccatggcgtcggcgcaggcgccgtcctccgccgctgtgccgtcgcgcaaggaccatctcgaggccgggaagaagcggctcgagcagttccgcaagaagaaagcggcgaagaaggccactgcagctagtgcagagcaggcaaaagcgcctgcgcctgatgtagtggagaacccacctccaattgtcaatgctggtagcttgggagatggactggtgtctgatgtagacccaaaccaagcgagcacgt

SEQ ID NO: 103642 - DNA, 954 bp, Zea mays
  Clone ID: MRT4577_26026C.1
gatccctagccgccgcctgtgtcacaactcctgtcttgctcctcttctcgccctctgtccagcagcagcagccgccgagggaccgaggaccgtcctcgaccgactcgttccgcaacagcacgccggtgtggggcggcagcgtgtacgcgtggtcgaggatgctgctgctcctgtcggtcgcgttggtgcggctggcgctgttcgactctccatattgctctccatcgtgatctccacgggtgggcggacacgcacgggaggccgcatgtgggcggcgggcctatgcccagtctcattttgatttgatctcatttgttagctaatagccgctgcctggaccttagcaactttgcaattccttttgaagtacttttgctgctcagtatgctatatgttttgctgctcagtacactgaatgttgcaaccagtagactataaaacttagcaaatgaatgttgttttccttgctattatttctagttctgaagtctgaaccgcctattgtatttttttgctttggttattagtttattacattggtaatgcgactcgattgttctatgttctgaaaaccgctaaaacatttagctgcggcgatatccggatatatccttttctagctgttaaaaaaggccggggataaatgcattagcccgctattttaaacactgctctgcaatgcatggtgtgtggcgcaggaagattactgcgcggcggaggtggtgcttgcaagtgaggtgcggtcgcgagggttcacgcccccacagcgtcgcagcgccccccgggaatccaaaataggcgccgtagggggagtgattcattagcagcttcggctgcagaaacgggagaagaagcctctgtatgagcgccgttgcgcagtaattaatagagaatattgaacatgcatgcgcgcgcttaatcagttcagctcaagaacagtcttcttgtggttcg

SEQ ID NO: 103643 - DNA, 135 bp, Zea mays
  Clone ID: MRT4577_26027C.1
gtttgggtgctcacagaaggattattacacagaactcaacctgtttgagggttgtgtggccatatggtgttccttccctcccatctcttggggggagggctccagtccatgccgagaggcagcggcgaggtaccg

SEQ ID NO: 103644 - DNA, 171 bp, Zea mays
  unsure (1)..(171): unsure at all n locations
  Clone ID: MRT4577_26028C.1
annctcnnnnnnntntttttttttggtttttgatgagttataatggttgtgtgatccgtgttgtngtgtnggtttcggcgctcagttgcaagctataattcaggattgattgtgttaaaaaatggcattggcgaattatagaaataaaaagaaagggggtgaatttctata

SEQ ID NO: 103645 - DNA, 202 bp, Zea mays
  unsure (1)..(202): unsure at all n locations
  Clone ID: MRT4577_26029C.1
ccccccgattgggtacctcagagccggccgggacacatttcataagagccgcgnctcgccgcgaatttccccaggagccacagaaactcgcacgccgctccccgccgtccggcccgagtcgccgtcgctgccgaatccatcccatggctccgcccgccgcacccaccgcgctgcaccacagaacgccacacctcctcccccg

SEQ ID NO: 103646 - DNA, 756 bp, Zea mays
  Clone ID: MRT4577_2602C.1
gtaatcctgtatactgtataccaccaaccaggaaccaaggatgtggatgccgctgtaatatttgattcttgcagctggacatcgtcacctagtttgttggacgaagacctgttccatcgatcttttttttaaccaaatgcgcttgtcatcccgttcccgttagagatgtaataagctgagatgcaaaaaaaaaaaaaaaaaaaactttgcttgttgatcaccgtgcgatctctaaacccgtcctgctgctgctgctgaagtcggacccctgcaggcctgacctgatctgcgttgggacgatggatcggaaacggctgcccaacgactccagtcaaaaccccaccgctgcaccgcaactgctactatgcaccgaatctgttgcaaaccgagccatgcttttgtcgcgcttgcgcccccgctgacggacgctaactaatctgttctgcagcacacgtcgaccgcatcgcgttgcaacatcagtttccgttggctcgcaggagattcgggggcaacagtccagcaacggagcgcgcgaaaccaggaaggggagcgaagagaagagctagcgcaggcaagtttcaggagagcgagattgccaattcgcgatgcacgggtggcactgcaatgcagggaactggttcctggtttcttcttcttcttcatgcaaggggaaggagaagtgagaggaaaaagaaagaaagtaagaaagcgaaaaataaataataaatatcctagagcagaacagaacggcgcatg

SEQ ID NO: 103647 - DNA, 434 bp, Zea mays
  Clone ID: MRT4577_26030C.1
atgcgtggacgcgtggtatcttagcccagatctgagctgccgcctaaacaagtgcttgtatgggcttaagcaagcgcctcgggtcccgtacagccgttttgccaccttccttgtatctttaaggcgtggtgaggacagatctgacgcctgtctgctcatctgccaccagggagcgactgttatatacctgctactgcatgtggatgatataatgagtattggccatacgacctctagctccactttgctacatcggaccatcactgccctacagcgggggcttgagaagatctaagtcaggttcaccactgtttgggtattgtcgtagaacaacggtttgtaggtctcttactacagcagcgtcactacactctagatatcctagatcgcgctgggatgactgattgtaagccatgttccacctcggttgatac

SEQ ID NO: 103648 - DNA, 726 bp, Zea mays
  Clone ID: MRT4577_26031C.1
acgacacgaggcggtgcgggcgctcgtcgatcgcctggttcggccccggctgcagctcgatatagaggcttgagggggcgacaagaggcggaggaagaggaggtggtgccggtgctccggctccggctgctgctcgtggtggtggctgtgcaggtgcggagatcgtcgatcgatcgctgcggttcgtcggcggcggtgtcgagatgtcgatggacttcggtgccccggcggatgaccccaaggctttccgcaacatctgccgcgaccgtacgtctgcaccacgcgcgcgactttgattgatctccgctcttcctcacgtcgtctgctttacgaattgacgacccgactgctcggttccgctgttgctcgtttgtgctctcctcagggatactgaaggacctgcttaagcctgacaaggataaggagaccaaaagctcatggaaggtacataggcgtaatatttttgtcgtccgtgcgcatgcagcttgatctatgcacattctgttgttactgcttcatgtgctcagtttcctactatctttcattttttgaggaaacgctgcagattctgagattcatacttttgatgggagaccgtattgtgtacattaggacatgaattgggcgagaatagaatttatgccatattcatttcacatggctatggggattttttctgtgtaatgtttatcaattatgtatatgatcctttctcacaggaattag

SEQ ID NO: 103649 - DNA, 562 bp, Zea mays
  unsure (1)..(562): unsure at all n locations
  Clone ID: MRT4577_26032C.1
ccctcctcgagnttttttttttttttttttttttttttttttttttttttttttttttttttaaaacaattctgggcatcaaaaaaatggttggctaaaaagcccaaccctcagggggctgggcagaaaaacaattaacccgcccacaggcttaacaaggggcctaattcacccagaaaaaccggggtaacccgaggggaattttttgaaccaaaaccgaggagggggcaggagccccctttgcagggaatcggaggccaataaggccctgactcaacggaagaaaaccctttccgaaggcccttatttcgccaaacggacgggattcccccttatcctgggggaggctaagggccccccctttctttaatagaaagctgtttttgtatgcctgccccccttgaaaggggaactcccacccctttttaaaaggaccgctcgcctttataaccccacggccaactatgattatgcccctgcccctggagttaatcacaaattcgggagggttgaattgttgcccaaaatcttttcctcctgggaccttttgaactccaggcgg

SEQ ID NO: 103650 - DNA, 279 bp, Zea mays
  Clone ID: MRT4577_26033C.1
ataaaaaaaaaaagaggaaaaaaaaaagggaaaaaaataaaaaaaaaagaaaaagaaaaaaaaaagaaaaaaataaaaaacaatggacaaagacgtcaagatgcttgaaaaggggggagaagaaaagaaaaatgaaggtgctgcagaacaatcattatgttgaacaaaaaaaaaaataatgggggagctgccggagaatgttggagcgaatgacatatagtacaagttctattatatggaagagattgagtttgagattttgctacagaatgtatttag

SEQ ID NO: 103651 - DNA, 1082 bp, Zea mays
  Clone ID: MRT4577_26034C.1
cattgggtacctcgaggccggccgggagctcggtccgcgagcaaacgccttcaagcccatctcggtagccggagaacgagcagcagcggaggcgatggcgtccccggatcccggccacacgccggcgcaaggcgaggaatctgcctccccctcctcgtggcctccccgaaagctccagagtttcacaccagggctgtggtcacaatacaaagcttatgaggatgcagttgtggagaacattaaaggaactattgcggatgctctggttcttgtgagagagcatcaggcggaggcaattggatgtgccactgttgcaggattcattctgttcagaggccctcgaagatttttataccgcaatacctttggccgtttaaagactgagaaggatttactgaatgatgccgagcaaagtatgatggagtaccaaacatctattcagaacttgaagaaagaatcaaaatacactcttgacaaagtagctatcggtgaaagcgatgtgcagcgtgggcgaactgatctgagatctactgggaagcagatacaatctcttataggttccatttacaaagcagaatctacagctgcaggtctgatggatagactaagaaccattccaaccaggcaatctctcgagctgcgagcagaggtggcttccatggcctccgatttgaagaaccagaggtgtgccttgcaggaaaggatcaacaaaatatctgaatatggtgtccgtgtctgaactgctgcaccgtctgtacatttcccctcatagagcctcttttggtcctcccgtacaataaactgtgaatccaccgtgaggtgcgcgttttggttagacaggttccgattctaaccatattttctgtcagcattttgaatgctaggacagacatggtaactcatcacaaccataaattgttcctatcactttaacgttgagcattgctcgtttctgggaagcagatgggctgatggctactatcttatatatgcgattgcaaggaaaaactttgttccaccttggcaaaaaaaatacaaaaaaagaaaaacgccgttccgcttcaaaaaaaaaaaaaaaaaaa

SEQ ID NO: 103652 - DNA, 238 bp, Zea mays
  Clone ID: MRT4577_26035C.1
ccgggggtgggctcctccctccaccccctctcatctctctctctatggcccgtcctaggaaggcgaaaccgccgccgccgccgcatagagcgacaagaacgaccatagacgaggagctgatgtatggacactgatctgtatggagcgattgccactgaaagtacttttgcgacacggattcacatactgagctggactacataattgctaaggagagggagaataaggtgaccttcta

SEQ ID NO: 103653 - DNA, 152 bp, Zea mays
  Clone ID: MRT4577_26036C.1
cctgaacagtatcagtctacttctcaaacatgtggcttagtacaatgttcagcatctcagtggcaaaatatgtcaagttctggattgcctttactggattgtcgcaaaagtattggtgagcccacttcaataattagcctggggggaaatgg

SEQ ID NO: 103654 - DNA, 196 bp, Zea mays
  Clone ID: MRT4577_26037C.1
agggcgattgggttcctcgaggccggccgggactgtagtttttactgaaataatgtataatcttcttttgaatgtactaagtgtgctgggagccagaacaaccatcagtccttgatctgaatggagtttttgcacctattcacaggctatgatattttagctgttggaggctaaaaaaaaaaaaaaaaaagcggcc

SEQ ID NO: 103655 - DNA, 383 bp, Zea mays
  Clone ID: MRT4577_26038C.1
gcggcaaccatgcggcgcggcggcgggtgccgcatccccaagccctccttggtgcccttcaccgcggacgaggacaccccggctttggaccccagcgtcatccgaaacctcgactccgccttatgccgccgtgactccgacgccaacagcctatgtagcaggcgtcccgcttttaccgtcggggccatcctaaacttctccgaccgcgccacgcaagtcgtcgcgctccgagtcgtaaacacattcctcgcccccgccgtcacgctccgggggcctttgcccgccgcgcgcgacattcaagcggcgctccgccttctggatgaccgaatccacttgccccggaacgacgccacatttgatgatgaccttatccaagaccttcg

SEQ ID NO: 103656 - DNA, 263 bp, Zea mays
  Clone ID: MRT4577_26039C.1
gggtggagggggccttcccttgaaatttttaaagcccaaggtttgttcttattaccgatccattgacttaacaatttcccagggcccaccggttccccattcaaagtttcaagttttacaggtgatcccaaaacaccaccgaccctttttttgtaaaaaggccacaaggaccaacaaaaaaaaacttaggccaacagtgcaatttttttttatttttccctcaggcaaaggtcaccaaaaattcttccataccccatttgggc

SEQ ID NO: 103657 - DNA, 2330 bp, Zea mays
  Clone ID: MRT4577_2603C.1
ggccgggaaggaccgtccggcagtggcacaccaacccgccgccccgccacgggcgcgcgcgcgaacactgggccccacctggcagcaattcgcccccggcccccatacaaatatccggcgcgtcgcggcgtcggcgtcggcgtcgtttaccagtcttctcgcccggtcgccggtcttgagcgaccgcctcgctacttcctcctaccggcgcaggcacacggtttccgcgccagcaaggggtgcccaccgcaaagatccgatcgatcagatcaaaagggaattcctgaaaaggagagaggagcacccttcctcgccatttccgtccaagtgttttcccgaggagtcgtgcgtgcctgctggcgctggggcggctggacgggagcattgctggccgcggcggagcccggcgctcgagtctcttctctcctctcctctcctctcctctgcggggggcagccttttatttgacaacggtataaagaaatcaagtacaaatgaagaggcacatctctgcccagtatttgatgactgaagataggtagcagtatggtagctgctacaattgcgggaatgtttcttgtgtgttttgagtccctctgcacctgttttggcacaaaaaggaaagatgaaagcgaagaccatgttcttgcagaacattccaattccttgagttcttatcaaatgaggtcggtttctgatagaatttctgcaagctcgcttcgagcacctgcaagtccatctagattttcattgtcttcgccaccaagcagaaatgaacctttaaacatcagtcttgaacatgtggttaaactgacacataacttcgctccgaccttgatgattggtgaaggttactttggaaaggtctacagagcgacactgcgagatgggcgtgtagtagctattaaaagggcaaagaaggaaaattttgtttctttacgtactgaattcagcaacgaagtcgcattactaaaaagtattgaacataagaacttggtccgattgcttggttatattgacaaacccaatgaacgaattctcataacagagtatgtaccaaatggcaatcttagggagcatttggatggtcaacatggcctagttttgggatttaatcagcggcttgaaattgctatagatgttgcccatgggttgacttatctgcatctctatgcagagaagcccataatacacagggatgtgaagtcatcaaacattctactgacagaagctttcatggccaaagtggctgactttggatttgcaagaactggtcctactgagccagaccagtcacagattgagactgatgtgagaggaacagcaggctatttagatccagagtatatggggacaagccatcttacgatcaagagtgatgtgttctcttatggtattttgctcctagaaatcctttcgggacgtcgtcctgttgagagaacgaggggtccagcagaaaggattacagtgagatgggccttcaataagtaccgcagaggcaatgttaggggcatactggacccaatgttaactgaagcagtgaacgaggatatactgaacaaaatcttcgatgtggcgttccagtgtgtcgctcctacccgcgaagacagaccctccatgaaagaagttgtggagaggctgtggaagataagaagggatcatacaaaaatacagaggatagcagaattgactctctgaatccttaaggctctgttcgttttttacagattggaggcccgaaacggttcctgaccggattgtttctctaatttatataagttttgataagttggaatgaatcctggtccaatactagacaaacgaacgccccctaaaccatctggtcctggttgctgtttttgcttgggagaacatgggtcagttcctagtgaagaccaaagaccgccacataaaaataattcaaattttgtggttgtgaacaactgggattctttaagagatgtggggaacaatgccctgcgattgatggtttccctgtagccattactgttaatcagcataagctgttcagtcatcgtcctcgagaagtacagtgtagcttcggtgtacggcatccttgtactttggaaaacagttagatatgaaggaaacctctgactactaatttcttctggatataactagtgaaggaaactaaaaattattattcctcactcgtgtaatcttgcaaagactttttggtttatgaaatgtaaatgacaatggtaatgatttatgcttgagtaccaacgataataagtttgaatatatcttatctattattctttttttgctttttattttttttgttgttatttctttttatattt

SEQ ID NO: 103658 - DNA, 243 bp, Zea mays
  Clone ID: MRT4577_26040C.1
aaacgttatatccacatcttcgcatttattgaacagggtttatggtttgtttacagagagcaggaatttttggggctttttaaaagaagttggttttggtcccaaacgaacagctgtttttcagacttttttgatcagggggaacagtttggttgtagcttgagtttacaaaaattattttgctccatgggtcttgttcccaaacagcgaggtgttgtctcaaaacctcggccttatttttgg

SEQ ID NO: 103659 - DNA, 160 bp, Zea mays
  unsure (1)..(160): unsure at all n locations
  Clone ID: MRT4577_26041C.1
aaagctgcacatctctcctcgtccaaagactccaagctcctgtagcggctgtggtctgctagcagatcttagtcacatctccccgngtagcgacccgtcgtccgncgacaactttagcgctgggaaagatcacaggggatcggcgcgaagactggggact

SEQ ID NO: 103660 - DNA, 369 bp, Zea mays
  Clone ID: MRT4577_26042C.1
taggctcgacacgcaagacaaagcgcccttggtttggaggggccatgtccatccctccatccaagcaaggcgccgacaggacatctgatgcttgagtgcaatcactaccttttctacctatatggcactctgccctgtgactatggcttatacccactgggcctctcacacccgttagggcacctggtgctttatcgatcccaagtggctggtctacggagaggtgatcaactgacgatactccatgctgtgctcgtggggcgccatcgacccgaagatcttgtgtatgatgggcatcatcccgacggagaccatgctgatcgtggatcaagaccggcgtcatgccattaacgttcacctacaactact

SEQ ID NO: 103661 - DNA, 294 bp, Zea mays
  Clone ID: MRT4577_26043C.1
aaaattagggggtttataagaaaacatttaaaaaaaatacacgttaatgggcctgggggggggggggaagcttttcatgtgttttaaaggaagttctatttattaaagttaatttttaaataatgggggtaggacgggcacagctttaaactaaaactggtgtacacaatttgggcatgttttgcagttggttacagggcataagaggtgagaagatgcacgggaagctgttatgctagttgggtgctggaaagacaacaaagggggggttcgaaacagaaattagttttaaag

SEQ ID NO: 103662 - DNA, 248 bp, Zea mays
  Clone ID: MRT4577_26044C.1
ttagcacgtaccggacaggccggcggaggcggacagctcaagaaacctgaccacggccgcccgaggacacagagaacgctgcacagacaacacaccggggcaaacgcaaacgccgaggcagggccgagggaaggacccccgggagggacgcccaaagagcgcccaggacaggccgagagcaagaaccaaggacacaagggcagaggcacaaacgagcaagagcgcaagcggaaccatccaaaagcaag

SEQ ID NO: 103663 - DNA, 467 bp, Zea mays
  Clone ID: MRT4577_26045C.1
cgtcgccccgcgtccgcccacgcgtccgaaaaaaaaaaatatatatttttaaaaaaaaaaaaaaaaaaaaaaagaaaggggaaaattaaaggggggtctttcaaaaatcccggttttctttcgcggtcctactctctcttcccttttcttcgagtccctcccttttattgggtgccccctgttttttcctttgcctctgctttccccctgcgtttccccaattccccggcttttccccattttccttttttgcagtgggcgttccttttccctagttcccgccttttcgcattgtcctcccctttttgcccttatcacactaatggggccgcgcggcggggggggggcctttctcctttgtggttttttcattccccctcgtctggccggtttcccccgcctggcgcccttactcccttcccttttccttttttcccttccttttcgcccccttccctcctttttcc

SEQ ID NO: 103664 - DNA, 661 bp, Zea mays
  unsure (1)..(661): unsure at all n locations
  Clone ID: MRT4577_26046C.1
cctgttctttcctnctctcaccacatccatttgtgtgtccacacgnagnnatttctgttnnnctcgttgagtctcattcttagggaccatcctgcgttatttcttttaacagnattgtgcnncgccccagtccatatacctccccatcctgnnacatatgtcnnnttccgctccgtgtatcgtgcnnccggctgaggtccccgggctctttggtagtccataaaggtatgggtgcgtgtgtcccccgctttcnccgacccatcggnaattaatgtaataatgaaccgttaatatatgtagtggtatttttcactttttgcgcccggnagtgcttcccatcttatttcctacnatcctctcaagttcattttcacataatgtcggnactatnatgtcatatgctcatatcatgggtctttctttttccccgcttgatttccgccatannncccgttccctttggcttttgtggtttcgcttggattatgtagacagggnaccatgtgggatatttctcgttaattccatttcatttgcgcngtcacttaatttagnnatgatcgatggcattttnnggctttaccttaagaagnagtcattatgttacctttcccgccccgtttacccccgcgcccttggnnttgaattttctttcactttt

SEQ ID NO: 103665 - DNA, 411 bp, Zea mays
  Clone ID: MRT4577_26047C.1
tcgttctcacctgaccaggaccacccgcccggacaggggcctttgagtagggtacaaggtcaagcaggcatacacagtctaccgagtacgaaatgatcatgatggcgataagaagaccgagcccaacagtatttgttgtggccagcctaatccccaaggtatcacccaaatcaagtgtcagagagaacaagatgtagtactggtttctagagacctagacgtaagcttggtggactgagggttcttaactcctactgggagaatgaggataggacctacaaggattttgagatcatccttgaggacgttgcccacaaaagccatctaaactgacccgaggatcaactggctatgcaacccttggcacaagcaccgcgagcttcgtggacttaccttagcaagcaaaaagtt

SEQ ID NO: 103666 - DNA, 317 bp, Zea mays
  Clone ID: MRT4577_26048C.1
attcggctcgaggaaggtagacacaatcacttttgagccgagcacatcggcttaacaactgggtgggttgagtatggattcgacaatagccaccccataccaggagatccatgaccaaagaggacacacgacaggctgtgggttgcttactctgtcaaatgcgaagcaataatcgtagtctataaccgccatcaataacacgtatgatgtctgcaactcaaggatagggatcaatgtcacgaccaagaaacgttggagaggctctattagaggcatggctgtgtcagatgcgaccccacataccgaaggcacccgct

SEQ ID NO: 103667 - DNA, 269 bp, Zea mays
  Clone ID: MRT4577_26049C.1
gcttcaccaaattaaagtgtgttccatagtctgacgattcggcatgtttcaccctaaattgtcatacaatagagtgactggatccaagtctattatgaggcgaccttcactgggatagtcatatctgcctgtgatatttccatggcacgagaaggggttcttctagcaacacaggtcacacaaccatattcataacgggtacacaagcccaagtgctgcctaattgtgcctacaaaagccaaccaaacattccatgtacaaaagcgacc

SEQ ID NO: 103668 - DNA, 317 bp, Zea mays
  Clone ID: MRT4577_2604C.1
aaggacccaatcaaaccggttggggccaccaaaattgaaacctctttgtttatttttttaacaaagcgcaaagaaactaaattttatctaattcgttacaggacggccgaaaattatttaaacccaaaaggacaaccgggtccaaaaccaaaatggatccaccgtccaggggccccgttcaaattttttcttaccataaacaggccccaaaaatggtttggaaccaaaggccattggtgacaacccttaatagggaggaaaaaatatttctttttactgggttttgaacatggggcgaatcaggtccacaacccggt

SEQ ID NO: 103669 - DNA, 191 bp, Zea mays
  Clone ID: MRT4577_26050C.1
ctcgcaaagccaatcagagcggaccctcccttcttaactgccctccactcccctgcgggcccccgtctacatgacgcgcctgcccatctttacttcgccgtgtgccgacctcgctccccacaaccatccgtaaggagggcatagccttggtgcggtcgagccttttctctgtgcgcaaggcacttagatgt

SEQ ID NO: 103670 - DNA, 378 bp, Zea mays
  unsure (1)..(378): unsure at all n locations
  Clone ID: MRT4577_26051C.1
ntataattttttttttttttttttttttttttggtgttttttttaaatttttcgcggttttcacaccatatcatcaaaccaaaaaaagaccccccccatgagaaaacacaaagccaccaaaaataaaatttacaaacatcccccccccttaacccccttttaaagccgaaatccccaccatctaccatactaccaaaatccaaccaaaaaagtgacccaccccacccaaaaattatcccccgaacccaatgacgaacaaaagtaaccccaacctcccagaaaaaacccacccccccaaaaagtctgccggacccccctactaaatccccagaaccttaacaacccccaaaagggcaaccacccaaatcacacccccaa

SEQ ID NO: 103671 - DNA, 640 bp, Zea mays
  unsure (1)..(640): unsure at all n locations
  Clone ID: MRT4577_26052C.1
caagattcaagttccggaacggccacacccacacgtccgcgggcccgtgggcggcgatcggcgtgcctccactctacaggcgacgacgaaaccagcagcctcagcgccgaccactccgggagcggggcctcacaacctcaggatccacgggagatgccggtcgccgccgcctcaccctcgcactcgtgaactggcttcctctgcgacgagccggggcgggctcggattcggcggatcttgtggggccctggcgtcgggctggtccggtgctagattgatcccgcattcgagctgcggcaagcgtctgggtagtcgcttctcccgagggaaaggaaaacaaagttgcttggccgactttgggatcaaggatcggcgaaaagaaagagaaaggagggatctttttgggaggttctgtttgagctttcagggtttatatcgtagcctcgggcaactccgtgctgatggatttcttcaagattaagaagttcgggaaggggaataagagcgcccggggcgggggagaggtaatagaatccgacgacgacgccagcgctgggaatgtgacccctcgnggcctggtggagcagaagcctggcatcggngaggggaacatgccgaggtggcggcagagggtggaggc

SEQ ID NO: 103672 - DNA, 188 bp, Zea mays
  Clone ID: MRT4577_26053C.1
attgggaaaaacaaaagggccatatttaactgcccaaaattacatgaaacaccccaaggttaagcccccaagcagggtggccctcccgtgaaattttgaaacaagggcgtatataaaaccaccccccgggggtgggaacccctttataacacccagtaaatttttccctgcccttagttttcccccgg

SEQ ID NO: 103673 - DNA, 215 bp, Zea mays
  Clone ID: MRT4577_26054C.1
agaaaccacactcatcctctcgcaccgcaccgttcgcatcctttcgtcaaccccaaacctcttggccagccgctcaccaactcttcgccgctgccgccaccgcaccaccgggcagccagccagccatggatgaggattacgacgtgatcgaacttagtccggagctcaaggagtacatcctcagtagtctcctttccgtcgacagcctcaaggtt

SEQ ID NO: 103674 - DNA, 152 bp, Zea mays
  unsure (1)..(152): unsure at all n locations
  Clone ID: MRT4577_26055C.1
tcganctgcgtaccggtaatctgaagccttacanggaaccatttgaggtggatcatnggacccggattggtagggcctacttgaaagggtccggagtggtgagggggcagtcanagccttgcctttaccgcgacgtcaaggagtgcagcgat

SEQ ID NO: 103675 - DNA, 738 bp, Zea mays
  unsure (1)..(738): unsure at all n locations
  Clone ID: MRT4577_26056C.1
acgcctgcaggtaccggtccggaattcccgggtcgacccacgcgtccgctttttagccttaaacagggcttgacatgtcattcaataaatgttgaatctcagagtgccttcaaaggctgctcagttatagagcgcctaggcctgctggtgctttgagtgtttcgggaaatggtattgttatcaccattgctccatgatttagtaagcacccaaggtcaccggcctatcagtggcaggatgcagattctggtctgagtctagcaccaacgtcagaggttcctgtctgactttcccaccgcatacgcccatgccgtctcccatgaaggttatcaaaggcaccagcctttcccatcaaggagaccagagaaggaaaaagggaaacacgggaagcctatcccagctggccaacaccacagtttctctgtgggtgaaatcagaggcttgtgggagtctgctggggagagaaaggagcacaatgcctattgtcagagcctccctaacttacctgcagcacgtgatcttgctgctggatttgtgcttggacacagacttctgctcaggagaccataacccttcagtgttagacaatagaaaagagaagcagactattcagcaatagagaaaactaaactatccattcataccaaactcanatctccagggtcttatgctgagttaagaaaagaaaagccaactttcaaggcttgcaccatagaaatcatgatacacatactggat

SEQ ID NO: 103676 - DNA, 325 bp, Zea mays
  Clone ID: MRT4577_26057C.1
cctccttttgcggatcatacacttctgggtaaggagtcctggggttggactgctcatctaacggtctcatatgcatcgcttcaatccatatttccaggggcaacctcatccttttgtgaagcaaatatttgcctttctccgtctcgtcgcgggtcgaactctgttgctactataacacaacctgaaaacttcccaacgactcctatgaaagaagctgcagccccattatacaaccaaccacatataatatcacaagagtcagcacctcatcaatactaaactgagagtcttacagccggcatagattacacagccttgccacata

SEQ ID NO: 103677 - DNA, 186 bp, Zea mays
  Clone ID: MRT4577_26058C.1
cccacgcgtccgcacacgcgtcctgcggcggaccacctgccgacgccggtccggatggcaccgtcggtccatgtgccgccggcggttcatcatgacgcctctaccataccactaccatactcaaccgcgacagcctcagcctcatatgcagggacacccatgcccgtaccaacagccgcatccaag

SEQ ID NO: 103678 - DNA, 1469 bp, Zea mays
  Clone ID: MRT4577_26059C.1
acgcaaaaaaaaaagaagccgttggagcgcctccctctcaaacggcactcttccccactggcccactcctccgctccctcccgcatacaaatcctccgccaacaatcccccaaaccctactccaccacgcgatcaccgacagacgcctctccgacgagcaactcaaccccccaccgcgcacgcgagagccggatccccacgatggcgacgatccagcaccaggcgaaaccggcggtggcggcggcgccgagcacaactactggcggtgggcagcgcgcgatggacctctacgagaagctggagaaggtcggagaggggacctacgggaaggtgtacagggcgcgggagaaggcgacggggcggatcgtggcgctgaagaagacgcggctccccgaggacgacgagggcgtgccccccaccgcgatgcgggaggtctccttgctgcggatgctgtcgcaggacccgcacgtggtgcgcctgctggacctcaagcagggcgtgaacaaggaggggcagaccatcctctacctggtcttcgagtacatggacaccgacctcaagaagttcatccggggacaccgcagcaacaacgagaagatccccgcggccaccgtcaagatcctgatgtaccagctctgcaagggcgtggccttcgtccacggccgcggggtgctgcaccgggacctcaagccgcacaacctcctcatggaccgcaagaccatggcgctcaagatcgccgacctcggcctcagccgcgccatcaccgtcccggtgaagaagtacacccacgagatacttaccctgtggtacagggcccccgagattctgcttggagccacgcactactccaccccggttgacatatggtccgttggctgcattttcgccgagctggtcactaaccagccacttttccctggcgactcggagctgcagcagctgctccacatcttcaagttgcttggcaccccaaacgaacaggtgtggccaggcgtcggcaagctgcccaactggcacgagtacccccagtggaagccgacgaagctgtctgctcttgtgcccggcctcgacgctgatggctacgatcttcttgagaaattgctggaatacgagccggcgaagcggatccccgcgaagaaggccctggagcacccctacttcaaagatgtgaggaagggagatgcgcactgactgaagcgatccaccaagggcccgccctcacgagttgacatatatatacgtgtgtgtcgtcgtgtcgagcatgattgccctgaagcaattcttttgctaccagggcacagcctactttctgttctctagttgatgttcgtgtcgtgtgtgctgtgaaccgttcgctttggctggtgatggatggaaatgttatgtttctaggattactgatgaaactttgatgtctacctggtcaaaaaaaaaatataaaaactccgagggaggggcccggtgtaccc

SEQ ID NO: 103679 - DNA, 254 bp, Zea mays
  Clone ID: MRT4577_2605C.1
tggatcaaatgcatatataatccaaccgttgttcataatattccacttctgatagattaatttagtgcttctgttctgtctgtgctatattagttcagtaaccatgctatatgctctgcagatcgttcttatagcttgcagagcttttatttatgcattcttcttggtttgttgaagtccattgaccatttaccatgttcctatttggttcaacatttgttaactgctgcctataagatgctggatttatgggt

SEQ ID NO: 103680 - DNA, 467 bp, Zea mays
  Clone ID: MRT4577_26060C.1
acccacccccccccccccccccccccccccccccccccccccttcctctctttttttttttttttttttttttttttttggacaagcaaccccttaaaagggttgcggggtttttttttaatacaaaaacagttaaggtttttagtttcttttttccattccccaaaaaattaagttaaacggttaccaagttgggggtccaaaaggaaccaccaaaaaatcagcccaaaccggaacaaagttgcccttgctaatttacaattttttaaagggggccaaacaaagggggttaaaatttaaaaaaaagggccgggccccccattttataataaatccatggtgggggtaaaaatttaaaccggtttgttttttttttttttgaaaaaccctttgattcctaaaaattttgggagttttttaagttccgaaaccttaaaaaagtttaaatccccctttcccgggggggg

SEQ ID NO: 103681 - DNA, 1167 bp, Zea mays
  Clone ID: MRT4577_26061C.1
gccggccggtccgaaaacgcgttcatcctcccacgcgcttcctccgccctattttagtctgctcgacacgccaccggccactgacatcccatatcgccaagtccccttccctcgcctcgcgttaggtagcctgcttccgacccgcacatctccctccggttctcgccatgggcgccggcgccaacaaccacgaggagtcgagccccctcatcccagctgcggtcgccgcccccgcggacgagaagcccccgcaggctccggcaccggaggccgccaattactatgccgacggggtcccggtcgtgatgggcgagcccgtgtcggcccacgccttcggcggcgttccgcgggagagctggaactccgggatcctctcctgcctcggccgcaacgacgagttctgcagcagcgacgtcgaagtgtgtcttcttggaacggtagcaccatgtgtgctctatggtagcaatgttgagaggcttgctgctggacaaggcacatttgcaaacagctgtttgccttacactgggctgtatttgcttgggaactctctctttgggtggaactgccttgccccatggttctctcatcccactcgtactgctattcgacaacgctacaatcttgagggtagctttgaggctttcaccaggcaatgtgggtgctgcggcgatctggtcgaggacgaggagaggcgtgagcacctagaggccgcctgtgaccttgcgacccactacctctgccacccctgcgccctctgccaggagggtcgcgagctgcgccgcagggttccccaccctggattcaacaatgggcactccgtctttgtcatgatgccgcccatggagcagaccatggggcgtggcatgtgagctattccaccaccttccctaccctagttttatctgtgcttcccgtggtttatcatctgctgctgttggccttgatgtgtgatgtgtcgtttgttcgtcagtaaatacgagtttgtgatatgaggtcgtgctgggaactttggattgtttgcttcttatcgactgcagtttggattctgaacagtcacttatctcctgtgttactgtgtttgtacggtggtcctcgatgggcctgtcaatgtgaaatgcatttcgtcgtaccttattctgcaaaaaaaaaaaaaaaaaatttgcggcc

SEQ ID NO: 103682 - DNA, 831 bp, Zea mays
  unsure (1)..(831): unsure at all n locations
  Clone ID: MRT4577_26062C.1
tcttcccctcccacctatcattcttctaatcgagcggcagagcgtggtgagctagagcgagccagaaaagaagggggcaggacgctgtcttcctttctccatcggatccatggtctcttttctcagccctctcggtctcacacaccacaccagagccgcgcagccgagcatgcactcatcacatcagctcctcgtctcctagctttcctattcctgccttgataattggccaattgttcgatctccttctttactaccccctttgctttcgttgctgctactactactgttccatctcctaggtttcgttgttgtccctgcaggccgccactgagtgatttgttagcagataagatttagatctcccaaataaaataaaaaagaggttgagaggagagctagcactaggcactagcaagcctgctgtgaggtgaatatggatccagtcgcagcatccatacacggtcatcatcttcctccaccgttcaacacccgggacttccatcaccatctccagcagcagcagcagcagctcaagaccgaggacgaccacggcagcggcgcgccagggctgttcggcagccgcggcaccaagggcgaccacgagaataatgaccagaacagtggaaacagcaacggaagtggcggaagaggaggaggaggaggaggcgacgagctggcgctggttccaccatccggcgccgngccagagagtggagagcccaccctacgccgccctaaagggcggnncggcgnngtccaagaaacagccgaagccgcccatcatcatcacgagggacagcgnccacacgctccggacgcacgtcatgg

SEQ ID NO: 103683 - DNA, 366 bp, Zea mays
  Clone ID: MRT4577_26063C.1
ggaaaccgaaccaaaataccggtttacttaaaacgggggccacgataattttggtcaccaaaaaagggggttaacgggggtaccccggggcggccacaataaattggggagggacggggccagccagcccctggaggagacacacgagactgacacaatccggttaggccacctccttaattttgggggcagggccaccgttttcaggcggggggttcttgttcatgccggcggggccacccatgtggggacccgggccctggtacattttggggatgatgggggtgaaaagggtttccaacttctttattttggaataaaactcgtccgccttggggaggtgggtggggtccaaccagctgatgg

SEQ ID NO: 103684 - DNA, 641 bp, Zea mays
  Clone ID: MRT4577_26064C.1
ctcgaggccggccgggccgggctcggttcctctagcaagctggcatgtctgccgccgcgctgagggagaagtcaacggtctcctctcctccatgatcccctcggaactggcggacgagaacttccgacctctcgctatggtgcaagaatacgggacgacgacgtctttcagtcacacgaggccccaccctcttctgcgacgacaccgatgggagctgctccgagctcggcgctctggttgaccagcccagcgcgaactctgaaacggcggacgactacgtgcctgaatgctcagggagcagcgccagtgctgccgatcacaaagtggagactacctggatgcagaaccgtccggaatgattagaaaagaacacaaacggagtgcatcgctggcattcgtctgtgtgtgatagatagagctctatgatctgacctataatcttcacactatgcttctacttgatgcaccagatccatgctcatgaatacatgaaagcgaagagggtagctgcctgaggcctcccatgacatatgcatgttgacagatgtagagcatgctctctgtgtgcctacgattgtgacaagatcatcgatggagaggtcgctcacatgcatgtaactgctaggtataactattattga

SEQ ID NO: 103685 - DNA, 338 bp, Zea mays
  Clone ID: MRT4577_26065C.1
gaattcccggatcctccgaagcgctcaacccgtgcatacttcgttcatctagattcctctggcaacgctgacacgctcactcgtgcgtggcactctacacatgattacccacacaatccaccaactgttctatatgtctctaacatgattcatccaaatatatatacttttggaagcatcttcttagatatactacacaaccagtggagtcctatatatgacgtcgctgcaattttaactagtatccagtacctgctgagcgatccaaacccaaactcctctgcaaactcataaacagcacgactgttcatctagaacaagcacgagtacaaccgcaa

SEQ ID NO: 103686 - DNA, 162 bp, Zea mays
  Clone ID: MRT4577_26066C.1
caacaaaacaattgggtttaaatacataatatatggttgggggccacctaaaatcccacttaaccattggccaaccgggttgattattattgccaaaaatcctttaaatttttttttggaataaaatagcttaaggttataaaaaccgggggagggactttc

SEQ ID NO: 103687 - DNA, 197 bp, Zea mays
  Clone ID: MRT4577_26067C.1
actttcttttattgttaaaaggataagcacatacccttctgggcaaaatttacttattacaaaaaaaatggaggccttccatttcaaaccaccggttggtctaataactacactgtgcaaaaaaagggagttgtttgcaaagagaacctgtcttatctgaatgttcaaaaacaacattagcaatgcgataatattta

SEQ ID NO: 103688 - DNA, 798 bp, Zea mays
  unsure (1)..(798): unsure at all n locations
  Clone ID: MRT4577_26068C.1
cattgggtacctcgaggccggccgggagtccgctccccgacccagcatctagcacgcacgcagccgacccctccgcgctcgcccccagcgcgcacggcgtacgcagccacgtcggtcggtcagcaaccgcctgcacctcgcccccaacgcgcgcgcacaaaaaccgcccaaccgcttctgccgctgccccgctcggccagctcacgcccacgtcgcctcctctctcaccaatatccgccgcgcttgccgcatgtcgagtctccccgagcagatcgccgttgtccctgcaccaagcacacaggagaactgacgtcggccacgaacctccgtcccaagacttgcggctcttgggaaactgccgtgttcactccccgccgtgccgaagctccgttaagccgttgccgcgacattctccgtcgagatccgtttcgagattgcgatctgtttccaagcttcaagggatcaaagatcgagcgttggcgaccaagagatcaagctttttgaggtctacaacattgaacaccctgagcatctgtttgatgaaggttgcctttggtgcaatctatgctcaggtaaagaagaaggcatcgaggcggatctccagaagttctagggcttcgacgagtttgaggattaggctagcgacctcccccagtcagctgcctgtggtgggtttatttacgttggctatgtttctattctgggtactttgattttactatgtaaatgactctagtatttcatattattacttaccctttattggtaaannaaaaaaaaaaaaattggcgggcctcg

SEQ ID NO: 103689 - DNA, 807 bp, Zea mays
  Clone ID: MRT4577_26069C.1
aggccggccgggccgggttccacgcccaagcggcagcgcacagctgtgccgtggccgtgcatttgctccatggctattttgctgcgacgaggggtcgcctgtcatctttgcccctatcctgtaactgcttccccgcgcacacacaaaaaaccgcccagccgcgcttctgccgctgccccgctcggccagctcacgcccacgtcgcctcctctctcaccaatatccgccgcgcttgccgcatgtcgagtctccccgagcagatcgccgttgtccctgcaccaagcacaccggagaactgacgtcggccacgaacctccgtcccaagaattgcggctcttgggaactgccgtgttcactccccgccgcgccggagctccgttaagccgttgccgcgacattctccgtcgagatccgtttcgagaattgcgatctgtttccgagcttcaagggatcaaagatcgagcgttggcgaccaagagatcaagctttttgagttctatgagattgaagaccctgagcacctgtttggtgaaggttgcctttggtgcaatctatgctcaggtaaagaaggcgtcgaggcggatctccaggagttccaggacatcgacgagttcgaggagtaggctagcgaccacccccagtcagctgcctgttgtgggtttatttacgtttgctacgtttctattttgtgtactttgattatattatgtaaatgactctaggctttatattattacttatctttattgttattcgaagcattgtgctacgatgagtcatttatgtaaatcgctgtgtacgtgtatt

SEQ ID NO: 103690 - DNA, 188 bp, Zea mays
  Clone ID: MRT4577_2606C.1
cccagcaagcaagcccattcattgacaaattatgggtggggccccaaccaacccccccaggcacacttcatcatcgaacttgtccgtacacacaattgcaaaccagccctctccgttgtcgcacccattcatcattacaagatcttctactgtcatggcaaatataaatctcatgtcggagattcagc

SEQ ID NO: 103691 - DNA, 366 bp, Zea mays
  unsure (1)..(366): unsure at all n locations
  Clone ID: MRT4577_26070C.1
ccgggtcaacccacccccgcggctgtgcttctttgtttccatcctttttggctagaatgcatagccccgtctaggatcaagctagctagctaacgatggctttaactgacaggctgtactatggagtaaacggccaaggctgtagatcactctcgatagtgaggttcaaggccatgaagtngagccacagagctgctaactgtgatctgtaccattatgataccattgctatccagactcgagcagccttgaccccctnttgaagaatgaatactgcatctgcatgcgctgattcttactgagatgtctgttntgatatttaaaccaaaaaaaagcatacaaaaaacaaaaaaaaaacaaaaactg

SEQ ID NO: 103692 - DNA, 991 bp, Zea mays
  Clone ID: MRT4577_26071C.1
ctcgaggggccggccgggagagcgctgctctttctatcatcacaaatttggtgagcagattcatccaagtctatacacatcgatctacaacaagttgcagaatggaaagaacactgatcacttctaacctctccatgagtgcacatgcttcaagatcgtcccggagggttcactacatctctcctgcggcctctgctgctgcacacaactccagctacaggaagaagaagaagaacgccccgtctccgccgccgtcggccgccgcaactgacaccgttgtcatctcccctcctgccactgacaatgttcagtccactgctccgaagcaggccgggcgacaggagcttgaagagctcgtggccgccaagactaacacttcaagaattgctactgcaagaacaagtgcgtcgagccagtctcgggctaagcttcgccgccggcctgccccggcaatcacgtccctgccgatggcgttctgcagcgcgttggaggaggcgatcaacacgttcgtcgacccgccggtgctgcgaccgtccgtggacccgcggaacgtgctgtcgaccaacttcgcgccagtggacgagctgccgccgacgccctgccccgtcgtgcgcggcgcaatcccgcgctgcctcgccgggggcgcctacatccgcaacgggcccaacccccagcacctcccccgtgggccgcaccacctcttcgacggcgacggcatgctgcactcgctcctcctcccgacggcggggtccccgccgtcgtcggaccccgtcctgtgctcgcgctacgtgcagacgtacaagtacctcgtggagcgtgacgcgggagcgccggtcatgccgaacgtcttctccggtttccacggcgtggccggcctggcgcgcggcgccgtcgtggcggccagagtgctcactgggcagatgaacccagccgagggcgtggggctcgctaacaccagcctcgtcttcttcggcggccgccgagagctcca

SEQ ID NO: 103693 - DNA, 560 bp, Zea mays
  Clone ID: MRT4577_26072C.1
ggcacgagggctggctgaaaattgaagtggctaagctttgaccttttcatgtctgattcttggttcgtggtgtcgggcatcgagatctgtacatcaatctaaatactaccaagaagtcttggagttgctaccaagttaacaaaaattagtgtgcacggctatgaaattgagtgactagttgcgtgattcgagtcagaggtgtttctgggagaactgtgaatttaaaattgaacctgaaagcgtgaaggcaaacgatctttatcggcatatactgatactgcgtctgtgaagatcttgtgtttccagtggactagtcactctgaatgttgttattctgctgttgcttcctgttgacaaaaataactccagaatagaattggctcttagttgacactgtccaattatgatagtataaagtgatgaaggatcttgttcagagaactgtgcaaaaaagaactcaactgagtcaactcctagttgagcatagtattctgtaatttttttttaaaagttactctatatgatcttgggttctttttctagttgaaagcattttggtt

SEQ ID NO: 103694 - DNA, 232 bp, Zea mays
  Clone ID: MRT4577_26073C.1
cataaaaaccacaattctacattattttcaaaattttttatatacttgcattatcctaatgactttttcggatcccccaatgcactacacgccagaacaacccctacaactgacttctggcaagcctaaaacaaaaccgttcagaaaattgaaaaaaaaaaacatcttaaaactcccccccttcccccaagctaaaaataaaaaagaaaatcctcactcgcacccccaaata

SEQ ID NO: 103695 - DNA, 377 bp, Zea mays
  Clone ID: MRT4577_26074C.1
tttttttttttttttttcaacaaaagcacccaagcgatgctaatttaccaggtcaagcattttacgccgacaaatgacatacttgcaagcagtagcccaataacaagtccaagagacgacagtcaacacctgaatggagttatgcaatattcctcagcgtctaacttaaaacgtgtcaggctgatggcttctattttcttctgctgatgagctactggagtcatgttaatttgatcatttattttgtacccagacagcaagaaactgtccagcttattgttatgttcctcagcatcttgtcataagcaacttcaaactaagaagcgcatgcattgtgattaaaaacgttttcagtaattgagtacaagtcttttgta

SEQ ID NO: 103696 - DNA, 319 bp, Zea mays
  unsure (1)..(319): unsure at all n locations
  Clone ID: MRT4577_26075C.1
cggacgcgtgggcccggctacgccctgccgccgcacccgcacgccccggggaccgggaccccctcgggaccgcctcagggcgggagccccggcaccggcgagcactcatccgggcggatgngataagctgcagtatactttgtttttctgtgtggggattgtaccgtacccggctctttgtgtatttagttgctacaactgcgcttgaccgccgatctacctaagtgaccaatgttctattttcgggactggtcttgcgactagcacgcaccaggaatagttctacctgatactttcacttcactctagcttggggcca

SEQ ID NO: 103697 - DNA, 239 bp, Zea mays
  Clone ID: MRT4577_26076C.1
gttgctctccgaccccgaacaagaatatctcaacactaagaggattgcccaccaaagtgtatcatcaaacatagttccaaagcaggggataaaggagcccgcaaattcatggcgaggagtaccatccatttgcacacttagaagatgcaacttatgcaaggagaacaagactagccagacaatgaaaactcaagagctcaccatagaacaacttagaaacacccaaggcacacctcccg

SEQ ID NO: 103698 - DNA, 371 bp, Zea mays
  Clone ID: MRT4577_26077C.1
ccccgaccccggctgtccgacgcatactgctctcggccgtgggtctccacttcttccagcaggcttctggcagcgactccgtcgtccagtacagcgcccgcctgttcaagagcgcggggatcaccgacgacaacaagctcctgggcgtcacctgcgcggtgggcgtgaccaagacgttcttcatcctggtggaactgcctagcagcaagtaggtggctatcccagagcacaggtcaagtgaagtagatggacaagatcattgtcttttcaactaattagatgggcaagaataactaagactgccctatgaggtgtcgtggttcaaccagagaacattctgctcccttttattttgccttccctttttcgag

SEQ ID NO: 103699 - DNA, 511 bp, Zea mays
  unsure (1)..(511): unsure at all n locations
  Clone ID: MRT4577_26078C.1
tgtgcggcccgctcgaggccnggcccgggttgcaaaaaaaagaaaaagcaaatcactacacattccttgtctctaatcagatatcaaagaagtagccattaagttaacgatggcttccgccgacctcgcagaggccatcgagcccagcaggaagaagaagagcaacgtcaagtatgcctccatctgcgccatcctcgcctccatggcctccgtcatccttggctacgatattggggtgatgagcggagcggccatgtacatcaagaaggacctgaagatcacggacgtgcagctggagatcctgatagggatcctcagcctctactcgctcatcgggtccttcgcgggcgcgcggacgtccgacaggatcggccgccgcctgactggcgtcttccccggcgtcatcttcttcgcgggcgcgctgctcatgggtttcgccggcaactactccatggtcatggtgggccgcttcctggccggaattggcgtgggctaccggggcatgatcgcg

SEQ ID NO: 103700 - DNA, 2076 bp, Zea mays
  unsure (1)..(2076): unsure at all n locations
  Clone ID: MRT4577_26079C.1
gccggccgggcttcggaaatcactaacacacaccttgtctctaatcagatatcaaagaagtagccattaagttaacgatggcttccgccgacctcgcagaggccatcgagcccagcaggaagaagaagagcaacgtcaagtatgcctccatctgcgccatcctcgcctccatggcctccgtcatccttggctacggtacacaacccatcccttcgttgctgtcgaaatgtttctcgttttgctctttccaagagtttgtaggtgaagtttgtgtgtaccgtcaaccaaccaatctatctatgtagatattggggtgatgagcggagcggccatgtacgtcaagaaggacctgaagatcacggacgtgcagctggagatcctgatagggatcctcagcctctactcgctcatcgggtccttcgcgggcgcgcggacgtccgacaggatcggccgccgcctgactctcgtcttcgccgccgtcatcttcttcgcgggcgcgctgctcatgggtttcgccgtcaactactccatgctcatggtgggccgcttcgtggccggagttggcgtgggctacgggggcatgatcgcgcccgtgtacacggccgagatctcgccggcggcgtcccgcggcttcctcacgtccttcccggaagtgttcatcaacgtcggcatcctgctcggctacctgtcgaactttgcgtttgcgcgcctaccgctccgcctcggntggcgcgtcatgctcggcatcggcgcagttccgtccggcctgctcgcgctcctggtgttctgcatgcccgagtcgcctcggtggctggtcttgaagggccgcctcgcggacgccagggctgtgctagagaagacctctgccacgccagaggaggccgccgagcggctggccgacatcaaggccgcggcggggattccgaagggcctcgacggggacgtggtcaccgtacccaacaaggagcaaggcggcggtgagttgcaggtgtggaagcagctcatcctgtccccgaccccggcggtccgacgcatcctgctctcggccgtgggtctccacttcttccagcaggcttctggcagcgactccgtcgtccagtacagcgcccgcctgttcaagagcgcggggatcaccgacgacaacaagctcctgggcgtcacctgcgcggtgggcgtgaccaagacgttcttcatcctggtggccacgttcctgctggaccgcgcggggcgtcggcctctgctgctgatcagcacgggcgggatgatcgtctcgctcatctgcctcgggtcggggctcaccgtcgcggggcatcacccggacaccaaggtcgcgtgggccgtcgccctgtgcatcgcgtccaccctgtcctacatcgccttcttctccatcggcctcgggcccatcacgggcgtgtacacctcggaaatattcccgctgcaggtgcgcgcgctgggcttcgcggtgggtgtggcgagcaaccgcgtcaccagcgccgtcatctccatgaccttcctgtccctctccaaggccatcaccatcggcggcagcttcttcctctactccggcatcgccgcggtcgcttgggttttcttcttcacgtgcctcccggagacacgcggccggacgctggaggagatgggcaagctgttcggcatgccagacacgggcatggctgaagaagcagaagacgccgcagccaaggagaaggtggtggaactgcctagcagcaagtaggtggctatcccagagcacaggtcaagtgaagtagatggacaagatcattgtcttttcaactaattagatgggcaagaataactaagactgccctatgaggtgtcgtggttcaaccagagatcattctgctccttttcttttcccttcctttttcgagtaccattcccattcgtcgtggtcagtacgatgttgggtcgttgggagttagtggtgtcagagtccgcgtgtgctttgcaagccagggctgaacccacaatcatcagtaacaaaaattcttccgtttgctttgcaagccaaaaaaaaaaaaaaaaaaaaaaaaaaaaaaaaactcgaggaggggc

SEQ ID NO: 103701 - DNA, 420 bp, Zea mays
  Clone ID: MRT4577_2607C.1
gactggtacaaagcataaaaacccaccacttttcatcgcacagactactgccataatgttgcgtccgatctcacaagcgaccctgcatgttctcaaccaagctactaaccagtgcttccctcatgtaacgaacctaccccacgctcgcatatgaagaacactgcgctcacctgcaacaaccaaccgtacaacactctgcaactacaacgctcattcatgttcatcatactaatgatgtgcatcaaacgacacgtacagtacaggtactccagcaacaccagctaccgaaacgtgccccacaccgaagcactcgtcaagccttcgaccccaacctgcgagcactatgacatcatcatattcacaaactgcgacttactatgaagcaacagcaggagctcccgcatgaggtgccctgtcaac

SEQ ID NO: 103702 - DNA, 289 bp, Zea mays
  unsure (1)..(289): unsure at all n locations
  Clone ID: MRT4577_26080C.1
attcggacaaacaccgacgcacatgcctatttcgtttctcagccaaccccgcagaagagtgcccgaccctacttcatagaggccgcggcatattccntcaacgccactcacgcaggaggttgttcaatcagctgctattttttcccttcttttctttatttattaaatcgactaacaaagaaatgattatcatatatataacccgtagaggaagccgaacaataataagctaggcctgaactcatgccatacataataatcatgagaattgtcagacagacatagaaac

SEQ ID NO: 103703 - DNA, 240 bp, Zea mays
  Clone ID: MRT4577_26081C.1
ctgccgcgcactgcctgcttcggccgagacgatccccccggcccacgtttcgctcacatctcgcgacactctgcccacagctcactcgcctccgtctctccccgtcaaaaaagccacccccgtcccccgcgccgcgccacccgcctttggcctctggctggcaccctttcccccgcctagaaacccgagctctccctctagccttctgccgcacacttccgagcttcttccacacaacat

SEQ ID NO: 103704 - DNA, 256 bp, Zea mays
  unsure (1)..(256): unsure at all n locations
  Clone ID: MRT4577_26082C.1
tcgttcgcaggccgcaatctcgcaaacacggaccgtctcggaatccgggtcgccagantcctcacggatggcctcgccagcgatggtcccgctgcggcagctcttcgtcgacggcgagtggcgcccgcccgcgcagggccgccacctccccgtggtgaaccccaccaccgaggatcacatttgctagatccctgcgggcacagtgaaggacttgcactcgtagattcatatttaaacgtattttttaaaataaatt

SEQ ID NO: 103705 - DNA, 687 bp, Zea mays
  Clone ID: MRT4577_26083C.1
cattgggtacctcgaggccggccgggcctgccctgctgccgcccctgcagctctgctcttgccccccgcccgtgtcgcccaactccaaaccttcgctgctccccactgctccgcgcacgtctctctgcgccgccggtccccggctgagcccccctctctgccgaggaagggcacgggcatggcggacgaggcgcatcttaggtctgccgtgccagttccttgggcggcggattaccgggagaaggccgtccactactgcactacaccatcaatatcggtggagtccctttatgtcttctgtgtgagatcccccctgagcggtcacaacctttcgagtcgtttgctgctttttttttcctgcagcattggccaactggtgatatgagcatcaagcccgagaccattcaacgcggcttatgcgggaccaagctcagttctctggattgaaaggttctaagagttcaaaaaatgtgttatgcaagcagaaggtggtggtgatgaattaggccaatcaaatggagcttctacaagtcttccagaaaaaaaaaacataatgataaaaataaaattcgtaacagaaggcggcgatgatgaattaggcccaatcgaacgggccttctacgatcctttccacagaaccgaatcgataaaataaaattcctcgacaccaccgggggcgattttgat

SEQ ID NO: 103706 - DNA, 366 bp, Zea mays
  unsure (1)..(366): unsure at all n locations
  Clone ID: MRT4577_26084C.1
ccaagggccggccggccagcagccacgacacgacggngacgacgacgaacgcgggcgccccngggcggaacgacaacgaggcgccgacagaggggccacgcggacccacccggcgggaggaccaccaggggggggagaaggaggcgcacnacgcgcgcgagcgcaacccggagcgcgaggagcacgcgcgcggggcccccgccaagggcaccgacgagcgcacccacgacgagacgacgcggacgcgcgccgaccacccgcgcgcgcccggcgggcggacgcccgggagcgcgcgcggcacaacggagaagcacgagcgggggaaccaggagacgaaccgcgacccgcgcggggcccccggggaag

SEQ ID NO: 103707 - DNA, 447 bp, Zea mays
  Clone ID: MRT4577_26085C.1
aacagaatcatgagccaagtgaataaaatataaatctcaaacatcaaatgcatgctagcagtcaaacaggatacttcatagttcatacaatgaatcagctctgcggctggaggaaacaacgtggactttggtggaaggcaatggcacgtaaaggagatggcaacttttggaatccagtcgtggcaacagccaacaggcatggcagctccataaccctaggaagccaccacaactcaatgacaagcagcaactgcaggactgctacctgcaaatctttattgtaggctgtaatagcaagggcgatgtgagagtatccatgagttcccatgtatacaaacaaaatagaatggagtatgaaaatccttcaagggtgcagtttatgaatatggtctaagcaaaaaaagctacgtctgttttggtgaacacagcctatggagaaacaaaacc

SEQ ID NO: 103708 - DNA, 408 bp, Zea mays
  Clone ID: MRT4577_26086C.1
tctgtcttcaacagatacaccacaacagacgacgctagaaccggcgggttctggttcccccaccaaaatcggactcgctaaatccatgcctatatatgcgttttgagcaccgccttcccccatgaaccatgtgggcgagctcgacctgggagctgcactaaccgagaacattcatgagggtagagagagaccaggggaggaagatcgctgccgtcgttggtggaagacagcaggtccgtcgtgggggaacatggaggtggacctggagatgtgcggcgtcacgggctgctcactggtgagacacccttgagctcgaccgcgccgatgtgcgctaccttaaactatgtgaattcacgggtgcgtgttgccaccctacagcttcggtgtttgccctttccgatggaccct

SEQ ID NO: 103709 - DNA, 1031 bp, Zea mays
  Clone ID: MRT4577_26087C.1
cgatgcggtaagagctgccgtcttcgctggctcaactacctccgcccggagctccggcacggcggcttcaccgacgaggaagacagcctcatcttgtctctctacggcgagattggaagcaagtggtcggtgatagcgtccagactccccggacggacggacaacgacgtcaagaactactggaacaccaagctcaagaagcggtacttggcgtcgtccacgtccacgggagaagcaaggccgccgccgccaccaccagctcctcctagcgctagcggcgacgacagcagcgccgccgccgacagccaccaggcccaacaagacgaaccctctcttccgctgacacctccagccttcagtaccgacctcgatacgacctttgccgttgtcgacgacgacatgctcctcttcaagtccgatcagctgtacgccgagctcgtgggtctggtcgagaagaaatcgcaggccacagctggcccgtccactggtggtggcggggacgaggctaattcgacggccacgccatcgtcctcgtcgtatggaactgggacaacaaacagtcccacggttagcagcagctcaggtagctgcgccctgtggcccacggacgtgcatggcacaacgctgctgtccgaacccaccagcagcagcctgttcgacgacgcttacggtgttggcgacgacgcgttcggagcggcggctctgcctgcgtactccttccaagaccttctggcctcgtcttacgacgatgctactgctgcggtggtgacgcaggagttgatgcagtactaccagtagtagtagtactgtaggcatgtggtcaatctggtgtgatgtgtaactggttaattagttactatatggccagtagagatggtaggtgctaggcagtggttagacgatgaagacggtgatgacggtaaaagacgtcaccatatggtcacaccccctgtcaaaagattacttgaggtcgagagcagaaagattaaatataatggaacctcgatattcaaaaaaaaaaaaaaaaaaaa

SEQ ID NO: 103710 - DNA, 466 bp, Zea mays
  Clone ID: MRT4577_26088C.1
gacctttgggctggtttatgtgcttgtttatgtgcttgtttatgtgcttgattatctccttctttatgtgcttgattatgtgcgtggtgatgtgcttggctagtcacgaggaaggtgaatagcccgttaaggagtacggctcggcccccacggaggtactcgtcaaaatcgtataaaatgctgaggaggtacctaccaagattgtcggcataacacataagaaaacttaagacggtacacccgacgcactaaacgagcttaatgggactaaagccggtcacgtcgcctttaatctactcggaggcggcgtcggtctgcttctataggtcggcggtcgtcgtagccgagtggcggtagtaagctacataaccgtaagggcctcttttgtagcactccgacgcccgttcacagtcggttttggacgacccgactccctagttactatgccctaacttacgaataaatt

SEQ ID NO: 103711 - DNA, 144 bp, Zea mays
  Clone ID: MRT4577_26089C.1
ggccgcttttttttttttttttttgagaggagacgatatggttcagcaggtatgagatggcacaccagactgttgtataggtatgcaaattagaagacgcctatacagtacaaaacataccaaagagagacttccatgccttat

SEQ ID NO: 103712 - DNA, 416 bp, Zea mays
  Clone ID: MRT4577_2608C.1
agcaatgcgagcgttcttcgttctgtttgtacttaataccatctattccttcgactggttttctagggacgcttgccagcctggcgtgtctgtcgtgtaactctgtctgcacgcgcttatttatatgcatccttcctttaagccgatttccactcatatctacctatagcgagctcatccgcccttattgtctgtccaccacgcactaactcacttcatgatacttcgtctttctgctgagtctactccttaccttctttttgcttaccttctactttatattttttatcttatatgagtggggttatttacatatttttctaaatttcttcttttattttcttttttttaatctttctactctttctttcttttttctatcttttttattttttttctcttattttttttctttt

SEQ ID NO: 103713 - DNA, 289 bp, Zea mays
  Clone ID: MRT4577_26090C.1
gatcccctggggacacaccagggaaccccggaaaaaccccgccgggccaaccaaccttccctaatgtcaataaaagaaaaccctgcaaaacaaagggaactcacggtccccacacacaaaaaggaaaaaactacacaataccccccaccaccaaaaccaaaggctaaaggaaaaaaaacccgggagccaggggagccagcaaacccaaataaaacatataaaacccgggggccgaccagcccaggcgaacccaaagaaccaagggacgctaaggaaaaacccaaaaccc

SEQ ID NO: 103714 - DNA, 198 bp, Zea mays
  Clone ID: MRT4577_26091C.1
ccccggtttcctgcttcaacagtgcttgaacggaacccggtgctcgacccctccgacccccgccggccgctttgagcctgagccctttgcaacttcgtcgctccgccgctccagcgtcgcctccgcgcctcgcccagccgccatcatgaccaccgcgtctccctcgcaagtgcggccagaactaccaccaggactcgg

SEQ ID NO: 103715 - DNA, 427 bp, Zea mays
  Clone ID: MRT4577_26092C.1
cgtagcactgaaatccttcaagagtggcgccactcctatcttggtcgccaccgatgtagcttgaaggggtctcgatgtcccgaacgtggcccatgtcatcaattacgacctacccaagagcatcgacgattacgtccacaggatcggaagaactgggagagccggaaaggccgggaacgccaccgctttattcacagattcgaaccaccacctggcaaaggacctgctggagctgatgactggagcgaaacaggatgtgcctgagtggctcgtggactatgcaagcaggccgtgctccggagggtccagttatgccggtagaggccgaaagggtggcggaagttttggcggaagagactatcgcctcagcagtgattatggatacgggggcaacggtggtgtctattccagcagcggtagcagctac

SEQ ID NO: 103716 - DNA, 527 bp, Zea mays
  Clone ID: MRT4577_26093C.1
ccggccgggttacttactaccacgcttggcgcgtgcatcggatcggatcccggccccgcgtcatcccttcctttcccggcccggtcgtcgactgtctcgcgctccactttccacggcgaatccattcttaaatgatctacactgctgcataaacccctgcggccgggtagtctcgaagactccacctaaaacggccaggccagacttggtcgtgccggcgtgcggcgtgcccccgagctagctgtggacctgggagccacgacggcgatcatgggctcttcttccggggcgccgctgctcgtcgctcacccgagccgggggaaggaggacctgggagatcagcgccgcctccgctggtgctgcggcgtttcgtcggaagggcggtgggcggaggcgacggcggaggccgggcggctggcggcgctggcggcgcccatgatcgccgtggcgctgctgcagctcatgatgcaggtcatctccaccatcatggtgggccacctcggcgaggtgcccctcgccgacgccga

SEQ ID NO: 103717 - DNA, 612 bp, Zea mays
  Clone ID: MRT4577_26094C.1
gttcgtctgactttggctgggcggctagcgctgccggcggaaaaggcctgtcggacgaaacggccgcccagaactcgtcgtcttgctccagcagcgtcatgtgctccgacgtcagcacaagctccgcggcgatgcttccggctccctcccggccggggtacagcgacgccttcccgtcggacttgttggccctgccgctgcgcggcgccaggggcggcccccagccgaagtcgcagccgccgtacatgtcgaaccgcggcgagctgcccatcatgatgccgttggggtcaaagaacctgaggttgtacaggacagggttggccatccacgcggccacgcgcgcccggatggcgtcgtccgtgtgcgccgccaccgcgcggccgacggccgccgtggcccagccatggccgcgctccagcagatcccccgcggtgacggcctccgttgcgatggcgtagatggtgttcccgaagtactccggcggaagctgcgggcggaggcgcgtgcggttgttgatggcggcgcggcaaaaggttgtttggccgagcggcatgcggcgcgcgcgggtgacggagcgccacacaagcgagctgagcgcctggaacttggtaa

SEQ ID NO: 103718 - DNA, 308 bp, Zea mays
  unsure (1)..(308): unsure at all n locations
  Clone ID: MRT4577_26095C.1
cccacgcgttcgcccacgcgtccgagaaagttgacgatgctaatccttttaaagtcaaaagttactttttgttgtatacttcacctttccgacaagctgtcgatgatgcaagaagttacacaggcgaatggaattgcctgggcttgcnttacactngngagtatcgngcattttattttcctgctctcgtctgaggttagccgaataattcaacgtttggagcttcttgttttaactgtattttacatgaaataccacctcaaaatcctgttgtggaatcagcaaaaaaaaaaaaaaaaagggcggcc

SEQ ID NO: 103719 - DNA, 735 bp, Zea mays
  unsure (1)..(735): unsure at all n locations
  Clone ID: MRT4577_26096C.1
gccggccggtccgagactagctcacccaccccacaccccatagagcagcagccctgcccagccgcgcgagctagaggccgaccagaccgaccgacaggagctcgctcgctcgcaactccgcaatggcgtccatcatcgtgcaagcggtggtgatcctcctggacgtgatcgccttcggcctgggcgtcgccgccgagcagcgccggagccgggccaccgtcaccccggacgccgccaaggagtacgactactgcgtctacgactccgacatcgccacggggtacggcgtcggcgcgctgctcctcctcgccgccgcgcaggtggtgctcatggtcgccagccgctgcttctgctgcggccgcgggctcaagccggggggctcccgcgcctgcgcccttatcctcctgggcgaggtgtactacctcagctactccaagtcccgggacgccgccggtggtgccccctacggcggctccagcattggcatgggcccttacaactaactaatggccgcccccggtcgcttcatgctggaggaatgcagcagcagtgttctttttgacgttaccttagtagggacacggtgtaattggttattggatccgctngtttttgtttaggttcttgtatgaggttactacttgngttggctgtatactgtttgggattgttgggttcgaccctggacatggatatacacgtatcgtaacaaaaaaaaaaaaaaaaaggtcccta

SEQ ID NO: 103720 - DNA, 427 bp, Zea mays
  Clone ID: MRT4577_26097C.1
ccattctaaacacccaatcaatacctttttttattacacaaccccacaattttcacggggggggggggggcccctttatcaagaacccacctaaactacccactccacgaacacccccccctctacccccctcccctcccccccctgctgctcccccccccccaggccccccatctacctctgcggctcagcaaactccatatagtccattccctcccccgtgtgccattccctgaaggccttcccccctaacatggcccgcaaccgttcacttacccccccccacctcccctgaatccaggtttattctcccactaattttgaccccatccccaagcccccgggggggatgtcccacaccctcgactccaccctgttcggaatccactccactaagtatgaccagttcttgttctgcaccttcaaa

SEQ ID NO: 103721 - DNA, 457 bp, Zea mays
  unsure (1)..(457): unsure at all n locations
  Clone ID: MRT4577_26098C.1
aatacacggccgcacctatttttttttttttttattttatttttactttttcttataagtattttttttattttttttgaggtttttaagtacattattttattttatgcatttttatttatttttctttataaaagagaaagaggcttaagataaaatgaaacaagggtgctaaaaaataaaattattaatgccattgatggggcttttatgctttctgggtaaaagagaatttatatactgtaaaattggaaagagtaaagataggggggttcttaaaacgataaaaacatgtttggggagaccatttccctccctgttaagaccaattaggatgttgtaaaaaaaatggttttgttaaaaaaaaaattaaaaaaaaatgttggagaaaaattttaaaattttttttggggaaaggaaaaaattttaaataaattnttaagtgggttaatagggg

SEQ ID NO: 103722 - DNA, 1090 bp, Zea mays
  Clone ID: MRT4577_26099C.1
gccggccgggctgcgctctgcactccacaccggcacgaggcgaccggcacggcctttaactacacctccacgccgggcgggcggccagtagctcacccaccccacaccccacagagcagcagccctgcccagccgcgcgagctagaggccgaccagaccgaccgacaggagctcgctcgctcgcaactccgcaatggcgtccatcatcgtgcaagcggtggtgatcctcctggacgtgatcgccttcggcctgggcgtcgccgccgagcagcgccggagccgggccaccgtcaccccggacgccgccaaggagtacgactactgcgtctacgactccgacatcgccacggggtacggcgtcggcgcgctgctcctcctcgccgccgcgcaggtggtgctcatggtcgccagccgctgcttctgctgcggccgcgggctcaagccggggggctcccgcgcctgcgcccttatcctcttcctcttcacatgggtggcattcctcatcgcggaggcgtgcctgctggcaggatcagtgcgcaacgcgtaccacacccggtacaggggcatattctacggcgactcgctctcatgtgagacggtgcggaagggcgtcttcgcggctggtgcggccttcaccttcttcacggccatcctgggcgaggtgtactacctcagcttctccaagtcccgggacgccgccggtggtgccccctacggcggctccagcattggcatgggcccttacaactaactaatggccgcccccggtcgcttcatgctggaggaatgcagcagcagtgttctttttgacgttaccttagtagggacacggtgtaattggttattggatccgctgttttttgtttttaggtccttgtgctggccatggtgtcacttggtcgttgtctgcgttgctgctcgtatttatgtgtaagtagtacttgttgtcttggttttggttgtaggctgaagttactacttggttgggctgtatactgtttggattgttgggttggaccctggacatggatatacacgtatcgtagtatgctatgttttcgctaaaaaaaaaaaaaaaaaaaagcgtccg

SEQ ID NO: 103723 - DNA, 245 bp, Zea mays
  Clone ID: MRT4577_2609C.1
tcgtttactcgtccacccactcattcttttgcgcggggggtataactagtccatgactgctagttataaagcttagattggtaataaccacgccaaatgagagatatagctgccgatgctgtggtcctatacgcagatacctaaatcgagagggggagcttgaaaacaaatggactgatgacataagacattatctctacgcgatgcggagagtttggtgcttcttaacatgacgcaaattgtct

SEQ ID NO: 103724 - DNA, 2106 bp, Zea mays
  Clone ID: MRT4577_260C.1
cctcgaggccggccggggtcacgcttcccggccttcgtcatctcgggggctgtcgactgacccgggaggccagcatttcttcgtcttctcgttcacgcaatcacgcccccgccaaacccaaaccgaccgaaagcggaaagcaaatagcagacggcagacaacagtcgaggggacacaggaaggcgcgaagaagaccgagatcctcgcccaacgccatcacgccactcccccaatactcaggtgtcaggacagcgagcaggcacaagcagatctcactccacgttgctccttccgcccttcctctccgccgctccccggaaggatcatggagcgcgggattcttggctccaggggcgccgtccaaatcttggggtcgaagaccggggccgcgatgtcatgtggcaaaacaacctctacaagttttacttgttctaccaaacacgagctgaacttgcatgtgaatgttaagccgttgcaattggcaacagatggatcctctcgtttggcatacaaaactccagtgcttaaaaatcagtggaatctttctgctagttcttcctctgcaaatgtggttaccacttttgatgatgacaaaggtgtaccttccagttttgctgaagaaaagatcggagtactgttattaaatcttggtggtccagaaaccctagacgatgttcaaccattcttgttcaacctatttgctgatccagatatcattcgactgcctaggctcttcaggttccttcaaagaccactggccaaacttatttctacttttagagctcctaagagtaaagaagggtatgcttcaatcggtggtgggtcaccattgaggaaaattactgatgagcaggcaaatgctttgaagattgctctggaaaagaaaaaattgaacgcaaatatatatgttgggatgcggtattggtaccctttcacagaagaggccattgatcaaattaaaaaggataagattaccaagctcgttgttcttcccctttaccctcagtactccatatcaacaagtgggtcaagcattcgtgttctccaagacattgtcaaggaagattcatatttttctggtttgccaatttccattattgaatcatggtaccaacgagatggctatgtgaaatcaatgtctgacctaattgaaaaggagctctccgccttctccaatcctgaagaggttatgatattcttcagtgcacatggtgtgccacttacctatgttgaggatgctggagatccttacagagatcagatggaggattgtatttctttgatcatgggggagttaagatcaagaggaatcttaaatggtcacactttggcgtaccagagtcgggtggggccagttcaatggctgaagccatatactgatgaagttttagtagaacttggtcaaaagggtgtgaagagcctcctggctgttccagtaagctttgtgagtgagcacatcgagacattggaagaaattgacatggagtacaaggagttggctctggaatcaggcatcaagaactggggtcgggttcctgctcttggatgcacttcaacattcatctccgaccttgcagatgctgtcgtcgaagccctgccctctgcttcagcgctcgcgaccagaaagcctgacgacatcgattccagcatggacctgacgcattacctcaccaagatgctgtttggctcaatcttggcatttgtcctgctgctatcaccaaggctagtttccgccttccggagcaccatgctttaagtcggacagaaatggcgtgatgggtaatttccaaagcactaaatttgagattgagaatgggatatttcattttggacctttttttcctccttaatagaatgatgtgcagttcttctgctcgttccagagaaaaaaataactgctaggaactcacaaggtagtaggggattgcgaaaagggatgtgaacagctgttttgatcgaagttgtctataaataccgtgctcacggactctgtattttaaaaaaaaaaaaaataaaaaaatgaaaataaaaaaaacaaaaacaaaaaaatataaaaaaaacttcaaaaaaaacggtttttatgggcagcggatttaaaaatatcaa

SEQ ID NO: 103725 - DNA, 820 bp, Zea mays
  Clone ID: MRT4577_26100C.1
gccccttctcgagtttttttttttttttttttttttttttttttttttttttttttttttttttttagcaaattactaagcagcatcagtgcaaggaaggaaatacatcagtaccgacggggttgcaatttaactagggacaaagatcacaaaaacaacaggaagcactcttgtacaagctaactgaagggggaaagtgcaaagtttgccctgttgggtttgggaggcaaaatctgcagtttccaccattactactttactagtactagtaactacaacacagttgcaaatgcaaatgcagcaaaagtgaactagtgaagtgggtaagcaaggcagcatctacttgctttggggggggggtaggagcatttacttgttcccggcggcatcggcagccgcggcgtcgtccttgaccccgacgagcacaatcttctcgtaaacgacgtgcgaggggtgcatggggtactccaccggcgcgacgggccggcgcttggtcgcgtaataccagaggaagagcacaatgaaggtgagcattgcgccggccgcggccgcgagcagcagggacagtgcggcgccccaggggctgctgtagcggcggtcgggggctggctggctggctctggcttcgcgctctggcggcggcgtggtgagcaggtcggcggggttgagcggcagagagtgcatccggttgggagctgcgcggaacgcccagctgaagagcgtgcagttcccggaggaggtccggaatccggcaaggatggggcccctgcggaggacggggagcagatggagcgggtaggagaggagcggcggggtcggc

SEQ ID NO: 103726 - DNA, 255 bp, Zea mays
  Clone ID: MRT4577_26101C.1
cgcacgcgtccgcccacgcttccgcttacataggtttagctccatcaccgacaccagacctatttccaaggcccatccccccatccactgcgacggatcaagacgcgacctccaacccaactggttagactcataccttatcttgacactctccctcgaactctaccactactgagctcctaaccttctagaaaccactaccgcacccgctctgccaaaccaatcaaacacaataccgagctactcaactagaac

SEQ ID NO: 103727 - DNA, 357 bp, Zea mays
  Clone ID: MRT4577_26102C.1
cagaagaccaaggatggcagggcgtagaagatgtactcaaggagggaggcgcccctccccgcatcaaggttgacaagggcaccattgaggttgttggcactgataaggagaccaccacccaaggccatgacgaccttggcaagcgttgcgccaagtactacgaggcaggtgcccgttttgccaagtggcgcgcttgttctgaagattggccctaatgagccatcacagcttgccatctacctgaacacttatggtctggcttgctttgccatcatctgccaggaagaatggtctggttgccaaatttgttgagccatgagatctcttggttgatgtgccctaatgaccattgattcg

SEQ ID NO: 103728 - DNA, 1200 bp, Zea mays
  Clone ID: MRT4577_26103C.1
atcgaggccggccccccccacacaataggctggcagtgaggcaggcaaccagctcgggcgtgtccttcctcctccgtctccatcttggcccaaccgagcccaaacctctccccttttctccgtcctctcctagtccacacggcagacgccgccgccgggggagaggagaggaggggaggggatcggctccaagggaacaggtgagatggcaatcctgtacgcgctggtggcgcgcggcacggtggtgctggcggagcacagcgcggcagccaccaacgcgggcgctatcgcgcgccaggtcctcgagcgcctccccgacggcggcgccgacagccacgtctcctacacgcaggaccgctacgtcttccacgccaagcgcaccgacggcatcaccgcgctctgcatggccgacgacgccgccggaagacggattcccttcgcatttttggaggatattcatggaaggtttgtcaagacatatggccgggctgcgctaaccgctcttgcatatgcaatgaatgatgaattctcaagggtcttgagccagcaaatggattactattcaaatgaccctagtgcagatagaataaaccgcatgagaggtgaaatcaatcaggtccgtagtgttatgattgataacattgataaggttcttgaaagaggtgatcgtttggaactgctggttgacaagactgcaaatatgcaaggaaatacagttcgattcaagagacaagctcggcggttcagaaacactgtttggtggagaaatgtcaaactcacggccgcattgatacttctcctcctggtaataatatatgtcgttctagtcttcgtgtgccatggtttcaccctaccaacttgcataaggtaaggcatgatgtgcacatagtgctctttgctgtgcatgtttgtgcctatcaccggggtccggggggcagcagccattgcaattgtttcttgtgtagaggaaagctacatattatgatgtgattgtgagaactcaattaaagatatgaacttaacataaaaagtgcttcttgtgggtttggctatgaccttgtaggtctatgagaattcggtgtttggattggtgtttatttgtggctattcttgtgtctgtacatgaattcagttacgacgagtattttatggctatgctaatgtaatattcttgaaattgacaaaaaaaaaaggccccta

SEQ ID NO: 103729 - DNA, 336 bp, Zea mays
  Clone ID: MRT4577_26104C.1
acccacgcgctccgaccatgacgtcgtacttaacgcgtgggcgagacgcgtggaggtcggaggaggcaagctgtgtcagcgcacgcagcagataggtcgagcgtgacgaccatcaggtgactcgtcgtaggaggggcttcgaggattgaggaggcagatcgccctcatgtacggatagttttaatggactaaaactcagttctcacaacacagtgatcagttgtaggtcgaggccatggcatttaatgttgttgcatagtagcttgcagccacaggcacagtggttggcgttgtgcctggatcaatgacttccttggcgtaggaatgaatgcagtg

SEQ ID NO: 103730 - DNA, 325 bp, Zea mays
  Clone ID: MRT4577_26105C.1
gtagaccacagtcttacctagagtgatctacgtgtttcaccaactatatccaacaagggggaggctccatcctacttcagggtggtcatacgaattcgttatattcacacaacagaatatgacaccagttgaccaagataactctaagaagatgctaatgcccactctaatctgatgagtctgagagggagatcattcatcatcagcaagatgatgatgcaccagtgcactacagatgattcgtggtcgatcttaagtgctcactgtgatataggcctgcacactaatctctatcacaatgcaagctctaagcggcgtactcgtg

SEQ ID NO: 103731 - DNA, 243 bp, Zea mays
  Clone ID: MRT4577_26106C.1
ggatgaaagggggcaattaaaaacctgccgcgggaaaaactttacgccaatagtccaccggtccgaaaaaaatttttggcaaaatttccacgggtccagcacttgaaaaatctaggttcccaccacagggcttttaaagtccagagaaaagtgagaaataaccacttcgccattccaagcccatcttaaccccaaaaaacccttagagcctgcccgggaacatgaacactctgaccttgcgcc

SEQ ID NO: 103732 - DNA, 529 bp, Zea mays
  Clone ID: MRT4577_26107C.1
ttttttttttttttttttttttttttttaaacatcaacaatattcatattatattggtactttcggcttgccaaaaggtgagagaacgaggatgatgcgagagtgattacaatccagcgtgaatagtacggtcggggtactgttcatctatttatagtcacgggacgcagcccggtaaaattacatccatgcccttgaacacttgtttacaagtaattaaaaccaataaggcctatctagtcctttttccttccttgcttgatgtgggctgaggccattgagcttcggcatcttgcactgtcggctctatacagagtcttcgtcttgaggagataaatcgagactgaaggtggcttcggtgatcctttgtatcattttgtcgaagatgttttttaaaagaatcttcgacggaaaagaagaccccaatagtgtatcgttgaaatgtagtgtactaattaatgtaccattagtagcatcattattttgctttagatcccgacgcccaagaagtcgaagaattgcacgtcct

SEQ ID NO: 103733 - DNA, 2907 bp, Zea mays
  Clone ID: MRT4577_26108C.1
atgggtgtgttagcgctaattatcaagctatatgggttttgctcccacccaaggtacagatttttagtgtacgattatggcgatagaggaagccctcgcgcgtccttggaaaacgtggagatcgcaggggagctgggctggtacgggagagacgatgtcgccctcgcaaggggacgttgctcaagctccgtattacttacaccacgagtgcaccccgccaattattcaccgagacataccaagtaacaatatcttgcttgacacagaatttaaggctcacgtttcagactttggcatggtgcgctcaacttctcggcgctcccgttcctccgatacatcgacctcagctacaacagccttcgcggtgagatccctcggtccatcgcctcattaccggagctctcccaccttgacctcaccggcaacaggctccatgggcacgtaccacgggagatgggcagcatgggaagcctgaccgtgctgttgctctccctgaacaacctcacaggaaccatccctgcgtccattggcaacctaactaggctagttcagcttaccatccacaaaacctcgctcatagggtccatcccggaggagctcagcaagctcaccagcctagagtatttgcagctaagtggcgacttactgagcggccggataccggaaagccttggcaacctgaccaagctaagcctcctgcgcctttacgacaaccagctatcaggtcccattccgtccactctcggcaaccttgttgagctgcagagtctccagctcagtaggaaccagctcgtaggccgtatcccaccgagcctggggaaccttagcgcactctacgaaatctggatgtacgagaacgagctggcaggctcagtcccagctgaaattggcgctttggcgggcctgcagacgctgcatttagccgagaatctcatttcaggtccagtccctgaaactctcaccggcctcacgaatctgaacatgctccagatcttcagcaacaagctctccggtcctctgcctctagggttttcaaaccttagcaagctggaagtgctcgatcttgccaataactctttctcgggagacttgccctctgggttctgcaatcaggggaacctcatacagttcactgtctccttgaacatgttcaccggccctattcccagagacatcgagacatgcaggagcctgcatatacttgacgtggcttccaaccaactctcaggagacgtatcaggtctggggccatacccgcaccttttctttgcgaacctggagagaaacagcctccatggacgcctgtcagcagagagctgggcctcgagcatcaacctgaccatcttcgacgtggccagcaacatggtgaccggaagcttgccgcctgagctatcaaggctagtgaagctggaggaactgcttctccacgacaacaacatgaccggcagcataccgccagagttaagcaatctgaccaacctgtactcgctcagcttgtcacagaaccaattctcaggcaacatcccgcctgaattcggtcggatgagcagcttacagtaccttgatatacagctgaacagccttagtgggccgataccgcaggagcttggcagctgcactcagctgctgttcttgcggatcaatggcaacaggttgaccgggcatctgccggtaacccttggaagcctgtggaagctgcagattgtgttggatgtcagcagcaacgaactcacgggtgagctaccgccgcagcttgggaacctggtgatgttggagctcttaaacctctcccacaacaacttcagtggcagcataccttcctccttctccagcatggctagcttgtcaacccttgacgtcacatacaacgacttggaaggccctcttccaacggggcggctgttttcaaatgcctcgtcaccagtaacatggttcctccacaacaatggcctctgcggaaatctcaccgggcttccagcatgctcttcacctccaacaatagggtaccaccacaacagtcgaaggaggaggactcgcatcttggttgcaacgaccatttctgttcccttgtgcatgctcaccgttctttttggaatcattgtgatcatccgcagaagcgataaaccacacaagcaggcaacaacgacgaccacagctggtagaggtgatgtgttttcggtgtggaattttgatggaagactagcatttgaggacatcgttcgggcgacagaaaacttcagcgagaggtacgttgttgggtcaggcgggtgtggaaccgtctacagagttcagctacaagggggcagactggttgcagtgaaaaagctccatgaaactggagaaggttgtgttgtcagtgatgaggagagattcacgggtgaaatcgatgtgctgacaaggatcaggcaccgaagcattgtcaagctatatgggttttgctcccacccaaggtacagatttttagtgtacgattatgtcgatagagggagccttcgcgcgtccttggaaaacgtggagatcgcaggggagctgggctgggagagacgagtcgccattgcaagggacgttgctcaagctctgtattacttacaccacgagtcttgcttgacacagaatttaaggcttacgtttcagacttcggcatatcaaagatccttcggtgtggttctgctggagatagtgatggggagataccctactgagctgcggtccaataattcactgcaaggacagcatcaccagcttgcaacggagactttggacaagcgtccatcatcgccaacattagcggagaggcacgagatttctctgcttgtccaagtagcacttgcatgcctgcaaccttcccccaaatcgaggccagagatgcaggaagtttatcagaaactgactcatgaccatacttaa

SEQ ID NO: 103734 - DNA, 285 bp, Zea mays
  Clone ID: MRT4577_26109C.1
attggacaaaaactgaaatggctttaattaaacaacaagggatctgatacatgcatccattcttcacccaaaaaaaaaaaaccacatttgagcccattaacccaacaagggtttactacttaacttgcagttcaacaaccattcatgggttttaattagggaccctagctatttatttgctaattaactctttttcaaattttccttatttatcccttgttggaacccgtcaacgtgttatttcccccatttttaacattcccccccccaaattcccgaaaaacc

SEQ ID NO: 103735 - DNA, 295 bp, Zea mays
  Clone ID: MRT4577_2610C.1
acttacaagcagctcaaagctctagctatagctagctagcaaaggggggaaaaaatggctccgcttctcgctgctgccatgaaccacgctgcagcccatcctggccttaggagccatctagtaggacccaacaatgagaggttttcacgggaccacctggcggcttttttttcacagagcaacaagcgaaggggtaacctgaggctttactccacgaatctggaagagtaggcaggccaaaaggagttcaaatgttgagccccttcggaaattccacaaaggggactgggtcccc

SEQ ID NO: 103736 - DNA, 643 bp, Zea mays
  Clone ID: MRT4577_26110C.1
gtaagctcggaatttggctcgagcaagctatatgggttttgctcccacccaaggtacagatttttagtgtacgattatgtcgatagagggagccttcgcgcgtccttggaaaacgtggagatcgcaggggagctgggctgggacggagagacgagtcgccatcgcaagggacgttgctcaagctctgtattacttacaccacgagtgcaccccgccaattattcaccgagacataacaagtaacaatatcttgcttgacacagaatttaaggcttacgtttcagactttggcatagcaaagatcgtaagacctgattcgtcaaactggagcgaactagcaggaacatacggttatatagctccagagctttcacacacgccagcggtgacgacgaaatgcgatgtctacagcttcggtgtggttctgctggagatagtgatggggagataccctactgagctgcggtccaatacttccctgcaaggacagcatcaccagcttgcaatggagactttggacagcgtccatcatcgcaacattagcggagaggcccgagtttcttgcttgtccagtagcactgcatgcccgcaccttccccaaatcggggccgagatcaggaggttataaaactgcctctgactt

SEQ ID NO: 103737 - DNA, 137 bp, Zea mays
  unsure (1)..(137): unsure at all n locations
  Clone ID: MRT4577_26111C.1
gccggccgggacgcaactacccactgcattctcgaatncgaattgcggatcccctcaaaagcacgggccgggtgaacgtctttcccggaacaaactaactcaataaagccctagagtaaaacccccacgcccggccg

SEQ ID NO: 103738 - DNA, 137 bp, Zea mays
  Clone ID: MRT4577_26112C.1
ccaaattcttccgcctaattttaggttagcaagtttgcacggttttgttttaaccctcctaaaaaactttacattcaggttagccaaaggtaaacattaaaaccgagaaaaaagatgggggttaatcccctgtttgg

SEQ ID NO: 103739 - DNA, 235 bp, Zea mays
  Clone ID: MRT4577_26113C.1
accaacgcgaacgaccacgcgtccgctttcgcgcaccgaaccattgttattacaacgaacaacatggcatttcgcggggcttcttatgacggacgtggcggccgcataagcggacgtggcggatttactcctcgtggaggacgcggtggcatgggagcctcattcggacccccagacactgtcatcgaaatgggcaaggtcgcacactactgtttatacttttttttttgcgaat

SEQ ID NO: 103740 - DNA, 442 bp, Zea mays
  Clone ID: MRT4577_26114C.1
attggtacctcgaggcggcgggatcacttatctctccgattcgccccgcctccgcctctctacggccgatgctcacagatcttcaattccccattccggccacctatctggctgtcacggcacgtctctgaatcttacgaccgaggccaacgcggttgataaagacaccgacaacaacatgaacgacagcgtctccgtcaccatcgtgcaggtcatgatccaatgcaccacctggagctggaaaatttactgcctcgagcaccactaccagtctgtcgccctcgtgattgtagataagatcaaccccacatcccaatgcctccttgctcaccttctctccccgactggagctgatctccccgttccccccgcatgctgcctgatctaaaacccactgagatcgaacatgagttgattgcatatgtaccgacatgctcttcca

SEQ ID NO: 103741 - DNA, 202 bp, Zea mays
  Clone ID: MRT4577_26115C.1
tcctccccctcaattccccaagcccgtgcaagcgcaagacgaccatccccgccggcggctcgcgtggcagactccctcccatgcgacgacgcgcacttgacaaccatcggcagaattacctgcttcagtgttcagctccggttggccacctggcacaccggcaaaggatctttacctggctttacctcccccatatccaact

SEQ ID NO: 103742 - DNA, 464 bp, Zea mays
  Clone ID: MRT4577_26116C.1
gggggcacaaaccacacacgacaggcctttacattacgtatttataaaggttacggggcaaccgaagcttaaaggggcccatactaggatccaggggggggggggggggggggccaaggaaacaaaacctcccccatttttacaaggggggcaaaaaaggccaggcggttaatttggggggggggccgggggccccttttgggccttaaggggcactgggttacgttcaccaaactgatccggaaaaggaaaaccggggaaacagccccccgggaaagggggggaaaaaactttgctccctaagccacggggggcccaccaaaaaaaattggggggccctcgttttcggggggcaaccgggaaaccataaaaaccccctaaggaccaggttaaaaaaaacaaccctttttgttactcggggagctggggagggcttaacggacttaagggggaaacaaaagcaa

SEQ ID NO: 103743 - DNA, 169 bp, Zea mays
  Clone ID: MRT4577_26117C.1
ctttgtcactcttctctgtgtaacgacttcctccctttcctgccacacgacgcgatcaccggttcttgagttgggtgccggcaagcactagcacatctccatccaccccctgcctccttgcggctagtttccctcaccttccccttaccttattactatattccatatc

SEQ ID NO: 103744 - DNA, 444 bp, Zea mays
  Clone ID: MRT4577_26118C.1
aatataaattttaaaatttttaaaaattttaattttaacagaaaaaaaacggaaaaaaaaattataggaacaaaatccaataaaaaaatgcaaaaaaaattttaaaaaaaccaataaaacgaatttaaaatttgaaaaaatttacacgcttaacaaaaaaaaaaaataaaattgaaaaaaacgcttttaaatttaaaaaaactgaacccggacttttggggggaaaaaaatttaaacccggtaattaagaaaaggtcccttgaagaaaacaaagtttttttatagggaaaaaaataaaaacttggcgtaaaaaaagccatagttttcccctgtaaaaaatggaattccctaaaaatttcaaaaaatttaataatgggaaggataaaatggaaagcccggggggcctaaaaaagagactaacttaaaaaaaatgggttgggctaa

SEQ ID NO: 103745 - DNA, 366 bp, Zea mays
  Clone ID: MRT4577_26119C.1
ccggccgaaattccgggccgaccacacccttccggaatttaatggaattgaactggtaaagttgttggaaaaaagcaccggtttaatgacaatggaggcttccttgtaagggggcggggtaaatatttgtttgatacctgaggtaccattaattgttgatggaccgaatggagtttttcgacatttcgaacacttgttaaaaaccaagggatttgttttggtttgcgttgctgaaggaccaggacaggattattttaaaaagtaaaatgcaactgttgcataagggaacatggtttttagggacattggtgtgcaccttaagcaaaaaatcaagtcccattttaaggacataggagtccattttga

SEQ ID NO: 103746 - DNA, 491 bp, Zea mays
  Clone ID: MRT4577_2611C.1
attaaaatggttatgaatggcactatattcaatatgggggactaggaccaaatatatacactaatacaggatagagactgagactgtgtagaataagaactctatatatgagactgaatacaacaaggacacatgcatagacatataacaaggactctatataagagatcaaatacaacaaggacacatgcatagatatctaacctccctcccctcaaactcaagggggatcaaatacattgagtttagagaggtaaaacctatactcagctctagtctataccttcacgaaggaatcaaccaactaacgctttgaaggcacatatagagagatcaaacatatcatcttgaacctgtgccaatgtgtaataggcatcacacctatatgcttagtaagctgatgcttgatcagatcacgagcaatactaatagcacaagtattgtgagacagaagaggagtcagcatagaaacaaaaacaccaaaatcctga

SEQ ID NO: 103747 - DNA, 149 bp, Zea mays
  Clone ID: MRT4577_26120C.1
catctgcagttcacgctcgcaaggtctgcaccgttgctcggatatcacatagcgcaatctgtatgttcctccctggtgtattgcggcgcggatgtatcaaacgatttattacaggcgccgttcccacagttcattacaccaactgagct

SEQ ID NO: 103748 - DNA, 300 bp, Zea mays
  Clone ID: MRT4577_26121C.1
aatagatccaaatattttgatattgataaagatatagtgaatgccgaacagacagtattcatgagccagtggtgttccatgcaacttacgagggtaagggtggttagcagtacaaatagaacgtggttaaaacacaatcgtagggccgggcgcagtgactcacacctgtaatcccagcactttttgaagccgagacgggtatatcacctcaggttaggaattcgatagcagcctggccaacatggtgaaatcctgtctgtacaagaggcgcaaaaagttagctgggtgaggtggcgggca

SEQ ID NO: 103749 - DNA, 327 bp, Zea mays
  Clone ID: MRT4577_26122C.1
ccggcgccgcagggaggaatcgcagattcgccttagcgggcgcggccgaggacttttttttttttttgtttttttttgtttttttttttttttttttttttttttttttttttttttttttcttttcatatcaaataacttatattaacaacaacaaaaacaccaaaaaatccaccaccaaaatcaggggggggggaaccaccatctgaaaaggagacggacagcggccaccaaaagaaaagctgaaaagggtggcggggacccgcaaacacggggagaaagcaaaacaggagctggtaaaaaaggaacccgcctcgctgcaccaag

SEQ ID NO: 103750 - DNA, 180 bp, Zea mays
  Clone ID: MRT4577_26123C.1
gaagagttgagcggttgcacgatgattatctttgcccagcgcatgagcgcggtatttcagtgtcgccagttgattgttgtatcttctgggcactgttgtgtgagttcgtgtctcctgctgatgttctaaggaatgagcgtcgtgctctcatcaaggtggtgcaaggtattggagctagta

SEQ ID NO: 103751 - DNA, 639 bp, Zea mays
  Clone ID: MRT4577_26124C.1
cccacgcgtccggcgatgcacgcggacgtgatgcgcaacgtgctgccgcaggtggagtcgctgctgcggagcacggcccgcgtgctgctgtaccagggcgtccgcgacctccgggacggcgtcgtgtccaccgaggcgtggctgggcggggtgcgctgggacggcctgcgcgcgttcctggacgcggagcgcgccgtgtggcggacggccgcggagggcggggagctcgcgggctacgtgcagcggtcgggctcgctgacgcacgtggtggtgtacgccgcggggcacctagtgccggcggacaacgggcgcgcggcgcaggagatgatcgagggatgggtgctggggacagggatgttcggccgcggttgtggtgatcgcgtccgcgacggcgtcaggagcgccgccacatgatggctgcccgagcaccccgacagcacgggcggaatgtgtcccagctatcttactgcgcgatatggattcttgttgctcggatttgaatgggttcgattcgattctatgtttaccgagtgatgaaacagatcggaatgcaaaaaaaacagagatacttttaactgtttgttacaggatgttgaaaaaaaaaaaaaaaaaaaaaaactcgagggggggcccggtacc

SEQ ID NO: 103752 - DNA, 438 bp, Zea mays
  Clone ID: MRT4577_26125C.1
aaaaaaaaatttgactaaaaaaggaagggggtaggaaaagaaaggtcaaaaacaaaaaacaaagggagggaaagcaaaccggaaaggggggaaagcaaagggggagaggcgaaacgaagaaggggggtagggaacccggggaggcaacagacacaacgaaaaaacaaaaagggggggcggaaaaaaaaaacaggaaaagaaaaaaaggaagggggaaagggaagaaagggcaggacgggatggaagatgaaaaaagcaaaaaggccatgcggggttgcaggaaaaccccaaaagaaagggaaaaggccgggggggaagggggacccaggaaaggaagaccggggcccgccagggtaccacccggaactacagggaggcgcccgggagcatagcggaattaccggaagggggggggccagtgggaagagggaatccggg

SEQ ID NO: 103753 - DNA, 207 bp, Zea mays
  unsure (1)..(207): unsure at all n locations
  Clone ID: MRT4577_26126C.1
cggacgcgngggcagcagggaagcanggcaaagggccaacannnaanaccngggaacggccacnnnggggngccaggngggacaangggnnnacanacnangaagnaaaccgcaggcngaanaaggcaacgcaganggcngcnggcanaagagancgancaaancagncngacangagggcagacaggaaggcannnaaccganggg

SEQ ID NO: 103754 - DNA, 348 bp, Zea mays
  Clone ID: MRT4577_26127C.1
agcacccaaagtaatagcgtcgctaacagttgtagagagaatataagacgcgaaagcttgagctgacagctatttacgttcgatactttgatcacagaatagacgcatatcaggtgctttcgaacgctacgacccctactgacaccaaagctgagtgccgagataactactattgtgctttcgtgagtgcgcagcgcttcaaatggctgcttacatcaggacactcttagcgatggatacctaatgcttagcgcacgaaaatgtaaggtccatgcgtacagtcattactcaaagatgccggattcgtcaactgcactaagagtaccttttgtctggagccaccagcct

SEQ ID NO: 103755 - DNA, 1359 bp, Zea mays
  Clone ID: MRT4577_26128C.1
ccgcccggagtcgcccgccgcgccccggccgccgtatttcctcttccccgcgataggcaaacacaaaccgcagcacacccagatttcctcttccccgcggtaggcaatagaagccgcagcgggagaaggaaagcgaagcgaaccctcgccgcgcgagttagcgatggccggagaggacgccgccgccgcgaggaggcccccgaaggaggaggaggaggaggaagatgacgacgatttggacaacgttccgctggcactttccagggccaagaaaccgggtaatgcgagcgcctccaaggtcaagaaggaggtggaggacgatgacgacgacttggacaacgttccgctcgcactttccagggctaagaagggaaacgagaagcagaaaggcaacaatagcaatatgaaggcttcttcgaaagtcaagaaagaagtcagttctgatgatgattttgtcatgccaacggcgcagaagaaaagtgcaggtgctgctggaagtaatgccaagacatccaaggttaaaaaaattaaagatgaagatttggaagatctcaaggaggacaagaaaaggaagaaacgagtgggtgtcaaagaagaggcaaagttggccttggccattgtaaagggagagaaggttaagaaagagaggaaagtgtatggtttgccagggcagaagcatgatcctcctgaagaaagggatccattgaggatattctatgaatcactctatgagcaggtccccaccagtgacatggctgcaacctggttgatggaatggggtttgctcccggtggatgtggctagaaaatgttttgagaagaaacaaggtcagaaggttaagtcaccagtcaaagcaattacggcgaagagaattccttcttctccagccaagacactgccttcatctgcaaagaagttagttatggcttcaaacagtgctggaaagctgaagtctcagaagaaaaggaaggcaagtgatgacaccgacgacgacgacgacgacgatgattttgtagcttctaaagcaaagaccaagaggcacaaggcctagttaggtcctagcatctcattatcctagtaatgagacgtgttcttcagacaatttctagctcggatgaccttggatgattgttccttccattggtttgctcatttggggcgcgcaactaaattctgtgaagtagcgtgttgtgttgtgtcaagaagttcctgcaaactttcacttggttagcatttgactccagtgaaacatctgattggatgactgtatttgcagggaaaatatcctatgcaatcacttatcctgatgcaagaatcaaaggagcgtcctggtgcaaaagaaaaaaaaacccccccccc

SEQ ID NO: 103756 - DNA, 383 bp, Zea mays
  Clone ID: MRT4577_26129C.1
tcgtgcgtccacgcgttcggtttcttgtgttcgcagatgaggagatggtgcggtcaaagagggctgctacatcgcttcatcaaatataaaatgtcaagatcgcacgcggccggcgacaagcagatcccatagagaagggaaccctagacgaaggtagctagatacggttgaggtctgagcacgagaccgtctcatcaagctgttcgagaagaccatgcccgtgccggagacggccgtcatccgcgaggctgccaaggacatccaacagagcgccagaagcctcttcggcaccactgactcaaaatgacaggagaacaacgttcaagactccacaagctcgcctacgtaacacgaggtccattacaccgaatactcgtcggaag

SEQ ID NO: 103757 - DNA, 229 bp, Zea mays
  Clone ID: MRT4577_2612C.1
ccggaattcgacggatcgctccaggcgtccgcagcaaagtcatgagatgaatgaggtcattgagcttgcaatcaaacatgcaggactgtctgagagactagctcttgcacaaccaaagggtgtccgtctttatggacctacggtcacaggatcgacattgttggcacgtgcggttgctcatgacactgactgcaccttaatcagggtgtctgcttctgagttggttcat

SEQ ID NO: 103758 - DNA, 893 bp, Zea mays
  unsure (1)..(893): unsure at all n locations
  Clone ID: MRT4577_26130C.1
tatttcggcacgaggatttccgggtgcgggggataggcaacagaaaccgcagcataacaaggaaagcgaagcgaaccctcgccgcgcgagttagcgatggccggagaggacgccgccgccgcgaggaggcccccgaaggaggaggaggaggaggaagatgacgacgatttggacaacgttccgctggcactttccagggccaagaaaccgggtaatgcgagcgcctccaaggtcaagaaggaggaggaggacgatgacgacgacttggacaacgttccgctcgcactttccagggctaagaagggaaacgagaagcagaaaggcaacaatagcaatatgaaggcttcttcgaaagtcaagaaagaaccaacggcgcagaagaaaagtgcaggtgctgctggaagtaatgccaagacacccaaggttaaaaaaattaaagatgaagatttggaagatctcaaggaggacaagaaaaggaagaaacgagtgggtgtcaaagaagaggcaaagttggccttggccattgtaaagggagagaaggttaagaaagagaggaaagtgtatggtttgccagggcagaagcatgatcctcctgaagaaagggatccattgaggatattctatgaatcactctacgagcaggtccccaccagtgacatggctgcaacctggttgatggaatggggtttgctcccggtggatgtggctagaaaatgttttgagaagaaacaggtcagaaggttaagtcaccagtcaaagcaattgtggcgaagagaattccttcttctccagncaagacactgccttcatctgcaaagaagtagttatggcttcaacagtgctggaaagctgagtctcagaagaaagggaaggcagtgatgacacgatgatga

SEQ ID NO: 103759 - DNA, 1376 bp, Zea mays
  unsure (1)..(1376): unsure at all n locations
  Clone ID: MRT4577_26131C.1
cccacgcgtccgcccacgcgtccgcccacgcgtccgggaaagcgaagcgaaccctcgccgcgcgagttagcgatggccggagaggacgccgccgccgcgaggaggcccccgaaggaggaggaggaggaggaagatgacgacgatttggacaacgttccgctggcactttccagggccaagaaaccgggtaatgcgagcgcctccaaggtcaagaaggaggaggaggacgatgacgacgacttggacaacgttccgctcgcactttccagggctaagaagggaaacgagaagcagaaaggcaacaatagcaatatgaaggcttcttcgaaagtcaagaaagaagtcagttctgatgatgattttgtcatgccaacggcgcagaagaaaagtgcaggtgctgctggaagtaatgccaagacacccaaggttaaaaaaattaaagatgaagatttggaagatcnnnnnnnnnnnnnnnnnnnnnnnnnnnnnnngggtgtcaaagaagaggcaaagttggccttggccattgnnnnnnnnnnnnnnnnnnnnnnnnnnnnnnnngtgtatggtttgccagggcagaagcatgatcctcctgaagaaagggatccattgaggatattctatgaatcactctatgagcaggtccccaccagtgacatggctgcaacctggttgatggaatggggtttgctcccggtggatgtggctagaaaatgttttgagaagaaacaaggtcagaaggttaagtcaccagtcaaagcaattgtggcgaagagaattccttcttctccagccaagacactgccttcatctgcaaagaagttagttatgccttcaaacagtgctggaaagctgaagtctcagaagaaaaggaaggcaagtgatgacacagatgatgacgacgacgacgatgattttgtagcttctaaagcaaagaccaagaggcacaaggcctagttaggtcctagcatctcattatcctagtaatgagacgtgttcttcagacaatttctagctcggatgaccttggatgattgttccttccattggtttgctcatttggggcgcgcaactaaattatgtgaagtagcgtgttgtgttgtgtcaagaagtaccgcttgtcgatggccttttcagatctggaatgaaggtaagttcctgcaaaatttcacttggttagcatttgactccagtgaaacatctggttggttagcctatttgcccggggtaacatatttcgccgacctcgaggtaggggcatccccaagcaaaacagaatttaaaataactattaggtcgccgtcgatgatatgtaattctgaaacgcttgaacgctttattccaaacttgtatgtcaatcgggttagcagagc

SEQ ID NO: 103760 - DNA, 293 bp, Zea mays
  Clone ID: MRT4577_26132C.1
ggggaggaacggggaacaaccccagaatgaaaagtttaccccatttacaaacaaaggtccatttacataagtttggggggaccgataacaaagtgtttttttgccgttagggccaaatacccccccccgtccaaaaaaatgactcccacaggcccgacaaaggtatcttcccgggtccgggttttttccaaaccggttcctcccccaaaacctttttccaaaaccaggggggtttccaaacctggtccatttgctccaagggcagctttttggccttaggggggaacctttaa

SEQ ID NO: 103761 - DNA, 533 bp, Zea mays
  Clone ID: MRT4577_26133C.1
tggcacgcacgcactgcacgggccgggactgaatggccggaccgacccatgcgttttttttaggcttgaggttcgggatccatagaaattacgcagtatacttggaagtggtatgaccaatgaactgagggaaacgcatgtggagcatgcacagacttgtgctttaagtggaaaatattacatatactattctgatgagactagaagtataggtgctatatgcaacaacatctatgcatactgagggtagattcctggcgagcatttttattcatctgagagtatagatgatagccaaaagctgttagctgatgcattggtaaagaaagtatatgattactgggtgtatgtcattgaatatgagggaaaaggtcttttgaaccctaaactaaagaaaaagtctgcatccactggtcaagtggagacacatgctcctgaggaagagccgacttgatattaacaatacctactttcgctgagactgacagggacatcaccatcaggtggaactgaatgtgcagggtatgggaggg

SEQ ID NO: 103762 - DNA, 292 bp, Zea mays
  Clone ID: MRT4577_26134C.1
ccccggcacgagggggcgaacgccgaagaacgccagcaagacagagaccggagggacccaggagacggagaccaacacccgacagggcaaagacgggaggccggggggaaaacggaacgggaacaagggaacaaagaggacacgaacgacgacggaaaagaaacccgaccgaccagcgaacgcagggaggacacagaaagaaacaaagaggccaaggaaaggagaaccaggcccgcccaaaacaggggccaagggcagcaacaccggaggcgccagagggggcagcaaccaa

SEQ ID NO: 103763 - DNA, 406 bp, Zea mays
  Clone ID: MRT4577_26135C.1
ggcgcatcatctgctgcatcgagcagaacgaggagggtcgaggcaatgatgaccgcgtaacactcatcaaggactaccgtggcgagattgaaactgagctcaccacgatctgtgatggcatcctcaagcttctcgaatctcaccttgaagccgatttcaccgctcccgagtccaatgtctactatctcaagatgaatggcgactactacagatactacgatgagttcaagactgaagctgagagaaaggacgctactgagaacaccatggtggcatacatggctgcacacgacattgctcaggatgatcttgctgcaactcacgctattacgcttggactgacactcaacttgtcagtgatctactatgagattctcaactaaaccgatcgctcatgcaatcttgc

SEQ ID NO: 103764 - DNA, 249 bp, Zea mays
  Clone ID: MRT4577_26136C.1
gcacgagcagagcttggcgtttcataagactatttctcagagtgtgtagactgcaactgcgcctgggactgaagacctgcagaaaccaacgcatcagccgcatctttcattcgtcagtagcttccgggcttgtctgtgacatctgctgtgatgagaagccattctttttttttcttttatttcttcatgggttttgtactctggtatctacatcccactcggacaaaacgtgaaggttgacttggttgg

SEQ ID NO: 103765 - DNA, 490 bp, Zea mays
  Clone ID: MRT4577_26137C.1
cctgccaaaagactcccttcttccttgactaccccacgcatacgcacaaactcataagaggactctatctgatactatgggtgattgagggcacccgcactggtgggctgccgatagaaacatgtgggtcctgccaaaacgagctggatgcctggtgtgcttccgtgcaaaacctacactttgccacagctacacccatggtactgcacaaacacaatcacacctgcttaggtgaaacattgctctatgcattacactatgtaccatgctgactgaaattatttggtggtgttggaacaatcgccataatcaaagctgtcatctgtgaaaatgtatgacattgatgaccaacataaatattattatgaacccatggattgtggcacaaggtgcctaacaggaatatgatccataccattatgatggtctaactgaacatcaacctccacatattactaacggccttgtatgctcagactagtgatcaaac

SEQ ID NO: 103766 - DNA, 1546 bp, Zea mays
  Clone ID: MRT4577_26138C.1
gtctgaatccggtgttgccgtcccggtccgttgcagcacatatgtgagcagccgcatccggccttcctcttcctcctcccctctcccccgttggcttgttcagttgctcttcgtctcctcccctcccctccgccggctctccggcccctcttcgtcccccctcatcctccgcgcacatttccagacgaggaaccagggaggctaagtgcaggaaggcaggatgcagtacaagaacctgggccggtcggggctccgcgtcagccagctctcgtacggcgcgtgggtcaccttcgggaaccagctggacgtgaaggaggccaaggcgctgctgcaggcgtgccgggacgcgggcgtcaacttcttcgacaacgccgaggtgtacgccaacggccgcgccgaggagatcatgggccaggccatccgggacctgggctggcgccgctccgacgtcgtcatctccaccaagctcttctggggcggccagggccccaacgacaagggcctctcccgcaagcacgtcgtcgagggcctccgcgcctcgctccgccgcctcgacatggactacgtcgacgtcgtctactgccaccgccccgacgcctccacgcccgtcgaggagacggtgcgcgccatgaactgggtcatcgaccagggctgggccttctactggggcacctccgagtggtccgcgcagcagatcaccgaggcctgggccgtcgccaaccgcctcgacctcgtgggacccatcgtcgagcagccggagtacaaccttttctccagacacaaggttgagtctgagttcttgccactttacagcacctatggcatcggattgactacatggagtcctctagcttcaggagtactaactggaaaatataccaaagggaacatacctggctgaatagcaggtttgccctagacaattacaagaacctggcgaacaggtccctggttgacgacacgcttcgaaaagtgaatgggctaaaacctatcgccgctgaacttggcgtttcgttagctcagctctcgattgcttggtgcgcgtcgaaccccaatgtctcgtctgtgatcactggagccaccaaagaaagccagattgtggagaacatgaaggccctagatgtcatcccactgctgacgccggaggtcgtcgacaggatcgaggcggtggtccaaagcaagcccaaacgcaacgtcgagtcatacaggtgaaaattcggtgttcatccgacggagttcaggcctcctccacgaaacttcatccatgatccgtgtgtattctgggcgtggtgctgtgttcacaaacacaagtctgtcagtcctgtgttgtgtattctgctttccgatacagattttggaccaattcaatcctgcattgtgttgcttgcgagcagaaagatttgttggatgaccatgatcctttctggtcgtgctgcaagatttctggagcgtgagatcctctgctgtatcactgtatcagcagctcatgctgttggctgttgcttgcagaaatattcgagtccgttttagcaaaaaaaaaaaaaaa

SEQ ID NO: 103767 - DNA, 216 bp, Zea mays
  unsure (1)..(216): unsure at all n locations
  Clone ID: MRT4577_26139C.1
gctaaaaaggggggccattatttttcccaagtcctgaaaaaagaggtatttccnnncnattttcctggggcaaaacaccggggtttaaaagggaaaaaacattggggccccaccccaaaatttaaaaggtttcccaaagaccaaaaatttatttttcaaaaaaacaaaaaagaaaaactttttctctataaggggcccttggccctattttctttg

SEQ ID NO: 103768 - DNA, 960 bp, Zea mays
  unsure (1)..(960): unsure at all n locations
  Clone ID: MRT4577_2613C.1
ctcatcatttggtacaggccagaaaattgcnttttgtgagaagaatgggggaacacgggctgtgattcagtaccctgatgtaaatacagccgctgtagcgaaagaagcattggaagggcattgcatctacgatggtggctactgtaagcttcacctgtcatactcccgtcatactgatctgaatgtgaaggcacatggtgacaagagcagagactatacaattccagctggcgtaatccaaggggtgccacctggtgtacaagctacatcctctgggtggcaaggtaacgttcaagcagctggggcatatgctgccccacccggtgccccttcgcaaagccacggtgccaatggacatgtgcagaactggaatcccggcaactcagtctatcccccagccccaggaccaggaacatatccaggccagatgtactcatctccctcacagtatgcagcgtcagggggcttccctaataccccatccactgctccgccacactatgcagcatcagggggcttccctaacaccccactcccagctcttcctggtgctcctacacaacagttgcacgcttcgcagcagatgctgcctcagcatggaaatcagtcgggaggcgcatccggaactagccaaccggcgccaccagcatcatactaccgttgagttgaaatcttctttcgctattgtacttaacctgttttgtcactgagtttgttattcatcatctaaaactgcaacactgttgtccgtagctgtgtttagatgatgttgggggagaacaacaacatagcaacataattatattggtggttcttcctctcctaagattgggaaaggagaagatattgcgagtgtttcatattggtggagtttgaaacattgttgctggagatagttttacataagcaaacataatcttcagttataaaggaatataagagccattgctattcatgaac

SEQ ID NO: 103769 - DNA, 457 bp, Zea mays
  Clone ID: MRT4577_26140C.1
tcttacacttcacgcttaaaatacatttacactatagctaacaacccatatactcacacaatgggcgtgttaaattactactacatatagaccatcacactatcaaacactcctactacagatactttcacttctatataccatttactaatactatatacaatcttatcctcccaccaccatactactaacacttactaacctaaataatcattatcatcatactactaactatactcaaccatatcaatatcatacctactatatatctataccaagttctatacctacctcatactctactataacatacatatccatatacatttacatatactcaaatatctatatactaatgaactattcaatcattattattaaacactcacatagagctttaacttcttcacaaatatcttaaatatttaaatccactctttattcaatactcatactt

SEQ ID NO: 103770 - DNA, 138 bp, Zea mays
  Clone ID: MRT4577_26141C.1
ggttgttttttatctcgtcatgatcatgttcaggaacacggttgtgggtgtcggatacgggtgcccacccggatcaggaacagcacaagcaccagctccgtcgccagcgggtcgtccactggcagagccttgatacac

SEQ ID NO: 103771 - DNA, 1123 bp, Zea mays
  Clone ID: MRT4577_26142C.1
catcgacagttctctcctgctcactcactcccttggccttctccagtcctctgtcctcgatcgatcggcttgtttacttccttagcttggagatccatttccatggaccctcacctcagctcccacgttcacgcggcagctgcggcggcctcggctttccccgatggtaagaagttggagagtgacgtgctgcctccaggggtcgtgaccctcgacgtcgaggcgggtgcgccgacgaacgcggccggggccgatccgcgcgacggcgacgacggggacgccggcttcgactacatggcccgcgcgcagtggctccgcgcggccgtcctcggcgcgaacgacggcctcgtctccgtggcctccctcatgatcggcatcggcgccgtgaacgcgacgcgcaaggccatgctggtctccggcatggcggggctcgtggccggcgcctgcagcatggccatcggcgagttcgtctccgtgtacgcgcagtacgacatcgaggtctcgcagatcaagcgcgacggcgaggaagccgccagggacagcctgccgagcccgacgcaggccgcgatcgcgtcggcgctggcgttcgcgtttggcgccctcctgccgctgctggcgggggtgttcgtaccgtcgtgggccgccagggtggccgcggtgtgcgccgcgaccagcgtcggcctggccgggttcggcgtggcgggcgcgtacctgggcggcgccaacatgctgaggtccggcctgagggtgctcctgggcggctggttcgccatgctcgtcacgttcggtgtgctccggctgttcgggacggtcttccacatacaagtctcgtcggcgtgatagctctcggagtctcgggctatggtggcaaatgaaataacgatccagggcccaggggcctagctatagctcttgacatcggaatgtgaaattaaaacctgcatgtcttgagtaaaaaactagcggtcgcctggatagcgaaatagaggcatgggtgtgggtgtgtccgtgtgggcagtggatgtactgctttattgtaatgttatcttgtgctactggtatctgctgacgagaaaatcgaacacagattgtataattgtattatatataccgctgctcgtct

SEQ ID NO: 103772 - DNA, 373 bp, Zea mays
  Clone ID: MRT4577_26143C.1
gtcttttttttacttaacacataaatcatacaatggcatgggaattcattcatctgagtcatagaattgaaaagcttacaggaataacacaccctaccacactcggagtacatatcaacaagcgcactctaaaccaccacatctaatcccaagtgtgacctaataccacaagcttacaactacattacacgctccaatgctggcacagaaccacatgcattgagtacaatcgaaaacgtgcatcaatccatgctttggcgcactgagtatcataaggcatacacaatccataaactcctgtagattggcattggatatgtcacctgaaataatagaattccaccagatggcctcccttctgtcagacatgtta

SEQ ID NO: 103773 - DNA, 1000 bp, Zea mays
  unsure (1)..(1000): unsure at all n locations
  Clone ID: MRT4577_26144C.1
ccccgcgtccggcctcggccttcccgaatggtaagaaagcggagagtactgacgtgctgccaccgagggctgtcgtcaccatcgacgtcgaggcgggcgcgccgacgaacgcggccggggacgatccgcgcgacgccgacggggacgccggcggcgtcgactacatggcccgcgcgcagtggctccgggcggccgtcctgggcgcgaacgacggcctcgtgtccgtggcgtccctcatgatcggcgtcggcgccgtgagcgccacgcccaaggccatgctggtgtccggcacggcggggctcgtggcgggcgcctgcagcatggccatcggcgagttcgtctccgtgtacgcgcagtacgacatggaggtctcgcagatcaagcgcggcgatggcggcgaggaggaggaggaaggcgccgctagggacggcctgccgagcccgacgcaggccgcgctcgcgtcggcgctggcgttcgcgttcggcgcgctcctgccgctgctggcgggggtgttcgtgccgtcgtgggccgccagggtggccgcggtgtgcgccgcgactagcgtcggcctggccgcgttcggcgtggccggcgcgtacctgggcggcgccagcatgttgaggtccggcctgagggtgctcctcggcggctggttcgccatgctcctcacgttcgccgtgctccggctgttcgggacggtcttccacatacaagtctcgtcgtcggtgtgaatgtgacagctctcgtgctaatggtggcaaatggaataatggcccaggggcctctatagcttgctcttgttgacatcggaatgcgcgcgaaaacctgcatgccttgatgagtagcaaactagcggtcgcctggatagcgaaatgagttggaaaaggggtgtgtgggcgtgtggtgtggctagtggatgtactacttgattgtaatgtactatgtcgtgctaatgtatccggcgacaagatcgannnnnnnnntnnnnntnnnntttnnt

SEQ ID NO: 103774 - DNA, 559 bp, Zea mays
  Clone ID: MRT4577_26145C.1
actcggtttttttttttttttttttttttttttttttttttttttttttttttttttttttttttttttttttttaaggggcctttaattattccttttggtcggggggataccctataaaaagtgggggctgggggaacttgctccttggaagcaacagcttgggcaaatcacccataaattctgacaaccacctgaaaaggattttccaactatgaaaggctggggttgggcaggctgcgttaagcggcgttttaaccttaaaaaaaaaaaataaattgtttgcaagggaatgcaattcaagctggtggggggggggcttttcatcatgttaaaatccccccaaatccaacgaccaaatagggggctcatttcatgtatgcaaatgagccccaaaaccattggggcagcaacagctgctgcattttttttttatactcacctttacttcccaaccgggggttatttttactccaaccactccgggggggggaaccctttttgatctcacaaggccccccccattggacccactttcgggggattccacctctatcca

SEQ ID NO: 103775 - DNA, 183 bp, Zea mays
  Clone ID: MRT4577_26146C.1
gggtgtggttttttttgaccaaaatggtaccccatcccccgtttatataccaacccaagcatacaatggaattcctgatgaactgggcaggaaccccatcatttgctacaaaaagcaaaggaaattccttttgaaattggcccccatcgaaaatacccaatggataataatcggccgaacact

SEQ ID NO: 103776 - DNA, 212 bp, Zea mays
  Clone ID: MRT4577_26147C.1
ccggggagcgatgcttgcccggcgagactcggaggaagtggagcggcacgaagagggacgtgggtcgtccgctgcgatagcatggcccctgatccctgacgggacacaggcctgttgatcgcacccaaggggcgctctagaaatcgacggtgaccagtacacggctgggctggaaggccaaatcaccgatgacggcctagcggggggggggg

SEQ ID NO: 103777 - DNA, 2271 bp, Zea mays
  Clone ID: MRT4577_26148C.1
atgactgaggggaagaaaatgactgcagagatgaagctaactgaggagacgaagttgtctgaagaaaggaaatctatggattcttttatggccgagtttgtcaagtctatgtcaaaaacaaatacagagaagattaccaaagagattctagaaggaaggtactttcgcgacatgtctatcgtaagagttggcggagacaacaccgccccttcccctgagaaaaatgaagttgttatctaccaaagctttcgtaagatcttccctcatcaaatcacccctgaagctataatgaggatggggattttcgtctgggctataaggagtcaggggctagagccaagcgcgaagtgcttctgcaatatgcacgaacttttatatgagacgaaggctactggtaaagaacaatatcacaacaacttctgttgttatggatttattgctcgtcctaatgcaagccacccaatgccaacattctggaaaaggtcgaaggtggaagttgatgacactgtcgaagcttgccagagggcttttagcactgtgtgtgcccatattggcatgaaggatttaattcaagagcacatatccttcagggtatggccacttgtggaaagttgggatatgccaaaggagaccaccgccgactctagtgaaggtggtcttgtccggctaaagtatacctttagatttagggagaagtttggtgagccaaacgacgactggctaaagtgtatagaagctaccagtgatgatctacttggagcatactctaaggccgaagataatgctttgtccgtagcatttggaggttggggtaagaaaagattaaacatggtattcgatgctattggcttcgtatatcctgattaccgctatccgctgcgagggcaatggaagagaaagactgctgcttcggccaccacagttgtgccgaagagcaaaaaaatgaaggttttgacccacccaccgcgatacattgaatcagccaaagtacctgaacttggcgaagggccctcttcaactgccaaaacaaggaaaacttcttcgattgtgcagagcattgaagagccgactgtagtgccgaaggtgcctacagtcaggccagctaaagcaaaagatgataaggccgaagagccacaggtggagaaggtaataaaaaatctagaaatcttgagcccaacagcagaggcaaaactcccgaagatgcaaaaggcttctaccgcaactcccaagaggagaatggccaacgtgctggatgctgtgctggagactacaaaggctttgagccctgctcccacaaagaagactgctgaagctgccaaaactccagccaaagctaaaactgggcaagcagaaaccgaagctacggaagctccacaagctccggttgaagccgaagctgggccctcagcacctattgcagcaaaacctgccgcactcgaggaaaaatcatcaggacatattgcaccagaaactcctgctcctgaagctctaatcgaaactattgactacatctttcgacatgcttcggggaagaaattgtccgaagatgaaatcgcagaagcaaggcattatgctcaaaaactgaaatatccaaaaggagccttagtttttaataggagtaatgaatatgatttcttgtactatctcccggataacaaagaattatctgtttgccgagagataggtagaagcattggattcccgaagctagaagacggccttttgattttgtcgaaggatgatcttgctgacaacctagcatacaacggtatgaagctggccgaagctaaagagaattgcgcactcgcagaggccaaccgagagatcagcgagtactggcaaaattatctagagaaaagagttgaagaactttggcaatccaaggaaagatgctttgagaagtccttggattgcgtgaagaagataaaagctagcttcgccaaagtgggtgcctactccgctgaagaaaatttcatacaaggcgaccctgaaggcgttgttgaatggattaatggagaagccgagaccttcgaagaaattttaagtgatcgcggggatgtctgcgcattttctgatgatacgaaggatccttcagctgaagcaatcttgatgggcggaaaattctataatgatatctgggtgaacggtggccgagagatggcccatgaaattataatgaagagtgaaaaagacacccacgacgcccgggcagaagcaaagcgagctgaagaagctgcagaacgcgaaaggcgtataggtattatatcttga

SEQ ID NO: 103778 - DNA, 358 bp, Zea mays
  Clone ID: MRT4577_26149C.1
taaaaatgatcaatacttcaatagcacatttaattagcaattgtttgctttgagatttgtgcgagttttatgaaattaccactggagcaggtctcaacaaataaaccttgagtatttttggccttccataaaatacgctcttgatatacgcgcttgcatgggggccggggggagatgggggatgggagcattagtgaagcagaaacaaatgctcctatcccagtttggatgatttatttccaagctaaaatttcagctctgaaaagaaaatagctaatacaagtgtatcctattgggagatttgaagtgttgtgtggaacaaccagacctgtaaactttaattgaatgtcaataacca

SEQ ID NO: 103779 - DNA, 284 bp, Zea mays
  Clone ID: MRT4577_2614C.1
tttttgtggaattaactgagcgccgtgggcctatagcacggagagcccggcaacccctacgtacgtcccgggtccagacaggggtagacgctaaacagacacaaaagaggacgcacgctagccaccacttcctgacggacacactgcactagcaaatgcaggacaagactatcacactggaccaaaggtacacatcttaaggatggatccggtgcaacttgaaacaagctgagatccacacgccccacatgatgctctctaggagtagacatacatggcatgag

SEQ ID NO: 103780 - DNA, 349 bp, Zea mays
  unsure (1)..(349): unsure at all n locations
  Clone ID: MRT4577_26150C.1
gggtcgtggttttggatccttttgctggagatgtgcatagtgtgagcagagagagagagagacgggtggaggatggtcagagccttcataagggcttcaggtggggcactgctggagacgacgaccgccgccgccgccgccaccaccatcgccaggcatctgagctcccccaaattctctgctggagcgcccctagcttcccaccgccgacgatgatggcggcctcttccaccatgagcaaggangaatcagcagcaagctacgacatggcggaatttgaccagtcagcaatcttcctctacctcgaggatggccacgatcaagaacaacaacgacagactctgaacat

SEQ ID NO: 103781 - DNA, 204 bp, Zea mays
  Clone ID: MRT4577_26152C.1
agattgtctataccgtctaattggttgctccttgaataatgcaaggtccatgggatacatcacgatacaggatagcccagcttacaaaatcacatcttgtccagtctacaaatactgaccaggcacaggacgattaactgtgagggcatgaggacccaaataaaaggataatgcctagggtattccacagccgtttttacccaa

SEQ ID NO: 103782 - DNA, 417 bp, Zea mays
  Clone ID: MRT4577_26153C.1
atctattaagaccatcctcgattataacttccattaatggagagcccgatccacacggtgagggtttctatcaaggccatcaatctgctaaaaacagataaaaacaatgaatcaactcattcacacaaactgataagagtcacaatcatcatagtcaagagatcactagtgccttgctgatctggatccattaacgctcacagacagtattacaggattctcttcggatcccctaatcatttgtacaaaagcaataacagttcatttgacagagtccaccctgacgaggttcctggtacaccaaggaaggaacttagcatttcagctgttcagatgcttcatttatactaccaaacgaacaattcacaatggccacattataacaagctacttttccatctaactctccaagaaaca

SEQ ID NO: 103783 - DNA, 234 bp, Zea mays
  unsure (1)..(234): unsure at all n locations
  Clone ID: MRT4577_26154C.1
gctcggacgattattattatactaacctgggtctgggtgagacaagaccaaaaaaaaagaagacaaatgaagaagctacgtaaaactcctatcgagaagggaaggggagggatgatgagcaagtanngaccggccgattcgagagggacccgaattacagcatgcatgcgcaaaaatatacatggatggatggatggacggaccggctatttctcgagtttttttttttttttt

SEQ ID NO: 103784 - DNA, 419 bp, Zea mays
  Clone ID: MRT4577_26155C.1
cttgcccttaacaaagttggacaggcctcttttgggcattaagcttgccatttctcccctgccggaaaccaaggccatccttaatgccagggcgtatcccattatagagcatgcttcttgcaaatctaaacttttcattttcaatttcatgctcattgatcatagcagctaattgagctatttgatcataaagttcctaattcgagcaaggtgatcattcatagcatcaacatgaacatctctacatctagtacaaatagaaacatgttcaacacttgatgtccagggtctgcatacatttaattgttctatctgagacccaaacatggcatttttatttctaagatcggaaatggaattattgcagacattcaattttctaatcttagaaaccaaactagcattttcatttctaagac

SEQ ID NO: 103785 - DNA, 250 bp, Zea mays
  Clone ID: MRT4577_26156C.1
ttccggatctgaggagaatattccctaattggagccattccgttctagttcctttgtaaccaaacagcaacaaaactgggacagaacggttccgttctacttggctcttcaaccaaacactaccttagagagagcactacaagttggttaagatggacaaaaaaattgcagcctcagcttcaccgctcaagacaagccatgcaagaacagtaaacatatcttcaactggtgtttttagagctgctacctt

SEQ ID NO: 103786 - DNA, 566 bp, Zea mays
  Clone ID: MRT4577_26157C.1
cattgggtacctcgaggccggccggggacgcgccgcctcaatttcagcttaatacagtcagataggaagcaggcggtggccatgtcatgtagcgagagtctgtctccgagcctaatgcgagatccgcgtcctcttctgacagccctgcccatgcagcgccgctgcccgtgacttcgctgaatacgaactatggggacatcaatggctgcgaaccctcactccccttcgttgtcacgctagtgctccggtgaccaggctcatctctgtgcgcgctatgatatgggtggggagagatgactgaaattgcatggcctgcacggagcacagattgctaatccgctggaggagcttgccatggcctccgagtctcttaagatcaactaattttggaactctatcgtggcatggttaactttcccaaataaatgacgcgtatgggtgagctcttgctactctatcgttatcagaagctgagactggaatcaagcctgtaaaaggcatcaacgatgctaaataatcactactcttttagttggcaagtggaaaaaaaaaaaagaacatctgcc

SEQ ID NO: 103787 - DNA, 372 bp, Zea mays
  Clone ID: MRT4577_26158C.1
aagcccaacaatttttcccaaaaaaaatttccccccccaacccaaaacaatttttaaatccctaggcccaaaaattccccccaaaaaggttcacccctaggcaaaaaagggccccttttattttggcccaaaaagaaacaaattttcaaaccaaggcaaaaaaaaggctcaaggtttaaaaccccaaaacccggggacccccgggggggcaacaccctcgggttccaaggaccaggggggggggaaaccccccctaaggaaaaggggttttacaaaaataaacacccttttttgttaaatccctcgaaaaggaactggagggggctaaacccccggcccccatgggggggggaaaaaaaaccggcaattttt

SEQ ID NO: 103788 - DNA, 530 bp, Zea mays
  Clone ID: MRT4577_26159C.1
aaaccaaaaacccgttaaatacctttcgaagtcccccgtccataaaaaaaaaaagggggaacaaatggagggcccctcacatttggccgggggggggggagaaacaaaaaaattttccaagcccaattttttgggcggggggaagctaccttgcctgccacccccatgtttattttttttttaaaaacacaaaaccccaccctaccctttccccccttgggtttgcgggacggaggccccccaaatattttaaagggggccccccccccccgggtcctgtttcctaggaaccaaaaaaaacccacccggtgggaccccccccccaaagggaacccccaatcaaaggtaacccttgcacccgggaacccattaagaggtgctttatttgtatacaaaaaaagggaacatcccgccaaccgggtccttttaaacctcccctaaaacgggggcccaaacccggggccaaattcccgcagcccggggggacccccttttttttaagaccgccccccccccggggggggcccccc

SEQ ID NO: 103789 - DNA, 605 bp, Zea mays
  Clone ID: MRT4577_2615C.1
ccgggctcctcatcaattcggcaataggctgccccggcctcccctcaagttctctctctctatcgcaagcggccaccttgcacccctggccagtcccatccacaccacccaatcctgctgcgttctatataagctgctggagcatcttgtgctttgttcgatactagcggccacgtacgtacaatgcctcctaacgccgaggacgtgcacggaagcggcggcggcggcgccctcgccacgacggcccctgcggcgtccaagatggactgcttcttgaccaccgtctgcacgccgctcgacctccagttcatcgacgtgtcgtaccgcgtcaagcagacggagcggtcggcgtccaaggcgccgccgggcggccggatatcacactcgggtcccggcgcccccgcgacggcggaggagcggacgatcctcaaggggatcaccggcgaagcgcgtccgggggaggtgctagcggtgctgggcccatcggggagcggcaagtcgacgctgctgtccatcctggggggccggctggtgggccgccacagcgggacggtccttgcgggcgggcgccctccgtgccgtgccgtgcagcgccccacggggtt

SEQ ID NO: 103790 - DNA, 366 bp, Zea mays
  Clone ID: MRT4577_26160C.1
acaggacacgcgtccgagacaacgagagctcggcttctatatttacttatgcgcgatcagatggtgaagctgctggcgatgcaagctcgacgcagcaagtgttaaaagactttcatgtccatacatatactgctggcgaaacataagaagcatgtgaggtagctcgaaacagcatagaacttcattgaactgctctttcctcttatgctgagcatgatgctctaaaggatgactcgacgaccactctcatgcaacactgctaccgatctcagcacactctgcatatgattattgatagcgtcggagacaatgaagctgcgctatctgaggtctagagcgtgaacgacgagatcgatagcgtattat

SEQ ID NO: 103791 - DNA, 396 bp, Zea mays
  unsure (1)..(396): unsure at all n locations
  Clone ID: MRT4577_26161C.1
taaagttacatgtttcattatttcttgtcttccctacctatgtaattctctcttcggtatgaccaataatgctgagatcgatataaagtgctataacttgaatttgtggatactataccgacagtacacacgttaagatatatgaaaggatgctgtttttttttttgatctagaatgactcttttaanttgagatctggtacgaaccgcgcctgattctaaaacaccgatgttccaagaaatcataatcctactgagcgctttttcttgtatcttacggcctagctcttattcctccacggatcttattggacttgcacttccaattttaccttctctagaccgaatatgaagccttaaaaaaagaccattactgattaagagatcctagtgatcc

SEQ ID NO: 103792 - DNA, 111 bp, Zea mays
  Clone ID: MRT4577_26162C.1
cgctttgcttgtcgcaaagactcggaaactcagggaactccgatgctcagcgtgcagctcgcttaatcagtcgatgtaccatgttaatcaagcgctagtcctttatctgct

SEQ ID NO: 103793 - DNA, 420 bp, Zea mays
  Clone ID: MRT4577_26163C.1
aaaacgaaagtatttttataaagtttataaaaaaaccggtaaataaaaggaaaaaaaattttttgtttgtttttatgggaggcaaaaaaattactttgcaaaaatttttttttcggggcggggcctttttataaaaaatgtgggttggaaacgttcctttgggtgggcttggcgcggttaaagcaaagggggggggttttttaaagtttttaaggggggggaaaaaaaatttttggtcaaaaaacgtgctttttgttgttgaaaggtaaaggggaaccccaaattggttggggtaaaacgccgccgggccaaaaaacccggttttggggggggggctaaaaaatttggggggggttcccgcgccggggcgaataaaattttccggaacaaaagccgggggaactttttttttcgggtttt

SEQ ID NO: 103794 - DNA, 376 bp, Zea mays
  Clone ID: MRT4577_26164C.1
gggtacccctcgagccggccgggccgggggacactccactcttcagcccacacagagctctgcacaagaaaaggggaggaaggacgagccggagccactcagccgccacctcaccccccccatcggccgcctgcgtcccaccacccgctcctgctgccgggcctgccgcccgttgctctcgccactgaagccctcgccgccgcctccgcctccgcccgcttgcttgccctcctgccggctgcctcccggtgaggacacagctaagagaaggacccaaaaaagcaaaagtttcaaagaggttgaaaaatttgatgtttttgcgctgcagaacagttctggatgcaagctcccatcttttttttttttaccccccccc

SEQ ID NO: 103795 - DNA, 1854 bp, Zea mays
  unsure (1)..(1854): unsure at all n locations
  Clone ID: MRT4577_26165C.1
ctctgcacaagaaaggggaggaaggacgagccggagccactcagccgccacctcacccccccatcgcccgcctgcgtcccaccacccgctcctgctgccgggcctgccgcctgcgtcccaccacccgctcctgctgccgggcctgccgcccgttgctctcgccactgaagccctcgccgcctccgcccgcttgcttgccctcctgccggctgccttccggatgagaagcggcgcaacctgggcagcggaagcgtggtcggcctgagccttcgccggggtttctgccgagaaggatcctggagattaagcgcatgggttccttggaggcccggtacaggccggccggggcagctgaggacacagctaagagaaggacccaaaaaagcaaaagtttcaaagaggttgaaaaatttgatgtttttgtgctggagaaaagttctggttgcaagttccgatcgatgcaacttttgctcttcgctatcatgtctgctgcatttctaacaatcctatacacaccttctgtgtatgagcatcagttgcagtcaagctctcggcttgtcaatgggtggatatgggaaaagaggagttctgatccccgatatgtatcttctgctagcattcaatgggaggatgtatataaaagtatccaaaatctgaatgttggtgaacagaagctcagtgttggactcctgaattttaacaggactgagttcgacgcttggacacacatgctcccagaaagtgatttctcaatcataaggctggagcatgccaatgaaagcattacctggcaaactctctatcctgaatggatagatgaggaggaagaaactgagataccatcctgcccttcgcttccagatccaagtttccaaagagcaacacattttgatgttattgctgttaagctcccctgttctcgtgtggctggttggtcaagagatgttgcaaggttacatttgcagttatcagcagcaaaattagcagcgaccacagcaagaggcaatggtggaatccatgtgctgtttgtgactgattgcttcccaattccgaatctcgccgggggatttaatgactttataatctgtttagtccctagaaccaaacatgtatggactaaagtttagtcctagactaaagtttagtccaaggactaattgaaaccaaacatggcctatgtcgatgacagtctagcttgctttaaacttgctggaaaaaggaactcaaaatatacctagtcactttctattttttccacctgaatcatgaacaatatcctttcttgtgcagcacgactctacacggtagacagacgcagagaagcatatgctacaatactgcattcagcaagtgaatatgtttgcggtgcgataacagcagctcaaagcattcgtcaagcaggatcaacaagggaccttgttattcttgttgatgacaccattagtgaccaccaccgcaaggggctggaatctgctgggtggaaggttagaataatacagaggatccggaatcccaaagcggaacgtgatgcctacaatgaatggaactacagcaaattccggctgtggcagcttacagattacgacaaggtcattttcattgatgctgatctgctcatcctgaggaacattgatttcttgtttgcaatgccggaaatcaccgcaactgggaacaatgctacactcttcaactctggggtgatggtcattgagccttcaaactgcacgttccagttactgatggagcacatcaacgagataacatcttacaacggtggtgaccaagggtacctgaatgagatattcacatggtggcaccggatntcaaagcacatgaatttcttgagcatttctg

SEQ ID NO: 103796 - DNA, 2828 bp, Zea mays
  Clone ID: MRT4577_26166C.1
gtctcgaccactcccctcttcagcccacacagagctctgcacaagaaaaggggaggaaggacgagccggagccactcagccgccacctcaccccccccatcggccgcctgcgtcccaccacccgctcctgctgccgggcctgccgcccgttgctctcgccactgaagccctcgccgccgcctccgcctccgcccgcttgcttgccctcctgccggctgcctcccggatgagaagcggcgcaacctgggcagcggaagcgtggtcggcctgagccttcgccggggtttctgccgagaaggatcctggagattaagcgcatgggttccttggaggcccggtacaggccggccggggcagctgaggacacagctaagagaaggacccaaaaaagcaaaagtttcaaagaggttgaaaaatttgatgtttttgtgctggagaaaagttctggttgcaagttccgatcgatgcaacttttgctcttcgctatcatgtctgctgcatttctaacaatcctatacacaccatctgtgtatgaacatcagttgcagtcaagctctcggcttgtcaatgggtggatatgggataagaggagttctgatccccgatatgtatcttctgctagcattcaatgggaggatgtatataaaagtatccaaaatctgaatgttggtgaacagaagctcagtgttggactcctgaattttaacaggactgagttcgacgcttggacacacatgctcccagaaagtgatttttcaatcataaggctggagcatgccaatgaaagcattacctggcaaactctctatcctgaatggatagatgaggaggaagaaactgagataccatcttgtccttcgcttccagatccaagtgtcccaagagcaacgcattttgatgttattgctgttaagctcccctgttctcgtgtggctggttggtcaagagatgttgcaaggttacatttgcagttatcagcagcaaaattagcagcgaccacagcaagaggcaatagtggaatccatgtgctgtttgtgactgattgcttcccgattccgaacctcttctcttgcaaggacctagtgaagcgtgaaggcaatgcttggatgtacaaacctgacgtgaaggcgttgaaggagaagctcaggctgcctgttggttcctgtgagcttgctgttccactcaacgcaaaagcacgactctacacagtagacagacgcagagaagcatatgctacaatactgcattcagcaagtgaatatgtttgcggcgcgatcacggcagctcaaagcattcgtcaggcaggatcaacaagagacctagttattctcgtcgacgacaccataagtgaccaccaccgcaaggggctggaatctgcggggtggaaggtcaggataatacagaggatccggaaccccaaagccgagcgcgacgcctacaacgagtggaactacagcaaattccggctgtggcagctcacggattacgacaaggtcatcttcatcgacgcggatctcctcatcctgaggaacatcgatttcctgttcgcgctgccggagatcacggcgacggggaacaacgcgacgctcttcaactcgggagtgatggtcatcgagccttcgaactgcacgttccggctactgatggagcacatcgacgagataacgtcgtacaacggcggggaccaggggtacctgaacgagatattcacgtggtggcaccggatcccgaagcacatgaacttcctgaagcatttctgggagggcgacgaggaggaggtgaaggcgaagaagacccggctgttcggcgcgaacccgccggtcctctacgtgctccactacctggggaggaagccgtggctgtgcttccgggactacgactgcaactggaacgtggagatcctgcgggagttcgcgagcgacgtcgcgcacgcccgctggtggaaggtgcacaaccggatgcccaggaagctccagagctactgccttctgaggtcgagcctgaaggccgggctggagtgggagcggcggcaggccgagaaggcgaacttcacggacgggcattggaagcggaacgtaacggacccgaggctgaagacctgcttcgagaagttctgcttctgggagagcatgctgtggcactggggcgagaagagcaagagcaactcgacgacgacgcggaacagcgccgtgccggcaacgacaacgacaacgcctgctgctgcgagcctgtcgagctcgtgagacttgtagatagctctgtctgccgagagtagtataccagtaccagatacagaacttctgaagctctccatacatacatagcgacagctctgtaaaggtagctatgtaggccttttccttccccgaatgactatataccttcgtcttcgttcgccgtcacagctgcaggcagctccctccctcccgctggtttccgatggttaacaattccttttttttttgccaataattcatcagtataggatgtccggctatgttgcctcaattcccagtggcttttggtttttgccaataattcctcagtataggctgtttttccctttgggcggcttgagtccggtttgggcctgttgttgcttcaaatcctaccgggggtactgctttttttgcggtacgcctggtttttatgtatggtggttgaacagtttcagtgataaatttggagtgatgcaatatgggattgctggccagcaaaccctgcatcatttaaggcatgaatatttatttggtcggtttaaaaaaaaaaaaaaaaaaaaaaaaaaaaaaaaaaaaaaaaaaaaactcgaggaggggccgcgggtaccc

SEQ ID NO: 103797 - DNA, 620 bp, Zea mays
  Clone ID: MRT4577_26167C.1
gatagtcgagtcttggttgacggcaaaggaagattctcatgaagattgaagcaaagtcttaagacttgcttgtgtatgtacataaagtggccttagagaatggattaattttggttgacactaagtttgatgttggaaaagcacctgatggaacaattgggatgatagatgatgtgtatactcgtgactctagtgcatattggattgctaattgatacgaaaatatatacaaatgtggacttgtacctggaaatgtgtgataaggagtttttaaagctttgggtaagaacactgatgctatatgaagacgcgagtatgacataagcttcagaagagttgttttgcgagctgacctggcgatgcattttcctgtttgaaacattcactaagactaaattatggatgctaaagacgcatgaaccaaataatgagaggatatcaaggaatgatgctcagggcttacgggaactatgagtgctgatagaggatctgatgcagagattgagtgcatgtctggaaccatttcatgtgagcatgtgatcaggctttgggagaatatatgcgactaatgttcctgtgcaaatagcatgcttattgggcagatgacatatatccggcct

SEQ ID NO: 103798 - DNA, 354 bp, Zea mays
  Clone ID: MRT4577_26168C.1
tccgggtcggcccaagccttccgttggcattaagttaatcgcctccagtttgaagacctcgccacaattgaagggcctgacggtggccttggttttcttgggcctggttggaggggccgcctcaagtccaggcggcggttgtggctgccaaccaccaccgtttattttaccgcctccgttctatttgccgcctcggttctttctgccgccgaagaacaagccgcagccatggcattacccaactcaaccaccgtagctaagcccgtgccagcagttcggatcctgcggcgtcggcagcgtcggcagcccgttcctgggccagtgcgtcgagttcctgaggcaccagtgcagccc

SEQ ID NO: 103799 - DNA, 430 bp, Zea mays
  Clone ID: MRT4577_26169C.1
cccacaaaacccaccctttggggggctggggcaaaattaaataccacggccgggttttaaaaaaaacccttcccagaacccatcccaggcccgagccctttggggaaatggcaaaccagggacccctaaaggggttccgggcccaaaaaatggccccctggaccaaccccttggggggcccccccccgttaaaaaggggggttgggaaaaaaccccccggttttggccggtttggaaccttccctgggggcccccctggggggccttgagggcttaaccctttttgccccggggggaaagcccgtgggccccccccaaggcaactccctaaaagccccccccaggggggtaccggggggccatggggggcggaaagttaccaaccttgaaaaacccctggccgggggacttttgggccgttttttggggg

SEQ ID NO: 103800 - DNA, 419 bp, Zea mays
  Clone ID: MRT4577_2616C.1
aacgacttcatacgttaattaaagaaaagtgataaaaccgggggcaaaaaaggggggggggactcctcgtggggggaaatttacatgggcgccaacatccaaacaaaggatctttttttagggggccagttttggggttctttacaaaacgaggttagcgagcccttccttgggttgaggctaaaaggaccctagcttggggtccttccccaggagggccaaatcccgggggggaaccacttggccccaccaaaaagcgggcagggccccgggggtgaattcccaggacgcccatgcccgtgggacccggaacagggtgttcccgttgggggggccccaatgggggggcccccaggccctggccaagattttcattagcccctggccctgggggttgtttttttccggtgtggggcccc

SEQ ID NO: 103801 - DNA, 196 bp, Zea mays
  Clone ID: MRT4577_26170C.1
gcactaactcctccatccaactcggcaactcctacatccaactcggcaactcctccaggcagcccggagggtgggacatctcttcatccccacagtccacggcgatggctctcgcgcccccgaactgctgacccactcccaccgtgccgcggactctgcatctctccccgtgggcttgagattaggtaggtggtgg

SEQ ID NO: 103802 - DNA, 247 bp, Zea mays
  Clone ID: MRT4577_26171C.1
cccacgcgttgattgcctcattttttttttctatccccatcctatacacggacgggtccattctacacgacgcgcgggaaacactatactctcacatctcagaaaaatgcttggcctgtgcaactcacccaccaaaatgctgtatatcacgactccgtcgtccttatactccatcacactgtaaacaaacctgttcatcataccctgcctaaggaccagcccagtcttatcactcacgccactccat

SEQ ID NO: 103803 - DNA, 1157 bp, Zea mays
  Clone ID: MRT4577_26172C.1
ccgtccgggcccattgtcatctctattcacggctgattgagtcggccagaaaaaaaaaaaaaaaaaaaaacaagggctgtcctactcctgcccttcttcccacggttcacggctgattgggtctcgggccgggggccactgcccagtgcccacgccacgccacccaaaaactcatggccagcgctgtctgcggcgtcaccgcgcgcgcccacctgccttccgccgtccctgcagccgcaagaaagctcttcttccgctgcagggccgcgtccaccatgaacgaggcatcggcgagctcgccggacgccgaggagaagaagacgacgactgtcttcgtggccggctcgacggggcgcaccggcaagctcgttgtggagaagctgctggccaagggattcggcgtcgtcgccggtacgacggacgtgagcagggcccgcggcagcctgccccaggaccccaaccttcagctcgtcagggctgacgttacggagggcgtcgacaagctggtggaggccgtgcgcggcgtcgacgctgtcgtctgcgcgacgggattccggcggtcctttgacccttttgctccgtggaaggtagacaactttggcacagtgaacctggttgaagcatgcagaaaggctggcgtagcaagattcgtactcgtcagctccattttagtaaatggggccgccatgggtcaacttctgaatccagcctacattgtgctcaatctacttggcttaacactggtcgcaaagctacaggcagagaatcacatcaggaaatcaggaatagattacactatcgtaaggcctggagggctgacagatcaacccccaacagggaatatagtcatggaacctgaggacactctttattcgggatccatatctcggagccaggttgctgaagtagcggttgaagcacttgtgtgtccagagtcttcctacaaagttgttgagattatcgcccgtactgatgctccaaatcgctctctgaaggatatgtacgctgcaattaagcaaaattgactgctatatttttttgacaggatggttagtttgttatacaaccatgaatcaatgaagaacacttatagtctatgtatttggcattcgacagtatatttttgacgcgcgaaaaaaaaaaaaaaaaaagcggcc

SEQ ID NO: 103804 - DNA, 476 bp, Zea mays
  Clone ID: MRT4577_26173C.1
aaaaaaaaagcaacccaaaatatcacaataacaccccccgcggggaaaaataataaattcttgaaaccaaaagttgatggggtggtgaggggtccatcaggcccccaaaaaatatgcataaaaactaccaacaaaccccccaagaaaaaaatatttggcagttctagtaaaaaaaaggcttaaaaaggcaacaccctggccctttttccttgggagctttttaatgaaaaacccgacctctttaccctcaaggaggaagccataagctgggccaccctgcccaggacgggcaaaaaggcaacccaacaatcccccacggccaaatggctcttaaaaataagggtcaagggcacggccctgctggcgcttctaaatcttcctcggcacagggtaactcttctttgttccctcagtaatagccccaccctcttgcccctaagccgcatccttttaagaaacaggcacctttttcttcc

SEQ ID NO: 103805 - DNA, 423 bp, Zea mays
  Clone ID: MRT4577_26174C.1
gcagatcaggggcatcttcctggcttggttcccgaagcgatatgtatttcagcatttcttgttgcagtctttgcttgtgcaggagaatttgttcaagggctttcatctcaactttatcgaagtatgtcgcagctgtaatccaatgtttcactcttcccttcatttggtactctggtgagaacaatgaaccactcaaaatagagtcgattgactctggcctaaactctttgtcataaagacatcttaatatttttccaggtatccactcaaaatcatcagaatttgttgagctatcagaatccctctggcagtacagcttgtaaatatctgccaacctctccatggtatagcacttcacagcctgcgatttatcgcggacacgctctgctactactttaattgtatcaattggaatagcataag

SEQ ID NO: 103806 - DNA, 862 bp, Zea mays
  Clone ID: MRT4577_26175C.1
tcaagggtgattagtttggggaggcacaccagtacggcagtaccacgcgacatgaactcgtgaagaacagagccgccactgaggaaccctagcgacggcggtgcgctaccggtgacatcgtcctcctcggcccctcctccatccccgacgcggcggcgccaggctgcaggtcgccatgtctctcgaggacgagaagcctgtcttcgccgccgccgccgtccccaactgggtgatgctggagcgcgtcgtcttccgcagggacgacgagtccttcccggacggaagcgaggcccccgtcagggcggccggcgtcaccacctggaacgcccggttccgcatcgccttcgacctcgccgagcccccgcgcatctcccgcctcttcgcgcagctgccgacctttcccaagaacgagttccccttagccatcgtggcgaccgaccggcatcgcgtcctgttccgcgtcggcaccatgatgtccgtaagtctggttcaggatttcttcatctacagcgcctcagctgcccacacatcctcgtcgctcacggcgctcccgccttgtgccgagcctgacatggattatagccgccgtgacggccgcctacctcgtgaacgtgcttcccggggacgacgcctgctggcggtcaggtccatgggcctcctgtgccgaggcgaagaagagttcgcggtggcggagctgcaggtttacaagcacagctgctacatggcctttgctgacatttacctgttcctgaaatcagctggcaaatgggactccatgcgtttgcccatcctctgcagcaccgaccccgatgtgatctggcaactttgcttatgggcagacgacacggtcatcccggtcact

SEQ ID NO: 103807 - DNA, 422 bp, Zea mays
  Clone ID: MRT4577_26176C.1
attcgtctcgagagaagttgaaatcaacttttttctgctggagtgcggtgcttaatgcgatgtggaagcgacgatgcttatgaaagaaggagactgcttaataattggcagcagagaggctgttcctatatgaggtgcttcaaatggaaatgcttaggtgactagatggcatgacggtctatagtgccgctggcccaatagggcatctactggtgagactgagctcacaggatctggttcaggatctcaactgtgcgctcccatactataacgtcttaaaccattccttcaccaagttaattctgaaactgtgcttacaaactgacgagtatcttcagattatgcgggatatgcctcagcccacacggtcttgcaatgtcaagaactggtgggtttgaaaacccattatgggccccctattt

SEQ ID NO: 103808 - DNA, 477 bp, Zea mays
  Clone ID: MRT4577_26177C.1
caactcgcccctctggccgcctccgtcctccgccttatcggccgccgcctcctccttcgtcagtaagacgcctcatcaacctacaaatctcccaatttgtcgtcgcagagattccccttggcacccctaatctcgcaatctgtttcaaggtcgcatgtctctcgaggacgagaagcctttcttcgtcgtcgctgtcgtccccaactgggtgatgctagagcgcgtcgtcttccgcagggacgacgagtccttctcggacggaagcgaggccatcgtggcgaccgaccggcatcgcgtcctgtttcgcgtcggcaccatgatgttcgcaagtctggttcaggaattcttcatctacagcacctcaggtgccgacactttctcttcgctgactgcgctcccgccttgtgccgagcctgacatggattgtagccgccgtgagggccgcctacctcgtaaacgtgcttctcggggatgacg

SEQ ID NO: 103809 - DNA, 272 bp, Zea mays
  Clone ID: MRT4577_26178C.1
atcgcccaagtcgtccgactaatcgccctagtcggtcagccagaacgactagcaaatcgtccaacttgaaaacattgacgatcagtaacactaatcgagtcgaacaccctaatcgagcacagagaaacgatcaacccgactaatcgcgactaatcgtgattagtcggacgatctgaaaacaatgctagctatgtggaaagtagccttcaagtgataattgacccagatgtgtaaatgtttatatctttctttctttatactccattccgaat

SEQ ID NO: 103810 - DNA, 428 bp, Zea mays
  Clone ID: MRT4577_26179C.1
aaaggggacccatggttttgaaaccaaaaaatttggtctccttccttttttaaaaaggggggggttgttcaaccctccttttggaagggggttgggaaatttaattcctttaaaaaaaaaaacgccccctttttttcgaggttggaaaaaggtttttaaagccaaacaattagtttgtggcccagggggttttcccccaggggggcctaaagttcctccccccaattgggatacgggattttttccaaaaattttgggcgaaggtgggtttttcccaaaattaatcccccccaaagcccccgggttaaaaccgggggtgggtacccaaccctgggggaaaaaaaaaccgggggaaaaaattttttttataaaaaatactcgggcctttttttaacaaaacccaaaagttttttggggtgccccttttt

SEQ ID NO: 103811 - DNA, 625 bp, Zea mays
  Clone ID: MRT4577_2617C.1
gccggccggggccgggtctcgaccaaaaccctagccctcctgccgtcaccgccgagtcgagtgttcgagttcatcgcctgccggaagctcacgccgaaacaccaccatgaatctcagcatcccaaacccatctaccgggcggcagaagaagctggaaatcaatgaggcacccgaaactacgtggcttttatgacctaaagatctcccactaggcacacaggagatgctctgggtgaggagtgtaagggtaatgccttcaagagcatggctgtatgagcacaaatcaggctccccaatgaagctaggaattctgacttctggccgtgcccgccttctgctccacagaggcgctccctgcttccgcaggtatgtgatgcgtaatggtgagcgcaagatgaagaattgcccgcgctctgtattgtagagcacaatgacctatcatgaccatccacatgctgattgataggaagggcgagaacgatctgtctggattagctgacactgaaaacccgatgatgaggcgtcccaagaggacctccatgatcaggaagctggtcgatcttgcatatgatgacaacgtgcacgagtacgagaacgcgtaccgcagagaccttcactaccgaga

SEQ ID NO: 103812 - DNA, 216 bp, Zea mays
  Clone ID: MRT4577_26180C.1
tcggtgttttgatacccttagctttatctgcgggatacctaagaagatcccgatcgacactataatgacattgctcgttgctctgagtcttctggctctcagcctttagcgcacacttacatgcatacaagcatgataatgcttatggcactcacagccgaatgatcatttacgaccctctgtgcatctgtacatcttgatgtcacctgccatcta

SEQ ID NO: 103813 - DNA, 299 bp, Zea mays
  unsure (1)..(299): unsure at all n locations
  Clone ID: MRT4577_26181C.1
gcccacgctcgccacgcgtcgaaagatcaagtattcccggagccgagggatacttggacaccaaagatgcctgcgantcctgccaagctagcctagatgagctatagatggttaacgatgccacgtattcggacttggtttgtcatatggccgcaatgttccgtttttgttatatattcaagtttttacatgtcatttgtgcagtttactttttatttattttttatataatattgtttttctattttttttttttatttatttttttatcttattttttttattttattttttttgtt

SEQ ID NO: 103814 - DNA, 328 bp, Zea mays
  Clone ID: MRT4577_26182C.1
attcggctcgaggactgggttgagcacacgtgttttctgcatgccttgcggtgtcgcacgcacggggatttctggagaggatctgtgggcgatctatgagaatgaaaaagatgcacaatctgtcatagactgtgttagcaaaactatgacgagcctcatgacaagggtcgacacagagaatgctaccggaatcggcactgaagtgttcttttacatggacgaaaatagccaagatgacatgcttaccctaaacgagaacaaggcccaagcacacagtgtagagtgcaggatgaaggccattgagcacgtgacacatgctttggtcaat

SEQ ID NO: 103815 - DNA, 561 bp, Zea mays
  Clone ID: MRT4577_26183C.1
gcccacttgaagaacctgcagcatcatgtgctatgttgtcttgaatcttacatgagctaaattctgaagtgttttcttactgacgaaaacatacacacctttgcaacgccatcctaaactctttacatgtgttatcaggtgtgggaacatgaagtcgatggcaacacaacctatcaagtctgtgatggcagcggggttgacccaaactgttgcaggagtgtgtttgcgctgttctggagcgcttctgaccatttgacctacatgggagttgagatagcggccgacgactggagcacctgcaggatcgtccttgggcgaggcgtcgagcagctcaaagggagtcttcccaacaacattgttacgtccggacgctccgtcgacgttgtcatcgctaatgatgatacacttcagattgattgacgcagttcagggtagtcgttggtagtcatgcatatagctagaagataaggtgttggctgttggtgcatgcttcaaaacaaatcaaaaggctttcttcctttttttgcttccgggctctttcaaccatatgtactatgccac

SEQ ID NO: 103816 - DNA, 651 bp, Zea mays
  Clone ID: MRT4577_26184C.1
aattcggcacgaggctcgactcgtggggaagtttcgctttcgcccgcgtcgacttcctagggttcgaggaacgtccgtccgtccgtccggggaaggagcaggagggaggcggagatgatccaggtggtgctcaacgaccgcctggggaaaaaggtgcgggtcaagtgcaacgaggacgaccccatcggcgacctcaaaaagctggtggcggcgcaaacggggacgcgccccgagaagatccgcatccagaagtggttcaacatttacaagggccccatcaccctcaaggactacgaggtccacgacggcatgggcctcgagctctactacaactgagccgccgcccctctctccctctcgtcaggttggtctgaattctgaagtcatgggtgcaattcgcttcgcggtgatctcttaagctcatcacatatataaaagcaacctcagttggctatgtaagacatggcgtgccaaactatcagtgaccactgccagctttgcaatacgttgttgtatggtcaacctgcaaacttggtgtactgctactcgtactataaataacatagggttttaaccttaaaaaaaaaaaaaaaaaaaaaaaaaaaaaaaaaaaaaaaaaaaaattaaaaaaaaaaaaaaaaaaggccccta

SEQ ID NO: 103817 - DNA, 652 bp, Zea mays
  Clone ID: MRT4577_26185C.1
accatctcgactcgtggggaagtttcgctctcgcgggggtcgacttcctagggttcgaggaacgtccgtccgtccgtccggggaaggtgcaggagggaggcggagatgatcgaggtggtgctcaacgaccgcctggggaagaaggtgcgggtcaagtgcaacgaggacgacaccatcggcgacctcaagaagctggtggcggcgcagacggggacgcgccccgagaagatccgcatccagaagtggtacaacatctacaaggaccacatcaccctcaaggactacgaggtccacgacggcatgggcctcgagctctactacaactgagccgccgcccctctctccctctcgtcaggttggtctgaattctgaagtcatgggtgcaattcgcttcgcggtgatctcttaagctcatcacatatataaaagcaacctcagtgggctatgtaagacatggcgtgccaaactatcagtgaccactgacagctttgcaatacgttgttgtatggtcaacctgcaaacttggtgtactgctactcgtactataaataacatagggttttaaccttggttgtggtaatggtcatattttctcatcaattaaaaaaaaaaaaaaaaggcgccgttaaggatccaagttagtaggtgcagc

SEQ ID NO: 103818 - DNA, 742 bp, Zea mays
  Clone ID: MRT4577_26186C.1
cactcgtatccccaaatgtccaaagccaactttatgcgcaaggcgactggcgaaacgcgttcttcctctccttttcccaaaggcaaccaaaccatctcgactcgtggggaagtttcgctctcgcgggggtcgacttcctagggttcgaggaacgtccgtccgtccgtccggggaaggtgcaggagggaggcggagatgatcgaggtggtgctcaacgaccgcctggggaagaaggtgcgggtcaagtgcaacgaggacgacaccatcagcgacctcaagaagctggtggcggcgcacacggggacgcgccccgagaagatccgcatccagaagtggtacaacatctacaaggaccacatcaccctcaaggactacgaggtccacgacggcatgggcctcgagctctactacaactgagccgccgcccctctctccctctcgtcaggtactagcagtagcagcgagtggtttcctctacaactcgaattcctttcgattcagttcctgcgcgcctggcccccgggaactttagttggtcatatgatccaattcgagtatttgtagttatattggttatgttgatcgcatagtgctgaggctatttacgatcgtctagtgtgttgaagcacttaaatttacggttcagtgtagaatctcaattaaatcgttttgtgaaatgttctgcttggaaatatcaaaagatctttttttttttctatgttgtgaattagggtttgctttg

SEQ ID NO: 103819 - DNA, 695 bp, Zea mays
  Clone ID: MRT4577_26187C.1
ccggccggggaaacgcgttgttttcctcttttccccaaggcaaccaaaccatctcgactcgtggggaagattcgctctcgccggcgtcgacggcctagggttcgaggaacgtccgtccgtccgtccggggaaggagcggtagggaggcggagatgatcgaggtggtgctcaacgaccgcctggggaagaaggtgcgggtcaagtgcaacgaggacgacaccatcggcgacctcaagaagctggtggcggcgcagacggggacgcgccccgagaagatccgcatccagaagtggtacaacatctacaaggaccacatcaccctcaaggactacgaggtccacgacggcatgggcctcgagctctactacaactgagccgccgcccctctctccctctcgtcaggttggtctgaattctgaagtcatgggtgcaattcgcttcgcggtgatctcttaagctcatcacatatataaaagcaacctcagtgggctatgtaagacatggcgtgccaaactatcagtgaccactgccagctttgcaatacgttgttgtatggtcaacctgcaaacttggtgtactgctactcgtactataaataacatagggttttaaccttggttgtggtaatggccatcttttctcattcaattatgtgcacttgattctgcttgaaaaaaaaaaaaaaaaaagcggcc

SEQ ID NO: 103820 - DNA, 1325 bp, Zea mays
  Clone ID: MRT4577_26188C.1
tacagaaacatcatgctgcccatgcatcgcgcaacctacatgatgaaagaagtgatcgtgatcaacgactctcttgagcgcagaagtgagccacaaggtagcatgctgttcccccatgatccgcctccaccacttccggtagtaccaaacaacatgccaccccgcccgttctactgctttccaccgcagagcccagttttgccaagggagaggggggctgttgggtccatgctcgtgtacgcaaacgttggctcaatggtcggcgtcaattcgtcgagtcaaggaagccaaacggaagtcgccagtccttacatgccaaacccgttcttcgtgcagtctcgagccggttacatgaacccgccagtgtactactcgcagaatctggggtgatggtttctcagtaactcgaatgaccaggagaactccatttggcttgccggtcgtcatcgctctgtaaaagtgggggtacatgggagtttcgtgatgggtctaaaatgctgagactagtcagcctgcaagatgtctgagtttcatgaggattttcacataggttgctttagattttcttttcttttttttggttccgacttaaaggtacaacatgtttgccgtcaaaagtgttttaattaaaaaaaaaaaaaaaaaaaaaaaaaaaaacgcgttgttttcctcttttccccaaggcaaccaaaccatctcgactcgtggggaagtttcgctctcgccggcgtcgacagcctagggttcgaggaacgtccgtccgtccgtccggggaaggagcggtagggaggcggagatgatcgaggtggtgctcaacgaccgcctggggaagaaggtgcgggtcaagtgcaacgaggacgacaccatcggcgacctcaagaagctggtggcggcgcagacggggacgcgccccgagaagatccgcatccagaagtggtacaacatctacaaggaccacatcaccctcaaggactacgaggtccacgacggcatgggcctcgagctctactacaactgagccagccgccgcccctctctcctactcgtcaggttggtctgaattctgaagtcatgggtgcaattcgcttcgcggtgatctcttaagctcatcacatatataaaagcaacctcagttggctatgtaagacatggcgtgccaaactatcagtgaccactgccagctttgcaatacgttgttgtatggtcaacctgcaaacttggtgtactgctactcgtactataaataacatagggttttaaccttggttgtgctaatggccatcttttctcatccaaaaaaaaaaaaaaaaaaggcccctagggcc

SEQ ID NO: 103821 - DNA, 398 bp, Zea mays
  Clone ID: MRT4577_26189C.1
ggacgccaccacgcgtgcgtaattgttcggttgaggggaacggagacggtcactgtaatgagacagcactggcagacttgcagcttatggtggaacgcgcaggcatagacacacgcggcaggagtaccgcaacggggggtcgttgatcctggagtctctggacaaccagaggatggggaacctgcgcgtggcgatggggggcctgcagtacctgggtgagtggctttgcctaagggggcggacgcctgagcagcgcctatccaacgagtacgccatcctcgactgcgccatgctatgcaggaaggtcgtcggcctgccacactgacacgacgacattaagtatctatactgctgactgctggatcataacgatcaagtgaaagaagaggagaatgtat

SEQ ID NO: 103822 - DNA, 219 bp, Zea mays
  Clone ID: MRT4577_2618C.1
cggggagggggaagcgaaccgatagagaggcagaacttggcaatggagctcccgtggggaatgctgctgccgctgctgctggtcctctccgtctcgtcctcgtcatcgtcttcagctgctgccaccctcaccgtcagcgctccgcccccactgcctgtccctcctcctcgtgatgctgaagacgccgacagcatgctcatcaactgtaaattctagacg

SEQ ID NO: 103823 - DNA, 1568 bp, Zea mays
  Clone ID: MRT4577_26190C.1
gccggccggtccggggaaacgcgttgttttcctcttttccccaaggcaaccaaaccatctcgattctcgactcgtggggaagtttcgctctcgccggcgtcgacggcctagggttcgaggaacgtccgtccgtccgtccggggaaggagcggtagggacgcggagatgatcgaggtggtgctcaacgaccgcctggggaagaaggtgcgggtcaagtgcaacgaggacgacaccatcggcgacctcaagaagctggtggcggcgcagacggggacgcgccccgagaagatccgcatccagaagtggtacaacatctacaaggaccacatcaccctcaaggactacgaggtccacgacggcatgggcctcgagctctactacaactgagccgccgcccctctctccctctcgtcaggtactagcagtagcagcgactggtttcctctacaactcgaattcctttcgattcagttcctgcgcgcctggccaccgggaactttaattgttcatatgatccaattcgagtatttgtagttatattcgttatattgatcgcatagtgctgaggctatttacgatcgtttatagggaaccgaacatatgacatgtggtgataaaatagaccagttattatgttatgattgatgcagaacattgtatagtcatgtttagcaagagaccagaaagagtgtatcctttcagcctacccagagaacttggttgttcaatcatgtgcctcactgaatattgttagatgcacaggatggatgtaattctgaaaacttgaatggttatcaagaagtacttcataagatgccagtatctgttgtagcaaaagaaatgtggctatgattgccagtatctgttggcctgattaatgacaatttctagtgtagttattttttttcactgcacaatgcaacatattatgcactggtagtttggaaaattatttacagcctggagcattgcatcaaatcgctggagattggaaaactacttataagttcaatacatgccgactatttgctttccaaatagttgccatgtgcgcattatcaacgactttgaacatttcagattcctggcaagtttgtttaagcttgaattcaagaaagctgcaacgaacgcgtagatctctatgctattagcatgacttgtgcacctttacccaggctaattcacatccacgtttctgtctatgatttccttgacatattccttctctgctaaatcgctgttcaattcccatgcaggttggtctgaattctgaagtcatgggtgcaattcgcttcgcggtgatctcttaagctcatcacatatataaaagcaacctcagtgggctatgtaagacatggcgtgccaaactatcagtgaccactgacagctttgcaatacgttgttgtatggtcaacctgcaaacttggtgtactgctactcgtactataaataacatagggttttaaccttggttgtggtaatggtcatcttttctcattcaattatgtgcacttgattctgctttaacccaggcttgttaggctaaaaaaaaaaaaaaaaaaaaaaaa

SEQ ID NO: 103824 - DNA, 264 bp, Zea mays
  unsure (1)..(264): unsure at all n locations
  Clone ID: MRT4577_26191C.1
aattcctgnnntgactgactcactagtttttggccgccctttttttttatttttttttgggggtttttttttttttttttttttttttttccttaaaaaatttaaggcaaagccaaactggattgcttaacaaacacagggttgttgttactacccaattacatttagataaaatgttaccaacttaaaaggagaaacaaaagggtttgggcttggtaccaggttatgccactttgtcctttgttgggacatacaacacccatt

SEQ ID NO: 103825 - DNA, 284 bp, Zea mays
  Clone ID: MRT4577_26192C.1
ggaaaagggaatttttcgattccttttttgggggggggtgaacagcccaacccatgtccatagcccatacataattggcagataccaaggaattccctgtttgaccccacccttcatggtcttctggaacccatgaggattttttttcccaggaacaaacccccaaattcccaaagcagtttttcccagccccaagttttttatggcatacaaatccccaatggtgggcgagtcccttatgcgggatcataaaacccgcgatgggggggccccctaggggcccc

SEQ ID NO: 103826 - DNA, 600 bp, Zea mays
  Clone ID: MRT4577_26193C.1
tccttcccctccggctcgggctcggggtagcgaggttctccggggttcgaccccgagggggagcgcctcgagcaggcggcgctggatgctgagcaccgctgatccctgggcggcctggcctgcgccaggcgaccactccctgcacaacgccttcagcacctaccgagagcgcctccaggccgggagcatactgcatcgggagacgcaaaggccccgcgggcttggatgggaaaccttctccacccggacgcgacgcggaacgccatcaagggcatgaacgggaaggagctggacggccgcaacatgaccggcaacgaggcccataccaccagcgtccgtgtaggcggcggaaaggtgtacggggcaggccgagaaggctgagcgtacggcgcaggcgtccgtccgtgatggcggcggacgatacggaggtggaggacgatacggcgacggctgcctacaccggggcggaggcgctggctacagagaaggcaaccgcgggggcggatacggcgactacgacggagaactggaggaactgcacggcggaggccgcgcgcccagattatgctgagcgctaccgggatgatgaccctaatgcag

SEQ ID NO: 103827 - DNA, 410 bp, Zea mays
  Clone ID: MRT4577_26194C.1
gcgggtgcacaacaaccggtacactatacaggcaatggggggaagggcgaaccgcttgaattaactgattcacgaagtgcgacaaagggaaaaaaaataggggaggggatacaaatacaactaacgggaggggggaaactttggaacaagaacactctgggccgaccccaaaagggcaattgtttcctgcaaaccggctttgcaaatgacacgataaaaaacaatgttgcaaaacaatgtacctgtggtaccccaattggaaaatgcttgttgaaacccccctgcctcaatcagtttaaaactttgccacgcccgctttctgaacttacttcaacacgaagttcttgaacgagaccacaaccctagggcccttaaaattaacgacgttttacccttcaaaaaacaccttg

SEQ ID NO: 103828 - DNA, 359 bp, Zea mays
  unsure (1)..(359): unsure at all n locations
  Clone ID: MRT4577_26195C.1
ggcagctgnggctaaagcaacagggcangcagcgggngcacaggngacagctgcacagccngggacagcncaagctacagcggnnccagcagcagcnacagacccanangcaggngcanangccagnnaccccccngcatancagcagggagcccaggcnggggcanancagcagggagcccaggcngggacgnaccagcagggagcgggaacccaggcnggggggnaccagcagggagcccaggcnggggcgnaccagcagggagcgggagcccaggcnggggcgnaccagcagggagcccaggcnggggcgnaccaacagggagcccaaacnggggcanaccagcagggagcccaag

SEQ ID NO: 103829 - DNA, 201 bp, Zea mays
  unsure (1)..(201): unsure at all n locations
  Clone ID: MRT4577_26196C.1
acaacccctacgagcaaacccccgcattggccacgcgaaccccgaacgagcagcncaccaccgacacggggcctaagctgacggcgccccataccacaaaaccgacaatccggccgccttccctacctaccaacaccctagtctattccccctaatacaactatacactactntccaaatggggggggggccanncccacc

SEQ ID NO: 103830 - DNA, 256 bp, Zea mays
  Clone ID: MRT4577_26197C.1
agcacattgcgcctaacgcatggcacacctgttacaaactgcaacaatatgctgccattcaaccaacttgctttgacaaacccagcagtgttctaccaacaacccatcattggtggagccctctttaagatttcttatgagttatagctaaataataaagtttcctatctgatgtttgtggcttcccagaaataacaaagtacattcctagattcttatgtgcttctccactagcggaaagacgaattacaacacg

SEQ ID NO: 103831 - DNA, 1790 bp, Zea mays
  Clone ID: MRT4577_26198C.1
atgcgcgccccgccctctgccggcggcttcaactcgccgtggacgctcgccattcgcgcggcggcagaccaaggccggccccgccgcgccatcgctctgtacctcgcgtccctacgctcgtcctgccgcccctgccccttcgcactcgccgccgtcctcaagtctgtgccccgccttcccgagcacgccgttctccccgcggcggcctccctccacgcgcacctcctccgcctcggcctcctctcccacccctatccgcacgccgcgctctctcacctctactcccacctcctccccccgcaccacaaccacgcccgtggcctgcttgatgacgcgccaacgccgctgaaccgccactccctcgtctcgtccaattcgctcctcgcttccctcctacgcgcgggtgatatccctgccgcgcgcgccatgttcgaagcaatgcccgcgcgggacgttgtgtcgtggaactccatggttgctggactcgccaaggccggacacctggacgaggccatcgagatgttcgaccaaatgcccgagacgaacgtcgcatcctggaacgccctcgtgtccggattcatggcacaaggccacctagcccaagcgcaggagctgtttgagcggatgcccaccaggaacaacgtttcctggatcacgatgatctcagggtacgccaaggccggtgacgtccaagctgctgctaacctgtttgataggatgggcagtaaggacctttatgcatggaatgcgatgatctcatgctatgcacaaaatggctgcgcaagggaggcacttggcatttttaacagaatgttgaagccacatatttgggtggtacccaatgagaagactttttcctctgtgatctcggcatgttcacagctgggggacttaaggttcggcttgtgggttgagagtttcatgggctatgtgggggttgatctggatgatcacttgcgtacagctctggttgatttgtacaccaagagtgggcgaatggatagggcttttgatttgttcagaggattgagatcaagggatgtggtgtcttacagcgcaatgatagtgggctgtggaatgcatggcaagttaaatgaagctgttggcttgttcaaggagatgtccaaagcaaggattgatcctaatgcggtgacctttgtggggttgctatctgcatacagtcacgcgggactgctggaagaagctcgtgcttgtttcacttccatgacaagcagatacagaattaatccttcaatggaacactacactattatggtagacattcttgggcgctgtggaaagttggaagaagcattccagctggtcatgcagatacctgtatgcccagatgccagtgtttggggtgccttgcttcttgcttgcaggttgcacaacaacattgagcttggggaagttgttgcttccaagtgctttgaactggagccacaagagagtggatattacattctcttgggtaacatatatgcgcaagcaaagaagtgggacaaggttaagggtttgaggaagatgatggcagaaaggggtttgagtaagacacccgggagtagctgggtgcatgttgcatgaatccattctattgatcttgctcattttaccatttgggtcagttactcagatgacatattaacatgcaactcagattttgggcactaaatttggaaagatatgttgttcttgtgtgttacatgcaaggggagtgggtgatggtgagttaaaattagtgagcacacggtgatgctaataagttatttccttgctatttttcctgc

SEQ ID NO: 103832 - DNA, 1072 bp, Zea mays
  Clone ID: MRT4577_26199C.1
ttgtagtcggacgcgtggggtcgaggagggtaaacactatctggatataatggtgagcaagtacaggttaaaaccatggcaggagcactatgcctgtgtggttgatatccttggacgctcaggccagacggaggaggcttacgagttcatcaagactatgcctatggacccaaaatcagctgtgtggtgtgcgctgctcggcgcatgccgtgtccacaggaactatggcctcgccgtggttgcagccaataagcttctcgagctggaacctgacaacccaggcaactacattcttgtatcaaatgtttttgctgagatgggcaagtggaacaatgccaaggaaactagaaccaggatggcagaacgggggttgagaaaaaatccagcttgcagttggattgagatagggaacaacatccacactttcacctcaggagattactgccatcgagactcggaggcaatccatctcaagctttccgagataacggaaatgctgcgcagagaaggtgggtacgtggaggacacaagatttgtccttcacgatacgagcgaagaggagaagatagatatgctacataagcacagcgagagaatcgcaatagcatttggcttgatcagcactcgcccaggcatgcctataaggatagccaagaacctcagggtgtgcggggactgccacgagttcaccaagctggtttccaagctgtttgaacgggatattgtggtccgagatgccaacaggttccatcatttcagtggaggctcttgtttttgtgaagacttctggtgaatgtgcgttaggccacagagctaacttatagtatcctgttaacttgaagaggacgcaacagaggtgaaattgatgacacggcgaaggcctggctaagactagagattacctgaggcccccatggcctgtcagtccgtgaatggagcaacccagaagaaaccctctattattagtcagtttcggtagggtcgttgccatttggattggggtagtggggtaatgcaatgcaaatgatctttttttattcagtatatacacccaccccacttttttcccctg

SEQ ID NO: 103833 - DNA, 249 bp, Zea mays
  Clone ID: MRT4577_2619C.1
cgccgccacatgcgctccatttccttcatcatcaaggctggacgccaggatccacccatcatactgcgtgtagaccgggacacgggctacagtgaccgttgaaagccccgaatctgctaggagtatgcgcacacatgctaggacaggtccaacaagtgcaagctggcgcactcgatcatgcgccacagtcaccaagacgctcgaggtccacctatagccgctctaccagaggattgggtggccgctcta

SEQ ID NO: 103834 - DNA, 246 bp, Zea mays
  unsure (1)..(246): unsure at all n locations
  Clone ID: MRT4577_261C.1
gtcgttcggacgggaaaggcccaacaccnagggggggggnctgaggagaaccaagggggacaaaccggagagggacgacgacaagcaagccatgaaggaaaggggaccaggcccaaaaggggggccgggcagcacagggaaggcggccaagggcgaagcgagcagggaccggccaacaggcaggaacagaaaggcgggagaccccgcagaggggccaggaaagcgcaagcagggggaccgaaagga

SEQ ID NO: 103835 - DNA, 1391 bp, Zea mays
  Clone ID: MRT4577_26200C.1
gccggccgggcgccggccgcttcgagagtttcagtatttgcagcatacacatcttggttgcaattgcaatccaagatgggtgacgctggtgagattcagctgcaaatcgcagggatccgatgccaagaagccggagacgatcatggacagagagcagagagcggtggagcatgccctggccctgcaacggaggcgccgcggccgccgctgtcgaaacggctcgcgtggtgggcggtggtccttatcaacgtcgtgttcatcctcggcgggcagagcgtggccacgctcctcggcaggatctactacgaccagggtggcaacagcctgtggatgcagacggtggtgcagtcctgcggcacaccgctcgccatcccgctgctcctctacttccggttccgggtcaggccgacgtcctcctccgccgtggcggctagccggccgccactcgtcaagctcgccgccatctacgccggcctgggcgtcctcctcgccgccgacaacctcatgtactcgtacggcctcctgtacctgcccatgtcaacatattccatcatctgcgcgagccaggtctcgttcaacgccgtcttcgcctacttcctgaacaaggagaagttccgggcgctcgtcctcaactccgtcgtgctgctgacgttctcagccgcgctcgtcggcgtgaaccacggctcggacgagaccggaagcagcatcccgaaggggaagttcccggcggggttcgcgctcacgctgtcggcgtcggcgctcttctccctgatcctgtccctgacgcagctgaccttcgacgaggtgctgaagagcgacgcgctccaaaccgtgctggagatgcagttctggagcaacaccgcggcggcgtgcgtgtctgtggccgggctcttcgcctccggggagtggcgcaccatcgccggggagatggaggcgtacaagaagggggaggtggcgtacgcgatgacgctggcgtcgacggccttctcgtggcagctgtgcacgatgggcctcatggggctggttgcagcggtgtcatcactgttcaccaacgtgatcagcacggtgggcacgccgctgtcgccggtcctcgccgtgatcttcctcggcgaccggatggacggggtgaagctcatggccatgctcatagcagtgtgggggctcctgtcctacgtgtatcagcactacctcgacgaccgtgccaaggctaagaggataaccgagaaatctgacgaacaataccaagctgcaaaaatctccgtagaatagtgcttgtttttttttctgccactgtcacatcgcaaaactactttaattgctctacggaagtccctgccgatgccagtggaaaatactaagtttagttcagttcaaaaaaaaaaaaaaaaaaa

SEQ ID NO: 103836 - DNA, 464 bp, Zea mays
  Clone ID: MRT4577_26201C.1
acccaaactgccatgcgtggagatagatagacagacagaacaggaactcaggcaacacatgacacaacacgctggagccgtggcaagtatggggcaccgtgcgcactgacaccgggccccaccaccattaccacccggcgcacagtttatttaggccacgtcacttgcagcccccaccggacacgtccacgccacagtcactgatcactacgtaccggaatttgtgcgatgacacacagacacacccccagagagacgccaggttactcgtgcgtactgaacagcaaaatcccttgtcatactgacatttactggcgcgagagatactcgggcacgcgcgcacgccgattccctggggtctgggccatgggcgacgtctctaagagcgcaccgcctaactctctggtcttttctggctactaaggagcaaaaggctccggctgggcagacgcctcttggggtac

SEQ ID NO: 103837 - DNA, 601 bp, Zea mays
  unsure (1)..(601): unsure at all n locations
  Clone ID: MRT4577_26202C.1
cggncgcgtgggttcggtgtctctgtttctctggcgtgtggcgaagaaccatacgctcctttttctagagtgtgcctacctggctacaccttataatgctaagagcaaaaaaaccgctcgcatctactctactgaccggtcattgagtgtttggtctgatgtcattttctcggacttatagggcaccacaagcgttaatgcatgtctgtctagcacgaactcagatgcctatgaaggtttaatttgtactccctccgtttctttttagttgtcgttagatagttcaattttgcactattcagcgacaactaaaacgaaacggagggaatacctaataaccacacttacttaaatctgttcatatagtagagggctaatttgttgtagctctcactctccggtcggtcacaccgaagcaatgtacatatcagacaccgagataccccgttaaaatccatcttttttgttaggctacgaggagattttaggggctgtttcgttcgtgactaaatgtgtcacactttggctaaagttagatcgtcgaattgaagaactaaccttaggcataaaagtaggcaagagggggcaagttagcctcaaa

SEQ ID NO: 103838 - DNA, 451 bp, Zea mays
  Clone ID: MRT4577_26203C.1
ttttcttttttttttttttttttttttttttattatatcaagggtcggttctgagttttagtttaaggatgaacatttttacaaaatactacatgcaggcgatatattttgctttgccttgaacaaacaatggagaagttttatcctggcccatataaaaaaaaccacaaatgtttctggctcctatgtacaaaccgaaaaatggacggtaaaatcttcctacccaaaactgccagatttttggcactgttaagatatacaccttggtttgccggttcccttttataaatttatcaaatttctcattatactggggccggggaacttttcagagctgggaagtaacccttcttcgacatcctttagaagattgtcactgtttatattgatacccccatgatattaaccctttatacaaaggccagggtaacaaaactgcagaattggtggc

SEQ ID NO: 103839 - DNA, 265 bp, Zea mays
  Clone ID: MRT4577_26204C.1
gggaaccacaacaaataactggacccatcggatgttccacagctggctgatatgctgggaagtatttccaaactactcacgatgaatatctccgatagtgcgcgtaacagaacgcagcggaaattctaccaactccgtttgctgaaaacaaaaggctcctaaccagtgcctgaacggacgagacactgcatcaggtgacaacaagcacgtgttgggtacagggagaggttccagcgctaacaactgtgatgcattggttggcggc

SEQ ID NO: 103840 - DNA, 218 bp, Zea mays
  unsure (1)..(218): unsure at all n locations
  Clone ID: MRT4577_26205C.1
ggttgtttttttttttttttttttttttttttttttttttttttttagggggaaaacaatcacccaaaagtataaaggggccggacagaaaagagggcacatcgccgtggtttatatacacccccaaaaaaatnctggnacaagggcgggatttggttattctcttttggattattcgcctatcaaaatgggtggtggggggggtctctcacggcccc

SEQ ID NO: 103841 - DNA, 394 bp, Zea mays
  Clone ID: MRT4577_26206C.1
ttttaagtgatttgtatcaactcgcatgccaaaacagaaaaattttaattttcgtcatgccaacttagaacatttcgaactccttggaaaattagcaaggactgcagcggggctcaatttttggttgggcaataaaacttaaacctgcctggttgttcctactgtgccattaataatgtttggccctgggactggcctggcacctttaaggggctttttacaggaacgactagcttaaaaacaggcaaaggtgaaactgggccttgctgccctcttttttgtgggcaaaatccggaagatggccttcatttatgaggatcatctcattatttttgttgaatcccggtgccctttctgagttaatcgtacgcttttttcgggagggtcctccaaa

SEQ ID NO: 103842 - DNA, 191 bp, Zea mays
  Clone ID: MRT4577_26207C.1
gcgggtgatcctgtcaagcgatccaaccttaattctcaaaagtgcgttcagtttgcccgggtagggacgggtttcatgaaaaaaaaaataaaaagcactgggtgccttatttcctgaattttcgtgtaaaaatgtactccctgcgtcccaaaacagttgacgttataatatttatagttaaacttgtagct

SEQ ID NO: 103843 - DNA, 856 bp, Zea mays
  unsure (1)..(856): unsure at all n locations
  Clone ID: MRT4577_26208C.1
ccggccgggaacaaatcatttcatcctcatcacttgcctcttactttctacaaccttcagccaacccctataacattcgcaatgcgtttccagatgatcccccttcttgctgtcgccagctgcgcgactgtcaacgcaagccccgtccagcatgagcctcgtgcagcaggatgcagctcatacaccatcatcaacaccagaggaaccggtgagatgcagggcccctcatccggtttccgaacaatgaactctcaaatcacttcccaagtctctggcggaaagatttacaacactgtgtaccctgccgacttcagccagaactcggcatcaggaacccgtgacatcgtcagaaaggtcaacagcgtcctgtcgtccaaccccagcgagtgcttcatcctcgaaggctactctcagggtgctgccgctaccgtcaatgccttgtcacagctgactggaagcgccaaggatgccgtcaaaggtgtcttccttatcggtaacccgctccacaagcgaggtcttgagtgcaatgtggacaacaagggtggcgacactaccaagaacgtgagcggaatttcagctttcggaggtggtggtattcctcaggactgggtctcaaagactctcgatgtctgtatctatggtgatggtgtttgcgataccacacatggctctggaatcaacggccctcatctgcaatatcctagggattcgtccactcaggacctcggaactaaatatgttgtgaagcagctgactggctccactagcacattcacgatggttggatcacgacatcgagtcccttgcaactntagatatagttttacatagtgtacataataaatacctagtcacg

SEQ ID NO: 103844 - DNA, 401 bp, Zea mays
  Clone ID: MRT4577_26209C.1
gacaccacgcgtccgaagcaccacgaaacacggcggcagcagcctgcgtgcctgcctgcctatccaccccctgctccagcctccgcctccgacacccgcgcgcgccctcgcgcggacaaagccgtgaggggcagagccgagggaggcggggctgtgccggccacgcaatgcagcagccggagcctgccgatctgccgggctgggccttcccgccacgggcgggaccggcgcctgccgccgtgcgcggggcgcaccaccgccgggccagatctgaggttgccttccgcctgccggacgacctcggcctcggcggcggcggcggccccgatggcgacgccttcgacgagatcggttcggaggacgacctcttctccaccttcatggacatcgagaagatctcc

SEQ ID NO: 103845 - DNA, 359 bp, Zea mays
  Clone ID: MRT4577_2620C.1
tctctccatttttttcaccaccatagcttattactaggggaatttaagaacctttggggggctgctcatatcctgaaccatggtctctttactttaaacaaataatctactaaaaaaagctcgctagctataatgctccactattataatcgaaacaggacaaggctaaaaatgtccatatatatttctatatcacacagcctatcaacattgatgaaaagccacttttttgaatcttcctcaacctttcttttctcccctccctttctggaaagcaaagcctataccgacctaatggcatccacctccagaagcaccaccattcagccattcatattgtgtcacgtcaaaatgaagtg

SEQ ID NO: 103846 - DNA, 933 bp, Zea mays
  Clone ID: MRT4577_26210C.1
cgtttccaaaatagcgatcacattcacaaactcacgcctaataacactacacaaccagctataggggcctaccagctttgtcaagggctgaagaagaccatggccagagccatcgtcctcgccgctcttctcctcgctgccactgccagctccacgacggcgaccacgctgaccatccacaacctctgccctcacccggtgtggcctctggtgacccccaactcaggcctcccttccatctccgacaacaccgcgcgactagaccccaacgcgctgctcaccctctccttcccgcccaccttctgggccggccgggtggccgcgcgcacgggctgcgacgccgccgcgtccggctgctggacgggcgccgcgccgcccgccaccgtcgtgcaggtcaccgtccacgacggcacgaaccaggaccaggccgcctacagcgtcagcctcgccgacggcttcaacgcgcccgtggtggtcagcccgcaggcggccggcggcgggcagtgcccagcgctggggtgccccgtcgacctcaactgcgactgccccccgcagcagcgcgccgccgagggcgccgcgtgccgcggcccgccggagtacttcaagagccggtgcccgctcaccaggaccacgcccaccgacgtggagcccgtgccgcagagctgccgcgcgccgggcgagctcaaggtcgtcttctgccaggcgaccatcgtcacaggcggtgtcgccgctgccgccgaagccgaagatggccatccgaaccgtcgtcgccgacagctagactactggccgagacagacgtccagctccactggccccgcttcgttgaatcgttatttgtcacgctttttgctttcgtgtgtttgttagcttaggcttcgacgcgtgtaacccggtggtttttaagcaaaatttcaagtttaaattcgtatt

SEQ ID NO: 103847 - DNA, 453 bp, Zea mays
  Clone ID: MRT4577_26211C.1
ccagctaattaaagtttgtataaattagagaaacaatccggtcaggaatcgttccgacccaccaatccagcagaaacgaacaaggcctaaaggtttacccactccggacaacctgcaacgcagaccattcccgaggaactccggacaacggccttgcacatgattggacccaggctttacagtagccagatataattaaacgacgcacaacctagagtagtgttctcaagaacccacgctctaatgttcgacgattatataatcctgttacagaccctgcgatattgatactgatagccatggttcacttgggaataatgctcagcccatctcccttcgaaatcttgagtttattggactcaccacaaaccattatatcccacgtggagtcgaccagactacatttgtcacgacaagccaatgccaagcccatcactgagggaattaacacct

SEQ ID NO: 103848 - DNA, 593 bp, Zea mays
  Clone ID: MRT4577_26212C.1
ggttctaaacccctaccctgcggccgagatcctctcccctcccgaccctaacccctacgccgcggcggcgcctctccgatggacgcctccgacgagctccggtcgctggaggccacggggatctaccgcctcgcgggctctcgcgccgccttcgtcgacccggtgcgcctcctcggcgaatcctaccggcgcttccgcctcgtcccgtcggcgtactactcccggagcttcggcccgtcgcggcagggaggcgaagcgcaggccgaggggacggcgccgtctcccgaccggaagaagcgcaagcggaagcgccagacgaaggcccgggaactcaacgccgtggagcggatcgcagaagcgcggcaccaggaagcaaggcctttgctaattagcgcgcataattcactcctcgatgcgaaatatctactggaataccttccgggtatgatcaagggagatgaatgcaggccagagctcgaaactagttctgagaacaattttgttgagcttgcgggctcatgtagagcacctttctactagatgactatttgctttcagaagcctcttggttaggatgaggcccggaacctgtg

SEQ ID NO: 103849 - DNA, 2566 bp, Zea mays
  unsure (1)..(2566): unsure at all n locations
  Clone ID: MRT4577_26213C.1
atttattttattttgggggccccataaaaaaaacttttacgtccatatcacggggaagtaaaattgggtcctttaaaagggccgccccttttttttttttttttttttttttttttttttttttttttttttttttttttttttttttttttttttttttttttttttttttttttttttttttttttttttttttttttttttttnggcttcaaaagtcaaaaccttcgccttatttttccctacaaattttatcaccaaccgccaacaatgcagctgccaacagctttttataagtcatttggcctccaacaggttggatcgaccgtagtaaagcaaggccgagcaatatactcaaaccacttgaaggtttacaactctggacaacctgcaacgcagaccattcctgaggaacctcaaaaccaaaccactcaggaatgtcctacggcattgcagataattagactcaggctatacagtagccagatataaaacataaatgacgcaaaccctagagagtagcctgctcaaaaacccagactcatgttcgacgattatggtcctgttacagaccctgcgatactgatatccatgacagcttgggaataatgctaacccatctcccttgaaatctcgaatttactggaccaaccacaaaccattatcccacatggaatcgaccagactaggttgtcatgagggaattaacacccttttggtcaaatactgtattcagttgaggttcaaaccaccaccaggagggttgccaccttggctaaagtcaaaaacagcaggagcagcttccccagcagtagccattgcatcatcttcctcctccatccagtaagtctcaagaagcttcacagccttttcatagatttcattattatcatggctctgtaggttctcgattttttccaggccttccgcgtcgtcaatcatctgagcgaaaacattaatgtcacctgttgcgcccatggtcttgtcgtgctcccctactttaagaatattctcaagaccctccagacaaactgttacaattctcggatcagggcaaacaagaaggtcgcacagcggcacgatgcagccctcagacaccaagtacttgatttgctcatgggaaccaccagaggtagcgtttgagatggcccaagcagcctccttcttgatatcaaactctgctccttgaagcagttgcaacaaaggagcgataataccagcacttatgacagcctgtatctgatctttgtttccagcagtaatatttgaaatcgtccagcatgcctctttcttaatgcttttcttgtggttctgtgtcaataaattcaggaggcggggaagagcttgatgatcaatgatacactgagtttgctgatcatctccagttacaatgttcccaacagttcgtagagcaggtataagcaccgacggtgatggatggctgcatgtggtatcagcacactcatataaaagataaagaactggtgcaaataacaaaaactatccaagtgatcatcatagagttgttacacagcattttgacatacagaaggagctccacaagccgggggcaaacaccagcttcaattacagcttggatcttatcattagtgccgtcagataagtatgacaaagcccagcaagcatcagtgagaacttcctcatcgttggaatggataagtcgtgcaagtgctggcagagcaggcttagtctgatcaaatgatggctgtggctttcccctgcaaaagttggacagagtccaggtggcattcctcaacatggagagcttcgcatgctcattcaactgggctagcagaggcatcaatgcaccattggcgagaacaaggtcacgacacttcggagaatcgccagcaacattgcccaaagcccacacagcctgctcacgaacatcatcactaccagacccaagaagcttcacaaatataggaacagccccatgatcaataacaacctttgtattttctgaagtgccagaagcaatatttgtgagagcccatgctgcttcgaactgcagctggggcaaatcctctcttgtgagcaactgcacaaatcttggaactacacctgatttgataacttcttcaatgggagggctcctctctatagatagcaacttgcgaaactgtgtggtggcctcaagctgaaggttattgtcatccgaataaaccccactgaccacagctgggaggctttcaagcttcttctcgacccccgagggaggggcagggacctgggcctggagcccctcgcggcgcctcttgagaaggctctcctcgcggcggctcttgcggatctccaccatattgtcctcgcgccgccgccgcccctcctccgcgtcaaccgccaccttgtagcggttccgccgcacctcgacccgctcgctcgggcgcagcgacatggcttactaagcacagctcagtctcgctcgctgagacggcggcagcgggaaggaggcaaaaccctagccgggcgtcgtgggagccgagggcagcgggaggagggggaaaagaagaggggagaaaccctagctgctagtgggaaagtg

SEQ ID NO: 103850 - DNA, 3668 bp, Zea mays
  Clone ID: MRT4577_26214C.1
tcactatgtgcttctgaaaccaaaagctaactggttcgaggtgatctcgagttctccttctgacttttaaagtacttcccttacagacaccagctcatctgaaagagttgcagaaactgactctgcatgctctattttgttagccagagcctgcctcacttcactggcctcatctgttagttttgaaatctgagtcatcaaatcctgatttgatctctttactgcgtcaagctcttcagagagtttaaacacctcatttctggaacctgttagtgcctcttcagtgaactcaacaaggtctgacaattttttcctggcaacaacttcattatctagtattgttctggtggtgaccaatacattgttcaacttggcaattcaagtatcgtgtccttgctaaagaaaaaaatagacacacgaggagagcagcagtaaactaacagctgcattcttgttatattttttggtcatttcttacgtgcatgctatacaaaagaaacttctacagttgtaccactactcacgtttttttacttcgactttgacagagcagaccacgacgccgacggcagctgcagccaggagcagatgctgctagagaggcagcagccttccatgtgagtcaccgagtccccatcaggccagggccggccagcgaacctagcgaggctggtggatcacgcgaggagcgctgctcttggggctgccggcgtacttggtcggcttctcggagtgcctgggtttctcccggaacccccgcggggcgtcgccgctcttcggggagcccaagttcagcgccttgagcaccgaatctgtcttaagggcggcggcggcggcgggggcctgctcgccgtagaagaggtcctcatcctcatcgtaggcaaggagggcgaccaactcgagctgctcggctatctcgtccaggtgggcgtgctcgcgggaccagtggtcgcggaaccaggcggtggtggtgatgaggtcccaccactgcggcgagaagtcctccacctgcagcagcgccgccgggatgaagagcggcgcgttcgggttcagcgacgacgaaaccgcgacggcactcatggttcaacttcagcccagcccctcaggcctcctaccccgacgccaacgcttgccctcgcgtgttgacccgcaggacactgtcatttgctatgtgcacgagagatagatgtattgtggtgttgtataattggtatgaagagagtatgcttttgttatgtctgtatctatatcctgcgtgctttgaatgttatataatacttgttaataaaggatggtgctcctgaatgttatatatataataccacaatacatctatctctcgtgcacatagcaaatgacagtgtcgtgcggctcagacgcgactcgtgccgaattcggcacgagaatgacttataaaaagctgttggcagctgcattgttgacggttggcctccaacaggttggatcgaccgtagtaaagcgaggccgagcaatatactcaaaccactttaaggtttacaactctggacaacctgcaaggctgcaacgcagaccattcctgaggaacctcaaaaccaaaccactcaggaatgccctacggccttgcagataattagactcaggctatacagtagccagatataaaacacaactaaatgacgcaaaccctagagagtagcctgctcaaaaacccagactcatgttcgacgattatggtcctgttacagaccctgcgatactgatatccatgacagcttgggaataatgctaacccatcgcccttgaaatctcgaatttactggaccaaccacaaaccattatcccacatggaatcgaccagactaggttgtcatgagggaattaacacccttttggtcaaatactgtattcagttgaggttcaaaccaccaccaggagggttgccaccttggctaaagtcaaaaacagcgggagcagcttccccagcagtagccattgcatcatcttcctcctccatccagtaagtctcaagaagcttcacagccttttcatagatttcattattatcatggctctgtaggttctcgatcttttccaggccttccgcgtcgtcaatcatctgagcgaaaacattaatgtcacctgttgcgcccatggtcttgtcgtgctcccctactttaagaatattctcaagaccctccagacaaactgttacaattctcggatcagggcaaacaagaaggtcgcacagcggcacgatgcagccctcagacaccaagtacttgatttgctcatgggaaccaccagaggtagcgtttgagatggcccaagcagcctccttcttgatatcaaactctgctccttgaagcagttgcaacaaaggagcgataataccagcacttatgacagcctgtatctgatctttgtttccagcagtaatatttgaaatcgtccagcatgcctctttcttaatgcttttcttgtggttctgtgtcaataaattcaggaggcggggaagagcttgatgatcaatgatacactgagtttgctgatcatctccagttacaatattcccaacagttcgtagagcaggtataagcaccgatggtgatggatggaggaggagctccacaagccgggggcaaacaccagcttcaattacagactggatcttatcattagtgccgtcagataagtatgacagggcccagcatgcatcagtgagaacttcctcgtcgttggaatggataagtcgtgcaagtgctggcagagcaggcttagtctgatcaaatgatggctgtggttttcccctgcagaagttagacaaagtccaggtggcattccgcagcatggagagcttagcatgctcattcaactgggctagcagaggcatcaacgcaccattggcaagaacaaggtcgcggcacttcggagaatcgccagcaacattacccaaagcccacacagcctgctcacgaacatcatcactaccagacccaagaagcttcacaaatataggaacagccccatgatcaataacaacctttgtattttctgaagtgccagaagcaatatttgtgagagcccatgcagcttcaaactgcagctgggggaaatcctctctggtgagagactgcacaaatcttggaactacacctgttttgataacttcttcgatggggggactcctctctatagagagcaatttgcggaactgtgtggtggcctcaagctgaaggttattatcatccgaataaaccccactaaccatagctgggaggctttcaagcttcttctcgaccccggagggaggggcagggacctgggcctggagcccctcacggcgcctcttgaggaggctctcctcacggcggctcttgcggatctccaccatattgtcctcgcgccgccgccgcccctcctccgcgtcaaccgccaccttgtagcggttccgccgcacctcgacccgctcgctcggacgcagcgacatggcttactaagcaccgctctttctctacccctcggtctcgctcgctgaaacagcggcggcgggaaggaggcaaaaccctagccgggcgtcgaggcttggggagccagggggagcgggaggaggaggggaaaattttttttttttttttttttttttttaattttttttttttttttttttttttttttttttttttttt

SEQ ID NO: 103851 - DNA, 1455 bp, Zea mays
  Clone ID: MRT4577_26215C.1
ccccctctcgagtttttttttttttttttttttttttttttttttttttttgcaaacaaaaatagcttttaaaaatcaatttatagcctcgaccgtagtaaaacaaggccgagcaatatgctcaaatcatcaaaggtttacccactccggacaacctgcaacgcaaaccattcccgaggaacttaaaaaaacaaaccacccaggaatgccttacggccttgcacatgattggactcaggctttactgtagccagatataattatacgacgcacaacctagagtagcgttctcaagaacccacactctaatgttcgacgattatataatcctattacagaccctgcgatattgatagccatggttcacttgggaataatgcattaatgctcagcccatctcccttcgaaatcttgagtttattggactcaccacaaaccattatatcccacgtagtcgaccagactacatttgtcacgacaagccaatgccaagcccatcactgaaggaattaacaccattctgatcaaagactgtatcagttgaagttcagaccaccagcaccaggagggttgccaccttggttaaagtcaaaaacagcaggagcagcttccccggcagtagccattgcgtcatcttcctcctccatccagtatgtctcaagaagcttcacagccttttcatagatttcattgttatcgtggctctgtaggttctcgatcttttccaggccttccgcttcatcgatcatctgagctaagacgttagtgtcacctgttgcacccatggtcttgtcatgctgccctactttaagaatattctcaagaccctccagacaaactgttacaattctcggatcagggcagacaagaaggtcacacaatggcttgatgcagccctcagacaccaagtacttgatttgctcatgagaaccaccagaggtagcatttgagatggcccaagcagcctccttcttgatatcaaactctgctgtttgaagcagttgcaacaaaggagcgatgataccggcacttatgacagcctgtatctgatctttgtttccagcagtaatatttgaaatagtccagcatgctctttcttaatgcttttctgtggttctgcgtcaacagattcatgaggcggggaagagcttgatgatcaataatacactgagtttgcaaatcatctccagtgacaatattcccaacagttcgtagagcaggtataagcaccgatggtgatggatggaggagaagctccacgagccgggggcaaacaccagcttcaatcacagcctggatcttatcattagtgccgtcagataagtatgacagggcccagcatgcatcagtgagaacttcctcgtcgttggaatggataagtcgtgcaagtgctggcagagcaggcttagtctgatcaaatgatggctgtggttttcccctgcacggacgcgtggg

SEQ ID NO: 103852 - DNA, 328 bp, Zea mays
  Clone ID: MRT4577_26216C.1
catgggcgtgggattagcgtggtcgcggccgacgtacctaatgttgatctggtgatacattatgaacttccgaactcgtcagagatctttgttcatcgatctggtcgaaccggacgtgctgggaagaaaggaagtgccattctcatgcattcctcaaaacagcacagggatttgaaaggtattgaacatgatgccgggtgcagatttactgagctcccaagttttaaagtagaggctggagcagcagacatgtatagtgacatgggcaaaggcagcgaccgctttggctcctatggaggcaccatgcgtagtcgatctggggattttg

SEQ ID NO: 103853 - DNA, 2246 bp, Zea mays
  Clone ID: MRT4577_26218C.1
cggacgcgtgggcggacgcgtgggcggacgcgtgggcggacgcgtgggcggacgcgtgggcttggctccccaagcctcgacgcccggctagggttttgcctccttcccgccgccgctgtttcagcgagcgagaccgaggggtagagaaagagcggtgcttagccacccatgtcgctgcgtccgagcgagcgggtcgaggtacggcggaaccgctacaaggtggcggttgacgcggaggaggggcggcggcggcgcgaggacaatatggtggagatccgcaagagccgccgtgaggagagcctcctcaagaggcgccgtgaggggctccaggcccaggtccctgcccctccctccggggttgagaagaagcttgaaagcctcccagctatggttagtggggtttattcggatgataataaccttcagcttgaggccaccacacagttccgcaaattgctctctatagagaggagtccccccatcgaagaagttatcaaaacaggtgtagttccaagatttgtgcagtctctcaccagagaggatttcccccagctgcagtttgaagccgcatgggctctcacaaatattgcttctggcacttcagaaaatacaaaggctgttattgaccatggggctgttcctatatttgtgaagcttcttgggtctggtagtgatgatgttcgtgagcaggctgtgtgggctttgggtaatgttgctggcgattctccgaagtgccgcgaccttgttctcgccaatggtgcgttgatgcctctgctagcccagttgaatgagcatgttaagctctccatgctgcggaatgccacctggactttgtctaacttctgcaggggaaaaccacagccatcatttgatcagactaagcctgctctgccagcacttgcacgacttattcattccaacgacgaggaagttctcactgatgcatgctgggccctgtcatacttatctgacggcactaatgataagatccagtctgtgattgaagctggtgtttgcccccggcttgtggagctcctcctccatccatcaccatcggtgcttatacctgctctacgaactgttgggaatattgtcactggagatgatttgcaaactcagtgtattattgatcatcaagctcttccccgcctcatgaatctgttgacgcagaaccacaagaaaagcattaagaaagaggcatgctggactatttcaaatattactgctggaaacaaagatcagatacaggctgtcataagtgccggtatcatcgctcctttgttgcaactgcttcaaacagcagagtttgatatcaagaaggaggctgcttgggccatctcaaatgctacctctggtggttctcatgagcaaatcaagtacttggtgtctgagggctgcatcaagccattgtgtgaccttcttgtctgccctgatccgagaattgtaacagtttgtctggagggtctggagaatattcttaaagtagggcagcatgacaagaccatgggtgcaacaggtgacactaatgtcttagctcagatgatcgatgaagcggaaggcctggaaaagatcgagaacctacagagccacgataacaatgaaatctatgaaaaggctgtgaagcttcttgagacatactggatggaggaggaagatgacgcaatggctactgccggggaagctgctcctgctgtttttgactttaaccaaggtggcaaccctcctgctgctggtggtctgaacttcaactgatacagtctttgatcgaaagggtgttaattccctcagtgatgggcttggcattggcttgtcgtgacaaatgtagtctggtcgactccacgtgggatataatggtttgtggtgagtccaataaactcaagatttcgaagggagatgggctgagcattatattcccaagtgaaccatggctatcaatatcgcagggtctgtaacaaggattatataatcgtcgaacattagagcgtgggttcttgagaacgctactctaggttgtgcgtcgtttaattatatctggctactgtaaggcattcctgattggtttggttttttaagttcctcgggaatggtctgcgttgcaggttgtccggagtgggtaaacctgagtgggaacatttgagcatattgctcggccttgttttactacggtcgaggctaaattgatttctaaaagctgtttgcttcaaaaaaaaaaaaaaaaaaaaaaaaaaaaaaaaaaaaaaaaaaaa

SEQ ID NO: 103854 - DNA, 454 bp, Zea mays
  Clone ID: MRT4577_26219C.1
agaaaacacatagaatctcatttgttggggaactgctttgagccttattacaacagagcttacgtaacgacttacgtatggagaacttggttgtttgcacagtacacgagcacgtgataaccacactttacggaacggaacggggaaactcatacagctagtgcgaccaccggacgtgctgatctaaaacacaactgaaatgtgaaccgtgtgggaatgcccttgcatggttatgcccttggtggataccttaacgtaatgagtgttgaggtagagcacagtgtaagggaactttgccgtgccgattctgatattgaggataaggtccactttcatggagactactcttatcttgatctggggcaaacgaaccccgaaccacttgaaccccagctggaccttgaggtccgtagatcactaattggtgtgcacaccaactatgaacacctgagta

SEQ ID NO: 103855 - DNA, 638 bp, Zea mays
  Clone ID: MRT4577_2621C.1
cgtgctgcgttgtttttcgcggccgcgtcggcttttgggtctttttgtttttctcctgatcaagtttacggtttgttccgtttgagatttattgagtgcacaaatactatgcggtaggatatacacaaagatatatagcttctgctagcctgatatatatatacactgaatctgcggattcatcagtacggaagaatagctttaatatttaattttaagctagcgaaagattatcttcatcgtcattggcgaccatggatgggcgggtaccggatgcaggatgcaccatctccatggtgccaaggtccttctccttctgcatctcctggtaacgctcctccgcctcgggcatgtctcccatgatggccttgaggcgcaggttcatttcgccgaggcgctcgaatacggggttgttggtgaacatgccctcgcacaccttgcagatagtgtcccaactctccaccagcggcaggaagatgatcaccgctgagccgaccgtgccccaggcgatcgcgatgacagcccacatggtgaagtagccggcgctgtacctccccgccggtagcgacagcacgggccacaccaccgcgatcacagccgtgaaggccacgccccacttgatgatccaccgcttcgcg

SEQ ID NO: 103856 - DNA, 437 bp, Zea mays
  Clone ID: MRT4577_26220C.1
ggggccaaaaaaactttccatttaagcaaatagcccggcaggggggggttttttacagcctcacaacaatgaaaaaaagagatcctaatcctaacaaaaaaaaatttttaaaaaatttgtggggggggggcaaatgttaaaaccaagcaaattttaaatgggggaccccttgtcccttaacacccttaaaaaaaaaaaaaaaacatacaagcttggggggggaaaatgaaaaaactccaaaaaatggtttttacatgaacaagaaccctttttgaaaagagaaagttaatggcctaaccgaagagggcactttttggtgggggggggggtttttttttggacccccctaaaaaattttggcccttgggtttgggggaaggccaaagagctttggagcttttgcaccttggagacagggggttttttgtatggaaaaa

SEQ ID NO: 103857 - DNA, 429 bp, Zea mays
  Clone ID: MRT4577_26221C.1
gccggccggccggccgggaatccacaatctcactcttcaacacacacaaacacttacaactttttcgaagaccttcttcaccaacaactatcaacatgtctccctgctcttgctgcaaccacgaggcctctgcctgcggctccagctgctcttgctgccagcactaaattccctcttccatcaccaacgacactcggccatgactaccacactcgcaggcctctgagggccatgcttccaggttacgatacaggaggacatcaaatgcgagctcagcgagcaagtcggacggacaggtacaatggaaaggaaagaaagaaatatgagacatgctagcgatggactggaaccgccaagtttcgatggtagggcagtttagagacaattgcagcttgcatgcccaaaaaaaaaaaaaaaagacccctagcc

SEQ ID NO: 103858 - DNA, 484 bp, Zea mays
  unsure (1)..(484): unsure at all n locations
  Clone ID: MRT4577_26222C.1
tctacttcngctctcgaggccgagaactgctantttgtgcagtgcagggaggcctttggaagggaagcagacaaaaggcgtgaatcttgcggtgtaaagtgtgngtngtacattgtgtgtattcctccggggaagcgggcnntacccantttntgtcctngccccaagttaccatttaanctaaggttttgggtggtgccctgtgctggggtctgggctctagttattggancagagcangcaatgcatgcaagaaactgatgatgcgcctgtgtggccctctttcccttcccaaggcatggaaatagccttggctctnaagcttattattggattggccacaggcggacttgagatagtactccaagaggcgcgcttgctcctggcangtnggttggcctatgtaaatgtgcctgtgaagccatgcaaccaagggtttgtggggggtgagggcttttcatggtagccgatctgctttcattgg

SEQ ID NO: 103859 - DNA, 806 bp, Zea mays
  Clone ID: MRT4577_26223C.1
cgaggccggccggggaatccaacaagcaaacctgcagtcatctcctccatcaccaccaaactcaacaacagccagctcgcgaaaataatgaagagccgcagcatggcatcatcggccgcgctcttggtgctagccctcgcgctagtggcggccaccgccccacaggtagcggaggcaaagaagaagagagcggcggagagcggcgaggcggcggaggcgaagaagatccaggacgacttctgctcgacgctgtgcgagggcaagaaggggacggacctggtcgtgtgcaaggagtcctgcgcgctctcccagcagtccaacctggtgctgtacggcaggatccagtgcaagggcaagtgcaccgagcagaagggcatcaccgcgccgcagatgaaggtgtgccaagaggcgtgcgacaaggactacgtggtcaaggcggctgaggtcaccaaggcctgcaacaccacctgcgccaaggagaagcagcctctgctcagcgagaactgcaggaggtcctgcacccctcctccttcctgaacgcagagcacgcccgccggtcgtcgtcttctgcctgcttgcgtgacactgaatcactgatacatcatacatgcatgcatgggatgcgatgacgatttgatgcatgcatgcatgggtatacctaccaatttgatgaccgacgatgtatagtttcgtcgactgcttcatacacatatatagcagcccaattaatgtaacgtcacgcaaataagcatttgcggtaattttttgtctcgttgattcgatgaataaagggcatgcttgagagt

SEQ ID NO: 103860 - DNA, 504 bp, Zea mays
  unsure (1)..(504): unsure at all n locations
  Clone ID: MRT4577_26224C.1
ngctatcacgcggtggagagagtcgcatacacaggcccaaattctaagtgccccagagagcgcccagacacgcaacttggctgtactcagagacgggcctattatgtttcacatacaccctaaaacgcgtactggtgacctgaatgtagcattgagcacacccagggcaattcttggatgaccaaaaaaacaaaccactggagcgtctcactatacataaaatctatgatcacttgactagagaatgatgactaacttgcaatatatccatatgtcatgaatagggctgatgacatcgtactcgtttatgaacatccatggacggccgattagccacagaggcatgacagctacgtgatcctcgcggcagtacatctagcctcgatggagagaaagcatatcgtatggttacatgtgcttattgcttgcaaacaaaaatattatattggcgtgacatgtctagtaggactgcaagtattacttacctcactgcttgactagcga

SEQ ID NO: 103861 - DNA, 891 bp, Zea mays
  Clone ID: MRT4577_26225C.1
aaaaaaaaaaaaaaaaaaaaaaaaaaaaaaaaaaaaaaaaaaaaaaaaaaaaaaaaaaaaaaaaaaaaaaaaaaaagcaaattaaacctatcatcatcttctccgatccatcaacaatcgccgagagcgatcgagagataaataaagatgaagaaagtggcatcatcgtcagccgttctcttcgtgctagccctgacgctagtttgtgccccgcttatagcagaggcaaagaagaagagagtcgccgccgccgccgccgaggagaagaaggtgcaggacaacttctgctcgacgctgtgcgagggcaggaaggggatggacctggtggtgtgcaaggagtcctgcgacctctcacagcgctccaacctggtgctgtacggccggatccagtgcaagggcaagtgcaccgagcagaagggcatcaccgcgccgcagatgaaggtgtgccaagaggcgtgcgacaaggactacgtggtcaaggcggctgaggtcaccaaggcctgcaacaccacctgcgccaaggagaagcagcctctgctcagcgagaactgcaggaggtcctgcacccctcctccttcctgaacgcagagcacgcccgccggtcgtcgtcttctgcctgcttgcgtgacactgaatcactgatacatcatatatacatgcatgcatgcatgggatgcgatgacgatttgatgcatgcatgcgcatgcatgggtatacctaccaatttgatgaccgacgatgtatagtttcgtcgactgcttcatacacatatatagcagcccaattaatgtaacgtcacgcaaataagcatttgcggtaattttttgtctcgttgattcgatgaataaagggcatgcttgagagaaaaaaaaaaaaaaaaaaatttgcggc

SEQ ID NO: 103862 - DNA, 230 bp, Zea mays
  Clone ID: MRT4577_26226C.1
cggccgggccgggacctactagaacgggggcgatgagggatatttctccacgtggcctaaaccactggaccacattagacatgatgggtgcgctggcttaccatctacacaagcgggatagagaacgacataatttgtggcaaagggaaaagtctatctcgcgatcccccgccaaatcttataactatcatataatgctatctttatttgcgaaaaaaaaaaaatgagaa

SEQ ID NO: 103863 - DNA, 314 bp, Zea mays
  Clone ID: MRT4577_26227C.1
aaaaccaaaccgggccaaattcaatcaaccccagaacgatttgaaacgggtccctcggggggggggttgttttcgggcttaaacgggaaaggggccacccaggtcctttggggactatgaaacttaatggccggccaaacacaatgggccggggcaatgtatgcaccccttaaaagggcaaaaaaaaaaattttaagcacgttcactaaatgccggcagggggtgaacaaactcctttggggggaaagctttaaaaacccgggcatttttttttacaacaccaactttgatctcagggggcttgaaattttcct

SEQ ID NO: 103864 - DNA, 461 bp, Zea mays
  Clone ID: MRT4577_26228C.1
cttttacactgcaccgaccgccactccaaggtacccccaccccccgccatcaatgagcaccgccccagcgagcccccgcccgccgactttcttattttcgccgtcctacctacgagccgccccggctcccacagccgcgctgctgcctgtgaccaaggtggccatcatggtccgtagcgctagcaacaggggttggctgcgcgcgcatgccaactacaacgtgaagctgatcacgccggtgggggaggtggagctgcaggtgcccgacgacgtggacatcctggaccaggccgaggaggacggtatcgacctgtcctactcctgacgcgcgggggcttgctcctcctgcgccggaaaggtcgtcttcgtatccatggaccagtccgaccagagctaccccgactacggtcagatcgccgccggctgggtggtcacctgccaagcctccccacctctgacga

SEQ ID NO: 103865 - DNA, 296 bp, Zea mays
  Clone ID: MRT4577_26229C.1
aaaagaagaatatattattttgtacctttccgtgtacagagatgtctcgattggttcctgcgattcaactgacgtttttcaagccacttgaaacaattgtttaagcactacaacagtaactgcttttgcagggattgtgagccatcgcctcactgcttattatattctcttagagctgagccatcatcaagttggtttttggacagctgcttgatgctatcaccaagtagctcggagtcaggggccgcctatgcatcatcctgattccaaatcttgaacgcaaaaaagcttggatc

SEQ ID NO: 103866 - DNA, 1143 bp, Zea mays
  Clone ID: MRT4577_2622C.1
aaattccaaaaaaaaaaaaaaaaaaaaaaaaaaaaaaaaaaaaaaaaaaaaaaaaaaaaaaaaaaaaaaaaaaaaaaaggaaaaaaaaaaaaaaaaaaaaaggccggaagcctacgcgcagtcgcagagagaccatcccgccacggcagcaggggaagcgagcctagccagccaaaccggggccaggccaggccgccagggggacgggacgggacggaaaggaaaccgccgccgctacctgacccctagtgtccggatttaacttcaaacatggcggacgtcgatgtcgagccggaggtcgccgccggtgctcccaagaagaggacgttccgcaagtacagctaccgcggcgtcgacctcgatgcgctgcttgacatgtccaccgacgacctcgttcagctcttcccagcgcgcgccaggagaaggttccagaggggtttgaagaggaagcccatggcgctcatcaagaagctgcgcaaggcgaaaaaggatgctcctgtcggcgagaagccagagccagtgaagacccatctccgcaacatgatcattgtccccgagatgattgggagcattgttggtgtctacaatggcaagaccttcaaccaggttgagatcaagcctgagatgattggccactatcttgcagagttctccatttcctacaagccggtcaagcacgggaggcccggtattggtgccactcactcctcgcggtttatccctctgaaatgagttgttacccagatctgtagcgtcccaagggtgtccagtggcattgccctttcagctttgctgcttgtttcgaacaagttacatacccaagacattttgttctgtttccagcactagatttcaaagctaagcattgcataactatgctgttttgttggaagtatgtgagtataatcttatctaatatgtgatgttacgttctttgttgtttccatgattttgggttgcttatttctgaaattctgaagatgaggcttacaactctggtgtttgctgttagtggaatcattggatttaaatttgaagaagtcaatttattgggcgctcgttttttttttcatttacgaggaattgtaatttactcaataaagtagaccattggcttgaaaaaaaaaaaaaaaaaaaaaaaaa

SEQ ID NO: 103867 - DNA, 261 bp, Zea mays
  Clone ID: MRT4577_26230C.1
atcgaaatatattcgtcatgctaaagctactatcacttgaaacaccaatctctggggaggaatcataaacaaaggtggtgaatattaatctcactacatgactctacaaacaccttttactaatgctcttatattctataactaaagtgttactctactaataattacacatttaacatctatctatatttctcacaattatgtattcactctcctagtccgaacatctaacactttcaaacctcatcttattgatccatc

SEQ ID NO: 103868 - DNA, 186 bp, Zea mays
  Clone ID: MRT4577_26231C.1
ttcgcagatgtggatgcctttgaactggcggaggaggaggtatcagaatccgagctggagtgaaacctgagagctgaaggtcttccccagaactacgtacgtgtcctgcctccatgtacaggagtagttacttgtacggcgatgggcggccagggcccagggttatgttatcgatgtataggcata

SEQ ID NO: 103869 - DNA, 390 bp, Zea mays
  Clone ID: MRT4577_26232C.1
cacaagcatgccatgttctacaaccaaggctaatttctctccaaactgaataatacctcggaccgcaaatcacaataagctaaatggcctgtcaagacacaaatattaatggactttggaggaccattgtgccaagttaaactgatgttttacctaggcaaggccctaaaaaagggtttcaaccggaccgtatccttattgaatccagttcatataaaaacgcatcctgctaaattaaccatactcttatataaagaggggaccctctgagagagcaatctgtgatcaggttgacaataaactgatagatagacgattccagcgcgcgcaacacaatgtgtgcactgtcacatctttttgttctagcacatacatagaaggatattgctt

SEQ ID NO: 103870 - DNA, 455 bp, Zea mays
  Clone ID: MRT4577_26233C.1
gcggcccggccttttttttttttttttctgacaaggctttcttgctagctttttttgggcaaatgacgaacaagtaacagggggtgttctcttcagaaaaccaacacaaacactaagtgcttaaacacgcatccaccaaggatcataaatcaccattctttttatcaaaggtgaacttcaccttcaaatacatattacataatgctttacacatgcatcaagagctatataacaccattccatggccattgtctgattctaccaattgcacgacaacttgctcatcatcaggcactgacttatctgacaccattgacgatacaaaggggccgattttatcctttccatgttgccacagctttttgttcaaatataaagacaaggttggctcgggtcccttgcttagtttgccaaatgccgccatagtaccttcaaacctatatttatctcgccta

SEQ ID NO: 103871 - DNA, 304 bp, Zea mays
  unsure (1)..(304): unsure at all n locations
  Clone ID: MRT4577_26234C.1
aacaatttgtgcttgaggttatccaccccggccgcgccaacgtctccaagggcggagttgaggagaggcttgccaagatgtacgagggtgaggaccccacaccatcttcgtncttcagttccgcacccacttcggtggaggcaagtccactggcttcggcctcatctacgataacctcgagtctgccaagagttcgagcnncaatacgctcatcggaatgtcttgcactaaggtgagagtccgaagcaatgaagacggagacaggccagagtcgtgtgtcagagccagctgtgcgcagagagta

SEQ ID NO: 103872 - DNA, 393 bp, Zea mays
  unsure (1)..(393): unsure at all n locations
  Clone ID: MRT4577_26235C.1
gantancgtcagggaangagntgttcctggacgcacgggagntccagttcatcgccttcgcctccatcaacagcggcatgcgcgtgccgggcacgcagtacgcgcccaccaaggccaacgtgcgccggtggcagctcgagcgcacggtgcggggcacgctcatggccatcatcgacgagcgcctcgccgccgcgaaggaggcgaaggggtacggcagcgacctgctcggcctcatgctggaggccaacncnnnnnnncncggcggcaagaggcagcagcaggccatgagcatggacgagatcatcgacgagtgcaagaccttcttnttcgccggnccacgaaacgacctcgcactcctcaactgggccatgttctcctnggnaagcaacnccg

SEQ ID NO: 103873 - DNA, 2011 bp, Zea mays
  Clone ID: MRT4577_26236C.1
ccgggcaacaaaggcgcctgcatcctcttgttcccgccgtctgcacgctgtcagagaaacccctcccgaaacccccgaaaatggcagcctctcacgcgccggcctccgtcgccgccgccacggatggtgtcatcgaggaaaacgtgatggcaatcctcgactcctccggcatcaaggactcccgcgacctccacgacgaccgagccgccttcttggaggccgtgcgctccacctgcctcgcctccgacaacccatcggtcccatcgtggagaatgtatgatggtgttttccagatacttcaaaacagtagctctcttgagcttgctgtggcaagtttccatctcttaacagaattgggcaagcaatatccaagaacatatgtggcagattctggtggacaccaatctttggtggtagttaaagagtcctgggtaccttttctctttggcaatggtgctgttagtagtgagattgggggaaacgtgaggagctcagatcacctatttgatccttcaagattctcgttgctgattgaggctattgtggaaccgacaaatggcacggatgataataatggaattaaggctatcgagaatatgatgctggtggcagtatcttgtcaacacacttgaagcagattttgtgcctcgccaaattgcaaccaaagagtcactagactgggtgattttcagagagtctctcttaagtatgcttctgggatcacgaaagctcgtgttcaaatcttttgtgaagaactgcatgtgtattctactcaaccagtattaccatgaagctaaagatgattatgaagacatcataccttctgaaagagaaactgaatcaacatcttatcacaatttctccctaaactatttgtcctttgagttaaaaaagacactcatttctctcaggaaattatttgtgatggttatgaaacttgacttgaccaggaaagaagcagacacattagggttaacctcaagagctgacggattcagaaactctatcatggatattattttggatgaactaacttacaacagcagttatttatccccatttctcttggcctttgtggaacggaagtggaaattggagattattttgcagtacttttcaaaaaattgtggcaagggtgcagtccgtactcgaaggtctgataattcacaagaagatttgaaactggaaaacgttctgagtttctttttgacagccacaagtgcaaaagctattgtcagaaagatgagtgcagaaattgcccagcttcttttaacacatgcttaccaggcgtgcctttctgctgaagatgccaacagcaattctgctgatacacccgaaaaagttggagctactctccaagagatatcttccaacttcatagctgcttttcaaaacatcagaaaagttagcccggatatccagatatcaccgttcgagaaagaagctctgtttactgctgcaacgttggttaggaaattaaaaagcaaagaaagatagagctgaggctcccgcttaggatgtgatgggttcagatggtgtagctccctgggcattggtatcatcctaaaagttgttcatattttgggttatgtgtcacgattacggaattaccccgcctccagtagccagtgtccgcctcccctactggaaagttgaaggtacataacttatgcggctgttgcatatttacgagtggttgcatgtgtcgggaatatggtcttagaacctgattgtgggtcatctgatcaacccaactaacccccgacagcaacggaattcgagctcgggcccggctctgtccgtactcgaaggtcttataattcacaagaagatttgaaactggaaaatgttctgaatttctttgtgacagccacatgtgcaaaagctattgtcagaaagatgagtgcagaaattgcccagcttcttttaacacatgcttaccaggcgtgcctttctgctgaagatgccaacagcaattctgctgatacacccgaaaaagttggagctactc

SEQ ID NO: 103874 - DNA, 543 bp, Zea mays
  Clone ID: MRT4577_26237C.1
gggggggggtggttttttttttttttttttttttttttttttttttttttttttttttttttttttttttttttcttttttttttttttttaagaatcggcccttgaaaagcagggtctatatttgaccccaccgaaaccaaaacaaaggggcgaaaacgatggccaaaaccccggtccgaacccaccccccccaacccaaaaagcataaaaggggccactaaaacaaacacccacccatccactgaattacaaaggcaaaaccaacaaccgaaatacaagggccattatgaaaaaaaaaaaaacccagtacaggtaacctattggaaaaaaactacaaaaaaacatgcccttaaaaaatgcaaaacttgcttaacaagtttttttttcccccaaaaggggacaggcggagggcaaatgaccccagtgggcccccaaaaaccctgatctccccaaagaaacgggcaaattcaccgaaaaaaccctccaatgggtcctgaaaaacaacaaaaattgcttcggcgggttaaaacccccctggttt

SEQ ID NO: 103875 - DNA, 832 bp, Zea mays
  unsure (1)..(832): unsure at all n locations
  Clone ID: MRT4577_26238C.1
ggctattttttatttaaggaggttttatctagacatgtggttgttgttctagttacatggcactcatgtgccttgtgtaatttaattttgtgctgtgaaacttttgtcgacaattattaacagggatcacgaaagctcgtgttcaaatcttttgtgaagaactgcatgtgtattctactcaaccagtattaccttgaagctaaagatgattatgaaggcaccataccttctgaaagagaaactgaatcaacatctgatcacaatttctccctaaactatttgtcctttgagttaaaaaagacactcatttctctcagaaaattatttgtgatggttagtgttcagaacttggtgataactgtactctagtgctaaactgctaaccatcattcatatataggttatgaaacttgacttgatcaggaaggaagcagacacattagggttaacctcaagagctgacggattcagaaactctatcatggatattattttggatgaactaacttacaacagcagttatttatccccatttctcttggcctttgtggatcagaagtggaaattggagattattttgcagtacttttcaaaatattgtggcaagactggtggggaaaggcaagccacatggttgtcaagaccagaaaaaaggggcttaactctctgatcatcctgngggctttggtgtctatggcttcagagaaacagaacagtttttcatggngagtcaccctcattacccaggattttccggtgtttctcggatgagtacgtttgctgggtatggcaggagctaaggagtttgggggctgggctcagttgctgccct

SEQ ID NO: 103876 - DNA, 893 bp, Zea mays
  Clone ID: MRT4577_26239C.1
ccctatcgtccggtccgtactcgggggtcgggtgggtcacaagaagattgaaactggaaatgttctgaatttctttgtgacagccacaagtgcaaaagctattgtcagaaagatgagtgcagaaattgcccagcttcttttaacacatgcttaccaggcgtgcctttctgctgaagatgccaacagcaattctgctgatacacccgaaaaagttggagctactctccaagagatatcttccaacttcatagctgcttttcaaaacatcaggaaagttagcccggatatccagatatcaccgttcgagaaagaagctctgtttactgctgcaacgttggttaggaaattgaagagcaaagaaaggtagagctgaggcccccgcttagggctggtttggtggacatggaattggagaggatccaacgggggagtaatcccctccttattcaaatttaaatagggaggagattcctcccacgtggattccctcaaattccctgtccaccaaatcagcttttaggatgtgataggttcagatggtgtagctttctggccactggtatcatcctaaaagttgtttcatattttgggttatgtgtcacggttacggaattaccccgcctccagtagccagtgtccgcctcccctagtagactagcggtactggtctactggaaagttgaaggtacataacttatgcggctgttgcatatttacgagtggtggcatgtgtcgcgaatatggtcttagaacctgattgtgggtcatctgatcaacccaacctaacccacccaaaacatcctgatttagggtgagtttgggtgaagagtggagaagaatgaagtcctattttctaaatctttagttctcaacaaaaaaaaaacacacaaaac

SEQ ID NO: 103877 - DNA, 286 bp, Zea mays
  Clone ID: MRT4577_2623C.1
ttatttttttatgttcattttttttttactgcaaggagcggccgcaggacaagcaactcgcgaaggagatacacgtgcacatactagaagaagaacacatacatgtcgtaaagagagacttttaaaacgcccgcaaaggtcaaaaccaagggaaggccgccccagaccaatgcggcgaccgtgcacgacaacgaaatatccgggatgaagcagaaactggggaacttgtaatgcccgaggacagctgcactctggaccagacccaagtctcaaaacttaacgtata

SEQ ID NO: 103878 - DNA, 485 bp, Zea mays
  Clone ID: MRT4577_26240C.1
tggcttggaacctttgggctgatttatgtgcttgactaaacttatggcccaacaatgaattgcgccaatccattacaataataatctaaccttcactgaaccttccttcactgaaccttcacagcaaaaccttcacaggacagaatgcatatagggcgcatataccacacacgaacgaaatacacctaccaatccaagtacatcttcccccccacccaacgagccgacaccaaccaaacactcccccccccagacccccgtaaaggccctacccatgttcaacttacactgagcagatttcgctgccgcgagaacctccaacctacgagccgcagggagggatccacgctattataaatagaaatcaaagtaagcgccggacccaaagtcggcgccaaggaccacaaaccgatccatcatattttggagcatgaaattaaggacatcgacactccggtagtaccttgagcaatcttctagtctgg

SEQ ID NO: 103879 - DNA, 175 bp, Zea mays
  Clone ID: MRT4577_26241C.1
gtggcgtggcgtgtcgtgtgctctgtcgtgtcgtctcagcaggtgtcagtgcacctggtaatgttcgcctcctgccttcgatacgagatatgagggaagaaggcgcgtggggaaaggaggggtacatggtggtcggcagatcgtggagtagtgcgtgtcggtgaaggcggcggcg

SEQ ID NO: 103880 - DNA, 285 bp, Zea mays
  Clone ID: MRT4577_26242C.1
cggcacgaggtcggcggtgaagttgtctagtccacgctcggagccatgccgtccaagggcccgctgcagtctgtgcaggtcttcggacgcaagaagacagcgacagctgtggcgcactgcaaacgcggcaatggtctcatcaagctgctggagccagttctgcttctcggcaaggagcgatttgctggtgtagacatccgtgtccgtgtaaagggtggtggtcacgtggcccagatttatgctatccgtcagtccatctccaaagccctggtggcctattaccag

SEQ ID NO: 103881 - DNA, 517 bp, Zea mays
  Clone ID: MRT4577_26243C.1
gaacaggcagattgcataaatcgccacattacagctagccgcaaaaatcgttcatgaactataagcatgatgcacacttaaaaacatggcatccttaaaacattgttctatactctagcaaagcacctagaacaaaccctcacacactacatgcacaggatttatgcataggctgcagactgggcagaaggcatccctccaccttagatcttttatgatgctcacattgattcccttgcccttgggcaggctcacccacggtttattaccctagccgctggcgaacacgacgcccatacgggaggcaaactggtggcccaaggagtcctacacgggaatgggctaaaacctggccttgctcttgcttcctgttcttgataacacccaccggtcatgtactacaagcgccgtcggagtcaccttatccgccgccaccgttgccaccaacgtatccgacaacaccaccaccgtagccgtcgtgcacaccaccggagccgcctgcagcgacagtaccgac

SEQ ID NO: 103882 - DNA, 172 bp, Zea mays
  Clone ID: MRT4577_26244C.1
ctcctttcgtcataaacaagacattcgatggaccacgactacatccttatgagatggctgctggaaaaaccccagagctgtacacgggatcacatgatgcgcttacaacgaaaaggcgtggacagatggttgacatggaatctaacgggacgcttgcgacagcatacttcta

SEQ ID NO: 103883 - DNA, 367 bp, Zea mays
  Clone ID: MRT4577_26245C.1
ggtaaaaaaaaaaccgatctccaaccccaatttttagagggggtgatccccattggttttttgcttacatttttaattttttttacattttgcaggggaagacaattgaacacagggcagggggtaaactttttttaataacaaagaaagcgttggttttttttcggggggggggggcccttaattacggggggggggcgaaatttttttgatgcgccccgagccgaaacccaccccaaaccgggtgcatggaacaataatacccggcggggccaaaaaagggaagaacgaagggggaaaaaccctggcccctccctgtgaccccttgttgatcaggaggggttgacctggggggactttttccttt

SEQ ID NO: 103884 - DNA, 418 bp, Zea mays
  Clone ID: MRT4577_26246C.1
gttcccaccgttcaaaaaaacaaacctaccgattctgtaaaacccgcacgggccctaatgggacaagaaaaaacctaacagccaaagactgcacgttagcggctatacaccagcgaaaacaacaagcgatcctggtccttcgccgctattattattcaaccagcgggggcacccaggcgtatatgaatgccacgcaaaaaacgagccgggcactaggtggcatgctacgaagacgaagaggctcagaaccctcgcaggtacagcctcattagcctgcataatgcagcgctgctcctgcgcgtacagaggaagcaaaaagagcttccggcaggaagagtgggacgtgatcacccagtcgacctgagaaggggccagaagcgcggtgaatatcagggagccctgatagggagcccccggt

SEQ ID NO: 103885 - DNA, 385 bp, Zea mays
  Clone ID: MRT4577_26247C.1
tttcggacttcaagaaccaccagttgcctctggcccggatcaagaagatcatgaaggccgacgaggacgtgcgcatgatctccgccgaggcgcccgtgctgttcgccaaggcctgcgagctcttcatcctcgagctcactatacgctcctggctccacgccgaggagaacaagcgccgcaccctgcagcgcaacgacgtcgccgcggccatcgcgcgcaccgacgtcttcgatttcctcgtcgacatcgtgccccgacctccgagtgatcgatcggcgcgtctcttggccctggcctcctggcttagctacatgtgcatgatgtcaatcgttcaatgtgccatgctgtgtatactctacagaaacgtggtaatggagctgctatg

SEQ ID NO: 103886 - DNA, 459 bp, Zea mays
  Clone ID: MRT4577_26248C.1
agcagtggtaacaacgcagagtacttttttttttttttttttttttttttttttactttttttttttttttttttttttttttttttttttttttttttttttggaataaaaaaggcccgaaatcgcccaaattatgggattttaaaggacaaaaagacagcaaagtttccatgggggcacacaaaccccacaggggaaggccaacacacgccttaaagcataaaacaggagtatttacgaatctaccaaacatgagtagcagcccacaggacaaggggtcattggggctaaacagcaaaagccggaatcgcatttgaaaaagccggaaacaacctttaagccgggggcctaaagctcggggaggggggaaaaaagggcatcctcggggactttctccttatccttggcggaagggatggggtgggcggttgcctgcggaaaaccgacggaaacccccg

SEQ ID NO: 103887 - DNA, 1560 bp, Zea mays
  Clone ID: MRT4577_26249C.1
accacacgtccgcccacgcgtccgcctacgcgtcggcggactcgtgtgccgaccacgcgtccgggcttggcttgggactgggccgcccggccgcgaggaataaactcactcctgccttcatacgtatccatagccgcggcagtacgtgtatgtggttagctatacgcgacctcagctcgggcgcaagctacaaccccgaccaggcgagaagaagcatcgatagtgtgacgagctaacccaccagcagcaacgtaatccaaatccatggacaaccagccgctgccctactccacaggccagccccctgcccccggaggagccccggtggcgggcatgcctggcgcggccggccggcacgagaagcaccttcctcttcctcttcctccgccccccaatccccctcgtctcacaaccctagctgcccccgaatccatggatcctaacaaatccagcaccccgccgccgcctccagtcatgggtgcccccgttgcctaccctccgcctgcgtaccctcccggtgtggccgccggcgccggcgcctacccgccgcagctctacgcaccgccggctgctgccgcggcccagcaggcggcggccgcgcagcagcagcagctgcagatattctgggcggagcagtaccgcgagatcgaggccactaccgacttcaagaatcacaacctcccgctcgcccgcatcaagaagatcatgaaagccgacgaggacgtccgcatgatcgccgccgaggctcccgtggtgttcgcccgggcctgcgagatgttcatcctcgagctcacccatcgcggctgggcgcacgccgaagagaacaagcgccgcacgctccagaaatccgacattgccgctgccatcgcccgcaccgaggtattcgacttccttgtggacatcgttccgcgcgacgacggtaaagacgctgatgcggcggccgccgcagctgccgcggctgccgggatcccgcgccccgccgccggagtaccagccaccgaccctctcgcctactactacgtgcctcagcagtaatgtatcatcatcacgttattgttccgtctatgtgcctgagcaataatgtatcatcattgccttattgttccggggcagttgtgttatttgtgtctgtttagttgctgctgctgttaccgcgtaatagcatatgtgttatttgtgtctgtttagttgctgctgctgttgccgcgtaataaaacttggtcatttacggggctccctcaagattaagaattgagttgtttgatggtagaatcctggtaaggttgttgtaactggggggcgcctttgtttgggctggtagtgtatgcctaggcctcacttatctgatgctgtaatgcgacaagtattatgtggttgtctggtaattattgtccaattactgctcttcaaaaaaaaaaaaaaaaaaaaaaaaaaaattcagaacgaataaggcggggcgtgtgaggccgtaagagtacgtagtactaatatgtagatgcacgtgacgtgcctattaatcaaaccattaactatgctagttaattaaattagatcctctct

SEQ ID NO: 103888 - DNA, 319 bp, Zea mays
  Clone ID: MRT4577_2624C.1
agagaaaccttttaatagttcgtctgtttacttgtgtcctgtttctttttttctgtctccggcgggccgactcccaggggcaccctaaagaagaagcaatgcaaggactgtccgaacaaccattgttccccggccacgtggaaaagtccaccgccacctggtgctaaacaagttccttctgttcatgctcaggcaggggccgagccttcatggtcaggatccggcattttttactctacacgaacatcctcaaggaaagctttgacgactggcaccctttacttaacatgtcgacgtgcatgtccaatctgcttctata

SEQ ID NO: 103889 - DNA, 883 bp, Zea mays
  Clone ID: MRT4577_26250C.1
aattaaaggacaggatgtagcccttcccaagagcaaatacgaagaggacggtatcggtattcccggcacgagtgtgtggggttcatggtggaaagatcatcaatggggctacaagtgctgcaagcagactatcaagaatagttactgcacaggcttggctggaatagaagctgccgaggcctcagcagatctaatgaaggccaatatggcccgcaaggaggctgcagaagatgaacctgtacagcatgaagagaagcgactagccacttggggaaccgacgtgcctcaggatcttgttcttaatgagaagaagctggaggaatctctaaagaaggagactgcaaggagaaaagaggagaaggatgaaagaaagaggaagtataacgtgaagtggaacgacgaggtgactgcagaagacatggaggcttaccgaatgaagaggattcaccatgacgatcctatgaaagattttctcaactgaaaagtgtggtagataactagatgttcatgccactgtatcacattggttgcaccgtgccttgcatcaatgttgtgttactgtagggtggctacgcctgtcctaaggatatggccagcagaccgtgcatgtggcagtgtgtgttacacttaaaatatgatatgggatgggtaaggctggagataacttaaccagagtggtggtggtgctgtgatctagtggcagaatgtaagaaactggctacaccttttacaagctgcgtgttggaaagatataaggaaaaaaaaaagcggttaaagctagctaacagttgcagttgtaatctatggagagaaaaatactgtaaaagtagtataagctgatacaaactaatgccaaacgaacaggctgagccataattttatg

SEQ ID NO: 103890 - DNA, 487 bp, Zea mays
  Clone ID: MRT4577_26251C.1
cggactcgtgggcggacgcgtgggcagtttttgacacagactggtctgatgttgattgtcacatttttgtagcacatactcttaatgatcgggccaaaaagtctgttttcttgaatggttccttcctatttagggttgatatgtagtatcactgttgctgttgcacttttgtcacttgtttcatttagtttatggaattgtgccgttttctaatcggtaatggtagattttcatttctttactatttattgatttgtattacttgtttctattattatttttcattgttttattattctttttagtttttcttttttcttctttggtttttatttttgtttttgttttatgttttttttttttttatcttattattttttttgtttttttatttttttattattttttatttatcttatttttatttttttattttttttttttctttttttattattatttatttttttttttatttttaattttt

SEQ ID NO: 103891 - DNA, 321 bp, Zea mays
  unsure (1)..(321): unsure at all n locations
  Clone ID: MRT4577_26252C.1
ccacactgagcgcggggcgaccaagaccggggcgtgccggagcgcctcgcgccngccacatgngnggctgacgcgaacaagngccctctatgttttttttctcctatagcttcccttcttccccttgggggggggggggggctcncnttccntgccnaaaacccctctcttggctctcttggcttcaacatgcacttgtgtgngcgacatacctttatcgcccttgttttttctgctctcttcagtcctctctttggtccggtcgttgctgctgtccctcagggcgcatctgctgcatcttctctcgcttcctgtggtcat

SEQ ID NO: 103892 - DNA, 2484 bp, Zea mays
  Clone ID: MRT4577_26253C.1
ctcgaggccggccgggtttcgccgcctcgtttcgttatttgtttcgttatttcgccgcctcgttttgttatttcgccgccgttcgccgtcgtacagccgagccgccgccgagtcgagccggcaaagcgaagggaaggagagcggggtgaagaggagaggactccatggcgacagcctcagtgactttcaagtcacgggaggatcaccggaagcagctcgagctcgaggaggcgcgcaaggccgggctcgcgcctgcggaggttgacgaggatggaaacgagatcaatccccatattccccagtacatgtcctcggccccatggtatcttaatgctgagaagccgagtttgaagcatcaacggaagtggaagtcggatccgaactacaccaagtcgtggtatgatagaggcgcaaagcttttccaggccaacaagtacaggaaaggtgcttgcgaaaactgtggagccatgacacatgacaagaagtcttgcatggagcggcctcgaaatgtgggggctaaatggacaaatgtcaacatagctcctgatgagaaggttgaatcttttgagcttgactatgatggaaagcgcgatcgttggaatggttatgacccatcaacctacactcgagttatcgctgattatgaagctagagaagaagctaggaaaaagtatctgaaagaacagcagctcaagaaacttgaggagaaggatactgagaaggatgatgagaacgctggtagtgaagatgatgaagaagatggcctgaggatagatgaggccaaagttgatgagagtgcccagatggacttcgctaaggtagagaagcgtgtgcgcacaaccggtggtggaagcactggtactgttaggaacttgcgtatcagagaagacacggcaaaatatcttttgaatcttgatgttaactctgcatattatgatccaaaaacccgctccatgcgtgaagaccctttgccagatgcagaccccaatgataagttctatgtcggtgacaaccaaaatcgtcttagtggtcaagctctggagttcaagcaactcaacatccatgcatgggaagcttttgaaaaggggcaggatatccatatgcaagcagccccatctcaagcagaactgttgtataagagtttcaagatcaagaaagaaatgttgaagtctgaacataaggataaaattatggagaagtatgggaatgctgcgtccgaagatgcaattcctcgggagctgctgcttgggcaaagtgaaaaagagattgagtatgaccgtactggtcgaataatcaaaggacaggatgtatctcttcccaagagcaaatatgaagaggatgtgttcattaataatcacacgagcgtgtggggttcatggtggaaagatcatcaatggggctacaagtgctgcaagcagactatcaagaatagttactgtactggcttggctggaatagaagctgccgaggcatcagcagatctaatgaaggccaatatggctcgcaaggaggctgcagaagatgaacctgtacagcatgaagagaagcgattagccacttggggaaccgatgtgcctcaggatcttgttcttaatgagaagaagctggaggaatctctaaagaaggagactgcgaggagaaaagaggagaaggatgaaaggaagaggaagtataacgtgaagtttaacgatgaggttactgcagaagacatggaggcctaccgcatgaagaggattcaccatgatgatcctatgaaagattttctcaactaaaagtgtggtaaatgtccgcactgccgtataacgttggtggcaccctgccttgcagtgaagctgtgtaattgtaagatagactatgtacctgtccgaaccagggtggtgctgtaaactactctagtctagaatggctatgctttttacaagctgcgtgttgaaatgacatgatttctgatatcagaatccttgcttccatagttcccgtatccaagacacgggagccttcttcaggtgtatctaaccagaaacatgtggacatttttaccttaaatttgaccgacccgtcttattctagaaaaaaaaaaaattttattattagaaaaatgtggtagataactagatgttcatgccactgtatcacattggttgccccgtgccttgcatcaatgttgtgttactgtggggtggctacgcctgtcctaaggatatggccagcagaccgtgcatgtggcagtgtgtgttgcacttaaattatgatatgggatgggtaaggctggagatagcttaaccagagtggtggtggtgctgtgatctagtggcgggatgtaagaaactggctacacatttttcaagctgcttgttggagatgtatggggctgtccgcgttggattaaagcgatctttgtgaaccgctgaagttgtgtgtccaaaatactgtaaaagcagtagaagccgatattaattaaacccacactgtttctgatattac

SEQ ID NO: 103893 - DNA, 538 bp, Zea mays
  Clone ID: MRT4577_26255C.1
catatcacagctgttcatattatggtaagcgtctccaaaatggtacagcggcaaagacagaacacaggcgatgccaagcacactcaccaccatcaggtaacggccgagatcgagcccggtgttgcgaggcggcaggagtactcactatatacaaaaaagaaaaagggaaaaaaagaaaagaacaacgcatctcatatgtcaaaacactatgcacaaacacaccactctcctgcaagccaagctcatctcaactgtgccatcgacgatcttattctcggacaacctcttctactggctccatacaccttggtggcttctcctctacaccttcaaaactggcaagacgtgcccagcctcggcatcgggcgctggccgacgccggcgctgtgcttccgggtgcggagggcgctcgggagcagctcctggaacttctcgaggaacgcgctccactccttgcggctcatgtccgacagcttcacgaaactcgcgctgggcgggagcagctcgttggcgctccggctcccggactgatgctcgc

SEQ ID NO: 103894 - DNA, 2747 bp, Zea mays
  Clone ID: MRT4577_26257C.1
ggacttggcccagacagttaacccgggggaaaaggacaaatcacacaaaggcacagggaatcgcgccaccgtgggacgcgtacggcgcaccgcccgcccgccggatctgcgccggcgacgcgcccggacgtcggatctacgccgccgcaggaggggggaggcggcgctgtggccgttctctgcccgcgagcgcccggatccgtcccgccgttgatgcagaggtggtgaaaacatcttctcttctccaaagactgctgactgcaagttgcaaaagtttgtcttcagcttgctgtgttctttcttccctctctggcggagtacacgagaagtttgtagatataggcactaggcagctcctttcagctcttctatgtccagggatttggactgtcctgttcagacacagatggctgtggcagtcctggaccggagcttcagcagtgaatatcctggaggcagcagaactgaggggaggcaactgagctggaagagagtctttgtgcaaactgacaatggttctgtccttggcattgagctggagagaggagaaaatgtgcaaactgtgaaaaagaagctgcagatagctctcaatgtgcccactgatgagagttcattgacctttggtgacctggttctgaatgatgatcttagcagcattcgcaatgactcaccgttgcttctcaaaaggaatcagattcaccgaagcaattccacaccttgcctctcccctactggccaggatgtttggcaaagagaccggagtggacccattgaaatacttggctgttcaagcccttcatctcggatgaagcagattgcgaaggatgtcattaaggccataatgaatggtgtcgacccagttgctattaacagtgggatgggtggtgcctactacttcaagaacatttggggagagcgtgttgcaatcgtgaagccaactgacgaggaaccatttgccccaaacaacccaaaaggttttgttgggaaggctctggggcagccaggcctgaaaagatctgtacgagttggtgagacaggcttcagggaggttgctgcgtacctcctcgactatgatcactttgcaaatgttcctcccaccatgctggtcaagataacacacaccatcttcaacgtgaatgactgtgttggctgcaaaagcaaagtattctgcaacaaatcagagtctgtgagcaagattgcatcactgcaggagttcattcctcatgattttgatgccagtgaccatgggacctcaagcttccctgtatctgcggtgcataggatcggaatacttgacattaggatcttcaacactgacaggcatgctggaaatcttctgatcaagaaggttggtcctggggctgacaatttcggagagcagacagaactcattcctattgaccacggtctttgtcttccagaatgcctagaagacccctacttcgagtggatccactggccgcagtcgtctgttcccttctccgtcgaggagctcgaatacattgcaaaacttgaccctataaaggacgcagagatgctacgcgtggagctacctatgatacgggaggcgtgtctcagggtgctggtgctgtcgacagtgtttctcaaggaagctgcagcgttcggcctctgcctgtctgagataggagacatgatgagcaggcagttcacagcaaaggaagaggaaccaagccagctcgagcttctctgcatggagacgaggaagtgggtcgaggaagagagttatttcttcccgacgaagccggagttgaagacggcgatgatgacttcacccagttccctctcgacagcgacgccttcgaaccgccagctttctgcaagtttggcagcgtgaagacaagttccaggaatccactatccaagctggacgagtgtgacgaggaagacggagacttgtcggaagaggagggcgagcacggtgacgtcctgaccagtggtgcattgccccagaaggttcctcccatctccaagctgtcgtcgtccatgaaggggcttggcttcatcgggaaatcgaaaccctaccgtacaggtggcgtccccaagggtaaggtgacaggtagaactaactacagtggcaaagccagcgagcatcagtccgggagccggagcgccaacgagctgctcccgcccagcgcgagtttcgtgaagctgtcggacatgagccgcaaggagtggagcgcgttcctcgagaagttccaggagctgctcccgagcgccctccgcacccggaagcacagcgccggcgtcggccagcgcccgatgccgaggctgggcacgtcttgccagttttgaaggtgtagaggagaagccaccaccaaggtaaaaaaaatggatgtatacctccgttttagctctggtgtcgtgcaggtgcagcagtcagcaggtattattataacaaaaaagcttgtaggtgtatggagccagtagaagaggttgtctgagaataagatcgtcgatggcacagatgagatgagcttggattgcaggagagtggtgtgtttgtgcatagtgttttgacatatgagatgcgttgttcttttctttttttttctttttctttttgtatatagtgagtactcctgccgcctcgcaacaccgggctcgatctcggccgttacctgatggttggtggtgagtgtgcttggcatcgcctgtgttctgtctttgccgctgtaccattttggagacgcttaccataatatgaacagctgtgatatgatatcgct

SEQ ID NO: 103895 - DNA, 234 bp, Zea mays
  Clone ID: MRT4577_26258C.1
ctgggaattcggctcgatggatgaatattaccggccctttttttgaacccctcaagagtcaacaccggagggggccgtttggacatcaagagggttatataccacgggatccgccacctgcttattcatacgcgctagcagacaactgaggccaaaacacgggagatgaacctgaagacatgtcaaacatgctcacaacgggatccacggactcctatcagaatctgtagccag

SEQ ID NO: 103896 - DNA, 112 bp, Zea mays
  Clone ID: MRT4577_26259C.1
ggagctaaagccatcacactggttgatagaacgtatgtcaagggagtgcttgcatggcacatatgtgcccaggaacattagttgcccgtggactcagacaagcttcccacgt

SEQ ID NO: 103897 - DNA, 747 bp, Zea mays
  unsure (1)..(747): unsure at all n locations
  Clone ID: MRT4577_2625C.1
agggtagcgcaagaagaaggctacatcccgctcccagtaacacccgccgacgccgccaccgccgctcccaacggcgcccgcctctactccatctcccttcccagcccactaaaacccgccgagaccaccacggtggaggtcttctacgtgctcacccactccctcgagcccttccctgccgagatcacccagtccgagtcccagctcgtctactaccgcgacagcgccgtcatcctctcgccgtaccatgtccaggagcagggcacctacgtcaagacgcccagcagcagggtcgagtccttcaccagggccgaccccaccagccgctcgggccctgatgtcaaatacggcgcgtacagcaaccagctcccatacgcctactcgcccatcattctgcattatgagaacaaccatgcatttgctgtcgtcgaggagttcgtgcgcaaggtggagatctcccactggggggaacgtccaggtcaccgagcactacaagttgaagcatggcggtgccaagcacaaaggagtcttttcaaggctcgagtatcaggctaggcaatctatcagcggagcgtcatcatttaagaatcttcttgcaaggttgcctccacgagttcattcagtctactatcgtgatgagattggtaacatctccctcatccatctgcgcagtgattcatacnagtcagaactagaaattgacccagatatccgcttttttggtgggtggcactgcactttcacatc

SEQ ID NO: 103898 - DNA, 636 bp, Zea mays
  Clone ID: MRT4577_26260C.1
ggtaccgggccccctcttcgagtttttttttttttttttttttttttttttttacaaagatgaagaagaaaagaacaacgcatctcatatgtcaaaacactatgcacaaacacaccactctcctgcaagccaagctcatctcaactgtgccatcaacgatcttattctcggacaacctcttctactggctccatacacctacaagcatttttatataatacctgctgactgctgcacctgcacgtcaccagagctaaaacggaggtatacatccatttttttttaccttgggggcttctcctctacaccttcaaaactggcaagacgtgcccagcctcggcatcgggcgctggccgacgccggcgctgtgcttccgggtgcggagggcgctcgggagcagctcctggaacttctcgaggaacgcgctccactccttgcggctcatgtccgacagcttcacgaaactcgcgctgggcgggagcagctcgttggcgctccggctcccggactgatgctcgctggctttgccactgtagttagttctacctgtcaccttacccttggggacgccacctgtacggtagggttttggattcccgatgaagccaagccccttcatggacgacgacagcttgg

SEQ ID NO: 103899 - DNA, 342 bp, Zea mays
  unsure (1)..(342): unsure at all n locations
  Clone ID: MRT4577_26261C.1
gggtggggggcaaaaactggggggcatcctttccactantaaataacaccttatacatagtataccacagctacagggagattcttggccatcaaaagggacacaagagtacgggggggcatggtacacaaactggaaaagaaaaatcatcggcatccaacccaaaaaaaaacaggggaaagacgctctgatcttccccccagtttggaatccggcaacacttggccccaacccccaatggggtgggtgcgggcctcctatttgggggttacaaaggaacacacccatacaaacacttggcggaacattggtaatggttcctttttggtggaacataaaaac

SEQ ID NO: 103900 - DNA, 409 bp, Zea mays
  Clone ID: MRT4577_26262C.1
gcgtccggactctcggacccacgacgagttaagcccggagggaaaaaggacaaatcacacaaaggcacggggaatcgcgccaccgtgggacgcgtacggcgcaccgcccgcccgccggatctgcgccggcgacgcgcccggacgtcggatctacgccgccgcaggaggggggaggcggcgctgtggccgttctctgcccgcgagcgcccggatccgtcccgccggtgacttcatctccgctaatccaacggataggcaaaactctaatctttgtcaaccatcaagtatatatatatatcaatcaaaatggtcctgtgatatcgagcttcacttgatgcagaggtggtgaaaacatcttctctattccaaagactgctgactgcaagttgcaaaagtttgacttcagctt

SEQ ID NO: 103901 - DNA, 2170 bp, Zea mays
  Clone ID: MRT4577_26263C.1
taacccctttctatgtgcttcaggaatatcaactactatgttgatgtaccagtggaattaaaaaagcaaggtgtagcagaagaccgcctgcagctgcttgttgatgtcactggagcttttaggccagggatactaacagctcttgttggagtcagtggagctggcaaaaccaccctcatggatgttttagctggcaggaagactggaggtctcatagaaggaagcatcactatatccgggtatcctaagatgggccagacttctctaggatatccgcatatggctaacagcatgatgtttcggcgacctgctccagcccctgcgagtcgccgacggactcaccttgcccacggttgcctttttcctttgatgcagacactcaaagggcttttgttgaagaggtgatggaacttgttgagttgaatcccttaagcggtgctcttgttggtctgcctggggtaaatggtttatcgactgaaccaagtaaaaggttgacagtcgctgtggaacttgttgcaaatccttctattgtgttcatggatgaacccacgtcaggattggatgctagatctgcagccattgtaatgaggacagtgcgtaatattgttaatacaggacggaccattgtctgcacaatccatcagccaagtattgacatatttgaatcttttgatgagcttttattcatgaagcgtggaggacagcttatatacgccggtcccttaggtgccaaatcgcgtaatctggttgacttttttgaggcaattccaggagtgcctaaaatcagggacggctataatcctgctgcatggatgttggaagttacaagcacccaaatggagcagattcttggagtggattttgctgaatactatcggcaatcaaaattatttcaacagaccagagaaatcgtcgaggccctaagcagaccgagcagtgaatcaaaagaacttactttcgccacgaagtatgctcaaccattttgtgctcagtatatggcttgcctatggaagcacaacctatcgtactggaggaaccctcagtacaccgcagttagattcttctacacagttattatttccttgatgtttgggacaatttgctggaaattcggttctagaagggggacccaacatgatatattcaatgcgatgggtgccatgtatgcagcggtgctgttcataggaattaccaacgccacttctgttcagcctgtgatctccatcgaaagatttgtatcttatagagagcgagctgctgggatgtattcagcgttgccttttgcattttctctggtcactgtggagttcccttacatccttgtgcagtcactcatatacggttcaatcttctacagtttgggatcatttgagtggacagcagccaagtttctgtggtacctgttcttcatgtacttcacgttgctgtacttcactttctatggcatgatgacgacggcgatcactccaaaccataccattgcgcctattattgcggctccattctacacgctgtggaatctcttctgtggattcatgatcccaagaaagcgcatcccagtttggtggaggtggtactactgggccaacccggtgtcgtggacgctctacgggctcctgacctctcagttcggcgacctggaccagcccctgcttatggccgacggcgtcacctccaccaccgtggtggctttcctggaggagcacttcgggtttcgccacgacttcctcggcgccgttgcggccatggtggccggcttctgcgtcctcttcgccgtcgtcttcgccctggccatcaagtacctcaacttccagcggcgatgagagagcaatgcaagtggttcagctagcttagtatagtagccaccgccgacagacccaccaaacggatcgcagcctactgtacatgcatacaccgatcgagtgcaggagggcagcagcgcaatgaattatgaatgcgatgtacctaccagcgcgtcgtattggcacagttaatttgcccattaccccagaacatttcgccgggggtaaataatcttccggtcggtcacgggagcgagagtgagaaaaaagtaaagggtactgtatagccagctattcatgtacttgctgcctaaaaaaaagcccctccatcgttatacggtggcgtcgcttcatgcaggtttttttat

SEQ ID NO: 103902 - DNA, 469 bp, Zea mays
  Clone ID: MRT4577_26264C.1
gttgcgctctgctccccctccggttcgggttcgggttcgagaggttctccggggttcggtttggggggtgggcgtatcggagacaaggttacgtgctgttgagtaccgctgcttagtctgtggtctcggctgcgccaactgacagaccactgcctccacaacgccttacagcacctactgggaagaccttgagtccaacatcattcttgatcgggagacgcatacgtccttcggcttctgcttcattaccttatacaccgaggaggcgatgcctaacgccatcgagggcatgaacggtagggagctggacggcccctacatcaccgtcatacaaggcccagtcccgcggcggtcgcggacgcggtgaccgctgctactgcggtggccgtggaggcggtggttacggtggtggccgtcgctttgatggcaggtgcggctactgtcccggcggaggtgtatacggtggctg

SEQ ID NO: 103903 - DNA, 380 bp, Zea mays
  Clone ID: MRT4577_26265C.1
tcgagcggccgcccgggcaggtacaagcttttttttttttttttttttttttttttttaatatttaaagcacttccttatctccgggaagccacaaaatcagacaaaaccttagtatcgaactaaaacacataaaaaatctaaagggggcaccaccactgatgggtaaggggggaaaactctgacgggtgcgacaaaggaagccgtttaaacggcaagatttgacaaacccataagagggcgcccaacaaccgctcattgggggggcacaactacaacaactgtaggagtgataaaaaagcaataaggctcacaccatgaagctggcggattggcagaaattagaagggtgcttgttcgtagatctaggaaagttcaatg

SEQ ID NO: 103904 - DNA, 779 bp, Zea mays
  Clone ID: MRT4577_26266C.1
gttcccccatccccactgacgcctcctccgcacgacacaccggcgccgcactcatcggagaggaggaagctcccgccccggctcgatccgatggccgacagcaaccttcctcgacgaatcatcaaggagacgcagagactcctcagcgagccagcgccggggatcagcgcttcgccctcggaggagaacatgcggtacttcaacgtcatgatccttggtccggcgcagtcgccctacgaagggggagtttttaagctggaactctttttacccgaggaatatccgatggctgccccaaaggttaggtttctgaccaaaatataccatcccaacattgacaagcttggtaggatatgccttgacattctcaaggataaatggagtccggctcttcagattcgaacagttcttttgagtatccaggcactcctgagtgcaccaaatccagatgaccctctgtctgaaaacattgctaagcactggaaatccaacgaggcagaagctgttgaaacagcgaaggagtggactcgtctgtatgccagtggtgcgtgacaacccccacgccgctcttgatgtaataacccatcatactttagccagcaatcaagtgccattttgttggtaagaacaaactggagatgtttgcgctggaagggagtatctgaatgactagtgctcgagctatttggttggttgtaacacctgtgttggttggttcccttcaccctggggcaccttctgactgatctgtatctgatagaactttctatgctcctcac

SEQ ID NO: 103905 - DNA, 331 bp, Zea mays
  Clone ID: MRT4577_26267C.1
cccggtcgaccacgcgtccgcacactcttatggagacgcccgggatcgcgagtaaccggcagctcatccttacacggcccgggcacaagctcctggtggggtggtactgtgacaccattaacatgaactccaacgcgcgccagatgcttgtcaacgcctgctgattcttagagaccaccgtctttctgtgcctagtcgcttatgagatgtcctcggtcatctacaacgagctggaacttcacagaggaggttttgcctgactacctaatcaagagagacatggccgtggaagacttcttgagcccgtacaaggtactgctgctggaggagg

SEQ ID NO: 103906 - DNA, 197 bp, Zea mays
  Clone ID: MRT4577_26268C.1
ttattttctcaagcggggcaaaaaagcgacagcccgaattgtgcttaacaagtacacatcatgcacgatttattctacgatcttcaaaggtatgcatggtttacacacacctcgtcaagatccatgacggtggtcggacacctagctgatagacactcgattgattcgagctgagcgtaccagaccccttggatctt

SEQ ID NO: 103907 - DNA, 391 bp, Zea mays
  Clone ID: MRT4577_26269C.1
tcggttgggatttctcataagtatctatttgcaagggtttcgcggtgggctttccaggagatcaaaaaatgcttgtggccagcaagggtcatattcaaataaactgttctacactttaaacatgcccattattttttactctgcgctgattaccaaactctattttatattccagcttttctacagggaggacagggggaactttcttggtaaccttcttgggaagaggaaggaggctgaatactctggccattctatttctggtggtgggcttgcttactatgtaactgccccatcaaggttggctgatgttcttgcaaatacatttcatgcactggtttatgtgggcttcatgctggcagcctgtgctctgttcttaaagacatggatt

SEQ ID NO: 103908 - DNA, 260 bp, Zea mays
  Clone ID: MRT4577_2626C.1
aaaaggcacaataagaatacaatgggccgaaacgcggcctgtttatgtacaaacaaactgaccgaatctgctgatggaaaagcactaacttagaagcttttccaaatcggggttcctgaagctgccaccggtaagtgacaggaggccaccaccatggaccctcgcctcgggaaacaacaagacctgcctgtctggctgcatgtacagggtcagtcggccaaagagggataatggagggaggaaccagggcctggggggga

SEQ ID NO: 103909 - DNA, 411 bp, Zea mays
  Clone ID: MRT4577_26270C.1
cccacgcgtccgcccacgcgtccgcacgatgatgtgacgtgatgtgcgcgcgattcgtgcttaggtgcccatcaggtggccgaggagcagggacgaggtctggaaggccaacataccgcacccataccttgccgctgagaagtcagaccagcggtggatggtcgtcaatggcgataagatcaacttccctggcggtggcacccacttccacactggcgctggctgacgtgaccaacgtttttcacctgccgtggtagatgctgaattttccaaatggtacgctcaacaatggagggaacatcaggaatgtgcttgatgttggctgtggggttgccagcttcggcgcttaccttctttcacatgatgtacttgcgatgtctcttgctccccacgacgtgcatgaaaatcaaa

SEQ ID NO: 103910 - DNA, 320 bp, Zea mays
  Clone ID: MRT4577_26271C.1
aaaaaatcacccactttaaatttttctttcagaaaaatggttaacaaaagcgaaacaggttttactagctccttacgggaaattttccgttcaaaaacccggggaacagccccctttttggggggtttaaacaccccttttttttaaactaggagctaaacatcccctggccaaaatccaataggggcccctgggaaaataaacatttccccccacccaggccgttttgttttgccaaaattgggcaaaagcagttggggcgcaaaaaaacaactgggatcgagcaggggaacatggccccccccggggccccggccggg

SEQ ID NO: 103911 - DNA, 279 bp, Zea mays
  Clone ID: MRT4577_26272C.1
agctgtattcgatggagtaaacccttccttgagctctgttaaaagtttgtttctgaatgagttaagttgctgggatagggctggggctaagcagttacctagcattgatcttcctgctgttttagtagggtctaggctgggttccaatctggtctagtgttttggcttgccctctgggcattgtactttggtcctcttgaacctttttcctctcttaaaataatggcgtgcatttctcctgcccgttcaagagaaaaaagtcaatgtccattctgaatt

SEQ ID NO: 103912 - DNA, 348 bp, Zea mays
  Clone ID: MRT4577_26273C.1
ggccaaatggttagggtttagcgcctaaattgtaccaaccggcccaaatttcaaaaagaaaatttttcatggttcagacacctgctttgccttatattaaccctaggttttacatatgcgccgattgtccaaaaagagaagtaaacaaaggggaaggcttcttctacaagggatggaacgtaagaaccttaaaataattaaacttcgggggggtcagttttgttaggagttaaattttcaacatccttgatgggccaaactaaaggccaattaagggggtgcataaccattaattcgtagattttggaacggggaccaggcttgccaactgaccctgggaatgttgta

SEQ ID NO: 103913 - DNA, 150 bp, Zea mays
  Clone ID: MRT4577_26274C.1
attggacactaccagtcagtggtggagctttcagcagaggtggtagaacacgtggagaagtataaggccactctgagacggttctttaagagtcgagggaaatggtgtgttgtatttgagagaaattataagagccatcacctccagcta

SEQ ID NO: 103914 - DNA, 353 bp, Zea mays
  unsure (1)..(353): unsure at all n locations
  Clone ID: MRT4577_26275C.1
ccgcccttttttttttttttttttttttttttttttttattttttttttctttttttttttttttttttgtaaggggcaaaaagaactgaagagggggtctcacaaaacttaanaaaactaaatcaatcaataatatgctatttaagtccaataactccatttggaacaaaacaccattttttttttttcccataatttctaacaaaataaccctaaaactaangggatcttaacctaaccaataattatcttcttttaaaaaccctttaaggtactttcaatttacatatctccctaaatcttactaatattccaaaaattttccttttaaaatccaccacaaatattttat

SEQ ID NO: 103915 - DNA, 267 bp, Zea mays
  Clone ID: MRT4577_26276C.1
cacatgtgtatgcaccgatccattgcacgcggcatggagcgtcacaagggataccagctggcatgccggttggctaggggatgcgctcgcggacgcgggacctgttactgcggacggtctgcatgaaggtctacatctagctcaccacctacctgagcagctactagagcgacgactacgtgaacgtctccgtgcacagggccatgcacaacatgatgcagcacgggcgctaccgtcgccgcagcagccgcatcaagcacgacatca

SEQ ID NO: 103916 - DNA, 604 bp, Zea mays
  Clone ID: MRT4577_26277C.1
tttttccttagaaaccgttcagtgtagtggcaggatggatgatgggccagccaatggacttgaacttccattctgtttgaaaccgccagcctcttgataaccgtgctggttgtagcacttctgctgcaggatgggacctcgaactgtttcaaagggctgatgctgattctctgctacctgatagtggctgccagtttttatgtgtatgctgatccaaatatcgatggtgtttagcctcttcgaaactagcaccttcaatgatgggatgggactatacttctagttctccaaagaaacctcttcgaagagggcaagaggagctcctgcgattcactgaagaagaaaacagaagtggctggcctattcagcattcctcacctgaaggggccattcaagcacacccactgctgtaggtatgcagaaaattacacaggaagttctacatagatccccagtttgtgtaggcaacagttttgttcttacgatacacgcagaaactgtagaaatcagaaagtcattctttcttctgtgaacagctgtcgtcatttacaggcagaaataaatttagtgacacatggaatagatgaatggccggtcctcctcc

SEQ ID NO: 103917 - DNA, 429 bp, Zea mays
  Clone ID: MRT4577_26278C.1
actcgggccggccggggaggacaaatagaacatacgatcaatcaggtgtggtcagacatggacaataatggcgcctataacggcagcgacgctaggaagacgagctagccgcgggctacgacgaggaggacgacggcgccgataaatagaagcctgcacgtgacaccacggcaagtctaaggcgaagccgtgaacggacggccacgcgacgaacaacaatgggcccgtactgggaactgacaccacagaccaacagtgcgtacggctacaagggcgagcattggaaagactacggaaccctaacggcgagcacgggcccttcgctatacaccaactgcaccaggtgcggcgagtgctataaactgaatggcccaagaagaaaccgcggtggtgactcgccaccaacgatgcaccgacgacggtagagcg

SEQ ID NO: 103918 - DNA, 274 bp, Zea mays
  unsure (1)..(274): unsure at all n locations
  Clone ID: MRT4577_26279C.1
cacaaacacggaaagaccgccacgaaagcaagaccgagaggcacagcaagaaagagagcaccacagcaccaggccaagggcggggggagccaccaaaagaacacaaaacaaccaacccgaaagnagagagagcgaacaaaagaccaccagacagaggcacgcccngcaagcgacaccaaaagaaccagaacacaaccagnacgcaccacggggcaacaaaagccacaacagaggccaagaaccaacacaaacaaccgacagcaaccacagcaac

SEQ ID NO: 103919 - DNA, 260 bp, Zea mays
  unsure (1)..(260): unsure at all n locations
  Clone ID: MRT4577_2627C.1
atacgtcccggccggggggtcaacagtgacaaacaaaacattatgacttcttatgcttcttgggcaatatgcaagcgctgctacagcgaccatatgaccgcggagcatcgcggggccatatagcttggcttgttttgttggcacctccggcgcggccgctcggaggggggaatccaggcccccggcgggcggttcttgggggatcggggcagggtcccaggctggcggtaaccctggtctaggcggttccttggcncaaa

SEQ ID NO: 103920 - DNA, 418 bp, Zea mays
  Clone ID: MRT4577_26280C.1
aaaaaaagaaaaattttaaaacccccccataataaaaaattggggaagattggtttttaaactttccttggtggataaaaaggaaaaaaaaccttaccaggcaaaaaaaaaatttcttttaaaggtaaaaaaaaatgtaaggctaaaatccacccttttataatggtttaaaaaaaaaccttttgctttgaaaaagttaaaataaacttaataaagggcctaaattgtaaaactggtaaaaaaaaaaaataaaaaaatttgggcaattcctggtaaatttgtttgaaaaaaaatgggtaaaaaaaaacaaaccaccggtaaataaagccacccaaaagaaaatagggcacccccaaaagggcgctcaaagggaaaattctcaccccaaaagggagtttgcccaacaaaaattggcccc

SEQ ID NO: 103921 - DNA, 733 bp, Zea mays
  Clone ID: MRT4577_26281C.1
cctcgaggccggccgggccggatatcttctacacatacctcctcaactagcgatctatcctatccaccgacatatctagcatcgaaaaagtaacctactgcctaaagtacatatgatcaccatgatcgataatgctgcctatcctcgccccgcccaccaagccatacctgctgctgaagtactgactggcacaactgaacagcgactctccagcatccgtgtacacaaggcagacgacaaccgccgtggcctcccagatctcctattctgctgacatggcgatctcaagcaaatccctggtgagatccacttcgaccaaagcctgtaacataaaaccaaccaagtgaacccttttgaagacgtctcaaggaggcagaagcctcccagtactcaggcggagaaacaaccattgacaggtgcagccgctgatcacgagaccaccacctcaggacatgacgacattgccatgcgttgatccaagtactactagacacctgcccgatgtgcaattcggaggcgtgttctcaagattggacctaatgagtcatcacagcttgccatcgacctgaacgctcagggtctgagtcgctatgccatcatctgccaggagaatggactgatgccaattgttgagcctgagatccttgctgatggccctcatgatattgatcgatgcgcttacgtcactgagaccgtccttgctgcctgctacaaggcgctcaacgagcaccat

SEQ ID NO: 103922 - DNA, 454 bp, Zea mays
  Clone ID: MRT4577_26282C.1
gtcgtggagggtgttctggagggtggcaagttcctgtctttgaggttgtgctcaggcgtggtgtgaggtgctgatccaagcccatcaagcagcacttgcctgacagtggtttccatattcgttgcatggcttgcaagggaggggaagctgtctgtgatcggaccactatccatctaatcatcaaggcggaagcaagttgtcctaccattcccgatgctctcatagtggtgatcacgcggtacaaggggaggagtttctgcatgctatcctagtttgctctggacagaggtgagtgtgcattgagattaagctttgctctggacagagggaggccaaagtaagtttgggggaagccttccaacttggcaccgcgttgcaggatcgaggtgaattaaccggctcgatgttgtgggtcaacatgaatgggaacaagggtgctctcatcgtaattgat

SEQ ID NO: 103923 - DNA, 448 bp, Zea mays
  Clone ID: MRT4577_26283C.1
tccctcgccggttccatttggagcctcatcaccctatttccctctccctcgcgcgcgcccacacctgtactgccgagccgccctagctcatgcgcccatccggtggacgcccgcccgccatagcacgtcgtgcccatcagttctgtggaggagccctgctgttcgcgctgaatcgctagttcggtgctcgccgacgaactccgtcatggtgagtccgctttcccttccccacctcatccctcccctttcgccccctggccatggctgccctcccctgcgctcaatccgcggtcaagcgtggcccctgcgcgttctcccttcacgcggcagcagcctgcgcagcggccagcctgtgtggcggccagccagcgcggctagcagcgcccaggcgccctgttcccctaggcgcggccatgtccggcggcccggcgcggtgtcgcggctagct

SEQ ID NO: 103924 - DNA, 308 bp, Zea mays
  Clone ID: MRT4577_26284C.1
cggaccgtgggctactaacgaaccagcttaaggatgagctcacttcactaagagaaagttttgaggccatgaaagatgcgttaaataagcaatcatccataaacaatgatatacaaatgatttctacatcccttcaagatcaactgggtgacctatgctctaaaattatatcttttaacaaggaagcaaacatttcaggcttagaagaggcatctttgctgcatgaacttgagagtaagaattacgctgctgtgatgaaaagattggaatccttccatcagcaaacatgtgacaaggtacttcatctt

SEQ ID NO: 103925 - DNA, 552 bp, Zea mays
  Clone ID: MRT4577_26285C.1
catatatatattacacgctcggagtaggccaaaaccccggcgtccccacggtacactctcctgtacaaaaacaaaggaaggaacagaagccatgactagcaacaagaacactgccgccgccagggcgacggcgacggtggcggtgttggtactagtagcggcgacgctcctggcaacggtggcgaatgcacggccttgcttggacggcgtgctgcctccgtcgacgacgtcacatggcgtggttggggatctgctgccgcgtaagatcatcccgccctctgggcccagcgacttctggagccccgacgacgagccgtcgccgccaccgcctgcggaggcgacagtcgatcgcggtaattgagtgtgaggaggagtggtgatgaatgagaaatgctggatgtataatgccatgtgcaagaacgagcttgaataatcaacaagagggcagggtcttcttgatctgatcatttcccttgtgttttataaatcatctcgatctaaatgttctccttcgtttgtttgaaaaaaaaaaaaaaaaaagcggcctgaggc

SEQ ID NO: 103926 - DNA, 370 bp, Zea mays
  Clone ID: MRT4577_26286C.1
cggacgcgtgggttggaatgtatgaaaattctccaaatgttttgaattaaaaggattactagcttttaagttaattttctaaaacaaatagatgataatattaaatcttggatagttcaaatttaggcttgaattttcaaactggcctacaactttagcttataagatggcttgttgttacagcatacagttcccgtgtaagtttatgataaataactttagcttataagatgggctgttattacataaattaagatattagtttaacttactttaaatataaacaatccgagttgaaccgagctactctggaatcctggatcaaaatgaacgtgctagtaagctactagcttttagtcatgccctaatt

SEQ ID NO: 103927 - DNA, 185 bp, Zea mays
  Clone ID: MRT4577_26287C.1
cagtccatataccctaactaataaatcaacggtccgctatttttactaattttttgcataaccaaataactaaataccaactagctaactccactaacaatttttagccaactaactattacttctaatacattcaaacacccattaacactcaccttccaagtcaataactccttctaacacac

SEQ ID NO: 103928 - DNA, 641 bp, Zea mays
  Clone ID: MRT4577_26288C.1
cccgaaaaaattagccgggcccgctttgtggtggccattagttcctacggcaaaagtcaactttaccgctggtgtagcttggcagattggcccaaaattcaagtagtccattgtgcattggcggcggattatctccaacaagaaatcaccccggtaccagaggttccgcaactagtctgtgtaggccgactgtgtgaacaaaaagggcaattgcttttagtacaagcagtgcgacaattacgggataacggtattgcggtaaagctggttttagtgggggatggggaactgcgatcgcccattgaagaattaattgagcaatatcaactcgaagaaaacattactattactggctgggccagtagtgccatggtgcagcaacatttattagcttcccgggccatggttttgccgagtttcgccgaaggtttaccggtggtaattatggaagcctttgccctgggtcgtccggtgatcagcacctatgtggccggcataccggaactggtcaaaccgggggtttccggctggcttgtgcccccaggctccattcctgatttagtagaagcaatgcagtctgttttaactatgtcttgtgaacaacttaccgccatggccgcaatgggtcagcaagcggtgca

SEQ ID NO: 103929 - DNA, 311 bp, Zea mays
  Clone ID: MRT4577_26289C.1
cctcgatcccatctcccaacgcccccgcctcgcctcgggatcccgccgccgctccatctgggtgtgctctcccacccgcaggcagcgagcgacatctactgctatggatggccaatgccatgttgttggcgaatcagaaacatgctctattttcaaacggcggcggtaaccactcgctttatttcaagctcgtccggttccttgacctctaggcctccttggacaatgaccaactgctgtacgcgtagcactggatccttcagtctatggggctcatatgcagacttctctggtgagccgacaccctcttt

SEQ ID NO: 103930 - DNA, 588 bp, Zea mays
  Clone ID: MRT4577_2628C.1
aggagtaagacaaaattcttattcgcttcttactgtcctcttcataaaacaatgcactgagctctctttacaaccacactgttcaggtcccggaatcaccacttggcctacttacaattacaggctacgaaccatgcaaggtgcagacacacgaacacaagccaagtctccacacgagtaccgccaccggagttacggctggcggaagcagccgatgaggtcacggtgtacacgccgccgccgcggctaactacagtactattgctccaaaccaagtgctgcgtcgtgcgactcctcacgctgtcacagtccgcgacgccggcgagcgcaacgacgccctcgaggccttgttgcttggtgtcatagcacagcccctcgttggagccgacgcgcagcttcttgcccagcctccacatcatctccttgccgaacggtatcggccccaccagccggttgccgtccacgcggagctcgctcaccctctccagcctccggaagctcgccggtattacgccggtgaactggttattgtccagcctcagcacccgaagctcgctcagctccccgatggactcagggatcgccccg

SEQ ID NO: 103931 - DNA, 490 bp, Zea mays
  Clone ID: MRT4577_26290C.1
gtctggcactgacttttctaatgtcctctctgtgtttctagtacgcctctgcggctgcagcctcagcacccctggtatggctgttggagtaaatttgtctgcggcatcagctcctgcggcagctgctcctgctgatgaggctgatgatgatgatgacctcgatctttctgttgatgaaactgacgaggacaagaaggcagctgatgagcgtgctgccgctgccaggcctcttctgaaaaagaaagaaagaggtaaatcctccgtaccttatggatgttaaagcatgggacgatgacactgatatgaagaagctgaaggaggctgaacatagtgctcatatggagggtctgacttggggagcatcaaatcttgacgcctgttggatactgcatcaagaagatgactatcatgtctgacacttgtcgactatcttgtgaacatcgacactctaattgaggaccaccttactcaagatcccatcaatgagtac

SEQ ID NO: 103932 - DNA, 450 bp, Zea mays
  Clone ID: MRT4577_26291C.1
caccggcccggtatccccgggtcgccaccacgcgcgctcatatggggaggaggggaaggccaccgtaggtgagaggatgcaggaaccaatatggctgccccagatgctgctatgctgtcttgagacaacaaagcagctctagttgcctcaaagctaccttcagtggataaggctactccagtgaactcataaatgtgcaaagagaaacaaagtgactaacgcccagaccaaatctccagcagtcgacaaagcaactgcacatcttcccacatttccagcaaccgacaaagcaactcctgctcgatataaatctccagcagttgacaaaaccactctagatggcactaaatctgcaacaggtgacagagcaactgcagagagtgctcaatgcgcagcagttgacaaagcatctgcagctcgtccaaaatctccagccattgatcaagcaac

SEQ ID NO: 103933 - DNA, 183 bp, Zea mays
  Clone ID: MRT4577_26292C.1
gagctacgcatattgataattaaatgggtgatctgatactggagaccaaagcaaactaattatggattgccacccatccaaacaagtcttgaagcgcacctagactagtgatacactacctactaattgattaccatcttgaattagaggagggaatccttgacttactcattcacgcaactt

SEQ ID NO: 103934 - DNA, 304 bp, Zea mays
  unsure (1)..(304): unsure at all n locations
  Clone ID: MRT4577_26293C.1
gggnccttggtgaagaaagtcgccgcgttcctcttgcctgatgaaatcctcttctcgtctagatctgagcctccgcgtggcttcaggatcagatgcttggtccgatcgaacaacgagctatgacgttccgggggaatctggatcttgacggactggacaaatgggaggcgtcgacgggcttctaaagcatggttgaacaattgtgagatgggacatcttgaaggcctttgccatgttgggtgcgctcgcgtggcgggcatcgtagtacagatgttgggtttgtgcgctgggtgggtggtccccc

SEQ ID NO: 103935 - DNA, 365 bp, Zea mays
  Clone ID: MRT4577_26294C.1
agaaagtcgccgcgttcctcttgcctgatgaaatcctcttctcgtctagatctgagcctccgcgtggcttcaggatcagatgcttggtccgatcgaacaacgtttgattgatgagttgacgcatcagctcgaagcgagacaaggctgccttgtttttgtgcctggaggtttctgatccgtcgaattgatatctgccgaccttcagagctatgacgttccgggggaatctggatcttgacggactggacaaatggtaggcgtcaaccggcttctaaagcatgggtgaacaattgtgagatgtgacatcttgaatgcctttgccatattgcgtgccctcatatcgtaggcataataataaagatgtt

SEQ ID NO: 103936 - DNA, 1283 bp, Zea mays
  Clone ID: MRT4577_26295C.1
gaaggtgtcgtactctcgagtctggcagggacccccatcgccacgcgtgcaacgaagctggctccgtcgccatggccctgctgccgttgcccccctgttccccgtgccaccgccgggccgcgcctttgccggcgcccacggtcgcctcggcgcgccaccgcagggggagcctgcgcctcgctgcagccggtgcctgctccggacctaccgccgcgcggaagccccgtcccaccgccgccgacaggaggaggtgcgaatgctttgacctccatcggcggttagttccttacgcggaggcttactgctggcagaagtccattgtcgagaggaggaaaaggttgatagacagcggcgaagaccactccgacaccttgattggtttgcaacatccaccgcgctacacattgggcaccgacagcaaggaggaatacctccattttgacaaggaacatgctcctttccagggtcatcgtattaatcgcggcggtgaagtgacgtaccatggccctggacagcttggtatgtaccccattatgaatctgcgggaccacaaagaggagcttcactggtacttcagggcactccaagaagatgatcatccgcgcacttaaatccgccttctctataacggcagcaagagtagaagggctcactggtggttgggttggggaccgtaaagttgcggcgatagggatccacggctctccgatgatagtttatcacgggctcgcactaaacataacaactgaccttgctccattcagaatgattgatccttgcggcataaaggaccgcggtgtggggagcattaaggagatactacaaagggtgtctgatgcggaagagatcgatgacgcgtcactgatggatatagtgtatgattccatgatcaaggagtttgcggaactcttccagctcagtctagacttcagccctggttgcagtttccagtgagaacaacgcttttagcagaccgtatgatgctgccgttgtattctggacggaatgttagctcacggcctttcgtgctcggtatctccgtgtctgctgcactccaccatgtataccacatccacctttcagtcgcaggatatctctggaatctgtagcagtagagtcgggttcttcggtgtcctctcttcatgggctctggtgtttatagagcatcactgctctctctctctctctctctctctctctctctctctctcttgtatgtaacagtgtatacttacacattcttccatctgagcagataataatatcccagccagcgattttac

SEQ ID NO: 103937 - DNA, 259 bp, Zea mays
  Clone ID: MRT4577_26296C.1
agggaaaaatattaggggtttttttcattttgtggcgtcccagttttttagggaaaaaaagcgcgggcctttccctttgcgggagcgccgtttttttttttacccaggttattgaactgccccccaccaaaaaagtcggtgcatttttttctcacctttgagggggtgggtcccggaacccatgggaccccatcaaaccattttttgggaaaacttggtattttaaacaccaccccccctttttaccttttttttttgc

SEQ ID NO: 103938 - DNA, 138 bp, Zea mays
  Clone ID: MRT4577_26297C.1
gggcaaagaacagtatcccaattggaagatgcaaactgtggacctttctgtacccgtaggattgagattgctaaggctgctcttagctaccattgaggccttagtaccggcagaagctcttctacctttttgggacga

SEQ ID NO: 103939 - DNA, 450 bp, Zea mays
  Clone ID: MRT4577_26298C.1
attcggctcgagccgcatgggctgcttcttttttggaggatccgtcacggttgtggaggactagcacacaaaactcaggagattgaccggcggacaaacagcccatacgcacggatgatttactagtgttaaggatacaggggccacagcgacaacccaaagttgaacaggataacggacggacctaattgctgaagtgagttattgctctgatatgagagcgaaccgtttaacatagggtatagcttagaaatagtcaggaaagattgtgggtgatacaaggcaacaactttgatctatgggcaccaccccactggaactgaggttagatacagatggaattcaagtgactcttgcctcaacgaatctgctataaggaatggactatatgattgcctgcaagcctatagtgatgagcactcaaagagcgctaaaaaggatttattcata

SEQ ID NO: 103940 - DNA, 435 bp, Zea mays
  Clone ID: MRT4577_26299C.1
aagaaagcaacttgggagggaaaaaactgaggtctaggatcagtggaccctattcttgcctaaggggggagaaaaactatcctggaataccgatctgaagaaggtgtttaaaatgcttacatcaataaccgcaatgagttagctagaaggaaaccgtaaatgttttacaccttcaaaatttaacctgtcgaaaaaaagctttatcttttacatttcgactaagactatgaccatcaatgacctaaagaacctttccatacaagcactcatctcgtcgatctacaaaacaaaatcctgtcatagggaaggtgactatcctgaccactgaaaagaatggcttgcaaaaccattcacccggtgtaccctttgttgattttcaaaaacatctaccacgctcttgttgctctaagggtgttaaaaaacattcctgaaact

SEQ ID NO: 103941 - DNA, 303 bp, Zea mays
  unsure (1)..(303): unsure at all n locations
  Clone ID: MRT4577_2629C.1
gtgcgtggagggtgggcatcgaggtgggcggcaacatcgagagaggcagcgtcgaggggggcgtcttccggctcatgactcacgaggacggcgcacagatgaggacgagagccggcgagctgaagaaggcggcagcggagtgcaccgccgagggcgggtcgtcgngnntngccgnngncnngcccnnccccccnnnnngncnctccnnttttggggggggggggcnncccccccccctcccttttctccccccccccccccccccccncccccccccnccccccccccccccccccccccccc

SEQ ID NO: 103942 - DNA, 449 bp, Zea mays
  Clone ID: MRT4577_262C.1
attcggctggagctcgcgcagtgctgttttctcagctcaatagacggattcttaggggggacgtgacgacggatgtcgatgacatactgctaaaccgcgtccttgccgaacagctccacggtgaccttcaggctcttgcaccatcctctccggcaggaagaaggacatgaacacccaccctgcggcggcgattctagcgtagaggtagaagctgccgaagatggtcatggagtaggagagcgagtaggaagtgaccatggtaggtgggtggccgaatgaatgatctgggttcagaccctttgcctatggtggaggtctgagcacgcagccgcaccggagggatctcggagcactagacccaggcgacggggcccaaaccggacgcgaactatgacacgaacgacagcaggggcgagatgctgaccgcgcccagagcggtggccatcccc

SEQ ID NO: 103943 - DNA, 438 bp, Zea mays
  Clone ID: MRT4577_26300C.1
aaaaaccacgggtaaactagaggcaactttggcccgggagggacaaacatacactaaaaacgactggggaaggacccaaatgctaacaacagggatttatacgtcccgggcggcacgacgacccacacaaaaaaaacatgcccgacgacaggggacatgcctgcccagacgacgaccacaagaacattttaattaggcccaacacccaccctttaaatagggccggggaccagatgagaaaaaaaaaaagacccgtacgtacgggcccctgcctgcaccctggtggaaaagcacacacaaacacctacaggtagcaatgccgggggccttcctgcttggcttggcttggctaaaaaactgctaacaatcgggcggggggggaaggccccacttggccgaaaaccccatggcccgcttgggggccatgttgtaaacccc

SEQ ID NO: 103944 - DNA, 1340 bp, Zea mays
  Clone ID: MRT4577_26301C.1
tttttgttccaagatgatctttatttcacacaggcatagtattgtacataagttacaacaatgaacaatcatgtgtctctttacaataaattcagacatcgttagaatgttaaacattggaatggaggtatttttcaaaacagtggacattggagaaatgtattattctttgtgggtgagcattgtacaaatctgacatccctcttcagccaagcatcaattcatctagaacttctcctagtcttttcaaagatctgctcagggatcagtgtgccattgccattggccttcttgatctccatgttatccttctggtagaacccaatgcctctcagagcatatgtaatgaagtcattgaatccaatggcgatggcagcctctaccttagccccataaaccagactcttgattcgggagagatgaactacaccaaagcacatttccaacatcatccaaatctcttcaagcatcatactcttagttgatcaaaagaattgttacttcatggcccaagcatacatgataagctgatttttacttggaaagaatcttcagaacaactaatttgatgtgaaagaactgtttaagttctttttgccaaatttacgccaacctattctaccatccaaaatcaaaattattgagtgattctgctgctccagccaatatttccacagatctcaatatttctctccctacaagttaactgtgggcaacgaaactacccttctcgcctttatacttgatgaatttcaacatataaaccaccattgggctaaagttctaggtggtagatgctaagagtgacactggtccaccttttccagtcctcaaaatgatatgaaggtagcagcaattggctcttctaaaaactcacaattgaaggggccccctcttcgagagttaaaaggctgctacaatcttgtaagagaagccaccatctcaatctaagggcaacacatgtccaacagtatgttgaacatatattcttattgaggacaaaatagtcctcacaaggcatatagatcaactggatcagctctcccatttaccacagtagattcaccacttaacactgaaaaaactaatcaaagagcccaaattttgcccatttgtttgacctttaacgagagcttgattttggcacatcaagatgtcaaataagaaaagaaactccaatttttagttcagtgttcaaatagtaccttcgcggacggccaatcgtcggctcgaatcggcgctgcgaacgccctaccgcgatcggagagatagggccccggccttcttcacgcgagcacgcaaccgccctcgagagaggaggaatttgctcctggtgcggc

SEQ ID NO: 103945 - DNA, 432 bp, Zea mays
  unsure (1)..(432): unsure at all n locations
  Clone ID: MRT4577_26302C.1
gcacgaggtcggtcttcaacctcacggactctgccccaaatctcaactaggcgccgacctacacgccggggatcaggggggtgttgttggctaaatctccgcatgggtggttgtaatctggtgccgtcccatgtctatttaactcaggctcctctggtcctatcgtcgcccaagcaaaaccaaggggggcgtcatggtccgccgcggagggaaattgggcgctgttgtcaacctgcattttcatcaaccggtgaaccttggactcctccttcgccatagctcttcggtaggatctcccccaaacctctgtgtgcccaggcgtgcttgtcgtgcgngtgtttggagaaccatttttaaagaagagacaaaaaaaaaaaaaaaaaaaaaaaaaaaaaaaaaaaaagaaaaaaaaaaaaaaaaaaaaaaaaaaac

SEQ ID NO: 103946 - DNA, 412 bp, Zea mays
  unsure (1)..(412): unsure at all n locations
  Clone ID: MRT4577_26303C.1
ggcgatttattttttttttttttaataattatgttgagtgaatattaaagaagtgatgaatcattatagattagtagttgttggtgtaatatgtatattgatggntggttagaactggttatggagaaattatctcgtgggaagctattgttgttggtgggggtgggtgtggtggagtaatgcttttttggtgtagttatatagtgaaatgagatgtatatgatgataggagaaggtagatgttaggtacttgataaggggagattggtgactctgtagttggaaggaacgtaagaataatggttaaagatcaggtagaagtacttgaaagtaatgattgatatgcaatttaggatgatgaaagttaatttgagtggtaattgagaaactaatagctgtgaatagaaggagg

SEQ ID NO: 103947 - DNA, 378 bp, Zea mays
  Clone ID: MRT4577_26304C.1
ccgttggatcgctgcttaattaactaccctctatcccaaaaaaaaaaaaaaagagaggaagcaatcctatcggcctgagacgaaactagctagtggctaatcaggttccttaaaacctgaagcatttcgaagccttctccgcgttcggcgggcttcgggccatccgtcgcgtgacgcgcgtcctccgtaggtccgacgccgcggacgcgagactcgctttcgacggacgcgaaatttctaggcacgcaccttctctcgcagtacagacgtacaatacaaacatggtcgcggctgttctcagctgatggcaaactcgcgaaggcccgatgcggcgggacccgtctctgctccatgtctccattacttcgtgtcgtcctc

SEQ ID NO: 103948 - DNA, 242 bp, Zea mays
  Clone ID: MRT4577_26305C.1
gtcgaacaaaacatatcatacaaatccacggggggttttgttagttccaaatttccgaataccagtcactttacccacagcagtttggatgttaaagcttattccacgtcttatctagctaaacacggttgctagcctttcctcaatagtccatttgctgatttgataactttatcctttctagtgttacaccaaggttttaaacttgttgacatgcaattgcttgctgattttttttttgt

SEQ ID NO: 103949 - DNA, 435 bp, Zea mays
  Clone ID: MRT4577_26306C.1
gtttggtgatgtctgggttaggtatcttcctgtgtgcttccatatgtccacaagggggtagtcctcttttttttgccccatcgtccatatgtcctgtatacttccatatgtcctgtttgaatacaaagctaatcactagccagctaattatatgtagcccatccaaacagggagctaataagtgggctaatttttatcccaatccccaaccagtcactggccaactagctgaggaaccccatctagtttgggctaaaagcgtgtaccaaccgctcaaacaccaaaaatgccctgattctataataatctcttctggtactcatccttgacaggttgtctgcctatcttctaaatgaggaactggtttcctgagttaaattactcatactctgctgattactttcaggtttgcgaatacaacagatatctgatcga

SEQ ID NO: 103950 - DNA, 628 bp, Zea mays
  unsure (1)..(628): unsure at all n locations
  Clone ID: MRT4577_26307C.1
ggccgggnaaaaaatatcccaaaaaaaaaaaaaaaaaaaaaaaaaaaaaaaaaaaaaaaaaaaaaaaaaaaaaaaaaaaaaaaaaaaaaaaaaaaaaaaaaaaaaaaaaaaaaacccgcgggggggaaaaaacgggggttttcgaactcccctatccccggaactaaaagttttttcattttccaaccgccgccgttgaagttccccccctttccgccaacaccaggagggagggattctcaatccaaatgggcaaagcgggaatccaggccgaaaacgggggtgggaagttcaactgcctcaagaagggaattcaggccaagggcaaaatgcccgggaaaaaaaccatgggggggggggatgatgttttcaacaccttcttcagggaaacgggggttggaaaccacgccccccgggttgtttttgttgaccttaaaccaactgtcatcaaggaggggaggatgggaaccaaccgccagtttttccaccctgagaagtttatcaggggaaaggaggatgcagccaaaaatttcgcccggggtcacaacaccattggaaaggaaattgtggacctgggccttgatcgcatcaggaagttggccaacaactgcactggtctccagggttt

SEQ ID NO: 103951 - DNA, 313 bp, Zea mays
  Clone ID: MRT4577_26308C.1
cacgggaaaacaacaaaaggacccggggacttaaatcaagggttcaaaagcattacataagcagcaaaaccagaaataatcctctaggggaaaaaacaaacacaatacgaccccgaacacgtaccacttaataggacagggacagtacagtacaaatgaaaagcaaggggcaaaacaagaatcacaagtgggaaccataaaaaagcatgatagagcgcaggcacaccagaccagaccagaccaaaagcttcttccaaaacagaggaggcgccttaagcaaaaaaccgtttttccgccttgaggggcttcacca

SEQ ID NO: 103952 - DNA, 174 bp, Zea mays
  Clone ID: MRT4577_26309C.1
atatctatggcgggcgcttatgatatcacctataatacgggaccgacacctgtaagcccacctgatacgactatgacgcgtcatattacatggtggcgccgtcttggtgatagctttgtgctgtgtgaaatacttcaacaatgacagtggccactatacatacctagccctaca

SEQ ID NO: 103953 - DNA, 438 bp, Zea mays
  Clone ID: MRT4577_2630C.1
atcagatccaacaaatcttcttcttcttcttcttcttcgatcatcatggccagtatcaagggtcacggagttcccatgtccaccgccacaatgcgcgtcctcgctactctttacgagaaagatctccagttcgagctcatccccgtcgatatgagagccggtgcccacaagcaagaggcccaccttgccctcaaccccttcggtcaaattcctgctctcgaggacggtgatttgacgcttttcgagtcaagagccatcacacagtacctagcagaggaatacagtgagaaaggtgaaaagcttatctcccaagactgcaagaaagtcaaggcaaccactaacgtatggcttcaagttgaaggtcaacagtttgaccctaacgcctctaagcttgccttcgagcgtgtctttaaaggcatgttcggcatgaccactgac

SEQ ID NO: 103954 - DNA, 251 bp, Zea mays
  unsure (1)..(251): unsure at all n locations
  Clone ID: MRT4577_26310C.1
gttctagatcgcgagcggctccctttttttttttttttnctcaacaagcatagtattatgcggagcttatcttatcccagcggcaagaaggttgtcaagatcgcaaggaccagttttggagcaaagtgtaaaaccaaaaaaaaaaggaccgaatgaaactaagaacgcaaggacccttttgagtccatgtccatctctggcgtggcgtggcgtgcgcaccctactctgcccgttcatgcagtgcaacaaca

SEQ ID NO: 103955 - DNA, 195 bp, Zea mays
  Clone ID: MRT4577_26311C.1
cccactcgttctctctccccgttttctctacctctctctcgcgcgcgcggggactactcgaatggtgggttgccccctcctccccctacaccagtttctcatctcttcttcttgccactttccgtaaacaagctctcaacacatttcattataccatccaaacctaaacgattttagtattcataatcctttcta

SEQ ID NO: 103956 - DNA, 1815 bp, Zea mays
  Clone ID: MRT4577_26312C.1
gtcgctccttctcgccggtcgccgccgccccctctctcatcgtccaaggctgcctccagtccatgcacgccgccgccgccatgccctcccgctgctggtccagactccaaagcccttactcctcccgagcgaacacccaacttacccctcgattgctgtctgtcctgtttctgtttcgaatgccgcttctttggctgcttccattccatggcggaaaaaatcgcagcctttctggcctgccagccgttttttttacttggatttgcatcggttatctctttgcctgtgcgggtggagctaagctgcccacgtcctgcacgctgtccccgtgtctccagcccagtcgacgaccatcaacttgagtgtcggtgcttgtataagtgtgtcttgtttcgagccagagggcacatgtcatctgccttatctggagcacacttaggctttagggggagggaggaagggatatcagttcgtcgatccatccaggggatggctaactacacggcctattgcatcgctttgaaggctaaggatcatcatgatctcagggatatgcatagcttatcagcttgtgcaaagtacctttggagcacttctagggcaacagtgatccgcaatgaggtacttgtcgtattgtctgccatcagcctgttgttcatgaccacctttgggcccttgcgccgccggagcagaaactcgtttgtacagaatggtttcatggttgcatacactttgtcctcgtccctgatatcatacacacttggttcaatgtactcatctgcagtaaagagcagcatgtatcccatttgggcctcatccctgtatctcctcttttgttctgcggactctattacatcttattgtctcaatggcaacaatcaacaaaaggaacagcttattttgtttcttcttttccaaatatatgtcagccaaataactaatggatctgattctaatggctctctagttttttcggtagctgcttttaaatttgtggaacgattctgggcataccagctggccaccggatcatggaatttgaacaaaatggttgctgactacatgtatgaggaacaatccagaagtggctcatcttatgatccaaccagcatgaaaggttatcattacttagttgattggcccttggatgagtcaaaactggaagcaaggatgtcatatgcaaaggaattaacagtggatgatgcacagatcattgacatagagaggatatttatgtgcagtgaactaagctccgagctgaaggatgtatgcctttccttctctctttttcttctgctgagaaggcgcttctttgggtttgtctgcgttgaagcttcacagcgaaagacacatgattttgtcttcaagggggttttgtcaaagaatcaggacggaaccctcaattacgacaggatcttcaggttgattgaggttgagttagcttttatgtatgatttcttcttcaccaagtatgctgttctttactatggatctaaaaaggtttcagcaatttggtccctggcatcagccagcttcatgtctgtgacaatctacaagctgatagaaagtgttctttctaaccagaatcggattgaattcgtgggcacaacaacatctgatgttacaacaacatctgatgttgttgtaacaatactgatagtagcatgcattgttttgcttgagtttatccaagtattacttttttttagcaccatttggtgcagagtatcattttgtttgccattatgttcgagaaccagcaacgaacacaaggagaggcttctgcatgaaactgtttcaaagttctgctgcatg

SEQ ID NO: 103957 - DNA, 562 bp, Zea mays
  Clone ID: MRT4577_26313C.1
ggggaaaccccagggaaaatttcaagggccccctggtaaaaaggggttccccccccccccccccccccaaggaaaacccgggggccccccaaaaaaaaactttttttttccccccctttttttttttgaaaaaaaaaaaagggggtaaaatcgggaaacccccttttttttttttttttggggaaaaccggggccaaggctttaaaaaaaaaaaagaaaattgttggggggatccccttggggggcaccccggggttttcccccttttaagggggtttgggaaaaaaaagggtttaaggaaaacggccccccttttaaagttttttaaaaccggggcttttttttttggcccccaccctttttttttttttggaaaacccccccccaaaacttttaaaccccctttggcctttggggcccaaagaccctttttttgggccccccttgccaaacacacccttgggggggggggggggggaaaagtttctcaaaggagaaatccccaaaaccgtcttaaacggggggggggggggccccaaaaaaaatttttgcggtttttttt

SEQ ID NO: 103958 - DNA, 572 bp, Zea mays
  unsure (1)..(572): unsure at all n locations
  Clone ID: MRT4577_26314C.1
gcatgcaacattgaatggcaataataccagtactagaatcgtaatgcctgcatcggaattcatgctgtgcaccactagctaaactggtcattaagcaagcagtgtcacggttaactgatgagcatgagcacatgctgtatcactgacgtaaggacgcgtgcacaacggaagcagcaaggatgcttcctgcttcttctcggcctttcctcgtgccgcgcagctatgcttgaccgggtcgcacgccctcgctgctggctgcaggctcgcaccgcgcgtggcgccatgtgcgcgcccacgccgcaggacatcggcaacggtgacggggagccacgcccacgcccacgccacggggcaactccacgcatggggcacatggtggcacgggatgccacccccggcccgctgcggggatcggaggccggnagcgtcncccgccggctcgatcacgtggtgaaccagggcgcgtgcgcacgatctggccggccgtggcgcggcgcgggtcacatgcacgcgcgcctgctgcccactgtgctcactgcccacagtcgccgcgctcgagcgccccgacgcgc

SEQ ID NO: 103959 - DNA, 231 bp, Zea mays
  Clone ID: MRT4577_26315C.1
tttcgtcgtacacctcacccgctttcctttgctccactctagcgacgcgatttctgtgctcttttgagattaaattatcttggactgctgttggtctggtcggcggctggtggcatagggatggagaccgcagctgcgatggtggagggcggagtggggcggtttttgttggcgccggcgatgttcgcatctctgccggctgtcttacaggttggtcatttaaaaaccttt

SEQ ID NO: 103960 - DNA, 456 bp, Zea mays
  Clone ID: MRT4577_26316C.1
gggggaaccccccaaaaattcatttttttgcagggggggggggaaaaaaaactggggaaccttttggggcccatcaggttaacccaaaagggggggccttgggggaaacataacagctaacatttttggggcaaaaaatgggataaagggcccaacttgccttttggggggcaaccccagggccttttttaagggggggttaagggtcctcgaaaccccactttggggaaaaagggcgggggggggcaaaacaccagtggggggactcgggggggaaaaaacacctccggggaaaaaattcccgttcttcgaccaatttttccacccggaaaaaccacctttggggggggggggccccgggaaaacctcccttacccctgggtggagctagggggctccgaacgggaaggacaacacgggggggttttccccccccccgggctttttttggttttt

SEQ ID NO: 103961 - DNA, 2638 bp, Zea mays
  Clone ID: MRT4577_26317C.1
gccggccgggtcgggacataagaacgacgcgagtggccagtgggaaccaggaaacaagaaagtgagagggggaagctgcggccgacggccgagctcttgccgtccctatccacccctctcgccctcctctctgcctttcgctccgtccagccgccgcgtaaaatccgcggaaccagatgcccttatccgccctctgatcgaatccggcatcgccggcgaccttgatggcactggaggcgggtagcagcggcggcggcggcggcggatggggtggcgggttccgaagtctgatgcggcggaagcaggtggactccgatcgggtccgcgccgagggccagccgcagctcgccaaggagctcaacgtgccggagctggttgcgatcggggttggttccacagttggagcaggagtatatgttcttgttggaacagttgctagggagcacgctggtccagcattgacaatttcatttctgatagctggaatagcagccgcgctttcagctttctgttatgctgagcttgctagtcgttgcccctcagctggaagtgcttaccattattcatacatctgtgttggagaaggtgttgcctggttgattggctgggctctagtgctggaatatactattggtgggtctgctgttgcccgtggtatatctccaaatttagccttgttttttggaggacaggatagtgtgccatggattttagcacgccatcagcttccatggtttgatatcattgttgatccctgtgcagccgctcttgtttttgttgtcactgttttactatgcgtgggaattaaagagagttcatttgcacaaggagtcgtaacagttctcaatgcctgtgtaatgatatttgttattgtagctgggagttatattggcttccaaataggatgggtgggctacaaggtttctgacgggtatttcccacatggagtaaatggaatgcttgctggatcagcaactgtcttctttgcatacataggctttgatacagtcgctagtacagctgaagaggtaaagaatccacagagagatttgccattgggaattggagttgcattggctatttgttgtgcgttgtatatggctgtttctgttgttattgttgggctggtgccatatttcgccatggatccagatactcctatttcatctgcctttgcaaggcatggaatgcaatgggctatgtacgttgtgacaagtggtgctgttcttgcactctgctcgaccttgatgggctcacttcttccacagcctagaatacttatggccatggcacgagatggtctgttgccatccttcttctctgatgttaacaagcaaactcaagtacctgttaagagcacaattgtgactggcatctgtgcagctgctctggcttttgcaatggatgtttcacagttagcaggaatggtcagtgtaggcacactccttgcattcaccgtagttgctgtctcgatcttgatactcagatatgtccctccagatgaggtccctttgccgccttctatgcaagaatcattccgtttgaaccaggaatgtgatgaggaaagggataggggtcttcttggagttgggaactgtaacttatctcagacaaaggatgtgattgtggtagtagaatcagtgaaggatcctctcattgataaaagactgcataaaggcaagatggatgagacgaagcgccgaaagatagcctctttaagcatagggtctgtgtgtgtaggggttctgatccttgcttcttcagcctctgccacatggttgccttttctcccgatatgtattggctgcaccattggagttgtgctccttctggctggcctcagcttgctctcctggatcgaccaagatgctggcaggcactcttttggtcattccggaggattcacatgcccttttgttccagtgctaccagttttgtgtatcctgataaatacgtatctgttaataaacctgagtggtgacacatggatgagagttggcatatggctgctgctgggtgttcttgtgtacgctttctacggacgaacccacagctccctaatagatgttgtctacgttccggcagcgcaagctgatgagatatacaggagttcatcaggatatgtatcatagaaaagaacagctgcagtcatgtgacacgatagagccacagaaagaccgagcggatgacagttacttaaaaggtggttgtccatcagctgtagaaaattggttatcagccggggaagacggaactgactgttatttctttcatgctcggctagcatgatctcagatatataacgcctgtttgtttcggcttttcgcagcttctggccaccaaaagctgctacggactaccaaacacttagctttttagtcagcttctataaacattgtttgagtgtgcgtaaatgtggtgtatataaaaccagctgggtggaataggatgtggtacataataatttgtctaattcatgtaaaagccctttgtacggaaatgtgagggcatttaaaggatctattgaaaacagtacatggacggcaaaagaagccacctttttttatatcatgtatatgtcgtccacaaacattctcttcatgtatcatgtatatttgaccttggtcagtgttcatgg

SEQ ID NO: 103962 - DNA, 539 bp, Zea mays
  Clone ID: MRT4577_26318C.1
cccacgcgtccgcgagtggccagtgggaaccaggaaacaagaaagtgagagggggaagctgcggccgacggccgagctcttgccgtccctatccacccctctcgcctttcgctcttgcctttcgctccgtccagccgccgcgtaaaatccgcggaaccagatgcccttatccgccctctgatcgaatccggccagaaagcccggttctttgtcgtcgtcctcggcatcgccgacgaccttgatggcactggaggcgggtagtagcggcggcggcgggaggggatggggtggcgggttccgaagtctgatgcggcggaagcaggtggactccgatcgggtccgcgccgagggccagccgcagctcgccaaggagctcaacgtgccggagctggtcgcgatcggcgttggttccacagttggagcaggagtatatgttcttgttggaacagttgctagggagcacgctggtccagcattgacaatttcatttctgatagctggaatagcagccgcgctatcagctttctgttatgctgagc

SEQ ID NO: 103963 - DNA, 395 bp, Zea mays
  Clone ID: MRT4577_26319C.1
actagttctagatcgcgagcggccgtcctcttttttttttttttttttttttttttttttttttttttttttttgggaaaacatgtactatactagtaggattacagataacaagaacaaactgtaaaacagagtaccatatagttacagcaaactctttgcctggccggcaggaaaaccgttaacgggcggaaaacctcaaacaggagtcaagatttagcttatcatatgtaattagggataaacgacagggatccgaagcttagtcgacctcctccattttgttttcgccgggggcatcctccaggggaggcatctaagtttcggcctcagctgacttggcctcatcgatgctcaaaccgagctttagcatgcggactagttttaaatcgcga

SEQ ID NO: 103964 - DNA, 811 bp, Zea mays
  Clone ID: MRT4577_2631C.1
tgggtacctcgaggccggccggggcgtcacgactcaggaagaggtcggagcgggagagctgtcaggcttccagccgagatcctgcaaaccgcgcggcggagttattccgggctctgtgcgagttctgcagttccggcgctgctcttctttcccgcgccgcctgcctgtctgcctgcaagaaagcgccgggggcgtgccgtcttttccccccctccacgcttcagcatcagcagcagccagcagcgcagtaaatttcgccggcgcgttgggcagcagcagcagcagttggcagccaacgtcccgctcccccgcccgctattacttccccagctccgcgacaagctaggcgcgcgtcgtccttgtgctcctctgcagcaaaacgagcttccggcgcttcgggttcagttgcgacttgcgaggatggcgacgggcgagcaggcggaggacgccatcgtggcggacgtcgtcggcaacggcaagggcgaggaggtgcgcgccatgggcgacgacgctgagcagcagcgcgacggcggcaaggtcagcatgaagagcctgctgtggcacggcggctccgtctgggacgcctggttcagctgcgcctccaaccaggtggcgcaggtgctgctgacgctgccgtactcgttctcgcagctgggcatgctctccggcgtgctgctgcaggtctggtacggcctcatgggcagctggaccgcctacctcatcagcgtgctctacgtcgagtaccgcacccggaaggagaaggagggcgtcagcttcaggaacacgtcatccaagtggttcgaaagttctg

SEQ ID NO: 103965 - DNA, 1242 bp, Zea mays
  Clone ID: MRT4577_26320C.1
ttgaattgttattctcgcagcctagaatacttatggccatggcacgagatggcctgttgccatccttcttctctgatgttaacaagcaaactcaagtacctgttaagagcacaattgtgacaggcatctgtgcagctgctctggcttttacaatggatgtctcacagttagcaggaatggtcagtgtaggcacactccttgcattcaccgtagttgctgtttcgatcttgatactcagatatgtccctccagatgaggtccctttgccaccctctctgcaagaatcattccgtttgaaccaggaatgcgatgaggaaagggacagggctcttcttggagttgggaactgtaccttgtctcagacaaaggatgtgattgtggtagtagaatcagttaaggaccctctcattgatataccgctgcataaaggcaagatggatgagacaaagcgccgaaagatagcctctttaagcataggatctgtgtgtataggggttctgatcctcacatcttcagcctctgccacatggttgccttttctcccgatatgtattggctgcatcattggagttgtgctccttctggctggcctcagtttgctctcctggatcgaccaagatgctggcaggcactcttttggtcattctggaggattcacatgcccttttgttccagtgctgccagttttgtgcgtcctgataaatacgtatctgttgataaacctgggtggtgacacatggatgagagttggcatatggctgctgatgggtgttctcgtgtacattttctacggacgaacccacagctccctaacagatgtcgtctacgttccagtagcgcaggctgatgagatgtacaggagttcatcaggatatgtatcatagaaaagaacagccgcagttacttcaaggtggttggtcattcagttgtagataattggttatcaaccaggaaagaggggaattggctgttatttctttcatgcttggccaacaagatctcgtggatgcaactttgcaagatatatatgatgttcacgagcctggtcaatttacacattgtttgttggagtgtgcgtagatgtggtgtatataaacccagctgggtggaatgatgtggtacataatttatgcaattcatgtaaaagcccccatccccgttccccgcgtggacccgttaaacttacatgtgacgatgttttcatataatagttaatgataaaaaatcaataattatcttgcc

SEQ ID NO: 103966 - DNA, 264 bp, Zea mays
  Clone ID: MRT4577_26321C.1
ggcggagccgacaatgaccccgcaaaacaggggcggaggggaggaagagaacgggaccaagcgcacgcaggaggcccgccacaggaacaacgggggcgcgggcaccgaagaccacagccccagggcggggcgcatccacgccaacgaggaggcacgcgcccatggccgacgacccgaccggcaggaggaggcaacagctaccgcaataaccaaagcggaagcacaagaggacacagcagaaggtggcgattaacccaccgaacc

SEQ ID NO: 103967 - DNA, 935 bp, Zea mays
  Clone ID: MRT4577_26322C.1
gatggatgagacgaagcgccgaaagatagcctctttaagcatagggtctgtgtgtgtaggggttctgatccttgcttcttcagcctctgccacatggttgccttttctcccgatacgtattggctgcaccattggagttgtgctccttctggctggcctcagcttgctctcctggatcgaccaagatgctggcaggcactcttttggtcattccggaggattcacatgcccttttgttccagtgctaccagttttgtgtatcctgataaatacgtatctgttaataaacctgagtggtgacacatggatgagagttggcatatggctgctgctgggtgttcttgtgtacgctttctacggacgaacccacagctccctaatagatgttgtctacgttccggcagcgcaagctgatgagatatacaggagttcatcaggatatgtatcatagaaaagaacagctgcagtcatgtgacacgatagagccacagaaagaccgagcggatgacagttacttaaaaggtggttgtccatcagctgtagaaaattggttatcagccggggaagacggaactgactgttatttctttcatgctcggctagcatgatctcgtggatgcaacttggcaagatatatatgctgctcacgagccaggtcaatttatacattgttggtgtgtgtagatgtggtgtatataaaaccaactgggtggagtatgtgatgcgatacataataatttgtctaattcatgtaaaagccctttgtgcagttgtgctgaaatgtgagggcatttaaaggacctattgaaaacagtacatggacggcaaaagaagccaccttttttatatcatgtatatgtcgtccacaaacattctcttcatgtatcatgcatatttgaccttggtcaaggggttcatggatgtactttgtttct

SEQ ID NO: 103968 - DNA, 301 bp, Zea mays
  Clone ID: MRT4577_26323C.1
acgcacacaagccgtaagacaaacaaacagcacgagagcggcacgccgaaaggcaaaggcaaaggtaacggcaacgcaaggcagaggcagagcgcgccccgccacgatgaagaaggaggaggcggcctcgccggaggcggcgacggaggtcctgctgctcctgtcgtcgtcgttggaggccggcccccgccagccacagccgcagctgcagcccgtgtgggcagacaagcacaccgcgccgaccaccccgcggctgcagaaggcgcacgtggcgctgcaggctttgaagcgcgcggtgacc

SEQ ID NO: 103969 - DNA, 291 bp, Zea mays
  unsure (1)..(291): unsure at all n locations
  Clone ID: MRT4577_26324C.1
ccggnnnccggaaggcccgggtgcgacgccacgtcgtctcgctccacgacgtctcgtcggacgtcgtgtggcggctatcgcatctcgttccgcttccttctgtgtggacagagtgttcttcgagcgagcgacggaggacgtacaagatactaccgggcttggctgtggcttgttctctgggacgtcctcgactcagcagacactcctcgctgtactaaggagggagctaggagaaagatgatagcgtagatggcgctcggacaaacttctcggctcggacattcgcaggtg

SEQ ID NO: 103970 - DNA, 1235 bp, Zea mays
  Clone ID: MRT4577_26325C.1
cacctgtccagttccagtgctttagatccgcggccctgttcgcaccttgctcgcctcgcctcgcctcgccttccgctgcttcccgcctctaaccaccacggcatccagatcccgcgactccacctccactcgcggcggcgtgccctcgccgagatctcatcatggacacggtcgagaagatcgtcgaggacttcgcctcggacatcgccgtgagccccttctcctccgggacgagcctccgggagatgatacgcgcgatacgcgcgtgcaagacggcggcggaggagcgcgcggtggtgcggcgggaatgtgcggcgatacgcacggccatcagcgagaatgagccggagctccggcacaggaacatggccaagctcatgttcatccacatgctgggctaccccacccatttcgcgcagatggagtgcctcaagctcatcgcggccgcgggattcccggagaagcgggtgggctacctcggcctcatgctgctccttgacgagcggcaggaggtgctcatgctcgtcaccaactccctcaaacatgcttaatttgggggcagagatctcaaccacacgaaccagttcatcgtgggccttgcattgtgtgctcttgggaacatctgctctgctgaaatggcgcgggatctttcacctgaagtggagaggttgatgcgcagtagggaagtcaatacaaagaaaaaggctgctttgtgctctataaggattgtcaggaaagtgccagatttggcagagaacttcaggggcctggctgcatcattgttgaaggagaaacaccatggggtcctcatatctgcaattcagctctgcacagaactatgcaaagcaagcaaagattctctagagtacctgaggaagaactgcatcgaaggtttggctcgcatactgagagatgtgtccaataggtcatatgctccggagtatgatgtttctggcattgttgatccattcttgcatattcgagtccttaaacttttgcggatcttgggtcaaggagatgcagattgcagtgaatatatgaatgatattcttgctcaggttgcaacaaaaactgagtccaacaagaatgctggaaacgccattctgtatgaatgtgttcagactataatgggtattgaagctactagtggtttacgtgtgctggcaatcaatattttgggtagattcttgtctaaccgtgacaacatataagatatgttgctcttaacatgctta

SEQ ID NO: 103971 - DNA, 182 bp, Zea mays
  Clone ID: MRT4577_26326C.1
gagccctcaagtcggcggccgccctttctttttgggggtttttattgaccaagggggtgtttaaccatcacacacaccagtggaaaacacagtacccacaaacaaaacctatacagatcaccactttcttccagttcaaaccacgactcgatctaccccccaaacacatcggaagccaacat

SEQ ID NO: 103972 - DNA, 815 bp, Zea mays
  Clone ID: MRT4577_26327C.1
ctctattatcctaccagaccccgaccggacctcggctcatggccttctcgcgcctcatcccctctagaagtcgcctcctctccaccctcctccacacaccgggacccatccccaccccgcgcgcggcggccgccgccaccaccaccccgctcggccccttcctccgcaacttcgcctccgccgcgcggcgggcggggccctcctcccgtccccgcaccgcggacatcggcgcccgcgcgcgacagttgcagactcgccgcctctggtcttacggactcgccttcgcctgcacggccggcttcgtagtcaccgtgctcgccacgttccaggaccagctcgtcttctacgtcacgcccaccgacgcgctgtccaaattcaccgccgacccctccaagtcccgcgtccgcctaggcggcctcgtcctcgagggctccgttgcgcacccctcgtcgtcctcccccgagatcgagttcgtcgtcacggacctcattaccgacgtgctcgtccggtacgagggcgcgctgcctgacctcttccgcgagggtcactccgtcgtcgtcgagggcctcctcaagccctacaccgacgacctccgacgcgacgacgggaggaaggtgaccgagaaggcgcgggagtgcgcgtgcttcttgcgcggcaccgaggtgctcgccaagcacgacgagaagtacatgcccaaggaggtcggcgaggcgctcgagcgaaacaagaagcgcctcgaggctgaggctgaggcggccgccgctcaagggtccaatgtggctgcagcggcggagggagcaaaggcaagctcgtaa

SEQ ID NO: 103973 - DNA, 484 bp, Zea mays
  Clone ID: MRT4577_26328C.1
tttttctgctggctttatctctcctaggagaagcgggtgctcatcacactgttacggtttcatacaccgacctttatataccccgcgctccggccaagtgctggcaccaagaaagcctcatggtgcggccgaccgacagtcgagagagaggcatgcacaggctgggcgcctagcaggttgtatgaactacttgacggccgcaggcagaggatacgctgcgatgcatgcacgcactcgtcacgcgtacctgcgcgcgcgcgcgcgtgtcgcgcaattggctcgcagcatgatcacggctcatgcggatccgccaacgccagagaagtacgagcaggcggctgcccccaggcacggccgttccggctctctgtaggcaaactgttccactactcctgcctgcgataggctctctagtgagaggccctaatctaacgcgaggaactgcctgaacccttcggtggaggcgaggaacacggacaaccag

SEQ ID NO: 103974 - DNA, 2792 bp, Zea mays
  Clone ID: MRT4577_26329C.1
gtcgactctagaggctacagtatacttattcatatttaatgaagataatgataaatggattattgatatatagcaattattacctttattcctttgtattcttctgtattcctttactttcttgtttatattcatgtttacatgataaaatgatgaagatgtgaccttcatgaccttcgtctgaagatcattatatctgagaggaaatatagcttcgaaggataaaatcctttaaccattaacaattgtgttgccttgttcttgatttatagtattcaagaacaagtgaacaacattggcgcccaccgtggggtgaactcacttctacaactatgatgatggcttcgcaaagcaaccaagctgtggcaccttcggctacgaagctggagctcccaatcacaggcggctcaagttatgaaccagccaacaagaagcagaagaaggaagcacagagaagggtacaacatgttggagtccaaggacccttcgtcaagtccaagtggtctcatataccaatcaccttctcccaggaagaccttcagctcaaggattatcctcacaacgatgcaatggttatatcttatctcatcaaaggggtttctggaagacatatagtggcacttggcaagataaccatgccgattacctttggctatgttcacaatacaaagacagagcaagttgtctttgatattgttgatatggagtatccctacaatgcaatgattgggcgaggaacactaaatgcattcgaagcaatacttcatccaacatatctatgcatgaagaaaccatcaaaccaaggccccatagctgtgcatgggagtcaagaggctgctagaagagccaaagggaactggacagattccaaggctattcataacatagatgaagctgaagctcatcagcagtacaagcacaaaagagataaggctgtctcagcagaccaaccgaagcccatgctcctatgtgaggacatagctgagcagaaggtgttgctgggatcacaactatctgatgaacaagaaaaaaccctgttgaggtttctattcaacaacaaggatgtcttctcgtggtcagccaatgatctctgtggtttcaacagggatgtcatcgagcattcacttaatgtagacccgactatcaggccaagaaagcagaggcttcgaaagatgtccgatgacaaagtcgaaggctaccaccaaatttggatgaagaaagaaaacgagcccaagacaagtttcataacccctagtgggacatattgctacctttggatgcctgaggggctcaataatgctggagtaagcttcagcaggatgactgccaaagttctccactcccaaattgacaagaatgtgctgacatatgttgacgatatcatagtcaaaagcacgaagcaagaaaatcacattgctgatttccaagaaacatttgctaatttcagaaaggctggtcacaagttgaatccagaaaaatgtgtcttcggagtgaagaagggaaaatttcttggttgtctgctatcaacaaagggcatcgaagccaacccaagcaagatagaagccatacttcggatgaagccaccaaagtcacgagaagaagctccatttctgttgtatgtggctgcttcccacgttgcggttagttcagcgctggtacaagaaaagcaggatggtcaagcaaagaagcaagtgccaatgtacttcgtctccgaagtacttagtccatcaaagaaaaattacacagggttggagaagaaactgaaggcaacaggaataagaagtgaaatcctcaaatccgagtcacaagtcattttgggtcacgtcgacaaaagcagtaaagcaagagacccgaagctcgagaagtatctggacacagtccaaagaatggaagcctctttcgaaggtttctctgtaaagaacatcccaagaggagaaaacgaacatgtagacttgctagctaagtcagcagcacatgggcttccattaccttcggaagtattttttgaaacaataaaagcaccttcggccgagctcattgagagagcagtgcttagaatcttgccagtgcacaacgaagattggaggactaaaattgtatcgtttttacaaggcaactgtctttcgaatgatgaagcttacaacaagagaatggaagcaagaacaagaacctatgtgaccatagagggagaattgtacgcacaaggagtctgctctccgttactaaaatgtttgtctagaaccgaaggtcaagagctgatgaaggagatatatgtaggactgtgcggagctcatattggggctagacctttactgggaaaggcagcttcagatgcagtagatttggttcaaaaatgtgaaaactgcgagaagtgtgccagagaccagaaacaaccttcgtctctaacccaactaattcagcccgcttggccactgcaaagatggggcctagatttgctaggcccacttccaccagcaaaagcaaacttgaaatatgttgtggtagcagtggagtacttctcgaagtggatcaaagctaagcccctagctacaataacttcagccatagtccagaagttctttttgcagaatattgtttgccgcttcggtgtaccgaagattatcacggttgataacggaactcaatttgatgctgaaacgttcaaagctttttatgaccagatcggtacaaaaatacactttgcatcagtgagacatccggaatcaaatggactggtagaaagagcaaatggaatcataaaaacagggataatgaagtcaatcttcaactag

SEQ ID NO: 103975 - DNA, 461 bp, Zea mays
  Clone ID: MRT4577_2632C.1
ggggaggggaacgaaatatccctaatttttaaaatattttaaaaatccccattaaggggatttggttcaaaaaggggccctaaaccctaaacccccaaattttcccttgttgtctaaccggggcgattttgccgggtttttttggggagcgacggacccccaaaaagggggggcaaaacgggcccctaattttagcggggggaaagggagcaaaacctgggcaaccactccccggcctccaaaaaaccggcccctttttttaatcccagggccgcccattttgattccattattttctgccttcggggggaaacaattcggttttttttcgaaaaaagggaaaggaggatccccggggccggtataaaatcccaggccccggttcccacggggggatggacggggccgaggccaaaaaccgggaggggcccccagggtaaataaccaacaaccctcttggt

SEQ ID NO: 103976 - DNA, 465 bp, Zea mays
  Clone ID: MRT4577_26330C.1
aaaagcaaaaaacaaaggcgggcatcccaaaacaaagccccccataaggcgcccggggggggggggaagaggtccacacccttttgaaaccaaacccaccctggcaacaaagagaagctaaaaagggaaacaaaaatggctggcggctcttttttttcggggcccccttcctaaaaagggggcaccaccctttggggagcggcaacggaaggggaaaccccccggccagggaggaggccatgccccggccgggccaaaagaagggggggggccctccccggaaaacccctaaaaaagttgaggggaacaaagggcatttgggggggaaaccgggggggcctaaaaacgaacaggccggggaggaaaaccacaacccgaaacggggggactacaaggacaagggggggaacaaaccaaaaaaccccaaacgggggggcccccctggggcccctcaagctaaaaagg

SEQ ID NO: 103977 - DNA, 888 bp, Zea mays
  Clone ID: MRT4577_26331C.1
agataaacaattgatagattgcatgatatagctaacttctacaagttctaagttcacccatgtattctaatatcaacagagattcgcaaaacatcaacaaaaaaacatagaatctcactctgaaaacaagatttacagaatttggtacccatcatttaatttgtctcagttcggtcttctgctgatacgtaccctggtgctatgaaaaaattgtactgggatagcagtagcacaagaagatagctacaaccataaagatattataatgatctagtcctacttgagcgacatgcgctcctacagactggaagagctgaaactggtccaaactgtcaacttgatgatgcatactcttctgaacaggatgcagacgttgaggtgtcaattcatacggcgcacccactgccccaaccggagctgcttcattggacgaccaacatagggcttgcctttgcgaggacacttccatttgctgctcggctctggtgctggagctccgtttacttctgaaaatttagtcctatccgccaagggacgtctggtttgctcttggaccaaaaccttctggtctggaatgctgacattctcttttaagttcctcttttgcttctctcccccagttaggtgcctcagatttttatttgttatgtgttcctctggttgcttccttttcctctttacagcgataaaaccatctgatgcaactatttcttgtcgccttttactgtctgatgaaagcttgcagcggtcagcttcccctaggggagaattctcttcactgtcagtttcgcgtaatgcacaattatcttcagtctcagctaaactgggtctgttgcgactaacaatatgtgtgctgtggtcaacaccatcttggatcttttccccagt

SEQ ID NO: 103978 - DNA, 572 bp, Zea mays
  Clone ID: MRT4577_26332C.1
atcagtccggatgtggtcggggaggccgcgcgacgaagagttcggccttctgctgcgcgtcgagcttgcgcgtgtggccgagcatagcgttgaagcggtcggcgtagtcctgtaccgtcgaggtgaagggcaggcgggcaagttcggacaggcgggtgccccgaacaggcggcccaaaccgaagggtacagacctccttgaagcgtccccacgttggcatgccctcgtcttgctccagggcgtaataccaagtctgcgcagcgcccttcaggtgatacgaagcgagccaagtgcggtcagtcaccagggtgcgctggccccggaagaactgctcgcattggttcaaccaatttagggggtcaacgctgccatcataggtggggaagtcgatcttgtagcagcgagggggagtctgtgccgcctggctatagcccaggccagcagcgggctcgacgaccccagaggaggctgtctgggtcgtgggttcatggaagaggactccctcgacgcctccgtagaagaccctcccagaggccggcgcgtggggggcttcagactgcaccaccgacgac

SEQ ID NO: 103979 - DNA, 976 bp, Zea mays
  unsure (1)..(976): unsure at all n locations
  Clone ID: MRT4577_26333C.1
aaaacccacgcgaccgagaccagcagcagcaccacctcctccctccatcctgatccgatctgactgagccggccatggcggttagggtttggctctccgccatcctcctcgccttcctcctcgccgcctcccccttcgcccaagttgctagagctcagtctgaggaagatgctgctatgcaagaagttgttgatggggctgatctaggatatgtgggtgatgatactccggtttccagtgaagagcctttaagccctgctcctggtgtggagactgtttgcgtcttccccaaaaatgctgggaaaattgtaccagcgggtgaagaaactgagctgttggttggcctgcaaaatgagggtgaatcaactttgaatgttgttgctgtccattcaaccctacatcttccttatgatcataaaatgtatggacaaaaccttacagttcagagtttctacaatgcatcagttcctgtctctgtgcaagcaacctttccctatacatttgccgtgagcaaattcttgcagcctggagcatatgatcttgttggttacattgtgtacgagattgatcagcacccttatcagaacgtattctacaacggcaccattgaggttgttgaggtcggagggttactgagtgttgaatctgtgttccttattacccttggaattgcacttcttggtctcctaggattgtgggcttatggtcaagtgcaacagctctcgaagaaaacaaagaaaggccccaaggtggaactcggaactggaacaactgatgccaacatggacgagtggctggagggtaccgcgtttgcaaaggacaaagccaagaaaaacaaatagattcgaggttgctgggcctagctagacatttcaggatctagaatgagacaaatcgagggtagcccttcacaagtaacctggatagatgagannaccggaggtgtttgaactagtctcgtggctgcacatcttgt

SEQ ID NO: 103980 - DNA, 476 bp, Zea mays
  Clone ID: MRT4577_26334C.1
catatgcacaaacaaaaatctcagcatgatgcatgatttattggcaacaccttgggcccaatcgaccttctcagcccgccgcacgatttattggcaacacttcgggccaaattgaccttttgatcccgcctgtcgtagtaatttatgtatgtgtttatgtagcttggtaaagctggtggtggtggaggaggttgttgttgttgtcgttgtctctccaaccgtgattgccttatttcttgacgtatctcccaacggacctgacgtatttcctcgcgttctcgtcttatctgattttgcatctcggtcaccaggtctgttaattgttatattaccagtctttgggcagcaaccacttgatcgatttcaacaggtggaggatttggaggattcatttctgtttgctgttgcgtgataatctttcctttcctgatattgatcatgaaagttagaagcatatggtaatagttttgcaaagg

SEQ ID NO: 103981 - DNA, 380 bp, Zea mays
  Clone ID: MRT4577_26335C.1
ccgactcgttcgccttcgcattccatctctcttgggctgtacctttgattcggggagggtgataatagggtcaggcctgaaagccagtgattaacagtgcaagaaaacacatcatatcactgaactgctagctatgactaggagctgcagagcgacccatctgtggtattaccatagaatattcaaagcgacgtgagccatacagtgcaaaaggtactagatctatatatgaatggaatcgaatgaatgactgaaaagccacctttaaaagttagacagacttctgactccaaattaaacttactcaattcaattggaactactgctatgatctgcatgatgatacactatgacacatatagagcctacgagttcacatt

SEQ ID NO: 103982 - DNA, 261 bp, Zea mays
  Clone ID: MRT4577_26336C.1
gcggtactacttacattcatgcttacagacctaagtggtcgtccaaagccctgagggcggtcctccttgagaccttgcctgcacaatagctatcggtgagctactatgactggaattatcaggacatccgtatgcttcatgttgtgcaggctcatatctgatagctggattccgtacacccgtgttggatactgtctaggatagtccttgcctgcaaggatcttgttgttatggtttggcggtcgagcatcgcatgttctg

SEQ ID NO: 103983 - DNA, 363 bp, Zea mays
  Clone ID: MRT4577_26337C.1
aaatcatatacggtttggtattcagatcaaccttatccagtttgttcattggcgccacgccatttacactaaaaggaaagtaaatgctattcatccatacagagttacagactaccttgaaaaggagggttatttttcatatacaaacttgaactttattttttttatttctttgagaacacaactacatacgtacaaacagacttgcccatgcatacactatgcgcaatgccataccatacgacacgtagacagatgtaggatttgtctttgtgggtcttaatggtgagttgagagcgagggcgccacgctaggcaacggcgaagagatggctggcttaggtaggacgggagccagagggga

SEQ ID NO: 103984 - DNA, 1483 bp, Zea mays
  Clone ID: MRT4577_26338C.1
tgatattagagaacaaatacaaaaaggagtggcaagcggatgaagaatcttgccataggtctccattgactgtaacaaaattttacatggaagagcagctggctaaagcctatacaataaacatgttcagaaaatttcaagatgagttgaaagcaacaatgtattgcgatggtatgccaattaaagttgatggccgacttgttacttttgaagtgaaagaatgctcatacatggaagatggaaaggacacagagagcaggacctatgaagtttacttttgtaaagaagaacccaaagttgaaattgagtgtgaatgtggtttcgttcagttcactggcatcctgtgtagacatgcattgtctgtgttgaagttgcaggagatatttgagatcccaaaagattatgttctcgatcgctggagaagggactataagaaattatattataatgcaaagaaacctaatgaaatgcctcttagtgacattgttgaacgctctgattatttgtttacacaatgtagtcagctgctcaatctagggtttgtatctgagagtaggtaccttgttgctctgaagttactgagagaaatggaaagatctcttctggatgatggactacctgctagagacaggcagccaatgcttctttcctttgaggctgatgcaccagaaaatggtcaaggcctttttagtcctcagttttcagagggcgtaaagaattctcagtcagcccatgcaaagcgccgtggccggccactgaagaaagtgacagaatctactgatgataccgtaacacagccaaataaagaacaggatttcctacgatcatcatttgtcacagaaaatacaaatatgatccaagggccatcttctgcctcccatcttgaaggtcctcacatgggagtgcaaggaggcattgatttaatggatggaataccaaatctctcatttggtaatcattttggaatggatattaatcaccaacatcaagtacccaaccaccaaaggatgcagcagaacaatttcatacaggtgcaggcagaaccacatgggtttgggaatcagtgggtttaccacccaatgttgcaggataatccagtgctaagaactcctgcacgaagagcagggtagtgtgtattcattgctctaattatttcagttaaactttaggcaccatgacttctcaggctcctgtaatgacttcctgagtcctgaactaacctaaggataccgaggctgtacgtggcactggcactccagaatccagatggcaagaacttggcagtgaatccaattgattctaacatttttgttatatgatactgttagctgctctcactaggatgaatgttcaaactgtacatagcactggctctataatatgatctttttatttcctgatttgcgccagaactgatattttgtggcagaggacgcgtattgtttagctgtttagcatattggtttgtttcagacaaagatca

SEQ ID NO: 103985 - DNA, 589 bp, Zea mays
  Clone ID: MRT4577_26339C.1
ccccccttccacgcccctggggtttttgggaaaccccccctttttaaaatttttccggggtcagggttccaaaaggatccagaacctggcgaaacttcaagacaggggcccctacccttttttttggggaacaaacccaaacccccttttttaggggtttaaactttgccgaagtttccccccccccctaaaaaataaaggcctccaagaggttcccggggcaagattgaccccaagcctttttgggggtggggctgaaacaatgaaaacccaatttgaggcttggggggatcccccggcctgaattccttgtttcctggagatcggccccttatttggaagccatttgggggggttttgccccccttccaaattgggcccttgccttgggaaaaaacccacaaagggtcctgcaaaggggggagcttgttgcccttaaagggcaactgcatttaatcaggccctcaaaaaacagagggggggggatcccactggggggaaggtcctgaggggggggaaacttgtcaaggtgaaatgtttccaggaacaaaacaggacggaatgcccctagggcccggtttggggcccc

SEQ ID NO: 103986 - DNA, 334 bp, Zea mays
  unsure (1)..(334): unsure at all n locations
  Clone ID: MRT4577_2633C.1
aaaaaagggggggggaaaaaaaagccccccctagggttaaaaacatttgcctgttacctttaaccgacaatttaaaaccccaaaagggttttcgggtttttcaagggaaacataaaaaaaggggggggcccgtgtccttttaaccgcgtcgagaaataaaaagctttccccaaattcttttttaaaacaaggtgggggggggtccccccctttggcccccaaagggctcgctgggggntgctctaacttccgggggggggggancttttttttcccctttttaaaacgggcaaggggggggatccttctttccacaaaaatgagccctaattta

SEQ ID NO: 103987 - DNA, 390 bp, Zea mays
  Clone ID: MRT4577_26340C.1
agcattacaagcaaaaccaaaagccacatttttttgttcacagcagacggcgtggaaagagaaggaaatgacacacggtgctgtatatatatccattcactgcttcgagctatctactgcctactgaaagaaaaaatgtataacgtaatagtatgtagcagcatcgatcagggcatgcagctagggaggctcacagcttcagagtcagatcaagcttaggcagctcgtcttgtccgactccaacccctgggctgtcgtcaacgtacccaccagtgaacagccgttggccggcggcaaccaccaccaccaccgggggagcctggccgctgcgtgcgtcatcatcccactccgtcaccggcgccggtgcatcctgcacgaaggcgccgtgga

SEQ ID NO: 103988 - DNA, 687 bp, Zea mays
  unsure (1)..(687): unsure at all n locations
  Clone ID: MRT4577_26341C.1
ccggccgggcccacctttcatgcgctcgactctagtgcaagaaagacaaccggagcgccacctccattggtgagggattgccgccgccgtcgcccctacttcctccatcgttcggtgcctatgtggagactcgagacgtccaccggctcacgaaggatcttggcggatcttgcctatgctcggatgggtgcatcagtgctcgccgaagtgtactggagtctagaattcgttggcaagccgctttgggtcggggtcaatgtcgccgcggtttcggtcaccgattgtaatcttgccgacggagagtacgtgctcatccccgagcaaggacctatccaagaggaggaccaggagcaggctacagaggctgctattgaggatctccccgcagccccagcaattgaaggttgtccacgttgcaaccactgctcaggagaagatgaagccatggagggagacttccaggagtcccaagagtatgatgagttttaggcgtgggttagcggcaacccccagtcgactgcctatgaaggccgcatgtatctacgcttcgtttccgcactttgattattgttaaagactatgtggatgtatcagacatcatgatgtaatcgactattactatcctttatgttattatttgaccattgtgtgatgatgtccaaaaaaaaaaaaaaaaaatttgcggnc

SEQ ID NO: 103989 - DNA, 310 bp, Zea mays
  Clone ID: MRT4577_26342C.1
gtggcggccgctttcgaggccggcccgggcctgggaaaaaaaaaaaaagaaaaagaaagagagtcacgcgaatagagaaatttgtatgtagattcagcccggtcagtttgttgactgaggtagagtacttatgctccattttgcttatttaggctttctggtttggtgtgataccatgtgactatatgtgtatcatcattccttgtgctttgtaaaaccaatttaattgtgatgtagactttagaacagctgacgtccgctgcccaagcttatagacattgcttaagaaaggagtattaagttgtcgttg

SEQ ID NO: 103990 - DNA, 374 bp, Zea mays
  Clone ID: MRT4577_26343C.1
ataaaattggagtgtatcgatcagttaaggtggagcaggctacatatcaatatatcatggacatcactgagtcgtctcgccattttatttcacgcctaccacaggacaggaacatttaggatacataatgcttagaactttgaataaatgaacaaagaactagagcagctctatttattagtgcctcaggaaagttatctgcttgggatccaaaagtgctgacttgtttaaattgaagataaaattagaaattgttaatagaaccaatggctcacattatatttattttagtttgaaaatattgcaattcatggacgtaaaacatgttgagatatttggtgattccttactgataatgcaacaagtagctatat

SEQ ID NO: 103991 - DNA, 1696 bp, Zea mays
  Clone ID: MRT4577_26344C.1
gcacgaggggattacaagcgttaccgccgccatcttgccgaaaccgacggacgtcacgtcaccatatatatgaaatgtggccatgagagctgggcgcagttctcctattaaggtccaagttcgtggttagtgattacgaccagcaagtcacaagtgagggcgggagaggttgaggttgaggaagagcagaggaatccattccaggagtgtttaatggcgggaggcaaggaagcgcacgggtgggcagccagggatgtctctggtcacctctccccttaccacttctcacggagggttcagagagacgacgacgtcaccatcaaggtgctcttctgcgggctttgccacactgacctccacgtcatcaagaacgagtttggcaacgccaagtaccccgtcgttcccgggcacgagatcgtcggcgtcgtcaccgacgtcggctccggcgtcacaagcttcaagcccggcgacacggtgggcgtgggctacttcgtcgactcctgccgcagctgcgacagctgcagcaaggggtacgagagctactgcccgcagctcgtggagacgtccaacggcgtgagcctggacgacgatgacggcggcgccaccaccaagggcggcttctccgacgccctcgtcgtccaccagcgctacgtggtgcgggtcccggccagcctgccgcccgccggggccgcgccgctgctgtgcgccggcgtcaccgtgttcagccccatggtgcagtacggcctgaacgcgccggggaagcacctgggcgtcgtcggcctcggcggcctcggccacctggccgtccgcttcggcaaggcgttcgggatgaaggtcaccgtcatcagcacgtcgctgggcaagcgggacgaggccctcggccgcctcggtgccgacgcgttcctggtcagccgcgaccccgagcagatgagggcggcggcgggcaccttggacggcgtcatcgacacggtgtcggccgaccaccctgtcgtgccgctgctggacctgctcaagccgatgggccagatggtcgtcgtcggcctgcccaccaagccgctccaggtgcctgccttcagcctcgtcgccggcgggaagcgcgtggccgggagtgccggcggcggcgtcggggagtgccaggccatgctcgactttgccggcgagcacgggatcaccgcggatgtggaggtcgtcgggatggactacgtcaataccgccatccagcgcctagagaggaacgatgtcaggtaccgcttcgttgtcgacgtcgcgggcagcaagattggaggctaggcatcaccattcctagtgttctgtcgatcgacgtgtgatttgcttcttcctcgagcgtgtcttattgttctggttggagcacgtacgcggccatcacacgcaggcgtggataataaacaaggtagagtttcgggttgtgtcgtttctggatgtatggtgccggtggataataaacaagcttaattggcgtggtcgaaaaaaaaaaaaaagctcgggcggccgctatctagggataggctacggactcaaaaaaaaaaaaaaaaaacaaaaaaaagaaaataataaatactacaacaaaacaaaaagaaaaaacaaaatgagttcataacacgttcctttccgcgctccatgtttgctgtttactggttgctattaaaactgggcggttctccttttccccctgtgc

SEQ ID NO: 103992 - DNA, 299 bp, Zea mays
  unsure (1)..(299): unsure at all n locations
  Clone ID: MRT4577_26345C.1
aaacccaaaaaaaaacattaggtttaagttacagttatttaactaaaaatatccaacgtcaaggcataaatgcaaaatgcaatttaaaataaaaagcccaccctaaaaaaaaaaagcatgttcaaactaaaagaatttttttcctgaggggtaaaaaacaacatacaacacactatgatcctacaaaacaatagtgttttagaagaaaaaagagccaactaaacttgnctaagtcttttccagggtattgnagttgagcaatttctaaaaaaggtaaaaaagggcaaaaaacatccccc

SEQ ID NO: 103993 - DNA, 1500 bp, Zea mays
  Clone ID: MRT4577_26346C.1
gggggggggggggccccttggacggggttattaacccggggttggccgaccacccctttgttccgcttttggacctgctcaaaccaatgggccaaatggtttttgttggcctgccccccaaaccgctccagggggctgcctttaacctttttcccggcgggaaaggcgtggcccggaattcccgcggcgggagacgacgacgtcaccatcaaggtgctcttctgcgggctttgccacactgacctccacgtcatcaagaacgagtttggcaacgccaagtaccccgtcgttcccgggtaactatacatgttcaccaacacccaagccattccattttgcaagcgaggacagggatttactcagacggccgcagcaaagcaacaaattaaccaccctaggctcgctcatcctttcgggcgcaggcacgagatcgtcggcgtcgtcaccgacgtcggctccggcgtcacaagcttcaagcccggcgacacggtgggcgtgggctacttcgtcgactcctgccgcagctgcgacagctgcagcaaggggtacgagagctactgcccgcagctcgtggagacgtccaacggcgtgagcctggacgacgatgacggcggcgccaccaccaagggcggcttctccgacgccctcgtcgtccaccagcgctacgtggtgcgggtcccggccagcctgccgcccgccggggccgcgccgctgctgtgcgccggcgtcaccgtgttcagccccatggtgcagtacggcctgaacgcgccggggaagcacctgggcgtcgtcggcctcggcggcctcggccacctggccgtccgcttcggcaaggcgttcgggatgaaggtcaccgtcatcagcacgtcgctgggcaagcgggacgaggccctcggccgcctcggtgccgacgcgttcctggtcagccgcgaccccgagcagatgagggcggcggcgggcaccttggacggcgtcatcgacacggtgtcggccgaccaccctgtcgtgccgctgctggacctgctcaagccgatgggccagatggtcgtcgtcggcctgcccaccaagccgctccaggtgcctgccttcagcctcgtcgccggcgggaagcgcgtggccgggagtgccggcggcggcgtcggggagtgccaggccatgctcgactttgccggcgagcacgggatcaccgcggatgtggaggtcgtcgggatggactacgtcaataccgccatccagcgcttagagaggaacgatgtcaggtaccgcttcgttgtcgacgtcgcgggcagcaagattggaggctaggcatcaccattcctagtgttctgtcgatcgacgtgtgatttgcttcttcctcgagcgtgtcttattgttctggttggagcacgtatgcggccatcacacgcaggcgtggacaataaacaaggtagagtttcgggttgtgtcgtttctggatgtatggtgccggtggataataaacaagcttaattggcgtggtcg

SEQ ID NO: 103994 - DNA, 294 bp, Zea mays
  Clone ID: MRT4577_26347C.1
agcgtcgggcccggtaattcatccatgcgtatggggcgccctcgttggaagcctgacagcattgatggagaattgactgaagcttgtggggtcttgagaggaggggccgattacttgtgttgagttagaagagcctaaggggtctgtattcacataggacgaacccaaggtgaaatgacccagaccccacacttgacaggaccaacggaatattgcatatagataacaatatgaaagctatctgaatgatagcacagcgacagagagaccatgtgtaacagacggaggatgcac

SEQ ID NO: 103995 - DNA, 285 bp, Zea mays
  unsure (1)..(285): unsure at all n locations
  Clone ID: MRT4577_26348C.1
gcagaaacgagagggcaggagcagcgggggtcccggcgatcccgccgccggtcgccctcacagtcctcgtcactgccgccgtttctctttccangcatcatggtctcccgtggnggtnacgngggtggtggtcaaagttctctgggttanctcgttggaagcggtgagacccccaaaccagcagtggcaccaccagctgtaagtgctccacctgctgcgtgcggtgntnnactgctgagaaaccactgctgcaagcctgatggcaccatcagttgctgtggggtt

SEQ ID NO: 103996 - DNA, 392 bp, Zea mays
  unsure (1)..(392): unsure at all n locations
  Clone ID: MRT4577_26349C.1
gccgggttgggtttgctcgggtggggggggggtgcggtgcgggttctttctgtggtggggctgctgcgtgttgtttgcgggtgccacgtctgctgttgtgcctcgccgggtcggatgcggcggggngccctggttggtgattgggccgtttggttgtgctgctgtggtgtccgttgcgaggtggtgggctctttcgttgtcgttcctgtatcttcgcagtccggctctcggttgtgtggcttgtgttgcatctgcncgggaaccattttctttttcttcctttggtgttgtgccggttttgncgcttttgatggctcgtcggtgtttgtttcgtggtctctttgtgggcgtgcttgttttgtcgttgtgtgttttttgtggttgtgagtgtt

SEQ ID NO: 103997 - DNA, 246 bp, Zea mays
  Clone ID: MRT4577_2634C.1
ccggccggggccaacttctaggctggatacctattgagtaagggagaacttcggggctgtcatatgttcgacggactttgagccataaattcttgacatacattttgataccttgttctatactggcaatggagcaaggtatactatagtctataacggtcgccgcaacgcctgaagctagatgcagggcgcaggaaatgaagaaaacataatgcgacgaaaaaaaaaaaaaaaaaacccgcggcc

SEQ ID NO: 103998 - DNA, 371 bp, Zea mays
  Clone ID: MRT4577_26350C.1
tttattttcagtttccaaggcagtgggcacctgtttacagtgatctcgctctgggtcctcagaggaaaagacaaggtaatgcatagttgtcagtgaatctaataggtccaaaggtatatgtttgcactaacatggctgatgtggctaaaagaccagctacaggactctggttggtccttgcaggacggaagagctacaaattacctgtacatcctcaacaacggtgatctctgattcagattattcagcttgaagacgagctttacaagtaccaatccctggagtgtgaccgcatatactacgaaccgggtggaccgtggaaacagtattctaatgtttgcacaggactagtcgagtcggatgatctgtgc

SEQ ID NO: 103999 - DNA, 861 bp, Zea mays
  Clone ID: MRT4577_26351C.1
attgattcgattgttgatgattaatcggccgtattcctctgtatttatagaggaaggggctggacccgttacaaacaaatttctcgagttaattccgcaaatctagccaacaactatagcaagaaactcggaaccttttttttttttgcgcgcgcggtccgtccgcaccaccagtgcggaccgtccggtttcgaggccggaccgtccgtacggtcatttttgctctccaacaatatgatacatgatcctttaggcctaatttgggtactatagtattaaccccaatccacatgtgttaggtcaatactagagtacccaaataaagtcttatgtgtcatgacctgagatagtcttaacctgcagctaataaagagagatatagtccgttgatccctcatggtggaacaactacttatgatgtcaataaatgccgacgaagccattagtaaacattaaaaatacttcaagggaaaaaacatgagaagagtctaatctatgtgcataaaatcatataatatattagatagacgtgtaatttctcgggtcaccttgctatctatatgtaatcattaaaaatacgggcgtgctcaccatgaataccacaagtaaaaaaactttaagcctacggtgtgcggattcggttatcagcgttagtgctattttcacctgtggtgccttaaaaatccgctagtaggaatcaaatttctataggaggttcgttaagaaaacgcatgtagaaatccatgatttctacagacgattttcttaaggaaccgcatgtagaaatcgatttctatagacggatttctacattttatccttagtattttggtttttcaaacaatctcgcggacgcgtggg

SEQ ID NO: 104000 - DNA, 625 bp, Zea mays
  unsure (1)..(625): unsure at all n locations
  Clone ID: MRT4577_26352C.1
gccggccggtccgggaaaaaaactttttgttacttatgtcgtggaattctaagacttggtcttgggttaagaaatacttttctattaaccctttgtcaacagacggtatgcctgttgtcggtaaattccgtacacctgctgttgcttctcgacctgaaaaatacgtttatcccaagtcaaaagcttccaacattagcaacaactattatttccaacgtgacactcgcagaaactatcctcgtttagctgtatacactcaaaaggaggttgctggtcttcttgaaggtgcttccgtcaagcctagccttaccccagaattagcaagtgatgtagccaccactactgaaaccaaaccccttgttgaagtgttgaactcccgtcaactttactctgtcaacaagcttcctcctacttctaactttggtctcaagcccaaatggaagatctctgaagattttgttcctcctaatgacggttcatacttccctatgaaagttattactacatagaccattcaattttgaataaaccttaaagtttgtatgacagctannaaaaaaaaaaaaaaaaaaaaaaaaaaaaaaaaaaaaaaaaaagggaaaaaaaaaaaaaaaaaaggccccta

SEQ ID NO: 104001 - DNA, 232 bp, Zea mays
  unsure (1)..(232): unsure at all n locations
  Clone ID: MRT4577_26353C.1
cgcgagctctccacccctcacacgaccctcctcnggcgcggcggcggcgatgcagatggcgcgcgaccactaccgagtcccaaccggccgtgccgcctcaacaccctcacgcccacccccacgcgcccccgcagcatgctaatccgcaccaccacatgtccgcagccacgcgtgggtcgtcatcccgtacccgccgccgccgcccatggtggccgcgccaccacctccgccg

SEQ ID NO: 104002 - DNA, 304 bp, Zea mays
  Clone ID: MRT4577_26354C.1
ttttttttttttttttttttttagggttctgggtttttttttttttttttttttttacaaaaaaagggcgggttcaatttccatccatcctgccggaatcgaattggggcttaaatagcggcctcactttggggttttttcaaacccaacaaaattcctggttcggggggggcgttggggtcgacctatgaccaggcctgaactggccggctacccttaacagatttttaaccccctcaaaaaggaaatcttggtctaaaatagaatgggcaacccgatccccttaaaaaaggccaggtccccc

SEQ ID NO: 104003 - DNA, 571 bp, Zea mays
  Clone ID: MRT4577_26355C.1
aaattgccaaatcaaagcatcttcttctgaggaaaaaatcatactatcaatgttttaagtaaagatatatgcggactacaatcagagtcttttccccctcctgaacgatgacatatgtgatagcttatcagcatttgcatcctgttgaatagtagctaccaccaccagtatggattactagtatctggtttcataagcagggggaaggggtgaagtaaaaaaaacatccatagttgaaggggttacgtagacttttccccaattcaaaagtacaatatatactttgaagattcatgtcccttaatgagtaaatgtctggcaaaattgcagctctatgttctgtagactatagttgatgcgcactactgtaacattaagactaaataaagcctattcaacacaacattagacaccaactagactatcctgtatagctcaagcttacttggttatttctttttttggcaagttgttgcaagcaaagatcagctccaagaatcaattcttaaagagactttcatgacatgtgtgagaatcttaggtcccattacttgagtataactttccctac

SEQ ID NO: 104004 - DNA, 335 bp, Zea mays
  Clone ID: MRT4577_26356C.1
cactgctcgagtcataaagctcattagaccgcaaggggcctagacacccctgctggagtgatggctcacctagccaactaatagttttgttttgtacatcttctaggaacttatgtccgtgtctgaacataagttaaccgccaacttaagatatagcgactccatgtcaaacatcgaaggcctgaccttgaacattacccccatctgcctgacgcttacccagccgtgcttcggctagaccatttttggtctcgcaaccttgctatgctccaacagccttcttgatggccactacctgggccaaaagttagtcatgacgctaatgaaaccgtaga

SEQ ID NO: 104005 - DNA, 246 bp, Zea mays
  unsure (1)..(246): unsure at all n locations
  Clone ID: MRT4577_26357C.1
gatactgacagcagactancgactgtnanncgtgggagacatacgcgctgacttgcgagactacgaagtgttagccagcctaataccagctcgcctaccgcaatacatacctgaccccctaaactacccacacccgacagtcatccccacgaccgccgacactcgtcgcgtcgcgtcgtcaccggcgtgaagatggtcgggccaggcctctacaccgagatcggcaagaagaccagggatctgctg

SEQ ID NO: 104006 - DNA, 425 bp, Zea mays
  Clone ID: MRT4577_26358C.1
gcacaatcacgtaccgcgcatggcaggcaacatatcatgactgctcatgctcctcgggcattgggcctgtgctgcctcggtgagcattctgaggcactgctgacaacctcctatagcttactttgttcattgatccctactaccaatgatgcacaccgtctgctaacattcagtcatcttaccgtagagtacccaacgggctatcgcaagaggcatcatcccgctatcacgctcggtgctgcaacaatactgagtcctctcacactaccatccttcggggcatctattgtcacacaacatatcggcacgacacctccaccaacgctggctagccaaccttgcgttctacctttcgcagcagcagttacccatgtggcacaattcggcacattacatcagggcactgcagctacatcagctcgggc

SEQ ID NO: 104007 - DNA, 1324 bp, Zea mays
  Clone ID: MRT4577_26359C.1
gggccgcttttttttttttttttttcggattgaaatatttcacagttgtacaattacaaatatatagcaaatctctttctacataccgactaatcaaccacagcacagaagcagtaagtagcagcaataaatatgggagtccaaagttacaacccacctgtgtgtttctccagccaaatccggcggacgacccaaccgacctcaccgtggctacgtccctaccgtcaaatgttacacggccgccttgctcaagaggggcagctgctgtggaaaacacagacttgctatatatctctccaccttgggctaaggctcggcaagaagcctgatggagaaaggagcccagacggcgactgcgggaaccagagacccggcgacggcggcggcggcatgggtcccgggccaaggatgccggtccccgccaacggagacagcgcggggaagttcggcgtgagcggcggcggctgcagctgcagctgcgggacagctgccacaccctcaccaccagccttcacatcctcatcccccgcctgtaccgtcgcctgggatactcccttccccaagcagcttcctcaacctgctctcgcccacgcccaggtcgccttatccgctactctcgccagggtttcagcacccgccgccgctcacgccgaacttccccgcgctgtctccgttggcggggaccggcatccttggcccaggacccatgccgccgccgccgtcgccgggtctctggttcccgcagtcgccgtctgggctcctttctccatcaggcttcttgccgagccttagcccaaggtggagagatatatagcaagtctgtgttttccacagcagctgcccctcttgagcaaggcggccgtgtaacatttgacggtagggacgtagccacggtgaggtcggttgggtcgtccgccggatttggctggagaaacacacaggtgggttgtaactttggactcccatatttattgctgctacttactgcttctgtgctgtggttgattagtcggtatgtaaaaggagatttgttatatatttgtaattgtataactgtgaaatatttcaattcattcacttctcttagatgcaaattctggacatgttctactttagattctcgagtgactaggcttggaaatctgtaattgtaaacctgtagttcatgaaagagtagctctttctgacaaatctcaaactgatgggtattgttggtctgcctgttaaggcggaaaaaaataaaaaaaaaaaaaatatataaataaaaaagaggaacacaaaaccataaaatgacaacataagtacaaatatcggcgaacaaaaa

SEQ ID NO: 104008 - DNA, 1512 bp, Zea mays
  Clone ID: MRT4577_2635C.1
cctcgaggccggccggggaaagatatggcctcgagaacggccgccacttcctagcgttcgactgcccgagagctatacgctcggccgttttctgcatcaacggtggcaggcggagcaaccgaacacgcccgccgccgccctactcccacctgcccccgtcttcgttgccggcgacgagcacccactacaccagattaacatcctataccatggcctctctgccttgttcacaaataaagttaagcaaagtacttgtcaggaggaagtttcatgagagtggacagaccaatttgccaagtcctcttcactggaaacccttgcgaccaggccgttttgaaaatcttgtgctgcgatgcaccaagaatttgtcatgggaaacatctcttccatatgcctctgcagaggatgatgccagtatcatcaagggaacaggtgttgttgaacctattgatacagaagaagctccacagattccaatcctccagagtgatgaagatgttgtagaggtgaagaatgaaccttcttggcatcttaaggcatttaaactgccaatgtggctagtagggccttcaatcctgttggttacgggtatagttccaactttatggctgccattgtcttcagtgtttcatggtcccaacatcgctggccttctatctctagtcggacttgacttcatttttaatatgggagcaatgttgtttttccttatggctgatgcatgcggccgtcaagagaacagtatttttgacctgaaaaggcagataccaatttcctacaggttctggaatctggctgctaccatagtaggctttgtggttccatttgccctgttttttgcatctcgcaggggcactctgcagccacaactaccattcgttccatttggagtgctgcttggaccgtatcttttactcctatctgtacagatgttgactgaaatgcttacatggcactggaaatcgccggtatggttggtagctcctgtggtttatgaaggctatcgggtactacagctgatgaggggtctccagttagctgacgaaatcagtgcgcctgactggatggtgcaaagtcttcgtggcctggtatcctggtgggtactcgtccttggaatccaattgatgcgcgttgcctggttcactggactcaattttgctagaaattcaagctatggagcaagtggtgatatgaaccaataaatcatgcaagaaaaacttgaggccgaacatctttgagaacctgcaatgcctgagcaatcgttttgtgacgctttttgtagctgtggtaaatagtgcagtttctcttttgctggagcaggaaccaggctgctagatacttcatactttgaactgtgtaagtattgtattgtagttagtatacaggaacatgaacatttgagatttgactgagcatcgtgctgaacccagaaacatcactgtatatattccttgaacatactacaccgtaactactcactctatcccaaattataagatattctattttttt

SEQ ID NO: 104009 - DNA, 2303 bp, Zea mays
  unsure (1)..(2303): unsure at all n locations
  Clone ID: MRT4577_26360C.1
attttatttgttatcttgtttggtggtggttgtctgccctccatgcatctcgccatcttctatttatagtagccccgccttctcccgggggcacgccatacaattctcacacgcgcgcgcccaacacactagcctgcaggatcgtcgagcgcgaggcggctgccccgccggccggttcgttcgctctatagcttgagaccgatcctagctaggccaagacgatatcggcggcgatgatgatggacgcggcgaggatcgtagagtacttcaagggcaagtgcatcctcgtcaccggctcaacagggtttcttggaaagatccttgtggagaagatactgcgggtgcagcctgacgtgcgcaagatttacctgcttgtacgcgcggtcgacgagccatcagcgaagcagcgcgtccaacaagaggtgatagacacggagctgttcggcctgctgagagagaaacacggcaagggcttccagcagttcgtagaggccaaggtcgtcgctttggccggagacatcgtatacgacggcctggggctggaggcagccgtgctggacgcgctggccaaggacgtcgacgtcatcgtcaacatcgcagcaaccaccaacttctacgaaagatacgatgtttcgctggacgtgaacgtgctgggagtgaagcacctgtgcatgttcgccaagcagtgcgcgaggctcaggatgctcatgcacgtctccactgccttcgtctcgggcttcagggagggcctcatcctggagaagcccatcaagcccggcgagtcgctgcgggagggcacgtacctggacgtggacgcggagctgcgcctcgtcaaggaggtgaagaagtcgctggcggcgaacggcgatggcgacggcgacagcacggagcggaaggccatgaaggagctgggcctccggcgggcgcggcacttcgggtggtccaacacgtacgtgttcaccaaggccatgggggaggccgtgctgggccagcagctccggggcggcgacgtccccgtggcggtgatgcggcccagcatcatcaccagcgtccggcgcgacccgctgcccgggtggatgcagggcacccgcaccatcgacagcatcatcatcggctacgccaagcagaacctgtcctgcttcctcgccgacctccgcctcgtcatggacgtcatccccggggacatggtggtcaacgccatgatggcggccgtggtggcgcactcggaggcgttcgcgccgccgctgccgcaggtggtggtgtaccacgccacctcgtcgctgcgcaacccggccacctacgacgtgctctaccagtccggacgccgccatttctacgagaacccgcgcgtcggcaaggacggcagggtcatccccaccagggagatgtacttcttcaccagcatcgccaggttccacctctacatgactctcatctacaaggtgccattagagattctgcaccttgtgaatctgctgctctgtggccttctctcgcggctctacaacgacctcaaccgcaagtacaagtttgtgatgcatctggttgacgtctacggcccattcgccttcttcaaaggatgcttcgatgacataaacctggagcggctaaggctggcaatggcgatgaagacccctgaggatcaaatgttcaatttcgaccctaagaccatcgactgggacgattacttcaccagaatccacatccctggtattctcaagtatgtgtgcaagtgaagccttctttcttcagtctatttgcagcatgcacatgcttcttcttcgccttcttactatcgaaagttaatggctcatattctttatgaaagaaatttataccactctgtttggttgtacctgttctatggatcgaccgggtgttaccaagaaacaaaaataattcgatctctgctagattgatatagttctgtatgggagagactgaggcccctcatatcgtaaatcaatagtgatcgtcaaacgagtgtatgctgtgttaggtggcagccaatatgtatcttgattaattgagaacttgtaatctgtgtcatatgtacgcgtgtcactgtcagtgacaatgaaaagcaaatgtaatatctatttataatggcagtgaaattcaggaaagaaaaaaaaaaaaaaaaaaaaaaaaaaaaaaaaaaaaaaaaaaaaaaaaaaaaaaaaaaaaaaaaaaaaaaaaaaaaaaaaaaaaaaaaaaaaaaaaaaaaaaaaaaaaaaannggggggcgcgccttttaaaggaccaaagttaacgtccccgtgcttcaaaggaaaaaatttttt

SEQ ID NO: 104010 - DNA, 244 bp, Zea mays
  unsure (1)..(244): unsure at all n locations
  Clone ID: MRT4577_26361C.1
aggatccagcttgcatccgaagaaaggctgatggcagatgtcaaggnttcatattcgaaactcgaagnacatggatgcgctcaccgatacanacataattttgcaaattaccagtttcagtatgatgattcggtcgctgagcaatgtggcgatagacaagtcgcagaatggaggacgcagatgtatgctgtcacttcaacgaatcaggcagctcgtcctgagcgttaccgtgatgaatgggatg

SEQ ID NO: 104011 - DNA, 487 bp, Zea mays
  Clone ID: MRT4577_26362C.1
caatcggccccagggggaaacaacaggtgggacgccgggtcccattcctggggcgggggggggggcgggccgggtggccccggggggaccaaagggccgggtccaaggaaaaacggctggagggggggagaaacccttgggggggggggggccctggatattaaaaaacccgggagccgggaaccggtggacccaacaattttttttgggggggggaccccgaattcaaggacgggtttggccccccggggggaaaaaccacaaaaaccgagggggggatttggccccgggaggaggcctcgcaatgggggggttggaaaccttggggaaaaggggggtttttaagccttccccggacccaacaggtttggaaaactgaaaacccccggtaaaaaaacggcatggggaaggctggaaaaaaagaaacttcacccttggataccaaaaggggctggtttttatcaaaaacaggttcaacccataaaaa

SEQ ID NO: 104012 - DNA, 769 bp, Zea mays
  Clone ID: MRT4577_26363C.1
acacgcgcgcgcccaacacactagcctgcaggatcgtcgagcgcgaggcggctgccccgccggccggttcgttcgctctatagcttgagaccgatcctagctaggccaagacgatatcggcggcgatgatgatggacgcggcgaggatcgtagagtacttcaagggcaagtgcatcctcgtcaccggctcaacagggtttcttggaaagatccttgtggagaagatactgcgggtgcagcctgacgtgcgcaagatttacctgcttgtacgcgcggtcgacgagccatcagcgaagcagcgcgtccaacaagaggtgatagacacggagctgttcggcctgctgagagagaaacacggcaagggcttccagcagttcgtagaggccaaggtcgtcgctttggccggagacatcgtatacgacggcctggggctggaggcagccgtgctggacgcgctggccaaggacgtcgacgtcatcgtcaacatcgcagcaaccaccaacttctacgaaaggtaatcttaattaagcaggacgtcgaaaagaatgttgtatgttttgaacgacttcgacgatgcatgcatggctatggctattacttgcagatacgatgtttcgctggacgtgaacgtgctgggagtgaagcacctgtgcatgttcgccaagcagtgcgcgaggctcaggatgctcatgcacgtctccactgccttcgtctcgggcttcagggagggcctcatcctggagaagcccatcaagcccggcgagtcgct

SEQ ID NO: 104013 - DNA, 248 bp, Zea mays
  Clone ID: MRT4577_26364C.1
cctccggcatatacctcattttccaaataatactcactctacaactaatctacccacacctggagaattttccttttgacatgtccaaaccatctcataccgatgttcaaacactttctcctcaattggacccaccaagcccctatcctggatacccccgcttcgcacctatccctccgactactaccccacctccatcccatttaattaccacttccgcacataccctttctgcccccctacacttc

SEQ ID NO: 104014 - DNA, 303 bp, Zea mays
  Clone ID: MRT4577_26365C.1
tttaattaaaggccacattttaaaagggaatgctaaattctatattactatccgggcatgctaaaaatcgtcttaatttacttttaaatcaaattatcaaaacttaattaaccgacatcatctttaactatacttaaaatcacatcaatcagtttttatattacactatcatttaattattatctcctgactatgcattactaaatcgattgcaatcatatgaagccatcttttatcaattcaaattacaaaaactacttttactactttcattcacacacactttataccattctataattt

SEQ ID NO: 104015 - DNA, 508 bp, Zea mays
  Clone ID: MRT4577_26366C.1
gtaccggtctagaattcccgggccgacccacgcgtcagcactgttgtcgcactgctcagttatccctggtggtgtgccggtgactgagtttgcaattccaccctcagcatcttcgctagcggtgaggctgccatcgttgctcgcttgtcgacgctcttcaaggaaacacgtggtacatgggcaagttcgttgtgcggcaactcgcgaagctgggcaaccagatcaccatcgcatccaccatggtaggtcttgtggagtgcaaggtgtacgcgtacaaggtcggtctggatgtgatcaagttgctggagcgcatgcagattcgacaagaggggtggtagctttggaagttgagatgagcttgcgctgtggagaacaacaggctcttcttttttgaacacggaaaggagtaggtcttttccatgcctctttttgatactaagaatatcaaatgttggatctttgttgtccttattaggtcctctctttttaatactttttcctggaaaca

SEQ ID NO: 104016 - DNA, 328 bp, Zea mays
  Clone ID: MRT4577_26367C.1
ggataaaaataaatataaaaacaaaaaaaaaaaaaaaaaacaaaaaaacaaacaaaaaacaggcatacatgggggaacttatataagagggggccaccctctttacacttccctccctcttttttcccttcccttctacctcaactctcttctatcctttcccctttttttaatcccctctccacttttttacaccctcgttactttaaaaaccttgccttacaaaactctatcctttcccaatttatccccctttcacaaaatcccctttttcccaattatcccaataccaaaaaccctttccaccattttcccttcccaaaatttt

SEQ ID NO: 104017 - DNA, 371 bp, Zea mays
  Clone ID: MRT4577_26368C.1
cgagccaccaagaagcaccattttttccttaagcattaacgtgagaaaaatactgacaggagtaacctcttacatccgatccagaatacatgctgatgtgatacatggcgtcgtcgctgtgagctcaggcatgtacactacagggactagacgaactgccacagagcgagcttgctcatcacacacacacatgggcggcatcaaactagactaaccagaatcaaccctttggactagggtgaacattacggaagcgaacaggctaacttggccgcccgggccccagcgatcatttcctccaaaccccgccggaactgtcgaatccgctcgacacggatgtacaccggacgcgtgggtaagacaccgaatat

SEQ ID NO: 104018 - DNA, 1406 bp, Zea mays
  Clone ID: MRT4577_26369C.1
cggacgcgtgggcggacgcgtgttcggtctcgtgggaaggaagttaagcaagagggagttcattctggtgttgcgtcagaagataagaagttcttggaaagtatctttgctctaatgcagaaggaggaaacattctctgggcaggttaaattaatggaatggattctgcaaataaataatgttacagttcttagtaggttcgtaacaatgggtggtttgaccattatgtcaacatggttaagtcaagcagcaattgaagagcagacatccgttatccatgttattttcaaggtgctgctccaccttccgttgcataaggctttaccagtccacatgtcagttgttctgcaaacaattaataagttgcgtttttatagaacacaagacatatcgagcagggctaggaacctcctctccagattgagcaaagtgcttgtaaggattcaggcattgaagaaacctcagaaggacttaatatgtaaacaaaggataagtgaaattctccgtgacgagtcttggaaatctgaagttgatattaccgaggaggtacttgctttgactgatggtgctaatgagagcagaaagcctgaacccagaaaaacaccaatgcttctcactgcttctgctattgagacaaataaaaggagttctgtgcagacaaaatccaaacaaaaaagaaaagttctacttgtggagcaaccaaacaagaaagctacgtggaagaatgctaattctgtcaggaacacatctacaaacaatagccggccattatctgcagatgatattcaaaaagcaaagatgcgtgccatgttcatgcaggagaagcgtggcaagattgacataaataaattgagtgataaaccacaagcaatggacacgaaaaaagcagctggattagtaaattcaaatccatcagctatgcccataagtccccatacgtcagctgcacaacctgttgacccaagcccatctacttcaaaacaaagcacagatcctcagcctgataatacagaaatttcaggtggtttgaagttaaacataggttccaaaaacaatgtcatagagaagttggattgcaagagagttctttggcaaataccaccaggtatatttttgctttgtgctccccaatttgccattcttttgaatgttgaatagttctgagctgcttattggacgataagaatcagcaaataggtgtgcagaagttccaagaactaagcatgctgtcaccagtgcaagcttccgaagtatttacattagtcaccgttctccaaatcagcatgtttctgtgatccagcttcagtcaaatgggaaaaaatatccccaaatcctgcacgtgtgttgtatgttctctaatgtcataaacttgactaagaaatttaaaggttctacaatctgcccat

SEQ ID NO: 104019 - DNA, 617 bp, Zea mays
  Clone ID: MRT4577_2636C.1
ggtaccgcggcctcttctcgagtttttttttttttttttttttttttttttttttttttttttttttttttttttttttttggaagcaccaccgaaaacagccttattttttttaaataccccgggagcaaggcggggaaataaacaacttttacaacatggggggtggaaaaccacccattttttaaaaacaaacccccataacacgatagcgggaccacctcacggaaaatcaggggataggggcaacacactggcctgaggctgggtaataaaaaaatttttttagtactggtaaccctgggggccatcctcgccctaatgaaactaagggccgacctcctggaattctttttggagcgccgccaggtcctaagggccctaaaaaaactaacttttttccataccttaacggacgtaccagggcacaaaggccccctgggggaacatgaggccaaacttggggccgaggcggaaaaacccctccacaacactgggggagtgggaaataatgcacacagaacgctgcaccttggccaggtccccaccaggcccaacgctaggaggctggtatttgatgccccatttgaagccagtggggcaccaatccacaaacg

SEQ ID NO: 104020 - DNA, 2238 bp, Zea mays
  Clone ID: MRT4577_26370C.1
ccgagagccgctgtgcctcttctttctccgtgaatgggaaaagctgtctgactcaccctcactgcctctgcgtgcgtgcgtcactgccgcgccgctcgcccgatcacgcgataaataactcgcctctctctctcctcctcaagcagtcaggctcatccagggatcaggggacccgcccgccttgacttttcacgttgcgtttgagcggtgctgctgatctgcgattcctcctctctctctctctctccactccacacctgagagggaatcctgctccctcttgctccgcgcccgcggcggcggcggcggctttggtatccgtgcgggtgtttctgtccggcgtttacttgccgggccagcgcggcattggaggagggagatcggaggcgtgatcgatggggaactgcgtggcgagcgggggcacgacgacggtcacggcggcaggtgctgcaggggaggacgggaggcggcgggggaggaggtggaaggcgccgcgggaggagcagctcggttcggtccccggccggatcttctccaacgacggccgcagccgcaccgccgccgtgttcacgcagcaggggcggaaggggatcaatcaggacgccatgctcgtctgggatgggttcggcggggaggaagacgtcgtgctttgtggggtgttcgacgggcacggcccgcatggccacctggtggcgcgcagagtccgcgatgcgatgccgctgaagctcatgtccgcggtgcgcgcgtccaaggctggcttggatatgcccgccgccgcgtggaggaaggccttcgcgcgcgcctacaagaccatggacaaggaccttcgctcccacgccaccctagattgcttctgcagtggcagcaccgccgtcaccgtactcaagctcggctcggatctctacatggccaacattggtgactcacgcgccgtcctaggctcgagggatggtggcgacggcggcatggtggccttgcaactgactattgacctcaaaccggatgttcccagcgaggcagaacggatcaagaagtgcaggggcagggtatttgctctgcaggacgaaccggaggtgccgcgggtctggctgccgttcgatgacgcgccaggcctggcaatggcccgggcgtttggggacttctgcctcaaggattatggtgtcatttcggttccagagttcttccactggtcgctcacagagaaggatcagtttgtcatccttgcatcagatggggtgtgggatgtcctcagcaaccaggaggctgttgacatcgtgtcgtcgtccccaagccgatcaaaggccgcaagatccctcgtcgaggccgcgacccgtgaatggaaaaccaagtacccgacatcgaagatcgatgactgcgcagtggtctgcctgtatctggacggcaaaatggaccacgaacgtgactcgacggcctccatggacaacatgagcctcgacgaaggttcagccgcggacccaaacgaagcccaggagcaggagccagcgctgacccgcaacttcacggtcaggacggtcgccggaagcgcccacgagaaggcgctgtcgggggcggtggatgcggtcgttgccggcgcagcccacgaccagagttggtcaggcctcgacggggtgacgcgggtgaactcgctcgtccagcttcccaggttctccgacgagaaggcgatcggctgaggagctgtgcaattctttggttttcagttaacttattatcttttcctgtttggaaatttagtttagtttgcccgttgtttgagagcaaagatggaaacggaatactgtatggtctttgtgatttgcatcggcgcgtaggtatagtgtgttttttgagccactgtggttttagggtgtgagccgcgacttttaacacggcggaatcgtgctttgctgaagcacaaagggttcgtcctgtgctgtgttctaccttcaggtatgataagcattcctgaaaggtgaaacggcaagggggcgccttttgttcagagcttgcgattttgctatgtttaaacgaacagctcgtgctcctaagcacactggggcgcaaacgcatgctaggcaccagtcatctgggggtgatgacgctgtcgggtggcctataaattcgagcaccgtccatcggcacagcacctggctttgtaaaaagagaagcgtgtgtctgggcagtggcggacccaggatttgaagacagcctaggcgaaattatactgctgaaaaaaaaaaa

SEQ ID NO: 104021 - DNA, 685 bp, Zea mays
  unsure (1)..(685): unsure at all n locations
  Clone ID: MRT4577_26371C.1
gcttcgcacagcaccgcttccacggcccccgggtgcagtgtgcccccctgccttgtctcgtagctctctaagaaagagccatggaagctgacgcactactccatgcgcccatgacttcctcttcctcctcttcttcctcctcctccgactccgtcggcggctcgtgcgtcgtcaatggcgcgcaggagctaccgtccaataccggcaagccgcacaagaacgtgaaacggaagagaaccgcgtccccgtccgctgctccaggtggcggcgtggcgccggcgccgcccgaggccgccatagcggacgacgactgcggcggccggcggcgcaagagggggagcgccggcaccaggcacccgacgttccgcggcgtgcgcatgcgcgtctggggcaagtgggtgtccgagatcagggagccgcgcaagaagtcgcgcatctggctcggcacgttcccgaccgccgagatggccgcgcgcgcccacgacgtggcggcgcttgccatcaagggccgcggcgcgcacctcaacttcccgcacctcgcgcacgacctccctcgcccggngtccacctcgcccgncgacatccaggnncgcgcagccaaggctgctgccgccgccgccgatgccgacgtanaggtagagcaatgcgagtcctcccatgcggtcgagacgccatcgtcgtcagc

SEQ ID NO: 104022 - DNA, 345 bp, Zea mays
  Clone ID: MRT4577_26372C.1
gctcttcatgccatgacgaccagtacgtgatcaccaacggcggacgggcggtcggccggcccggcatgcaggcgcgcgcgtgctcttcctttgtactgcaagacgacgatggatcgagaattcgagacgacggcgaccactctcgatggaagcttcaagtgccggtgccgtaagcgtgcgttaatttaattttgcgagacttaagggaaggacggattttggatggtactaagaaagaagctaggggattgcattggtgtgaggtgattaggcgtgcgtaagtggtggtgcgctgtgtctgtgatctgtgtatatatatgcaaatcagtagatcttatgttaact

SEQ ID NO: 104023 - DNA, 258 bp, Zea mays
  Clone ID: MRT4577_26373C.1
ggcacatttgggtctgaaggacttgattcaaataacaatacccacactgtgctggataacccattacaggactggtaccttcctttcccgacagagatacggctcgcgtgtagctgacagatccgatctaaaagctggtgttccatttgttggaccgctcaatcgtggcgctgatcttcccgaaggcgaccccagccgacgtggtcaacgctctctcgatcaccagcctcaagggccacggcctctacgcgtacaaca

SEQ ID NO: 104024 - DNA, 687 bp, Zea mays
  Clone ID: MRT4577_26374C.1
actccttagggcgattgggactcacgaggccggccgggggacctcttctgtctctgtctctatctctctctcgcgcgcgctcgtgcccgaaacgctgacatgtccgccaccggcgttctctggccgcagcgcgcggtggccatgtcgtccgacgcggtggccgaggccaggaagggccggctgaagcagcgctacgacaaggagttccgcctcgtcgcagggtgcgtgccgtaccgggtccgggtgaataagaaggacgacgacgaggtagtaggcaacccgtgcagcatcagcctcggcgacgacacgggcacggccgaggtagaggtgctcatgatctccacgcctaaccgggccgacatggtttttcccaagggagggtgggaggacgacgaggacgtgtaccaggcggcgtcccgcgaggccatggaggaggccggcgtcaagggcgtcatccacaaataactacatgcatcttctcatctgctggatcgagtacatagaacacttgtgcaacacattcggcgagaaagcacgggtcatctttgtatcctactttctttaagtctactagtgtgagtccgtagttatccactgtcaccccacgggatgttgtacccattgccacctaaataagggtattttcaggtacctgatacaaaaaaaaaaaaaaaaaagcgggccctc

SEQ ID NO: 104025 - DNA, 483 bp, Zea mays
  Clone ID: MRT4577_26375C.1
taaaaaaaaaaaaaaaaaaaaaaaaaaaaaaaaaaaaaaaaaaaaaaaaaaaaaaaaaaaaaaaaaaaaaaaaaaaaaaaaaaaaaaaaaaaaaaaaaaaaaaaaaatttaaaaaaaaaaaaaaaggggggggccgtttttaagggttcaaattttgcttcccgttttttggaacttttttttttttttttgggggcccttaattttatttctttggccgggttttaacacctagtgggggggaaaccccttggtttcccccattttattgctttggaagaacttccccttttgcccgttggggtttatcccaaagggccccccccgttccccctttcccaactttggccccctctggtggggagtgggacccccctttttcggggctttttaatcgggggggtgggggtgtttccccccatcggtgccttttacttttttcgggccctagacccccgtttttttgtttttttcccttttttt

SEQ ID NO: 104026 - DNA, 443 bp, Zea mays
  unsure (1)..(443): unsure at all n locations
  Clone ID: MRT4577_26376C.1
gctagcatggnagnntgcggcagcaagaaaggggcagcaggncnnggtgtgnnttggcgccttgctgnncttctccagnnctggtgnnttagctccgnaccgacccggcgacnnggcccgcnnnctcctgcagggcggnataccctnnccaccgnntggttggccctggnaccatcanntcgcgagggnagtggttggcccatcccagtgagaaggcatcctctgtnnggtgaaacnnctgtgtcttccttacccatgctatnnacggcagccatggngttgccaatgcattggccaaatctgcatgatgtgatatctggactagcgctatttgtaatttgtgttgggagaaacacaaggacggtacggtggtgttcaacttattgcatgtgtatggtgatctaataagtaaagtataataaaaagggatatgttggatgtgt

SEQ ID NO: 104027 - DNA, 262 bp, Zea mays
  Clone ID: MRT4577_26377C.1
accataatgctgacgcgtatgcgccaaacattagtttagcaggccctacgactattgtacttacatactcatgtacatcaaaaccagaacgtgtcgacacaacattacccggtacgttttacagcacgcatggtgcatcaacacaatatacatgcacgtcacgatttcaacagttcaacttccgaggaagccgtccacctgggcattcaccgaccccacgcgtccgcccacgcgtccgcccacgcgtccgcccacgcgtccg

SEQ ID NO: 104028 - DNA, 270 bp, Zea mays
  Clone ID: MRT4577_26378C.1
atagttctagatcgcgagcgggcgccctttttttttttttgtttttttttttttttttttttttttttttttttttgttttttttttcccggcagaaaccaggtttcaggctttttttaatataataccgggggaacagtttttccctttccgaccaagtttaacaatacagtagagatggacgacaatgacattgcattcgcgttttcctttgaccacacgagatactaggctaggagacgacctgcaataggtgacaacggaactgaa

SEQ ID NO: 104029 - DNA, 225 bp, Zea mays
  unsure (1)..(225): unsure at all n locations
  Clone ID: MRT4577_26379C.1
gcgnccttttttttttacctncggcacgcaaagccatggtctaattaattgataattaatactaaacagtgggggcataaaagcgtagaaaatacagggtccaagtaaccacagataatgcagacgcggtgcaacacccagtgatcgttgtagtggtgttcgtcatatcacaggcctaatggggctaggtggatgattttgtaacaatcgacgagccactttttt

SEQ ID NO: 104030 - DNA, 708 bp, Zea mays
  Clone ID: MRT4577_2637C.1
aatgctccttacaggttccaggcttccagccagccgccgcggcgccgcccagcttcatagctcctacctgtgcggctgtgctgttgcactgctgcacttgttcttcacgtgcagctcctccctgtgcggttgtgctgctgcacgcttgcactagttcttcacgtggcgccctccataagacagcagcaagcgccggacagcgacgagctgggtggaggcgcaggcactgtccctgcgatgttgtgggactcggacagcgatgatgaagtgcgcgtggttgaccatcctactgagcgtcatgctgctactcaggcagagaaaggaaaggccatggccgatgccaacgcatcttctagtggtgctgatgtagtgcttgattgacatgggaaaccagtgaagctaaatggaccaattgatgtgacttggagccatggtgagccatatcctcgacctcatggggatgtctttaagtgcttttattgttttaccaccaaaaaaggtgggggtgtgtaacaccccaggtgtttgtcacgagctaaaccttaattctgaacctaagcaagtagtttagataatgaactctatgtcgcatccatctttgtctatctcggtgatatcaagggtcttgcggattttgaattatttcgtcgcagaaaaaaaaaaaactaatgcctactcgaaaaaaaaataattaaaaaaaatttaaaa

SEQ ID NO: 104031 - DNA, 135 bp, Zea mays
  Clone ID: MRT4577_26380C.1
gctgcaaagatgggggggggggagtatagagccactttgactgcagtccccaccagcggtggtgaggacaccttaactgcctccaccagcctgctgccagccactaactctgtaccggttcaccaagcatttcat

SEQ ID NO: 104032 - DNA, 648 bp, Zea mays
  Clone ID: MRT4577_26381C.1
ttttcttttccgctgacagaagccgtaagcatcttgctgctgcgcgagtgctcgtctctccttgtcctcctactacagtcgtcgtcgtctctctccagggacacacatccgccatcacctttgcttcttcgattcgcaaggagcacgagtactcatggagcagggacaggggtggaggaggcggcagatcccggcgttcgggaggtggaaccagcataccgacgaggcggggtacttggagtcggcggtgcaggctggcctcgtcaggcccggccactgctaccacgacgacggcggcaacgaggtggtgctgttcaggtcctccgcctcgccgcctccgcacaagccagccaagaaggtgcgaagcacgatggagggtcacggtcaccaccatcaggttcaggttgaggcggggagcaggaagcagcggccgttcgtggcgggcgacgggtcccgctcccgcgcggccaagccgaggccgagggtcgttagggcggcggtggacgaggacctgtacattgtcccttccgatatgtcgcgcaagaagaaggggtaccgttaattttcagctgctgtatttatttaacacacacatatatataaggccggcctgatcaggtcaaccctagctagctccactttgaaact

SEQ ID NO: 104033 - DNA, 313 bp, Zea mays
  Clone ID: MRT4577_26382C.1
tgtacgatctaaagcttcaagtagaacattgcacaagacacaagagcagtgcactgtactctggtctagctagtagagctagagcatgcatgcatgcactggcctctgctgccgcgcgctgccgtgcttctttgcgcgtgtcgcattgatgccgtcgtcctgccgtacggagtgcgcgcccatatctcagatgatgtaccacgcgtgccaagatctgtgtctgcgtgggccatttcggccttgatggcaaaccaattgcctttgccttcgccactgttacacgatctgcacgtcctatgtatatggacctttc

SEQ ID NO: 104034 - DNA, 301 bp, Zea mays
  Clone ID: MRT4577_26383C.1
cccactcgtccgcccacgcgtccgctgtgtcatataatacaggcaaaactgtttttaattcctttctccaggatgaacatagttcagatgtgtcatataatattcggttcatgagagaaacattggagacattgcatgccctatatgagaacctcaagcttaatattttgcggaaagaggatctaggatgtctcgcttcattgttatgtactgttgcttcatctctgggtgaacatagttatgttgattattattgccgtgactttccactcaacttgattgaatccccatccctagtctc

SEQ ID NO: 104035 - DNA, 238 bp, Zea mays
  Clone ID: MRT4577_26384C.1
cgataatctaattaaaaaaattaaatttgttctcaattagtatttaatttaaatttttactttcaaatatgaaatttcaactttgtttcgctttgagcgccattttggcctgttctatgtcgttcgctgttccacttggcgaacaattaagaaaattgtactcttcaagctccggtattttgcaagaattaaatcaaaatactaatgaaatccttaccaaccgtagcctgtctgtggc

SEQ ID NO: 104036 - DNA, 354 bp, Zea mays
  Clone ID: MRT4577_26385C.1
ttatgcgactccctccgcgcgtcggtacgggggctgtgctgatccgccccgtgcctgccatatagctgcacccgccgccacgtctagacccttcttctcgctccctcactagcccgtccctgcacctataagcggcctctccttgcctgccccctctcgcttgctgcttgctgcctttcacgcggagtgaggcagccaacggggttgctaaaggtagaacgaagctttaacaccacagtgtggatgtccagagcacaaatccgttgatggtttaccgcggaggtaaagaacaagctagactagccagccagtactcctttttgccgggcggttagcgcgcatgtgcaattcgat

SEQ ID NO: 104037 - DNA, 372 bp, Zea mays
  Clone ID: MRT4577_26386C.1
gtacacctaccggcttggggcgcaaggggtcaaactacacactggcgggtgacgctgaacttgctgggcaaagcacccgcaggaaacatcaagaacgactctcgtgtgctggatgaggcacggagctctgcctacaggagctcgttggccataccctgagacaagacacggccgatgtgagaggccactgcatcaccgcgcgaggcggggagaggcagcatcgataccgcctcgctaagaacatcatgaaggcggggcaagagtgagaggaggtaccgtccactgacggagagaaagccgtcaaggaccgtgaccactactacaagaggtactgggggatgctcacacagaggaacaaacacaacatggcat

SEQ ID NO: 104038 - DNA, 602 bp, Zea mays
  Clone ID: MRT4577_26387C.1
atttgtaaagaatatcattaaaaagtgaatggtcagaagtttgtgtacaagtttgtgtcgtacccagagattttgaaaatggaccccctgaccgtgggccgggctgagggagactgcgaagccctgagctgcggcgaggtgggcggcggcgccagggaccccgagagtgggggccgggagaagcccccccagcccggcgccagggcctccagccgcaacgactatatacactccggcttgtattcttccttcactctcaactctttgaactcctccaacaagaagcttttcaaacccataaagattgagagtccagctgagaagctggcagagaagaagccgcctccggagccaactccgtctgtcatcagattcgtaacgaccccctctgtgccggagccccccaggacccccacgccgccgctgagtcctaatcccgaggttgacacggacatcgattccgtggcttcgcagcccatggagcttccagagaatttgtcactagagcctaaagaccaggatgcggccttgctggaaaaggacaaaacaagcaattcttcaagatccaagaaacccaaagggttagagctggcgcccatcct

SEQ ID NO: 104039 - DNA, 933 bp, Zea mays
  Clone ID: MRT4577_26388C.1
cccacgcgtccgcggacgcgtgggcggacgcgtgggcggacgcgtggggggggatccgcgaaaaacacgtgagtgagaaagagagagagaggagggaaaatgctgcgccacgccgcccgccgcctcgtttcccgcgccgtcgctccgcccaccgcgcgccgggcgctcgccacggcggaggtgcccgcggaggccgtcgaggactccacgttcgtcgaggcctggaaaaaggtcgcccccaacatcgagcccccagcgacgcccctcttcctcatgcagccgcgcccgcccacgccagctaccatccccaccaagctcaccgtcaacttcgtcctcccctacaagtccgagatcgccaacaaggaggttgacatggtaattgtaccagctacaactggtcagatgggtgttttgccaggccatgttgccacaattgcagagctcaagcctggtgttctctcagtacatgaggggaacgatgtgagcaagtactttgtgagcagtggatttgctttcgtccatgcaaactccattgctgaattcactgccaagcttggttcggcctctactgacctggagaaggctgaggctcagatcggtgtcgatgttcacagtgcgctcaatgctgcattgaccggttaattggtgtcatcttaaattgtctgtcttttagattgagtttaactttgcaaatcctaaataaattatagtccatctaaaacatggacatatgtttcttgttacctgaatcctgcatggatttatttttgtactcgtgaatattttaactctggagctcaaaacccggagttgctttctttttccgttgagttgcggccttggatcagatgaaatcgatgttcctccatagctccagtaaattgttaaatattgttaagtctattttaagagaaatataaaccacatttgact

SEQ ID NO: 104040 - DNA, 409 bp, Zea mays
  Clone ID: MRT4577_26389C.1
aaaagaaaggcccagcgttttcactctttaaatggataattttacctcgataaccaggtaaaggtttccaaaaaacatgttaagggcaaagtttacccgttcaatttgttttacctgttgcaaaaaagttcgggccgtggggcaacattaccaggggactaagcactactaaatctactctgtatgtttttcatctgtttccaactttttggggcccatcgtcaaaataaccggcccaaaaaatttaccctcacgggggctacttttgatgcaaacatgcattttagggtttgcaaggggggcaaaatattcagtcccagttctttctttgctttctggtcttcgggggggccctccaaaagcatgctagccccccaaatgtacagctagcaagggcaatccccagggc

SEQ ID NO: 104041 - DNA, 219 bp, Zea mays
  Clone ID: MRT4577_2638C.1
aaaaaaaataaaaacacataacaactttttaaatttacacataaaacatccataccaaacgaaaaggtgaaatttaaaactttaaatataccttaccaaaattctaaaacgttctgccgttatactacatccaatcttacgtcatacatccatccaatgtcatacaccatttttattgccacctaatttaatttatttaacctacatttaacaactcaa

SEQ ID NO: 104042 - DNA, 174 bp, Zea mays
  Clone ID: MRT4577_26390C.1
ttttcacgtgaacactactatggggggggctaggcaaaaagagaagggggccataatcccatacgtgcaatcaccggagttctaatttgttgcacaaggactttaataaaaaccatgcatagttagtcttgcttacattcggataacacaattgtgttactcaccattgttgga

SEQ ID NO: 104043 - DNA, 1078 bp, Zea mays
  Clone ID: MRT4577_26391C.1
cttggctacctcgaggcgggcccggagccccgggccgcccggcgagctccccgctacgtactttgcacggaggcatccgtcaaaatacacgaagggcaacgaggcgaggcctagtatagaggaaaacgagtgagaggggggaaatgctgcgccacgccgcccgccgtctcgtctcccgcaccgccgcggcgcccaccgcccgccgggcgctcgtcacggcagaggtgcctgcggaggccgccgaggactccacgtttgtggaggcgtggaagaaggtcgcccccaacatcgagcccccaacgacgcccctcttcctcatgcagccgcgcccgcccacgccggctaccatccccactaagctcaccgtcaacttcgtcctcccctacaagtccgagatcgccaacaaggaggtggacatggtaattgtaccagctacaactggtcagatgggcgttttgccaggccatgttgccacgattgcagagctcaagcctggtgttctctcagtacatgaggggaacgatgtgaccaagtactttgtgagcagtggatttgctttcgtccatgcaaactccattgctgatattgtggctgttgaggctgtccctgtggatcagatcgacccagcttttgttcagaagggtctcgctgaattcactgccaagcttggttcggcctctactgacctggagaaggctgaggctcagatcggtgtcgatgttcacagtgcgctcaatgctgcattgaccggttaattggtgtcatcttaaattgtctgtcttttagattgagtttaactttgcaaatcctaaataaattatagtccatctaaaacatggacatatgtttcttgttacctgaatcctgcatggatttatttttgtactcgtgaatattttaactctggagctcaaaacccggagttgctttctttttccgttgagttgcggccttggatcagatgaaatcgatgttcctccatagctccagtaaattgttaaatattgttaagtctattttaagagaaatataaaccacatttgattactgcaaaaaaaaaaaaaaaaaaaaaaaagcc

SEQ ID NO: 104044 - DNA, 1143 bp, Zea mays
  Clone ID: MRT4577_26392C.1
cattgggaccctcgaggccggccgggagtcgtcggaaccccaaccgagttccccagtactccgcagtccgcacggccgcatccgtcaagatccgcgaagagcaacgaggcgaggcgaggggagggaaaacaagtgagtgagagagagagagagaggagggaaaatgctgcgccacgccgcccgccgcctcgtttcccgcgccgtcgctccgcccaccgcgcgccgggcgctcgccacggcggaggtgcccgcggaggccgtcgaggactccacgttcgtcgaggcctggaaaaaggtcgcccccaacatcgagcccccagcgacgcccctctccctcatgcagccgcgcccgcccacgccagctaccatccctaccaagctcaccgtcaacttcgtcctcccctacaagtccgagatcgccaacaaggaggttgacatggtaattgtaccagctacaactggtcagatgggtgttttgccaggccatgttgccacaattgcagagctcaagcctggtgttctctcagtacatgaaggaaacgatgtgagcaagtactttgtgagcagtgggtttgctttcgtccatgcaaactccattgctgatattgtggctgttgaggctatccctgtggatcagatcgacccagcattggttcagaagggtctcgctgaattcactgccaagcttggttcggcctctactgacctggagaaggctgaggcccagatcggagtcgatgttcacagtgccctcaatgctgcattgaccggttaattggtggcattttaaattgtcttgtctttttcatctacagttttagagtgagtttaagtttgcaaactcatgggcatgggatggagggaatgatcctaaataaattatactccatctaaaacatggacatatgtttcttgtttcctgaatcctgcatggatttctttttgtactggtgaacattttaactctgagctcaagacctggagctgctttctgcccccgttgagtttgggccatggatcagatgaaattgatgttcgtccgtaggttatgttaattgttaaatgttattatgtctatttttaagagaaatataaagtacagctcgaaaaaaaaaaaagtactctgcgttgttaccactgctt

SEQ ID NO: 104045 - DNA, 143 bp, Zea mays
  Clone ID: MRT4577_26393C.1
ggctctcaggagagtgatatcaagtgtgctcctccctgctacacctactctgtaatgatacatgatcaagggcgactggttttctattgataactctctcatgatcgtactcttcttatctgggatgacggcaatgattatgc

SEQ ID NO: 104046 - DNA, 378 bp, Zea mays
  Clone ID: MRT4577_26394C.1
tcgttttggttaaagtcgggcttccagatggaggggtgccaccacatgtgccaccgaagcagttccaggttcctgctcaggagtcacagattgctcagcaaccagacatgcttatggataatataggcctgcctgatggtggcgaccaaccacagagtccggcagttccttgacaaggccagcatgttgcttcacaggcacaggggttacaactaggactagctgctccatcacaaccgattggactcagcactgaccagggtccaggcgcgatcaagcccgctggtcgacctacagcgcctactgctgtgtgagctggccgggtaccacgcggggccagggctacaaaatgtacaagatggctcttgctgatcttga

SEQ ID NO: 104047 - DNA, 164 bp, Zea mays
  Clone ID: MRT4577_26395C.1
tcaacctgagctgagctgctcccattttattgagttatacaggtccgctcgcgtgcgccgggggggattttattggaaccgtcatccgtcggacgtcaatggggatccacctggtggcattcgtggcggtaaggggctttctgcatgtattccaagtgtctcgc

SEQ ID NO: 104048 - DNA, 1068 bp, Zea mays
  Clone ID: MRT4577_26396C.1
cactcagcaaacagtcaccggcacgcagacactcagcaagacccgggcgagtacgggcacccctacccgcgcgtcgaccagtacgggaaccccgtgccgccggtggaccaatacggcaacccgctcccgagggagccggtgtccggtttcggcgccatcgctccgccctacagcgctggagacagcgccgcggggcacgtggcggcgcctgtcaagtacggtgccgacgccaagtatccgcacgatggcactggaagcggcggcggcaccgctccgaccggtgtggcgtactccagcggtggcgtcgcaccagccgagacggcgcttgcgtcgtacgaggagggcatggtccacctccagccgaccggggaggagcacacgtttggtatggcctcgcagctccagccgacccgcggggaggagcacacgtttggcatggcctcacagctccagccgaccggggaggagcacacgacgctcggcgagaagctgaggcgctccggcagctccagctcgtcctccgaggatgacgagcaaggtgggcgccggaagaagagcatcaaggagaagataaaggagaagctcccaggcacccacaagcacgaggagcagaaggctgggcacgtgacgacgacgacgacggggacgcatgcagcggggacgcacgagaagaagggtttcatggagaagatcaaggagaagctaccgggacaccaccatgctcactgagcgtgtgtacctcagttgaggactcggacttgagggggtccggaatcgtgtgtgtcgtgcacatgtctctgcagtctctatatatgttgtgtacgacttcggtagcctcgacctcgatcgcttgtacctagtcatgctcatgcgtgcatattgctgtgctccttatatatgtagcattagaagctgcgcgcaagtagaatttgggttctagtctatatatacactgttatcgtcgtgtaggtttggctctggctcggagttgagtaattatgttgggctcgtttggtttgtgtttgtagtaatccaatgcatgttggctcttgcgactgtcaacgagtc

SEQ ID NO: 104049 - DNA, 504 bp, Zea mays
  Clone ID: MRT4577_26397C.1
ctaccagacaacagtcaccggcacgcagacgctcagcaagagccaacaggacatcgtcgctcagcaagaaacaaggggggcaataatggcggagtaccagggcgagtatggacacccgtacccgcgcgtcgaccagtacgggaaccccgtgccgccggtggaccagtacggcaacccgctcccgagggagccggcgtccggtttcggcgccatcgctcccccctacagcgctggcgacagcgccgcggggcacgtggcggcgcctgtcgagtacggtgccgacgccaagtatccgcacgatggcacggggagcggtggcggcggcggcgtcaccgctccgaccggtgtggtggcgtactccagcggtggcgtcgcaccagccgagacggcgcttgcgtcgtacgaggagggcatggtccacctccagccgaccggggaggagcacacgtttggtatggcctcgcagctccagccgacccacggggaggagcacacgtttggcat

SEQ ID NO: 104050 - DNA, 804 bp, Zea mays
  unsure (1)..(804): unsure at all n locations
  Clone ID: MRT4577_26398C.1
tcgcgatctagaattaggttctttggagcaaaatatcagccttatgctaaacccctccagattgcaatcacccaattgcatccaaatttgcagaagattaaacttgaacaggttgtatgtcatccaaacgctagcagtaacggacataagaatgtttcaggaagtttctttttatgaatattgttaaaaaagcaggagccatccacctttatttccttcttttctccatgtccaaattgtgatactgctggaataataaatttgattagaaatgacttcgaaacttatcttttcttctcaatatgatcaatagaactaaacttgtacttctgaacacatttggtacttaaacatttttattcctgtgttatctttactgagataaaacatatcttgtcttcgtgtcaggctcatgtggtgaaaatgcgagaaagccacacacaccatctgctattgttattggtggtgggtttgctggtcttgctgctgctgatgctctcagaaatgcatccttccaggttattctactggaatctcgtgataggattggtggcagagttcacactgactactcttttgggtttccggtcgatttgggagcatcttggcttcatggggtctgtgaagaaaatcccttggcaccaataattggaaggcttggacttccactgtaccgcacaagtggtgatgattctgtgctgtttgatcatgatctagagagttatgcactctatgacactaacggacgccaagtaccacaagagtttgtagaaaagcttgggaaggtgtntggagaagatacct

SEQ ID NO: 104051 - DNA, 834 bp, Zea mays
  Clone ID: MRT4577_26399C.1
tcaggagatcaaaaaataggaaatacccggaatgggtgcaccaggcaaatccaactgcagtgtaatggtgataggtttattaatatgtccaatatgctattccctgactccagagttaaactttctgttattggggacagcaaatgccaattggaatgcatgaaaaaatgctcctgcactgcatacacttattctgtattggatggttgcagcctatggtatggcaatttaacaaatatgcaggacggatataataatgggagtggagcaggaactctttatcttcgtgttgctgcatcagagttagagtcaaccaacagttcaggtcacaatttagtttggatagctggtgtacttccttcaattggatttcttattttttgtctgatcttgtttttttgatctcctgatccaaataaacaagatcagacaaaaaataggaaatacccggaatgggtgcaccaggcaaatccaactgcagtgtaatggtgataggtttattaatatgtccaatatgctattccctgactccagagttaaactttctgttattggggacagcaaatgccaattggaatgcatgaaaaaatgctcctgcactgcatacacttattctgtattggatggttgcagcctatggtatggcaatttaacaaatatgcaggacggatataataatgggagtggagcaggaactctttatcttcgtgttgctgcatcagagttagagtcaaccaacagttcaggtcacaatttagtttggatagctggtgtacttccttcaattggatttcttattttttgtctgatcttgtttatttggatcaggagatc

SEQ ID NO: 104052 - DNA, 816 bp, Zea mays
  unsure (1)..(816): unsure at all n locations
  Clone ID: MRT4577_2639C.1
gtacagtggggtttgggcgcttgtccacggccgccgccaacaacgagttcctgacctccgccgtctcttccccgctccctcgcgctcgcaagtcgcagctccggccgccctattttgcagaattcggtagatttgtttccttcatgggtcgcaccatcaagaaggccaggaaagcgaaacccaagaagtctaagaagaaaactgaagcgtcttcatcgtccaatcatgcggttgcctctggtccggctaaggtctggcaaccgggtgtagatgcactggaagatggggaggagcttcagtttgatcctgaggcttataattatctccgaggttttggcattggctggtcttgcttgaggtattgtttatcttcatagggctttcccacctctttttggtgcttatttcaggagttaggacaatatatgatctgttttcaattactaaaaccttctgttgcagttttgatgttgtgcgcgatcaacttggactcgtccgatcagagttccctcatacattatatggtgttgctgggacgcaggttgcgctagtctttacaccttcaaaatctaggcattgtttttttttttgcaaaaactagctattgttactattgaaagttgaattgcttttgatgtctatcacatagttctttaatgccttttgttatctaaattagaacctgtacaggaattgattttgtactgctgttcctgtttatgtgttttggattnaaaagcgcaccattgctgattttaagctcagaaagccatggcaaaaacgttttgtgagctctcgcttgcatttatatcattc

SEQ ID NO: 104053 - DNA, 570 bp, Zea mays
  Clone ID: MRT4577_263C.1
aaacaaaaaaacccaacatccccctcagtcaaaacccccccaccggggcaacaaaacatcgcattgccctttggaaaacgggggaacgaccaggcttttttattcaaagcaaagggggcccccaattctccccatactaggaaccgggccggggctgcccaaaaccgctcaaacaaaaaaaaaaaaaaaccagggacccaaagttttgggaacccaagtccccataactccaatacccgactaacaaggggaatgggggggaaacaaatcgaaaggcgggcgagggttccccggccggggcttttttttttttttttttccccggactaatcaaaggacaggggaccctggcttgccaggctacggtcctttagggggaaaaacatctcgatggaggggggggtcccccccccctccaggggggtcacgtacttccaaaacccggacacccggggaagggtcatcagcctctggggggagagcttccagggggccttcccaaaaattccctgcgggccgccctgagaaatcttgccccaaaagctcggatccgccttggttttggcaaaa

SEQ ID NO: 104054 - DNA, 363 bp, Zea mays
  Clone ID: MRT4577_26400C.1
atgaccgattcaatcgtgaagacgaccggagcccaaaccaagagggagaagagagtggcgatcttgcctcgatttgacccgcgccgccatggatccttgtcctcgccgtcgctcgaggccttagaaggggtcgggggccatcgccaaggtgccttgaacacgcaggtgggttctgccgacatcaggaagggagtactacaggggaattgctcgtcggagttcaacgaccacgtcaagccgcagttcgccgcggaccaggctcctatgcgtgccatcctcgacgagccagtggccgaggattcaggtgttcagtttgtaaaagttgctgagcaggagctcattgaaggcaagttgtgcccttga

SEQ ID NO: 104055 - DNA, 265 bp, Zea mays
  Clone ID: MRT4577_26401C.1
ctagttctatgcgagcgcccggccgctcgcgatctagaactagctggagggtgccttccccgacaccatgaccaagtgtgccgagctgctgagccgctccgtggaggtggactttgtggacatcaacgtcggctgccccatcgacctcgtgtacatgaagggtgggggctgtgcctcatgaatcgctccaccaagttccagcagatcgtccgtggcatgaaccaggtgctggatatgccgctgactgtgaagatccgcacaggcg

SEQ ID NO: 104056 - DNA, 269 bp, Zea mays
  Clone ID: MRT4577_26402C.1
gaaaaaaaggaaaagaacatggggataaaggaaaaagccctgggcatataaacactagggccggggactggcacacttgggcccgcggatgaagtttaaccgccccggggaccggccctaccctaactgggaaataatcccctgtaaaaatccaaaaagtggccccatatgcataggctgtccaaacctgtcaaacttccaaaagattgttgcgtgccttataagccattctccagggctcattgggaacttggttagcccgtttgcct

SEQ ID NO: 104057 - DNA, 325 bp, Zea mays
  Clone ID: MRT4577_26403C.1
gcttactatgttacatgggcgcggaatttatggatcttgcatggggtgtaatggcggggggtaaatataacgtagaataagatgttgaaagatatggcataaaaccgaaacgacacagaagttgcataaatagtatataccgtttggcgtaaaacgttaagtcattgtgtgtaaatagtgtattatggatattagattgacattgacatcgccataatatcgggactgtttcggaaataatgggtagaccctgtaaacgtggatgcagttacttgtatagtatacgtgatttcctttcatccgaaaaaacaccacaaagcctgca

SEQ ID NO: 104058 - DNA, 421 bp, Zea mays
  Clone ID: MRT4577_26404C.1
gtttttttttttttttttttctgaaaacacgtatccttattatgtaacaagtagtagtagcaacagcagctagtaatacatcaacttttgcatgcaactcattgctgcatcacacaacacaacacatcaaccttagttgcacgcacttgccgctccttgaacagcatcacctgcagtcttcgtcgtacatgcgcgcacacacacaggctcatacattacacgaggaacacggtgaactggagtacggactcgacgccgtcggtctcgagcagcgcgccggacgccgccacccctccgggcctcaccacggccaccttggcgaagcccttcgcaccgacgtacttccccgtgccgcagaatccgcttacccacgtccaagtgccggtcatgcggtgcacgccgaagaagctgatggtgtcgt

SEQ ID NO: 104059 - DNA, 234 bp, Zea mays
  unsure (1)..(234): unsure at all n locations
  Clone ID: MRT4577_26405C.1
tctttttttgaagcttccaatgaatacttaggaaagattccatataaggtagaaggtgttcctaacanctaaagcctttaagcccttgatgaccggttcaaggtctctggtatcccacacctcgtcatccctgatgcaaaaactggtgaagtttacactacacatggtgctcaatctctaaatgaatatatcatttatgcttaccctatcacaccatatccgttcaatgaactc

SEQ ID NO: 104060 - DNA, 206 bp, Zea mays
  Clone ID: MRT4577_26406C.1
gccactcgtccgactacccttcaaactccttgccaggggtcctactaccttcctacggggcatcctctccttaataattttcacacataaacccctacctactacaggatcctaacctcggcttacctctgacacaatgcagatatttttacataagagttatcaccatttgacaaactacctcattcacaaaccaacactttggg

SEQ ID NO: 104061 - DNA, 166 bp, Zea mays
  Clone ID: MRT4577_26407C.1
cctgaattccctgtctcacaaagtcatatgtttattaggaggatctcatctatccaaaccatattcttcctatcttaccctacttcctccaagccgagtttcctatcaggtgacgacacacaacacctcatcataccctgatatttctataccattaaccactcca

SEQ ID NO: 104062 - DNA, 429 bp, Zea mays
  unsure (1)..(429): unsure at all n locations
  Clone ID: MRT4577_26408C.1
ccatgatcttttacaacaaattctttgatttttttgagaaaatgacagctaacaagttgatatatccaatcagccactgaagaacatacggtttgcaaaagttacagtggtaagaacagtgccacaacatctaggcaataaggttgcaacagctagataaagctcagatttgcaagttgactgctgtgttttaaccagtgacggagaagagttgcaaactggataagaatgtacagttgacaaagcaattaaaactttcagtatcaaagttttttttattattccagcatgattcctgccaaaggaaacactacttttgtcttctgaatataatctgcattttcaccatggttttttttattgtttggnnnttgnnaatgnnttatttggcgttaccgacttctgtcaagccgggtcctatacttctct

SEQ ID NO: 104063 - DNA, 888 bp, Zea mays
  Clone ID: MRT4577_26409C.1
cattgggtacctcgaggccggccggggccttttttgctcctgttcaactacaatggctgtcttgaagtcaatcgccgtggttgctgcatgcgctgcagcagtagatgccgcagctatccagcctcgtcagtacaagacgcttgtcgattcgcaatctctgcgtaacgctcttcacatcgacaacttgtacgcaagagcagagaagctccaagagattgcatacagtacccccggcaagaatcgcgtcattggcagccagggccacgaagacacggtcgaatacatcaaaggggaacttgaagcgttctcagactattacgacgtatatacccaagatgtgccactctccattgggtataatgccaccctcagcgccaacaacaagactatcgaggctttcgctgtgacgcttgctccaggtggtaatgtgaccggcccgcttgttgctatccctagtcttggatgtaatgaggaggacttccctgaaaccctcgagggctccctcgctttgatccagcgtggtaactgctcatatggtgagaaggtgcaactcgcagctgctaaaggtgctctcggcgtcgtggcatggaataacgctgagggtactcttgaaggatattcattgcaagtcttgtaccctgagggcgatttcgtccctgttgctggcatcacccttgggcaaggagagtcccttctcgcccaacttgaagctggtgtggacatcaccgtggatatgtggacaaacgctaccgtctacaacactcgcaaccttattgctgagactaaggctggtgaccacgaccatgtcatccatgttagcggtcactccgactcagttacagccggtgcaggtatcaacgacaacggttcaggttctatgtctattct

SEQ ID NO: 104064 - DNA, 499 bp, Zea mays
  Clone ID: MRT4577_2640C.1
cccagccgtccgaaggagtctgcatcaagtacaagggtgttcacaggcacgcatcctgccgagctggaggccatactgctgtaccacccgtagggccaagtatgcgtgcgctttaggcctgcctgactaggaggctggcgagggccctgggtgacgcctggagaggctgtgtggcacgtcgcacaagctaaacggacatcatggcagtgacgcagtgcgggcacgcagtggcagtagtacaagaagtctccggctgttgcagatcggggacatcatccacaagatcggggtcaagcacatatcctgcagcggcagctacaggacgaggtctgtagcaagaccaaaactggggcagcctagctctagcgagagctaacacactccaatatgctagatgcatacttacatgcacacgtgcatcaaacgaatcaatgtcaagatattctaaattgtaatactactacattggcgctatgctcaatcatgtgaaaaataaact

SEQ ID NO: 104065 - DNA, 590 bp, Zea mays
  Clone ID: MRT4577_26410C.1
cattgggaccctcgaggccggccgggagtgtgtcctgtactccgttcgccctcagacctctttctctctcctagcgtaagtgagcactctatatacgaacatgtacggcttcggaggtgggaacacaactcgtaaacgccaaagcacgacaactcattctagggacaattaatatcctcgaacctgtatagactgcaacatccatatctatcagggcaccggaatcaagatgctggtggcgatagactttactgctacatgatgtgctccgaggccattcctggaatgctgtttctgctgatatagacacaaactcccctgatgcttttgtcgtcaatgattgtgtcattgaacattgcaagactgtgttgatgatgtcaatcaataggacatggcaacatttctggtcatgaaactatgtctacagcattgcttatggcatccctgcactatgaggaatactactccatgtagctgtgaactacacatggtctcgtgatatcacttttgtcactttgcaccattcgactatactcaagtactcctcgtctcaactctgataaaactatcgcatgcgcgaagtcaaaacc

SEQ ID NO: 104066 - DNA, 445 bp, Zea mays
  Clone ID: MRT4577_26411C.1
ctaattaaacaatgagcaatttcttgtttatcatgcaaagaaaacatgttttgcacggtatagatgtactggaggcatgcaaattctataatgttttgagaggtcaaattttacatattgagttgtggacttggacatttgacaaaaaagagtgaggaaagaagtgcgcttcagttattaacttgttagtatggctggacatctctcttgagtggatgcacctaatacactgcaaaatatgtttttaacaaaaagtttgtttgaccttgtcctgacccatgaccttacatattgccgttcaagtaatcccagcaacaggtttaacaaccgtggtggtttccaagctggtcgaagccgtggccagttccagagctgggggagaggccgtggtcagttccagagccgggggagaggccgtgcccagttccaaggacgaaggagaggc

SEQ ID NO: 104067 - DNA, 397 bp, Zea mays
  Clone ID: MRT4577_26412C.1
caacaagcaatagcagcaggcaacatacctttatcaccctggttacaacaatcgacagcggtatctttggtgcagacattggtacaaaccatcacggcacaggatctgcagaaactcgtgctacctgggatcaaccaagtaactgtggcaaacctttctccatactctcaacaacaacaatttcttgcatgcaaccaactgtctacatagaaccgtgctgtttatttggagcaacaactatgaccattcagccagctagctactgtctactattagcaacaacaacttcttgcatttaaccaattggacacactgaacccagatgcttatttgcagcagcaaatactactaccatataaacagctagctgcaacaagccgtgcttacttcttgacac

SEQ ID NO: 104068 - DNA, 336 bp, Zea mays
  unsure (1)..(336): unsure at all n locations
  Clone ID: MRT4577_26413C.1
ggaaaggcaaaggagaaaatatccnancaanggganaaggtataaattaaatgtgattaaagaaaagccgcccacacgataagaggagaaccaaaggtgcgtccccaagggtcttgcctccctgggaaaggaaggcgtccgaagtggaggacaaggcggcgacccccctgcttcccaacagtgcaaccgacgtccccccgagggggcgccgccgcgccgctttctgtcgaaagaaattagttttctcttttctccgaattggctgcctttatgagccccgaacttgtccggccggtgccccggtgtgcacaaggaccaagcgaaagcaaatctttt

SEQ ID NO: 104069 - DNA, 541 bp, Zea mays
  Clone ID: MRT4577_26414C.1
caatacaagtcctattgcctcactttattgcatatccatagcatataaacgcgatatttacctgttattccttcattcatcgccgcgggaaagaagggcgatatgcctatcaacactttctgtacgaaatagaaaaagatcaatgcatcccactaattgaacgggcatggcaaatacctaccataccgacttctacattacttacacgcgaggaaaaccgcgcaaatgcccagcaccagagtggtcttacatcatatacaggcaactgccatgctagtgaagccgccgaaggaaacagaaattacaaaacttacataaacaacacggccttgctgtgtaccataccatacgccatgtgttctggcctgagtaaactgactggcacagactcggccacctaccttggccacgccggaagaaaatttatattccattgcccctgaataggataccatggctcagattaacggttcatccatgtattaccgcttggcactgcctaaaacgaaaaaggcctgaaggtgaagacaaaacccatgaa

SEQ ID NO: 104070 - DNA, 349 bp, Zea mays
  Clone ID: MRT4577_26415C.1
gggccccaaataatcccggtacaaaacttgggccaggaggggaacaaacaaagggttcacagtttggtgattttgacaaatgggacttttggtggaccgaaaaaccttaccccttgggcttaccaaaaaacctttggtttttattggtgggttggaagccaccctccccaaatttggacgatgggtcaatgaacttgagcttgatctcctccaacccccgccgggaagttttcttcaggggggactggggggggggccccacccttttttttggacccacacaaaatcccttgataattagggaggccccctttacgataccctttgggggggagccccccctgggggg

SEQ ID NO: 104071 - DNA, 388 bp, Zea mays
  Clone ID: MRT4577_26416C.1
ggccggggccagccccagcaacattggggaaaacaaaaactggaactggttttacattggtacaaaatttacagaagtcggggcctcctgcgttttgtaggccgcgggcttggcccccgccaaaaggaattgaacgcccccccagggaacaaaaaaaaataacgggccttataacccttaaaatttttttttcaagttttttttttttatagaaagtaagggtccccaggggctttttaagtttcatgggctcaaatgtgggggggtaaaaataaaatgttacaagcctttttcccttcctggggctgcttggttgtttgcttccccgagagcccgggtccccgccctgccttaagttcccacatggaacggggttccacccccaagg

SEQ ID NO: 104072 - DNA, 362 bp, Zea mays
  unsure (1)..(362): unsure at all n locations
  Clone ID: MRT4577_26417C.1
cctatcttcaacatatcttatcttcatatctccancaaacantaacagcccttttttaaacacttaatggaagcccttatttntcaccttnatnacntttttttaactcttctaaaaactccaactcaatttttttcttatnaacttcnntctttcatttatntcctttcaacttattaaaacactctcatttatattttttcatcaataactaacaaaaaaatcatatacactaactatttctacaaattataacttaatatatatctttcctaataccataacctattcacatctttanattttcataacccttttctttctcttcctaacattacctatcttattacttttatttttat

SEQ ID NO: 104073 - DNA, 262 bp, Zea mays
  Clone ID: MRT4577_26418C.1
tttttgacacaagcgccgacccggagaggtgcgcgaggggagatgcgctgcgccacacaggaagcactatcaggacacgcgaacattgctggctgtggaaactttcagcaggctcggaccgtgcggcgggctagaactcgtccggtggggtagataacgaactcgtacgacactgacgcgttagagcacattgcctagcccacattacgagggataatgccgtccaaaacgctatcggaggcaacagctccaacgatgccat

SEQ ID NO: 104074 - DNA, 816 bp, Zea mays
  unsure (1)..(816): unsure at all n locations
  Clone ID: MRT4577_26419C.1
gaccaatgccaagaacaagaagagatcagtgagaaggccaggcgaaaatccccaccgggcgagaagagacgagctccggcctcctccgagaacaagaacaagaaggaatcccggagcacgagggaataaagcggcgggcggaggagaccggaaaggccgaggagaaaaaagctccggcgatggagaaggggatggatccggcgctgctggacaacatcatcgccaggctgctggaggtgaagagcctcaagcccgggaagaacgcgcagctgtccgagtcggagatcaagcagctctgcgccgcctccaaggagatcttcctcgcgcagcccaacctcctggagctcgaggcccccatcaaaatctgcggtgatgtccatggccaatattctgatctcctgaggctctttgaatatggtggatatcctcctcagtccaactatcttttcttgggcgattatgtggaccggggaaagcagagccttgagacaatatgccttcttttggcatataaggtcaagtatcctgagaacttctttcttctaaggggcaaccatgaatgtgcatcagtaaaccgcatctatgggttctatgatgagtgcaagcgcagattcagtgtaaaactctggaaaacatttacagactgttttaactgcttaccggtatcagcgttgatagatgaaaagattctatgattgcatggaggtctttccccagagttgaacaagctggatcaaatactcaacctcaatcgccccacagatgtgccctgatactggngnntactttgtggatcttcctttgggtccgatcctt

SEQ ID NO: 104075 - DNA, 340 bp, Zea mays
  Clone ID: MRT4577_2641C.1
cccacgcgtccgcggacgcgtgggtttttttttttttttttttttttttcaatctgaaaacacatgcactgatgcacacttgtgtttgtgtagaggcgcttatatatcatccaaaagacaagtcactcacacgcaaattcgcattggctaacagaagctatttggaatgcagttcagtcgactaacaacgtaggtacccccgtctccttgttttgccgatgttggcgatgccatcatatgtcagcagcaaggaagttgccagacaaggaaacctgccaatcggagaagcagcagcagtgaacgttcaagatccagagtacaatcgacagacatattttga

SEQ ID NO: 104076 - DNA, 177 bp, Zea mays
  unsure (1)..(177): unsure at all n locations
  Clone ID: MRT4577_26420C.1
catcttcccgcagcaccacacaggccgncgcgttgctacnatgggtacacagacggcaatggcgaacaccaagacgcccctactcctcttcctcgcgctgctcctcgacccgaacctaaccgcggacacacccggacaccagcgacggatgctccacagccacggccgccgacgacg

SEQ ID NO: 104077 - DNA, 817 bp, Zea mays
  unsure (1)..(817): unsure at all n locations
  Clone ID: MRT4577_26421C.1
gggtacctcgaggccnnggccgggaaccggatgcacaataacgctctcgcttccatgtacgccgtcgcccagcacctctctttctcccacaactgttgttcccttagaaggaagaagaaatcatcagctcctcccctctcctctcctcccgtaactgttcctccactcgcgcggtgcacgtcgtggagagactagcaactgcccggcccgatgccttattcaaaaccctccagaacgcccgctcgacctccactcctctccaagctgtgctctgcttaccctcgacgctcctggtcgcatgactcgcatcgctctgcgctcggaaaaccgcccgcatgttggagctccattgcaccgccaagccaactctgcgtcgcgcttggaacaccgtcagtctcgccacacgtcacttcctccggccacgctcgtctccggcggctgcgtcccagcactggcccgctcgtcgaagtccagccgtgtgtgggctggtgagccccgccgggtcccgtgctccatctgccgcgccgctcggtgcacccagccggcacgtcacctccggcgagcccctgcactgccacggccgtcccatccgtgcgttgaagagtcgacgttcacgttctccactgcccgagggagcccagatgaagcttcgtccgtagatcgcggttcgtttccaagcttcgaggaatcgacgatcaagcgttggcgaccaagtgatctggtcctgtgatctagctcttcgagttccacgaagttgaagaccctgagcatctgtttggtgaaggtacactttaggatatggttgatggtgtgactt

SEQ ID NO: 104078 - DNA, 1385 bp, Zea mays
  Clone ID: MRT4577_26422C.1
actcctatgggcgattgggatcctcgaggccggccggggccttgctaaccacaccaacaaattaaaatgaccaagaaggatgttggcgagcgccgtcgcggtcggatcctaccttggccgccggtctggcctcgggaggagaacgtgagatcacggagccaggagggtcgaagatgtgatgtggaatggctagtattgctctccagcgatcaccatggccgcggtgccgcactccgtcatggccagtaatatccgtactgcaatttacgaagcgaggttgcgatgcacctacattctacattggagaagtacctggagttgcaccaaataggtcaaggacaggtaccgccaagatgtggagcatgaaggatgtcgcgatgagttcatgagaggtctaggccgtcgtctccaagtcaactatggttgcagaggatcgttgtcttcgtatgatgtaattatttagctattttgtacaaaactcctattatatagtaaagatggaacattcgtttcagtaaaaaaaaaaaaaaaaaaaaatatgcgcctcgcctctcttcaaccttttcttgagcattggcgagagcccttcacatggtgcggcgctggcatcgttgttggcgacctctgcgcggtcggatctgcaaaggttgcagctagcgcgcctacagtacgtcaacatggtgcggcatctctttttgcagatccccaacttgctacgccgccggccgccgcatcggaactccttgcaccgcttgcctttcttctcccattcaaccggcaagcgttccctggctcaataacgcaactgggggatgtctgtcgctatctccatataggaaacgacaggtgcgacagatttagattttcaggtgatgcgtggtcgggatcgccggatcaatcaaaataagtgtgaaatttgagaggccgtggaacttccagatcgagtagtatccatccagatcgatatcccagaagaccaagcctggccatgaaacgcatgctaccccgatctcttcttcaccttttcttatccgcaggtaccaacaaaaaaagtgacccttttgacgacgtattgcgtgggcaaggcatgacagtgcgacaagagagaaactaacagagagctctgttcgttctgctgattgcttatgattcgactcgcagtggcggtagctgggagagcttgggcctggccagacacgaccaactcaccgctgtaataagacgccttttatacatacctgacagtccgcaccctcagttcaggcgcaaggtaattgttttgcatgtctatgacgagcatcgtcacttttggaccacgaatcttttttgtgtactgaaaccttttcagttctttatatgtttaagctatctctggctcttgaatt

SEQ ID NO: 104079 - DNA, 411 bp, Zea mays
  Clone ID: MRT4577_26423C.1
tcgagccggccggggataatatatctcttcccctctcgctgcgctaccgcaacgcatgcaagagactagggattcatgtgccactgcgcacttgatgtcttcccgctatgatggccgagggacgaacttatcacaggaggggggtctccatcaacggagagcaccacgatgtgattgcgtattcctgccaacgcccgaccgcagtaccgtcgggcatcgttggctcgccagacggtcggagtccatgtctcgcgagaacgagcgtgacctctcagcttctccagacctcgcgctcacgtgagaacatgtacacagatcacacttccacctgtgatgggctgtggcacttatcatgtgcgatgctaacatctctcatgaaggcaagggcggctccacgctcactgctacgag

SEQ ID NO: 104080 - DNA, 1704 bp, Zea mays
  Clone ID: MRT4577_26424C.1
ccaatttccttccacttccagtaataatgctgaagtactaaaaagaaaaggggatgtggaatttgagttgcaactggaaatggctctttcagctactgctgctgaaactcaaaataataaactagctactcacatgaatcaattgactgttagcttacaagattctagttcaccattgaagaaattgcgtcaaaatgtggaagctttatccagctcaagtgcagtttggtcaagaagtgctggagctccattatattgggctgaggtatactgtggtgggcaagcatcaacaggaagatgggtacatgttgatgttgtgaataatctcattgatgctgaacagaatgtagaagcttcttctgccgtttgcaagaagcctttaagatatgttattgcttttgctggaaatggagccaaggatgtaaccagaaggtattgcttgcagtggcacagaattgcacaaggcagagtgaattcagagtggtgggataatgttttggcgccactaaaacagatggaactggcagcaacaaacaactatgaagacatggaacttcaaaccagagccctaacagagcctcttcctaccagtcaacaggcctataaggaccatcacctttatgctctcgagaagtggcttcacaagaaccaaatttttcatcccaaaggtccagttctcggtttctgtaaaggacatcctgtttatccaagatcctgtgttcaaacactgcagtcaagacatggatggttgcgggagggcctgcaagtccgagaaaacgagttgcctgcaaaggtggttacacgtccaaagaggactttcaatgcccagtcagttcaatcaagtggcaacgaagatggtctaaaaccaaccttggaactatatggtgaatggcaactggaaccactgcaacttcctcatgctgtgaatggcgttgtgccaaagaatgaacgaggccaagttgatttatggtcagataagtgccttccgcctggtactgtacacttgaggttaccaagattattccaggttgcaaagagacttggcatcgactacgctcctgctatggtcggatttgattatcgcagtggtcggtgccttccagtctttgatgggattgttgtctgtaccgagttcagaagtgctatcctggaggcatatgcagaagaagaggagcagagacgagctgtggagaagaagcaggaggaggctcaagcactctccagatggtatcagctgctctgctccattgtaacaaggcagaggttgaaggactcctacaaaacaccttcacacgggattggtaacgaaggcctgcccgaaaatgataatgtccatagaagcactctcagcagccgatcctcagaaagggaacctagttcaagcaaactgcagacagatcatgaccatgaccatgaatttccaaaggaagaccagagctttgatgaggagaccttcgtgaggacgaaacgctgcccgtgtggtttttctatccaagtagaggagttgtaactttgataccaggaatgcacaagtgcacatgtttaactgtgttaacatatggcccctttcgtccatttgaaagtcggaatccaaaacgtagttttgaatctacttacccatttggatccttgcaattgaatccccgtctaataatcacaatttgggcccaaattaattaagctaaatgtagttttatgtggaat

SEQ ID NO: 104081 - DNA, 609 bp, Zea mays
  Clone ID: MRT4577_26425C.1
cgaagagccactgcacacacagcgcggaggcccacaagcaaaggcgcgcgcgcgggctgctcgatcagcatcggctagctcctcagcagcctcacccatggccttggatgcgaaggccctgcaggaggcgagggaggcagcagcagtccctgttggtgttgccctcgacgacgacgctggaaccgtgcggcggcgaaggaggtcgtcgtcctggaacggcggcgcttcgcctgcgccggtgccggtgccggtgccggtgccggtgctcctccgtagcgacgacgacaggaaggtgaagcgggaactggtcgcgtgggccaaggccgtggcgtccgtggctgtcagggagtctatgcattgctgctgaggcgtgctgctttactggcgaaatatatatcatctaggcatgcactttgcatttattttctatcgatcgatgccccttccaaatgagttcagcctagaacttacgatgtgatcatcggaactgtatcccgtacgccaaacgtgtgtgtgtatgtggagtagttttcatcagctgtccatcaccaaactatatatggagtcccacatgccgagcaaaaaaaaaaaaaaaaaaaactcgagccc

SEQ ID NO: 104082 - DNA, 140 bp, Zea mays
  unsure (1)..(140): unsure at all n locations
  Clone ID: MRT4577_26426C.1
atgcacccctacgtaagcncnnaattcccctcaagtttttttcccccatccctccanncaatagtgaggtttaaaaacttttaagagtcccacaaccccccncntcaaccaaattttcacactgtcactccatctataca

SEQ ID NO: 104083 - DNA, 242 bp, Zea mays
  Clone ID: MRT4577_26427C.1
cccacgcgtccgagtttataaatagccattcacaggcattaaaagagactaaaaggatggcgtgcaggttttatttttatccatcccgaccgatggtctgctacgttcctgtccagatccctactccaaccgatactgctagccccagcatggcgggggctaatgcggcgggatccctgactgttgcactagtgctcacgctcgctgtggccaacttctagggcgactctctctcggttctg

SEQ ID NO: 104084 - DNA, 326 bp, Zea mays
  Clone ID: MRT4577_26428C.1
aaaaaaaaaaaaaaaaaaaaaaaattaattaaaaaaaaaaaaaaaaaaaaaaaaaaaaaagaaaaaataaaaaaaaaaaaaaaaaaaaaaaaaaaaaataaaataaaaatataaaaaaaaaaaaaaaaaaaaaaaaataaaaaaaaaaaaaaaaaaaaaaagggctctcctttttaaagtccccaactttatatcccctccattcacctaaattacttttttattaggcacctcaaattcaattcaattacctctcttttaaaaacgtctatacttaaaaaccctttcattttccaattttttctctttcaaaaaaattccccttt

SEQ ID NO: 104085 - DNA, 635 bp, Zea mays
  Clone ID: MRT4577_26429C.1
tgttgggtgcttgtgttttcgttttgtttttttttttttttttcgaatcgaggataattcttgattattttcttctaaggaacggcaaaagctttatcgtaatttttaatagacgaagaaaataaaaaaaaaagccaaatgcatccttgattatagccttggcacagttgcatgtcgattgatactgcatctgtttccatatactagggcgcgcttgtaccacttctgtcttgggtggcaggaaggcgtccatgatttgagcagcttagaagatctggaagtcttctcaactgtggtcctccaagtggtctccccttcacgcgttttggctttatatcctgatcaaatatcgccttagggatggcaagagttgttacagcattaggagagtccactattccagatatcctaccctcgcatgggcagcatgatagtaaaagatacacctgagtatggatgagaagcaaacaccatagggatagccttccggtgcaatccggccgacccctcgtggacgctggccagccggtgtcaatgccaccgctggatctcgtgtagccgaatctcctagatgatgacacgacgaatgtcggagatgacgcgactagtcgacagcacaacaccgtacgcgtgtc

SEQ ID NO: 104086 - DNA, 476 bp, Zea mays
  Clone ID: MRT4577_2642C.1
ggccccaaaaaagggggcccatttttttacttttgggggccctaaactttccatacaaagggaaccgaattaattaagccggggatcgatttaaggggaaaccaaaaaccctggttggggcactggtaaaaaagaggggggggtaaactggggggggacccaattacttggggggggccccggggaaaagggccgtttcccccccgggggactggaggggaagcctttggaagggcaaaaaaaaacccccgggttccaaggggggggggggggataccggcccccccattggggggggaaaagccggggggaaaacctttccggggaaaaacccggcgaggttttggggggaggggaggggcttgtttaggaaccaccaatttgtcctcgggccaaaaaaagggggaaaaaataaaccaccttcagccccaccggggggggcgagggggggaaatttggccctgccggaaaaaggg

SEQ ID NO: 104087 - DNA, 395 bp, Zea mays
  unsure (1)..(395): unsure at all n locations
  Clone ID: MRT4577_26430C.1
tcgagcggccgcccgggtcaggtacattctcganagctctcctgtgggtactactgatctttgtcgcttccaccagcaaggacaaagtctacatatcgcattggtcaatgacaccaacactctttcttcttggagcgcaagaactgagagttcctgtttctaatggactgcagtatgcaagggcctcgatggtgagaggactcgaatcgtacactcttatcttacccgcaagatatccacggcaagtgacaagcctcattctgatttcgaacgcttcctggacatagaggcttggttcaagaagcacatgggcaaattaacaagagtgcttctcattacatgcatggttctactttttcatcctcactaattgcctgcaactggttcaaagtata

SEQ ID NO: 104088 - DNA, 286 bp, Zea mays
  Clone ID: MRT4577_26431C.1
cttgtgtaactgaaccagaggattgctagcgtcttggatcgaaggggattatcgaaggggattgaaggagattaccttctattcaattttgattagggagggatttaattctctcaaatcctcttcgatcgagacgtaatcaagtaagccttaagatgtgtaggctgtggcttcttgtgtaactgaaccagaggattgctagcgtctgaatttttcgttgttcggagtagtaagtttacagtcaaaaaatataaaatgtaattgttataattttcttttttgttta

SEQ ID NO: 104089 - DNA, 180 bp, Zea mays
  Clone ID: MRT4577_26432C.1
cgggccggaaaaaacgacaattttttcctgtttggtcgtgcctagcgaggccctcgctcgacttgttctttggttggttggttgatatttatctgtagttgtgatgttattcatctgctgagggggttccgctgacataatttattcatctgttgatattgatgcactgattaagtttat

SEQ ID NO: 104090 - DNA, 320 bp, Zea mays
  Clone ID: MRT4577_26433C.1
tcgttttcacgcatcgacagtcactcgtcggttaagggacccattgcacgagcatcgcctacactgccggtccacggtaggttgattgccatatttatgggctcgtacaccactcgttatgctgcgtgtaagcatgcgagctctatttcaatctgaccgctatgaatgatgcctggtggacggctagcggctctttagatgttaagtttctacgccctgcttctggatctgaagtgcaaaggggtctaccttcgtcttgatcggatgctgagactacgactatgccggctgctgggctgactgtaagagcacataaccga

SEQ ID NO: 104091 - DNA, 626 bp, Zea mays
  Clone ID: MRT4577_26434C.1
gccggccggttttccaacaactatgctaacttgattatcgatactctgctacaatggataacgattaatagaaacacaaggtcatgtcagccattaggacggaattaatggtgcatcctcatgctggcctccgtgatcatcttgctatggatcacccagatgaacgtgcccatccgaacaggggagctcaacgacttctggccgcgcaagaaggcatgagggcaccctgcgtgaggactgcgacgcaggactctacgacacagaaagcatctacttcgacggcggataccgacacggacgataccatctccacctctccggccacccactggacgcggtcggcgccgatatcagagactggcagccccagaggattcagagcttcatctccatcaacaacggcaagaaaccactacgtccatcccttccatccgcgcccagcggaatgcggcatgaaccaactgtgcaacaagaacactccgagctacaacaaagactcgcccacgacccttatgagaactggcagacaaatggattcacgtctacatcaacgaccacagtgcatcatttgaccactacgacaagctcgagcgccacagctactactacaacagtatgtactacca

SEQ ID NO: 104092 - DNA, 244 bp, Zea mays
  unsure (1)..(244): unsure at all n locations
  Clone ID: MRT4577_26435C.1
gggagggcacgcgtccttgctcctcacccgcgcccgggtcgtttttaatccacccatccatctactgcaccgaaggggcgcccctgcggtgggggggggtactcntggagaggagaggtgattagactaaattcgactgggtgggcattaggtgcaagaagcacccgtaccatgtctgctgcggtggcgtctgttgccacgtgcctcctctaccgccttatctcgctggagggcgcgcaaaacg

SEQ ID NO: 104093 - DNA, 297 bp, Zea mays
  Clone ID: MRT4577_26436C.1
cccaaacctactcacacatcaattttttttatccctacaaccaaacctaacatcatgactttgaaaatctgggatggtgcatacttaaatgtgtacaacacagatgcaattgattcacagaccatacaatacattacataagatcaatactccaactacagtttacaaattcctaacggatacttctaaatcctacacaaatgaatagaatcctgtaacaagaacttacattcctacaacttattacacgtccactcatactaattgtcaaactacaaagctatcacatccttcaat

SEQ ID NO: 104094 - DNA, 371 bp, Zea mays
  unsure (1)..(371): unsure at all n locations
  Clone ID: MRT4577_26437C.1
gggagaaaaaaaccctttttttttacttggattaatgaagcctgaaagagagagaggggcccagaaggggcaaaaaaagaaaaattggtccaacaaaacaatggcctgggagggcaaaaaggaaaaagaaaaggaaaaaaccaaggagaaacatttttccccgctgtccaatgccgggttacaggctttattacgaacctatgcaacttaatcaggccaaacacctttaccctgctgttagccgcgtaacggggttggggcggttgggggntttcctcccgaccgggaagggttcttttgggacgtgccccttacgccctggtttttttcctccgtggccgtagccgttgtttgtccggccgccgccattt

SEQ ID NO: 104095 - DNA, 129 bp, Zea mays
  Clone ID: MRT4577_26438C.1
ggggagaatgccctcgggaatccttattcaaattcaaacagaaaggcgcttcgggttcttgacatttctgtaggtcggtgcgatcaactagctggtgcggcaacgcgccgcgattgtcaactgaacact

SEQ ID NO: 104096 - DNA, 432 bp, Zea mays
  Clone ID: MRT4577_26439C.1
gcgccttcgccgccggccgcgccccggcagtctctgcgatccacatcaggtctcaaacatgtctaccgcgcttcagcgcacgaccccaggaacggaccaaagcttctgccgcaagaagaccgctgtggacgaggcatacaccaaaactagagtgcagcgctgatcaaggataacggggcggagattgagctgatcaggccgaagatgctgcgcctgaaggtcttcgagctcatactggtgtaggggcgcgcgcaccctcaaggacatcgacatgacgatccgcataccaggcggcgggaagacgcgccagataaactccatccagcaaggccgaaggcaaggggctagccgcctactaccagaagtacgtggaccaggccgccaaaaaagaggacaaggacatgttcacccggcacgacagcacccttcttg

SEQ ID NO: 104097 - DNA, 635 bp, Zea mays
  Clone ID: MRT4577_2643C.1
tttttttttttttttttttttttttttttttaagcatggaaactgaatatctgaattgatcaaaatttctacagagttcctgcaccacgattacgattcgacgccagatttggggtttggcacgtcgtcggacttgctgaatttcagccacttccagttagcataggaccgggattcgtcgtcgaaggggacagcatcgtcacaggagtcttccgcggcaatggatccaggtggctgtggctctgcaatttgctcccggtatcttcgcgccatctcttcagcctcagaaaacaccttctctttgttagtgataagcaatccaggttcgctctcgaggtcctttgtgcctcgggccgttctccctggagttgattttatgacaagagctttcaccgtctcgccgactttcagcacatcagccacagatctcagcttgccatgtgtcatgttcgagatatgtagtaaaccacctctgttagtctcgccaatcctaatttgtgcaccgtatggaaacaacttgcgtactgtgccttgcaagagagtcccttctctaaggcatgtcaccgcccatgcttctttttcactaattatcaattcgttggtctcttcatcaatcctcgtaatgcagacatgca

SEQ ID NO: 104098 - DNA, 653 bp, Zea mays
  Clone ID: MRT4577_26440C.1
gcccctcctcgagtttttttttttttttttttttttttttttttttttttttttttttttttttaaataaatatatccctttcatggctttaccatttgggctggaacatgaacttctccagccgacctaaatcgcctgaacttaagcacatcacgtccttgacacaagcagaacccaaggttttttttttcaggcttgcttcgatcaaattcagtccacccggcaccgcatcaccgataaatgatcccacggggagggggtgggtcggttaggcaaccgggggccagggggcggggcccttggtcgtgtcaagggacgtcgggggtatccactgccaaaacccacccgggggggggtagctggggtacggaacaaactttccagcctgagcaaaccccgccggggggggggggaaagatggaccaaccgcaccagggggcggaacaaagggccccggaccacccaccgcgggggggctgacaacccccttgagcatttgctccaacctctccttttaagccttgagcctggttttttcgtctcgcagctgggacttctaagccttaaaactcttgagggactccgggagcgattcgttcgatggctaaagcttcggggcctccccctgcagctggttcaggaaacgggcagc

SEQ ID NO: 104099 - DNA, 301 bp, Zea mays
  Clone ID: MRT4577_26441C.1
ttttcggttttttttttttttttgggcctgccaacgggaggccaaaaatctcaggggggcaagacatttttgagttgtccaaacaagggggggaaaaattccttgaacatgggggcaaaactcccactgaaacacctgggggggggcctttggacattacaataccccttttaatgttgccaggcccgccctttgggaaggctttaaattcacatggggccccacttttaacaacacgggtccttggttgaaggactttcttttaccaagcaggggttttttttttacccacccccaaccc

SEQ ID NO: 104100 - DNA, 309 bp, Zea mays
  Clone ID: MRT4577_26442C.1
gggctaacaaagacccaaaagccgaattttattgggtcattttttcgccccagatttgcaaattacctgggggaaaaaccccccgggaacgaaggggccccaaactaaaacagaaattccaatcatttaccacccccgcccccttaaaaccaaggttgaaaccccccccctgcctcccgaaatgaaacccaagcagggacccccccgcccggggggcccccccatggaagctagaagggggggacccccccgcagttgggcccgaactcgccgggcctccccgggggcggggagaatttgcccattttg

SEQ ID NO: 104101 - DNA, 513 bp, Zea mays
  Clone ID: MRT4577_26443C.1
attgggtacctcgaggccggccggggacatagctccaataacgagggtgtggttaatttgttttttctccgcgaagaggcgagctgcatacatctatgtacatctctctggtttgcatcccacacgaacgatctctcccacaggatacatgagcgtagacacatagaagggagtacgtataagtacgacgagtaaagcaagacccacaggacacgctgagaagaaccaatctagtggccctggcccaagccgaagaacgaattcgaaatcccggaaccatcccgagaatgagccgccagggccacgtccaggaggtaggaatctcctcaagcctcattcgtctcggtctcgacgatcaatgggtcgcatggctctatcgatatatatagatttatgtcagcccacgggcgatgttatgcgtcctgctagatatactccgtgatttttcgacggtagtgtgtcctagcagctataccctcggtcgcgtgtgtgtgagctacagatcttatttta

SEQ ID NO: 104102 - DNA, 401 bp, Zea mays
  Clone ID: MRT4577_26444C.1
gacagtgcgatagcttacaacactgtacgcttgttgctaagaacaccagcatacacagggatggctagctccatcagctgataagcagatatgtctgaggcaactgaagacctggcgtaagttgtgcaccgcgcaatatcattcgacttcgtttgctccactaagaagatcacgaccgacaactagtacggtaatgggggtggcctgaccataaacttttacatcaacagcctgaaaggtcatggacattggcttataccatatcgacgacaagtacggcgcgaacctcgacggatacaggacactctacaacgatgatgactgatctcacaccgtagacgtctacttcggtagaaccactgaacttatgatctgggccgttacaatcgctgggatcctaa

SEQ ID NO: 104103 - DNA, 416 bp, Zea mays
  Clone ID: MRT4577_26445C.1
gggggaaggggcccgatggatttgtttataaaaccgggcccccttttttgtgccgggccccctttttaaggcaaatcagggccatattaccccttctttaaaaacgttgttattcacgccttcggctcccaattggaattcctaaaaagggccctgttttttttgtccccggaaaaaaaaaagaacccccaattggtccccctggttttttggggggggtctttaacagttttctttgcccaatattaaaaactttttgtgggggccaaagtattcccccttttcctaagaacccccttccccgggtctaactgggggccctctaacttatatcaatggggccttttgggttcccctgtttgggaatttttaaatatccccctttgtttccccttcattttttatattgcccccaa

SEQ ID NO: 104104 - DNA, 311 bp, Zea mays
  Clone ID: MRT4577_26446C.1
attaatcattcgaatccacaaaggacgacggagaaaaggcaggagccaagaagaacaagaacaagcagcatccgcgttacagtttttacacatcgctagacaacaagggtcataagcccgaagcttgcatgcgcatggaacagggataaagtgcagcgatcgctataaggagccgatatgagactgctcatgtttatatggaaatgcaaagctatgctatcacgcccctccactaacatgaccagagctgtttctgccttgcgctttcagtttggactacataaggaaacctttacatcgatcaacgccat

SEQ ID NO: 104105 - DNA, 649 bp, Zea mays
  Clone ID: MRT4577_26447C.1
accacgcatccgcggacgcgtgggcgagtacgtcgtgcaggtcgacaaggtgtccatcgcgccggcgtgactcgtgagggcctgttggggcgaagctacattattcttagaggtgcaaattcacccaaaaatatacaaaatctataaatttagttaagatttcaatacatttacatatgcatctttataataaattcttatgcacgtataaaaaaaaaaaaaaaaaaaaaaaaaaaaaaaaaaaaaaaactattctgtgatggatgccaaaaaaaaaaaaaaaaaaaaaaaaaaaaacctcgggttcggcgacgacggcgccgacttcggggaggagcacgtccaggtcccacccggcgcgacgctcgagtacatcgtgcaggtcgacagggtgtccatcgcgccggcgtgaggcggcagtagatagatcgcagtcctgtggtgttctgatcattattttatggctcggctcggttctttctgtactggcagtctgacactcggtagcgtgaccacaattgttctagctgccatgagccatgggacaggttcattctcgttttttcaagcaagatctcccaaaagagcagagagatttctgagcttgcaaaccaagctcgttttgaaaaaaaaaaaaaaaaaagcggcc

SEQ ID NO: 104106 - DNA, 551 bp, Zea mays
  Clone ID: MRT4577_26448C.1
attgggtacctcgaggccggccgggcatcacgaaccgcgcagcgcacctacgttcatacatttcatcctactaagacgcatgagctgatgatcgactgacggaagcgatcatagcgttcatggagatgaaagggccgctgcgcatccacctgctcctgccacacgtcgtggaagtgcatgtgccactgccaggtacaccagctacttccacagcgatccgcacgcatgcgccctgcctgcgccgagcaccaagaccagcgccgggacatcttaggggaaccccgcggcggcgacgtgcgacagcaacacttgccacagctccaccagctgcgcgtgctccaggtgaagctgcaaaagatgcggtccgaccgagccggagatgacgcgcatgacgcgagaggacacctacgacacacgatactacatatgacctcataggaatctacaaataagatcacgccactggcacacgccattatcgagccaagagatccactgggagcaccgtccatgtgatgactaaggtctacccacactgccgtctctggccg

SEQ ID NO: 104107 - DNA, 363 bp, Zea mays
  Clone ID: MRT4577_26449C.1
acaaagaggtttgaagttttttttctttttttttttggtcttctcgtgggggggggggggggggggggggaagacgtggggggggggaaggggggggcgaacggacggggggggcgggcgggggggaaggagtgtggggggcccgatttctaaaccgggatgggcccccgagctcttatgtcctgaaagggcacgggcaaaaggatcggggcttggtaaccgggggaaacccggagggggaaaaaagttgaggggcggagaaaaaattcgggggaaaagggggcaccgccaaaaaaaaaaaatggcggggaggggcaaaagcgggggggggcgcctttgaactcaccttgggggggaaaaaga

SEQ ID NO: 104108 - DNA, 974 bp, Zea mays
  unsure (1)..(974): unsure at all n locations
  Clone ID: MRT4577_2644C.1
tcagctgacgtgcacatgccaacgccaaaccctgtctgccgaataatcctccgaaaacacaagcagnaggtgcgcgcgacgcggatctcgttctcgtgagaccaaatgaagttccgggcaacaagtgatctcccgccaactcctggatctctcatgtgcaccagccgcaccggcagaagctggggcaggagcagatgcaacagccgcatcgccaccacgggcaccggcagcaccaagagtaatcgaaccagcagcagccgcagcagcagcacccggcgtcgcccctccgccgctcctcctccgtcgtcatctccatgaaggccgacacggggggctccagctgcggctgctcttcctgcggcggcggctgctggccctccttctccagcggctggtacagcgcgctgctgacgaggtctttcttcctcggcgacgtctccgccagtattgggaaggcgaaggagaagttgctggagctgcttccggagccgctctcgtggctccggaacactgcggctctcttggcgtcgttgccgcacccggtgctggcggcgggctccgcgctgcgcggcgccgccgcgaactccttggactcgggcgcgtccccgggctccgccccctccgcaagggacggcagcctggagtccgcctccgccatggcctcgtcgtagaagaagtcgaagtgcgacctgctgccggggtagaggtcgctggcgccctggatgctgaagagcgactcgttggacgccatgctccagtcggcctgcgacaccgacgtcctgtgctggaagacggacgccgggatcctccccggatcgtacccgttgttggaccccgccgctccgaggctggtcggcgagaccgtctggaccttcggcgcctccggccgcgccgcgccgcggccgtccgacgacgcgaacgagtcgtcgacggccggaggcggtggatccggccacgtcacccagtcgtccggc

SEQ ID NO: 104109 - DNA, 216 bp, Zea mays
  Clone ID: MRT4577_26450C.1
ctctcgggttataaaacaagaactggggcctatttttttcatttagacggaataatgtatcgctcagtctccataataataacggtagggaaaacacgacgaccaaatgagctcggactacgctagtcccaggaaagaaaatacgaaaaaaaagaagaggggatctagttatacacactattatacaggctggggagatatcctcaaaagttatat

SEQ ID NO: 104110 - DNA, 720 bp, Zea mays
  Clone ID: MRT4577_26451C.1
ccggccgaccatctccctcctccggcgccccttcccctcttcctttataaaaaccggccgaccggacctctctcccctcccctcgcccatgggcggacccacagggtggtccgggtgggccctggcacaccctaagccaggtccaccgggaccccacccggtcattcggttcggcggacgtccgactgctgttccaacttccatctccgaatctccgatcgttcggcttcccacagccccaaaacgatcgatcctcctgcgcaagacggatgttcctagcggctggcttcctgcgcggccacaaccacaagacaatcccttctcctgcgcggctattcctggcgactggcttcctgcgcggctgaccggctgttccgggcttccagctctcgtctcgtctcgcgaaatccggtcagacacctgatctgtatctatggattttgcgaagtaattttgtctgttcctctcgacacctccgctcaccgtcgaccgccatccagccgactagataatatattttttgattttgttatcgtaaattgattgcttttgcaagtggagatgtgtgatgtttggatgactattatatacatctcgtggtagaagaacatatacgttggactagacgagccacaggacacgttcgagcaagatggtgcgtgttgggtccatgcttcgtcgccgaaggtcttatagagagaagcgatcctcggatgaagc

SEQ ID NO: 104111 - DNA, 239 bp, Zea mays
  Clone ID: MRT4577_26452C.1
attcggctcgagctgctctcccccacctcttggtccggctgcacagagcggtggtgcagagagatcgagatccggaggccgcgagtgggagcgccaccaccagcgactgcggcaatggcgggcacggtgacggttccggggttgaccaacccctttatgccggcgttttgggaggagttgtacatcctgtgctcgcaatgtactcatttatattgcctggaatttgaagcgatcttgtt

SEQ ID NO: 104112 - DNA, 273 bp, Zea mays
  unsure (1)..(273): unsure at all n locations
  Clone ID: MRT4577_26453C.1
ggtgttctgctcttgtttcgtncctcaatcgtaattcggaagtttcgcattggagtcattcgtcggtgtcggtaagctttacgcagccagggcgcatgacttgttgtccgccgcgcctcgccactcagaagcgagggaagtggtagccgaggggggtggtcgtcgtcgctcactcattggaaagggaggattgactntngtgatggacacgttcgtaatttcgaactcttggctgaagaaccttcgactccagccgattatannaaatcttga

SEQ ID NO: 104113 - DNA, 746 bp, Zea mays
  Clone ID: MRT4577_26454C.1
gccgggaaaaacaaatctcgtcgtcgatcccttctcctccttatctctctctcgcgcgtcctcttccctgtgcacgcgccgtgtcctgctcgctccttccccatggcgcgccccttgcttctctctctctccctccatctctctcctgcgccgcgcccaggtccctcctcccagctcccgcgcccccctctactcgctcgcgcctagcgcgtttccatggccaagcacgccatggctccctccgagctcgcccccgacctctgctccttcctcgtcgtagccctaggccgccgcgccctgctttgtttactgctcgccggcactcctcccatggcgcgcgcagccgtgcccctctgctcgccgtggctggttccctgctcgcaccgcggttctatcccagctccctgccgaggtctcgcccggctgcgtcctcgacctggctccctgtgctcgcccatggccgccggtgctcgccctcatgcgtcgcgcccgacccagccgtgtgctcgcccggctgtacgctcgctctgctcggccatgccgcctgctgcgcgtgcgtctgctccgtcccggcgcccaagctccaagtctgtcaatccgcggcacgccggcagttcgccgccaacgtccggtcgccggtctgcccctgcgcgcggccttctacacgccgggatggctcgtctccattggccggacgtcgatctcctatttgccatggacagcgcatcgacgccccattacaacag

SEQ ID NO: 104114 - DNA, 120 bp, Zea mays
  Clone ID: MRT4577_26455C.1
ccggccgggatcccgatatatcaaacatccatcatctagtaccatcccacaacctcaatcaagatgaagttcactctcctcactcaggctgttttcgccatctccctccatcacggagtc

SEQ ID NO: 104115 - DNA, 573 bp, Zea mays
  Clone ID: MRT4577_26456C.1
atgcaggaatcccttgcaggaccgccatcgcagcaaaatcctcccgagggcctccctacactgaccactcccctactgccgttgcccctttcgggtaagggttttcttccctacctgggctgcgcgcactatttacagagaacccaggggtctcggggaaagattcccaagacacaaaaattcctggactggaccgcggaggggcagctagcagagttatccggtggtcacttaccggcaattgaagaggtcgcgagcccgcccacggagaagagtggatccgcggcggcgcttgagctacggcgagcgcttccgacgtcgttggccttcaatcgctcccggaaagaccacggacagtgtccagacgcgcaggcgactttgatcgatccttacccggtccgattccaaggccccagtgaagatgaggacgcggggcaactccggcggccggcctactctgttgcgcggctgagacgagcgaggcagggcatgccaagatttatatccggaaagaaggagggggggtccgcatcctacgcgccacggaaccggggagatcacggaggtggttga

SEQ ID NO: 104116 - DNA, 212 bp, Zea mays
  Clone ID: MRT4577_26457C.1
ctcgggcgtggtgatacacgggttagtacgccacaggcgagtggacccagaagaagggcagcgctgggcaccatctgcccccatcgccatcggcttcatcgtgggggccaacatcctggtgggcggcgccttcgacggcgcgtccatgaaccccgccgtgcactttgggcgcgacctaaacagctgggagtggggctacaagggagtgtact

SEQ ID NO: 104117 - DNA, 346 bp, Zea mays
  Clone ID: MRT4577_26458C.1
cccactcgttctcccactcttcttctgatccggctgatccaccttctgagtggggttttttcctatcacaattccatacctcttgtgaattgcataatccctcgaaccatctagtttttgaactctatttgcgcccgaagccttctggcgaatgtcacgtctacctgtacgttacaccaaaagacattgtataataaaataaagatatctaaaactataaaattcaatacattataatctattaactcattcaaaaaaaaatggtcacatgttttataaaatccatttttacatccccttacatccgccttaataatttttttaatggttccctaaatttaattta

SEQ ID NO: 104118 - DNA, 850 bp, Zea mays
  Clone ID: MRT4577_26459C.1
cggccgctcaggcggccaggcttagtaccaccacagcagccgatcgagcaaacattcctgaccctccctccctccctcctacgcatccggccggcattctttagctagctgctacaagctctagccaagctcacagctcgcgttccctgctctgctagtgtctcggattcagcaaatggcggcgatgaatgtgtcgagggccatcggcgcggctctgcggagcccggcctcgtcaccggtggcggaggcggcggccgcggcgaaagccaaggacgccgagaagctgcgcttcatcgacgagatgacctgcaacgtcgactccgtgcaggagcgcgtcctggccgagatcctcgcccggaacgtcgacacggagtacctcaagaactgcggcctcgacggcgccgccgaccgcgacgccttccgggccaaggtgccggtcgtgtcctacgacgctctgcagccctacatccagcgcattgtcaacggggaccggtcgccgatcctgtccacgcaccccgtctccgagttcctcaccagctccggcacgtcggccggcgagcgcaagctcatgcccaccatcaaggacgagctcgaccgccgccagctcctctacagcctcctgatgccggtcatgaacctatatctgtcggggcttgacaaggggaagggcctctacttcctgttcgtcaagtcggagaccaagaccccgagcggcctgacggcgcggccagtgctcaccagctactacaagagcgagcagttcaagaaccgcccctacgacccctaccacaactacaccagcccgacggcggccatcctctgcgcggacgccttccagagatgtatgctc

SEQ ID NO: 104119 - DNA, 484 bp, Zea mays
  Clone ID: MRT4577_2645C.1
ccccccccagggaaaaagggggggaatccctggggggaaccccccaagccggaaatttttacaaaaccccccctgggattttttttattaagggggttaaaaaaggaaaaaacccaggtttttttacatgggcggggggctttttcgctcccctttttggaaaagggggtggcctttatttttcccaaaaaactgagcccccgggtgaaatttcaccggttttaaaagaataaacctttggacgggattgtttttgaccaaaaaaggggggggggccttggaggctaatttggtaagggtaagggaggacccttgaaccattatgcaggtggggcactaaaagggccagttgggaaaaacagcccaacccctttggtgttacttggagggggcctcgaaaaaaaaaagcctgccccgatcacaatggggcacagcaggaaaagggcccccttgggggagggggacaaaccatccggggggggga

SEQ ID NO: 104120 - DNA, 515 bp, Zea mays
  Clone ID: MRT4577_26460C.1
cgccacgatgccgccgcccctgcagcctccactgttgctgcgccttcacctcctcttccgctctgaaacccaaattcctttactccggcgacgacccagctgcgacgcgccccattgccggaccaggagggttggaggcggcggcagtgggcttcgtcaccggttctggagaaatattgttcagaaaggggatacggtggtcgatgccacatgcggccatgcgggaatgacaatgacacgctcgctctgcttaagatggtggctgacaaaacaggccgtggatgtgtttatgggatggacattcaagaatctgcgatagagaatacttcctcttttctgaaaatggccgtggatgatgaacatcatgtgtgggtttgaactatgaagcttttacctaatttcccctgaagaatgaaatagaaaggagacacttatgaactctgatttgacattattattcactattcaaatacagaggatacttgtcatctcctcactgaatattagatatatct

SEQ ID NO: 104121 - DNA, 1031 bp, Zea mays
  Clone ID: MRT4577_26461C.1
gccgccgcccctgcagcctccactgttgctgcgccttcacctcctcttccgctccgaaaccctaattcctttactccggcgacgacccagctgcgacgcgccccattgccggaccaggagggttggattggaggcggcggcagtgggcttcgtcaccggtaagaggaaggccaccgaggtagcccaagcgtaggtctcatagctacaattttggggcggtgccggccggcatcgcccgcagctgcccctgcccgccacgatgccgccgcccctgcagcctccactgttgctgcgccttcacctcctcttccgctccgaaaccctaattcctttactccggcgacgacccagctgcgacgcgccccattgccggaccaggagggttggaggcggcggcagtgggcttcgtcaccggtaagaggaaggccaccgaggtagcccaagcgtaggttctggagaaatattgttcagaaaggggatacggtggtcgatgccacatgcggccatgcgggaatgacaatgacacgctcgctctgcttaagatggtggctgacaaaacaggccgtggatgtgtttatgggatggacattcaagaatctgcgatagagaatacttcctcttttctgaaaatggccgtggatgatgaacatcatgtgtgggtttgaactatgaagcttttacctaatttcccctgaagaatgaaatagaaaggagacacttatgaattctgatttgacattattatttactattcagatacagaggatacttgtcatcttctcactgaatatttgatatatctgtacctgtcattgtatttgttttatgtggcagcagggactggtaaaactatttcctatatggtcatagtagaatggaagagattgttcccaaagacgctcctgtcaggtgatcaaggccttcctataagttcgttgctgtttgaaaattccaactcaattggtactataattcaacaaaacagtttcctggaaaagtggaaatgccaaaaaaaaaaaaaaaaagcggcc

SEQ ID NO: 104122 - DNA, 1535 bp, Zea mays
  Clone ID: MRT4577_26462C.1
cgggtgtatggcttatttgcgcttagtttgctttatttctatggattgtttcaaaaaagaaaactatggagattgcatacagttcacgacagatcaagaggatcatcgatgtcctgctgcgctggtcatttgttgcatctgttgctggtgatgcaatatatgaattttactccaaaaaaaaaaaaaaaaaaaggggcccgccatcaccaacccacctcccttcaattataaacctataaaatatcatcattgacccaagctgaggcgactagtgggtattgatttttggtggggcagatcaaggagggggggagggggttaacttccaaggaaccagttcattgctggttctgctagcaggaggttggatttcagaggcagaagctttcagccaggcgggctcagggcgcgggcacatcaatggctggcaaggaaatcctccacaaggtgaaggacaaggtgaaagatgcatttagttcatcaggaccagaaacagggaaaggcaagacaaagttatcaggcaagcgtgtcaagcatggttaccatctggtgaagggcaaatctaatcatccaatggaggattatctagtggcagagtaccggcaagttggtgaacatgatttgggattgtttgctatattcgatggtcacctgggccacactgttccagactttttgagctcccatcttttcaataacatcttgagtgagccagaattcttgagtgatccagaaactgctatccgaaacgcataccaacttacggatcagaagatattggaaaacgcagcagagttgggaagaggtggctccacagctgttactgccatcttaataggaagtgacaagttcgtgaaactagttgttgcaaatgttggggattcacgggcagttattagcaagaacggtgtagcgaagcagctttcagttgaccatgaaccaaacatggagcgacaaacgatcgagcagaagggtggctttgtatcaaacctaccgggtgatgtgccacgtgttgatgggcagctggcagttgcaagggcatttggagaccggagcttgaagaagcacctcagctctgatccatatgtggtcgagcaaactatcgatgaaaatactgagtttttaattctagcaagtgatggcttgtggaaggtgatgtccaaccaggaggctgtcgacgagatcaaggattgcaaggacgcgcaggcagctgccaagcacctgacggagcaggccgtgaaccggaagagcaaagacgacatttcagttatcgtagtcaagttcatgtgctagcacatcgtcaggttaaatggtctcccgattgtataccgtgttaaattatcttttaagtcttgtgctcgctggtgtcggacattttgtttaccttctttggttttgggaccccacaaagagggtcaaggcttgtaacatattgttgtttgtttaaggctccaaataaagcatggtaccaccatagtaatttcaaaaaaaaaaaaaaaaaaaaaaaaaaaataaaaaaatactaaaaaaagggg

SEQ ID NO: 104123 - DNA, 261 bp, Zea mays
  Clone ID: MRT4577_26463C.1
ccgtggtcaatccaccatatatcacggtttgacctactaaaacgacagtatccgtgttgagttcttccggggcggggatcacgccacaaaccatgaattacatttccaaataccatggacgagagatcactcaaattgactgagcactggatgcgatgaggctgatacaagcataatacatgaacctgcaagccgagaattcacaatggtaactcaagacgaagctcggtaacatacatagcactatggtggtctgttaca

SEQ ID NO: 104124 - DNA, 243 bp, Zea mays
  unsure (1)..(243): unsure at all n locations
  Clone ID: MRT4577_26464C.1
gcgccctttttttttttttttaacgataaagggtgtaggaaataaatgtcacaaatntcattatcacataggcggaagtctaacaaaaatgaataagaataataaaacgaactaagtnttatccctgggcgccatcaagcgggctgggacaccccacctagaggggcgggaactcgcgggggtngggcccctcttggcccacctacaaggagctcctgcccaccaccttctaccggggaaaca

SEQ ID NO: 104125 - DNA, 135 bp, Zea mays
  Clone ID: MRT4577_26465C.1
ctcaagatagataaagtacttgatctccaaactgacaaactgtttattttctagctgatattttgctatttggcatttacgtaaaagcacacgatgaagcaggtatcgccttacctgttgaaactgaaaataaag

SEQ ID NO: 104126 - DNA, 573 bp, Zea mays
  Clone ID: MRT4577_26466C.1
cccgggttcgacccacgcccgtccgcttgaaaggtcactttgattactcgtttgcatcagcttggagcccagatggcagaacatttgctactggcaaccaagataagacatgccggatttgggatgcgcggaatctctaaatccctccatgttttgaggggtaaccttggagccataagatcaatccgcttcacgtcagatgggcagttcatgtcgatggcagaaccagcggactttgtccacgtcttcgatgtcgggagtgattacaccagaaggcaagagctggacttctttggtgagatatctggcatgtctttcagcccggacaccgacatgctttttgtcggtgtgtgggatagaacatacggcagcctcctccagtttggccgtctgtataatcactcgtatcttgactcgctgtgttgaggtgaggaacacaaagcagacgttgggcgcgctgtgcctcagctgtgcaccctgtgctgaatcttgtcatcatacattaggtatcccaaatcagaatttgaagtcgtttacccgataattcaattaataaaacttgtacccttctgt

SEQ ID NO: 104127 - DNA, 323 bp, Zea mays
  Clone ID: MRT4577_26467C.1
ctgttggttatggatttagagagggtggttacatgaagcttgctgataaaattcttcagacttacaatggcacacatatgcctggcactgaacacacatacagaaagaattgtgcctctatcaaatctgaaaagaggcgccctgaaccacgaactgatcattcgaacctcgtccgggacctggcacctgatgtcacaacaacacttactacaagaaacattccaagtgaactatccatctgttagaggggctgaggttgttacggatacaaataccgggagatctaaaagatatggaagtgtaaaggtcccacatgaaaatga

SEQ ID NO: 104128 - DNA, 422 bp, Zea mays
  Clone ID: MRT4577_26468C.1
tattggggggttttttagaatgttttccggtttttacacacgggcaagcccgaaaaacccaaaggttaccacaaaaaaaccgaactggcaagggcaacgggtccggtggtgacgcccagggccaccccaaaggggaaacccttagcaaacaaggtgaggacaccggcacaccaagacatcccaggacatgagaaatggccaaaacaagacaggggaaccggtagaactggcacgaagacaacacgagcacaaatggggaggcaacccatgaagagataataagagccctccataggtcggcaagaaccggcggaaaggaaaagagaaaaggaccacaaccccaccgaaaggagcactagggggggaagcaggccccaggaataaaagaacggggcaggaggcctggtcacaaaaaacaggga

SEQ ID NO: 104129 - DNA, 1668 bp, Zea mays
  Clone ID: MRT4577_26469C.1
ttgggtacctcgaggccggccggggccgcctcatttcctatcagtccgaaccgttcttccgtcctgctcaggcgttccgaccagcgttgctcgcttctcgtcactcccgccggctgctgctcttgtctacgccacggtagaatggctttcctcttcaacaagttccaagaggcaatcagaacaattgccaagagccccatgtttgctcgtgatccaaggcatcttcaatttgaagctgatgtgaatcgtttgtttctctatacaagctattatcgtctcggggagaatgctgacgagaaggacgctgaggagattattgacttggctagcaaagcttctattgctgatcagcagaaacaagtgcaggataatgttcattatgaacttacgcatatgtgccaagcaatggatagcattttatgtcctgatacaataaacgacccatcaaaaggaccttcagaagcacataatcattctcagcgtagtggcttaagttttgccgttggtggtgctgcatctgcaaacaagcaaagtgcaattatccctgctacacgacctttaactcgagcagaattgtcaaagaaattcagggatcattttgggtacacacttgacatcggaccatctggaattcctcataaagacgcaggtcaaggtttattcttatcaggacaagcaaatgccggtgctgtcctagccatctatcctggtgttatatattcacctgcttactatcgatatatacctggatacccaagaattgatgtttgcaacaactatctaatcacaagatatgatgggacaataattgatgcaaaaccatggtgttttggtggtgaaacaagagcattatgggatggttcagatttggtggattacaatgctatggcacctaaaggctcagagaacaactctgatcgggtgtggagaatgctaagcaagcctctagaaaaaggtgtaagggaaaattttggtgaagtgcttgaacgacgaaatccccttgcttttggtcattttgcaaatcatccacccaaaggttcaagtcctaatgtcatgatctgcccatacgattttcctttgacagagaaggacatgagagtatacatccctaacattacgtttggtggtcaagagaccattaggatgaagaggtttggctccttctatttcaagtctggaggttctgataatcaggctggtgattctctagtactgaagacgctagtgctggtgagcacaaggtccatatgtgatgaagagctctttcttaattaccgttacagtaactcaaaaagacgaccagagtggtacagccctgtcgatgaagaagaggataagaggagatggagctagtttagcacttctgtatcattctggttgtgcatttttttggctaacttttttagttctttcccccctggaaattgcaactgagcattggtaagctcctgagatcgagatgacagttttgacttaattcgtcatttggtattacatactttggtgtcccaattaccatcatgataaaagttaagctactcatgtaagttctactctcaggtcctttgtggtgcttaaaggattacatttgttactccttttatgtgtgtctatcccaatgattatctatgaaagataaataatttatgcatatattgcctgatgatg

SEQ ID NO: 104130 - DNA, 265 bp, Zea mays
  Clone ID: MRT4577_2646C.1
ctaaaattgtgaaatttgttttgttggcttccttatgaaatgctctaactctaaaattgtgaaatttgttttgttggcttccttatgaaatgctctaactttcgtatttaaaaactggtttagaaaacaaatgaacttgcttctctccatagttttaattataataatccaaaaatgatgaaacttgttttgttggttagatgttgtcatactctagctaagaaaaatataaaacacatatggtgttcactgttttcttggtgtg

SEQ ID NO: 104131 - DNA, 388 bp, Zea mays
  Clone ID: MRT4577_26470C.1
agaagatccaggccgccctgcctcagggcccctacgccgtcaacctcatccactcgccttttgacagcagcctcgagaagggcaacgtcgatctcttcctcgagaagggcgtcactgtggtggaggcctcggcattcatgaccctcaccccgcatgtcgtgcgctaccgcgccgcggcctctcgcgcaacgccgacggttcggtcaacatccgcaaccgcatcatcggcaaggtctcgcgcaccgagctcgccgagatgttcatccgcccggccccggagcacctgcttgagaagctcatcgcctcgggcgagatcacccaggagcaggccgagctcgcgcgccgcgttcccgtcgccgacgatatcgctgtcgaggctgactcgggc

SEQ ID NO: 104132 - DNA, 558 bp, Zea mays
  Clone ID: MRT4577_26471C.1
gcgttcggcggcccagttcgggctaaacccctccttctcccagacgccgatccccgtcgctgccgcctcatttcctatcagtccgaaccgttcttccgtcctgctcaggcgttccgaccagcgttgctcgcttctcgtcactcccgccggctgctgctcttgtctacgccacggtagaatgggtgggctgttcaacaagttccaagagctattatcgtctcggggagaatgctgacgagaaggacgctgaggagattattgacttggctagcaaagcttctattgctgatcagcagaaacaagtgcaggataatgttcattatgaacttacgcatatgtgccaagcaatggatagcattttatgtcctgatacaataaacgacccatcaaaaggaccttcagaagtacataatcattctcagcgtagtggcttaagttttgccgttggtggtgctgcatctgcaaacaagcaaagtgcaattatccctgctacacgacctttaactcgagcagaattgtcaaagaaattcagggatcattttgggtacacacttgaca

SEQ ID NO: 104133 - DNA, 775 bp, Zea mays
  Clone ID: MRT4577_26472C.1
ccttctccacgacgccgatccccgtcgccgccgcctcatttcctatcagtccgaaccgttcttccgtcctgctcaggcgttccgaccagcgttgctcgcttctcgtcactcccgccggctgctgctcttgtctacgccacggtagaatggctttcctcttcaacaagttccaagaggcaatcagaacaattgccaagagccccatgtttgctcgtgatccaaggcatcttcaatttgaagctgatgtgaatcgtttgtttctctatacaaggctggtacccctaatcaaactgcaggaagtgtcgggatctccgagctcatggagattttgttatacctagttctcttgcaaaaccatttgtgaaggtaccatttcctgaatttcttctgctatgcacttagctattatcgtctcggggaggatgctgacgagaaggacgctgaggagattattgacttggctagcaaagcttctattgctgatcagcagaaacaagtgcaggataatgttcattatgaacttacgcatatgtgccaagcaatggatagcattttatgtcctgatacaataaacgaaccatcaaaaagaccttcagaagcacataatcattctcagcgtagtggcttaagttttgccgttggtggtgctgcatctgcaaacaagcaaagtgcaattatccctgctacacgacctttaactcgagcagaattgtcaaagaaattcagggatcattttgggtacacacttgacatcggaccatctggaattcctcat

SEQ ID NO: 104134 - DNA, 280 bp, Zea mays
  Clone ID: MRT4577_26473C.1
ggaacattaaccggggggcccttttttataaaacccattatgggaaaggggccttattaagctttcctcgggccagggggggaaaaaaacccgccctttaaaaggggtgccctcctaaaattttttttgctttaagggcaaatttttcccagcgcaaaaaaaacctttttcgcccgtttaaagggtccctcttataaaaagggggaggggcaatttttccgtctccattaaaaaaaaatttgggaacctaacttttgagtgggttgtacaattccccttt

SEQ ID NO: 104135 - DNA, 364 bp, Zea mays
  Clone ID: MRT4577_26474C.1
gggggaaggggccccttccttatttattattttagcacatttcacttacccagttttttaaggggggcaagggttcttaggccaaacgtttacctgtcatgcgtggaacaacattacgaaaacacgtacaaaggtaggttttttattggaaaaccatggcccccgtacgcccctgcaggtaccactttttttttccacgtgtccctacgaaggagcagtaacccttgggggagggggccctggaaactggaaagggccacccccggggacaccttccccccccggaagggttcccttcccttttattattaaccttgcgcccccccattgacgtttgtaattgtaacacccccttaaggggggg

SEQ ID NO: 104136 - DNA, 455 bp, Zea mays
  Clone ID: MRT4577_26475C.1
atccttgttccacaacaggtcatacaggagttttgttacaaagcttggtcttccaaagctggggatgcattttgcggctagcgatgatcacttggtgcgtgaagctgctctaagcggcctccttgagttgtcacaggaccagacatctggtaatgcgctacctgaccaagacaagctgaaaagagatcctgaagagccgaatcgaagggatcagtgcgatggactctgacgatctccatgccgcacacgagaagcgcagctggtggacacactaatgtaaatgttgttaattaggaagcggatcccagtgtgtgcacgtattgtgcagttgacacttgaaatagcggcgagcataagtgatgattggcgtctacttcatctcttcgctaatggcaaaaatcgtcaacctaggtcagctagggaagaagaagagcggcgtctgccgaagcagcaac

SEQ ID NO: 104137 - DNA, 457 bp, Zea mays
  Clone ID: MRT4577_26476C.1
ttttgaattgaaaaaaaaaagctgttattgattcctgacagaatatttcatgaatcatcctgcatattccagattgacaagccgaaaattatgtacagttacgaaaaaaactggcaggaagcacagcagcagagctatcatctcaagccaactctgctgatgatgagcatgtgtaagtccacaccatggaatatgaagcattttgcattttagcgccttcattgctgcttttgcaaacacttgagcagcctcagcctcagcttctgcagcctcagcctccctagctgctgcctcagcctgtgcaattgcagcctctgcctctgcaactgcttttgcagctgcagcagctgcctcttgagctgtcaagcccttcactttcgaaatctctgcatgaatttgggattatgaaaggatggtgacatcatcattcttatgtacttctgaaggatctttgggc

SEQ ID NO: 104138 - DNA, 272 bp, Zea mays
  unsure (1)..(272): unsure at all n locations
  Clone ID: MRT4577_26478C.1
cccgggtcgnacccacgccgtccgtacttcccgttcctcttctcgtgtcaggtccgtacgcactgctacctgcgggtgtatgttcacgcggaccagcaatcggctctgagaatgtccatgtcaggaagttcatagaaccactagggtctggtgggtcctctattgtggtctcaagcgatgagagatcggggacggttctcctgcttgtatctcgaaatactgccactttcctcaaggagtaccctgattatattgtatataccacaccaacc

SEQ ID NO: 104139 - DNA, 279 bp, Zea mays
  Clone ID: MRT4577_26479C.1
cagaaatccagctcgcacctagtacactcttacgcacgatacctaacaacttcccaaggcgaccactttgtcgctcgcgctttgctatcaccggcagaccccaccctcaccctaaacgccttgactaaaagcacagacaacgaccttatactcctactactatacacagacgtcacgccgagcgcttggcgttacgattgccgcgtcactggtagtgctcaacgtggccttcctcgtatgcgctagccactgcagtctcgatggtcgtacaagcgatca

SEQ ID NO: 104140 - DNA, 417 bp, Zea mays
  Clone ID: MRT4577_2647C.1
tcgaagtcaaatgatctccagcagaaattacgtcacctgaattatgaactgaaagagttaaggtatcgggtagaaataaaaaatccttatgccacacaaagtagatggatgaaaaatgaccaagtaagcaatagttcaggactcgtggagaatcagcagcgtgctatgcccacagcctcagagcatcttgaagaggctgaacaggttaatgttggagttaacctgaacaaccctgctgaaggggttcctgctgcactattggatgtgggtaaaccttgcagtactgacaatggcatatccagcacatctgttattgaaggaaataaatctttggggctttcagaacaaccatcaaagataattactgaccagactgatcgggactctatttgccgaggatccaatagttgcgagaaa

SEQ ID NO: 104141 - DNA, 379 bp, Zea mays
  Clone ID: MRT4577_26480C.1
tttgaggataatccgacatttaaacaacaacccaccaaagatcaccataacaatgtcggacggagaagagactatttccaacccccctgtcgctgaggccgaggatgtcgaggtccccgccgagtccagcggtggacagatgtcggtcaacgatgcgctcaagggcgtcctcaagatcgccttgatccacgacggtcttgcccgtggtctccgcgaggcctccaaggctctcgaccgtcgtcaggctcacatgtgtgtcctcaacgagtcctgcgaggaggaggcttacaagaagctcgtcatcgctctttgctctgagcacgacatccccttgatcaaggttcctgatggaaaggtccttggtgaatgggttggtctt

SEQ ID NO: 104142 - DNA, 1219 bp, Zea mays
  Clone ID: MRT4577_26481C.1
cgaggcgacaccgtggatgaggaggacagcgacgatgagtttaagggtttcgacgagaatggcgacctgtgtctgccattcgtcgtctcctgggatccgccaccagtactagtttgcacggcaggagcaagttttacgatggaggaagcagaagaaatagttgactctgtcaatgaaaggaacgatgacctgctctcagcatggtgtgaaatggttaacaacaaagtgactcctttgcctgcaacgcctctacatattcttccagccataaccacattctgtgtttctggatatgagtgctaccacctgcgatattggactgaaattacttctgaaactgatccagatcatccatatttcaaaccctgtgagatgatgcaagtgttctccttgggattatcaagccctctcactcatcctgttaatatttatgggtatttttctgttcgtgataactgggaaccactccgcaattatctatttaagcgctcaagagctgatccagccatgatttctcagggttgctctttcctgccactctgcagcccatgtcgtggaatatatgtgttgcaatttttcttagtagacattgagctttggataaaagaggaaggagaagcatctgctgacaaactgttgtttagtggttatgttgaaatcgacacttcttgggctggatttgaaagaatgctgagaggaaggtttcagggcgattatcttggcttgaacatggagtttgctttcctgggtcacagcattgagactcttatagaggtagaggcggaagccaaacaaccaaccgatgtgagaatcagtgccttaaccagtgggtttgatgaggagatttcactatatgatggcaaattttgtggaagtgggtcaatgttcaagcattttgtggctgtgaagaagcaagaggagttgcacgttgttttaaaaatggatggctcgccatataaatggactttcaaggctggagctggagttgctgcagcacctgagcatccagttccgggctttactcagtattttgtcatgaatgtgtcctttagaacaaggggcaaaacagcatcaacttggcaatggagttgcatctccaacaacgtctgtatatcggaaatagatccgtaagctagcagggtgcgataaggtgcagaaaacgtagctttctgtgggaactttacaggtggaaataacaaagatctctaaatttcggtga

SEQ ID NO: 104143 - DNA, 374 bp, Zea mays
  Clone ID: MRT4577_26482C.1
ggaaatgaattcggcagaatcattctatgcaactccaggtgcatggcaaaaatcttcttatagtggaaatggtagaaacacaaaatatgatgagggacatggatattgggggactgtcgaggttgacggagatggagctgattatatggatgatgatgcatcaactaatggtccaagacaagagagagatactagttaccatgcaaggcaaaggaattccagggggtcagctgctttccgtttgcgccagcatgggcattcgttttcttggagagaatcatcagaccagaacttcttggatggggagactcaaggtagcaaggaacaaggaagagggtctagcaaaaaccagcaaaagcatgctgatacgacca

SEQ ID NO: 104144 - DNA, 504 bp, Zea mays
  Clone ID: MRT4577_26483C.1
agaatccacatagggaagcacataaacaacaattaacaatagagaacccacagaagggggatgatcatgatgtttctattggggggggggggaaacacctcacactccggggggatccctctttaatagttccacctgaaatagcctaaaaacatcctggattgggtaaatacaaagaaccctagggtcaatcatgtttttgtttcctccggtttaacagattggacagggaaaatacacaagcatgcactaaaaactggaatggttggccctaaaatttgcctacaaaaaatgggtaacaggatgaccaaagggttgttgcatgaagctgctgccttgagcaaattcaaaataccatgttttccacgcgtcgacataatggacaaatagaacactgagggcttggttctgggactgggggcaaaatgaaaaaaaagggttttccaatccttaacccttttcctttgcccaggcttattggcgccatcaagtccatgtttcctt

SEQ ID NO: 104145 - DNA, 117 bp, Zea mays
  Clone ID: MRT4577_26484C.1
tggaaaaaccttgccaacaaccgaactaaactgaatggcgaaagatacgcgctctgtagcggggcattaaacgcaaaaggtgtggaggttacgctcattcagaccgttacacttgcc

SEQ ID NO: 104146 - DNA, 526 bp, Zea mays
  Clone ID: MRT4577_26485C.1
ggtatatgttaacccggattatttctttcgagtgagcaaagccaatcacttatcttgagccaagccgtgtttaaaaacaagaagaggatccacctgaagggccatgccgtgtctggatccgagggcaaatgcctcgacgtggtcacaactttgcaacaaatggggatatacaacgaggagtctgatgaggataggccatcaattctatcacagaagaagttgtcagttacacacgatcctcattgttatgtacaaataaaccatacccctccttttatttgacaacttggcagcagattgtgcctgcatactgtacattttaatcagacctgatgattttaggcgatagtagtttcctattaatggtgcggctccctttacataggtgctggacagatatcacctgaaaatagagaggaggtgctgtgaaacactcttgagacgcaagcatgtgcgggcaactactgataaaaacatacatatactgcttggctagaaagtgagtatcgcgcgatcagatccaaac

SEQ ID NO: 104147 - DNA, 585 bp, Zea mays
  Clone ID: MRT4577_26486C.1
agaatctactcatccctcactctttatttaggtgtttgtttggtattctaatctgtccagattatacaattcaacgaattttgaaccagcacttgattcaaaatttgttggatatataatcttgtcatattataatcccaaacaaacaccctttaatttgtgaaatagaatagtttgatgcttcgtcagcttattcttcacgagctaataatgaactaaaattaaataatgcaagttacgtcacgtgtgacctacttggctccatcattctggccaggaacgagagtgcagggcggcaggagcttcaccaccaactgctgccaataattcattcccggaatcactgccacccactctgtctgccagatcgggtggatttcttcgtttcgcccacagctatacgccttggtttgtgcacagtgtctcccgcgcgttcctatgtttttttttcatatactaaacggaaacaaccatttttcgtcgggtttttctatcctatgttttccgttccagaagacggagttgctaggacattataattctcgatttggttttattttttccattcctgcatgctgagaattc

SEQ ID NO: 104148 - DNA, 381 bp, Zea mays
  Clone ID: MRT4577_26487C.1
cggaatgaccgtaggagattaattctgctttaacattctctgacaagagcacatgaggacgctcggaggctgctttgcattgtcttttcacatactacatgtctcagattcgatcgatcaagttctgccccgtcgaaaaaaatactagctgttgctactttacagggctttgtctcagcgtattggtcgttgctgatatgcaggctcttgagcatggcggccatgatttcttgatcatcttggatgttactagctgatcggcgttccaatgacgttgtctttgcagaacgatctttttctcttaaatgacgaacaacctccacactaagctttttctgtgccatcatggacggaccacaagactgtaccgttcaaagcttt

SEQ ID NO: 104149 - DNA, 188 bp, Zea mays
  unsure (1)..(188): unsure at all n locations
  Clone ID: MRT4577_26488C.1
atagtnttnnnnnnnncgcacaacaaagcaaattgtttgcggataaaggggacaaaattttttacaagggttgtacaaatttacatgagttggtccataactatattacaagagtttttccagaattttnacaggaaaggttattggaagcaacttttaaacttcaggctaggcttcgtcaaacttca

SEQ ID NO: 104150 - DNA, 548 bp, Zea mays
  Clone ID: MRT4577_26489C.1
aggcggctgtcgctcgcccgcgcagcggcggacgggcggccgccgatgtccatcatgtggcaggcgccggcgtttgccgtgctcggcgcgggggaggtgttcgcgaccatcggcatcctcgagttcttctacgaccagtcgcccgacggcatgaagagcctcggcacggcccttgcgcagctcgccgtcgcggcaggcaactacttcaactctgccgtgctcgccgccgtcgccgccgtcaccacgcgcaacggggaggcaggatggatccccgacgatctggacaagggccacctcgactatttcttctggttcatggctgttctcggcgtggtgaacctgctgcacttcctgcattgctccgtcaggtacagaggcagcggcaacaacagcacatactcttcttgagtcttcacacgatctgtgccaagtatatgacaaaatgtcaacaaagagagatgtgcatcgaatttgttcacgaggctggcacagcaggatgcccgcattctccatttggcgtctccacaataaaaagtcgacgcggccgc

SEQ ID NO: 104151 - DNA, 240 bp, Zea mays
  Clone ID: MRT4577_2648C.1
aaaaaaaaaaaaaaaaaaaaaataaaaaaaaaaaaaaaaaaaaaaaaaaaaaaaaaaaaaaaaaaaaaaaaaaaataaaaaataaaaaaaataaaaaaattaaagggaaatttttgtaaaatttcaattacattggagtgccctttttatcatgcttttataagggccccatttacgccttattttgaagtcattttaaaatgtcattggctcgccattttacaaccgtttaaattgtta

SEQ ID NO: 104152 - DNA, 436 bp, Zea mays
  unsure (1)..(436): unsure at all n locations
  Clone ID: MRT4577_26490C.1
aaccgaatcagcacagaaggccttgacatcccaattgacctaacaaataacctggggggggacccttaacaaggttaaaaggaatctaaaaaaggccgcccccaatattccaatccaattgcggataaatgcaaaattatcacaatctacgggacacgtgaccggagagataaatgagaagcttcaagagcgcagtcagattgccttggcagagattgctgcccagttacatattggatccgagcttgtcatcagtatcctcgagccgcggcttggaactattgtgaaaggaaggctanaaggcggacagctatacactccagcgtatgtctcacggattactgctatggttcgcggtgctgcagggggtataacagtngcaacaaacctggcatctgtttggaactccttgcaacaacagcttcatgagatgcat

SEQ ID NO: 104153 - DNA, 465 bp, Zea mays
  Clone ID: MRT4577_26491C.1
ggccgcttttttttttttttttttccttttttttttttttttttttttttttttttttttttttattctttttattatttttttatacaaagaaagcccttaaaaacccccttaaacactccaaggcaaagtcaaaggaaaggacccgccaaaagccttaccaaaccatggacttattcagacaataagccacccttcaaacaatgcagcccacaaaccaccttaacatggcgggtaacccgaagctacccccaagagaaggccaaatcaaattatgaccatagtaacactatcaaccgctaaaaaaaccttaaccaccgaaaatagcaaaaatatcaaacacccctgaataaccccccactaacacgccaccaaattttaacttagaatgaggcttccaccatgccaccctgagaccaccaataaaagggaccacccacgattttgcctttaggggggaacaaa

SEQ ID NO: 104154 - DNA, 316 bp, Zea mays
  Clone ID: MRT4577_26492C.1
cccgactcaacccttgcgtggtggctttaccacccaattcccaccagggggatgtgcctattcttcgtcaccatgtcccgctcgaagctccttctttcctcaggtcgagtgcgccttcccggccgctccaatgttttactcttgacatccccgcaccttcgatcccatttcccatacccgtgccgtttccgtcgtctactcgaccgtttaccgatcccttactgcgatcgctcctcatagtccatatcgatccctgtattctttaccgttccccgagccctttccagaatcgtcggtaccgctttccgagcccttt

SEQ ID NO: 104155 - DNA, 450 bp, Zea mays
  Clone ID: MRT4577_26493C.1
agacaatcggcagcgcatatataggagcgtccagcagaacatcatgcaacaggccactgcctctccaccagtgcctggctctgcgacctgccagcgcctgtgcaatgaatatgccctgcccctgcgacgagctggacggcttgcacagcgctggcaccggcctgacgaccatgatgggcaccggcgggctgtacaccctacccacagtacccgaggcagccgcaaggcaccccgatgggagcggcgccatcactactccctgggagggcagacgagcgccatgtaccagacgctccggctacacagctgccaaaccctaaagaggatgatggacgtgcgcaccgacatgcatgatctgcggatgacgatgcacctagagcgtgccgcagcctccagcatcaatcatgacgagccagcgtctgaggcaacctgaacaacctctgcaggcag

SEQ ID NO: 104156 - DNA, 1601 bp, Zea mays
  Clone ID: MRT4577_26494C.1
aagtcagcattctggggccaccttcttcggcatgtgatgcagcaggggcagaagaacatggtggaattctttgacctactcctttctccggcatcgaaaatcttgaacacctggtttgagagtgaggttttgaaggccactcttgcaactgacgccgtgataggagctatggctggtgtgcacactccaggttctggatatgttcttctacaccatgtcatgggggagactggtggtcagcgtggtgtttgggcgtatgtccaaggtggtatgggttcagtgtcatcagctataagcaaagcagctcttgaagcaggagtgcagattgtaacaaatgccgaggtttcccaagtaatggttaatgaaactagtggaatggtagaaggggtagctttggttgatggaacagaggtgcactcgccagttgttctctcaaatgccactccatacaaaacatttgtggacctagtaccttctagtgttcttccggaggacttcctctgtgcaattaaggcagcagattacagctctgcaacaacaaagattaatgtggctgtcgacagactgccacagttccagtgttgcaacaccaatcttgaaggtggtccagagcacatgggcacaatacacattgggtccgaaagcatggaggaaattgacgttgcatacagggaagcagcagacggcatctcgtccaaaagacctgttatagaaatgacaattccttctgttttggataagaccatctctccgccaggtcagcatgttattaatctctttgttcagtacacaccctacaaactttcagaaggcagctggcaggattctaatgtcagaaaagcctttgctgagcgatgcttctctttgattgatgagtacgcgccaggcttcagctcatcggtggtaggctacgatatgctgactccgcctgatcttgaaagagagttcggcctaacagggggaaacattttccacggcgcaatgggcttggattctctcttcctcatgaggcctgccaagggatggtcggattacagaactcctgtgaaggggctgtacctctgcgggagtggcgcacacccaggtggcggggtgatgggcgcgccaggacgcaacgccgccgccgttgttttggaggaccacgtgaagacaaagtaggtgtagtgtagctcgctggaaaccaagatggcatttttatcatcaggagaaaatctttgatgccatggtgctgttttagtgcctttcttttcttttcctttttggagaattattgtcgcaatccatagtcggagaacttatatcatgtgaagactcgtgtaacaaatcctcactaacatttctgtccctgtccggcgggaaattggaactgtggtaaaatgtggacccatctctttgaaccacaaaggccctatgggcttattttgtgatgtatgcttgtgtttgtattttttttttttttttttttttttttttttttttttttttttttttttttttttttgaattattgtcgcaatccatagtcggagaacttatatcatgtgaagactcgtgtaacaaatcctcactaacattttaccacagttccaatttcccgccgg

SEQ ID NO: 104157 - DNA, 1168 bp, Zea mays
  Clone ID: MRT4577_26495C.1
ttgggtacctcgaggccggccgggtagaggttgcatgctgtcctgtcaaacctgggcatggtatcaccagttaatagtggtgagcgtttgtttgttggtgagattgttgttggggaaattagtgccttgcagaaggctgttactgattcaatgaacaactataagaaagttgaactggcccaagcgtcggttgatggagtcaaagttgatggtcttgatacaaacttagcagtaatgaaggaattgttatccccggtaagtgagctttggagggttttgctattgctcacatcatgggacgagcctatgaagtccatgttgttttgcttcctattctcttatattatcatcagggggtgggtaatctattttattgtcacggtactattgttttcagcaacttttatgtttctcacaagattaactaatcaaggaaagcaaatgagtgaggtaaaggtggtatccccacctccactgaacacaatggagcagctcctagctgttcaaaatgccatttctaaaattgaggagcttgtccaagatgcaaatattgttcttctgaagataagagctctattgttggcttttccatcccaggcgacggacagggctattctggcattggtactgatggccctgagccttgccatcgttcccacaaaagtgcttctgctgctggtgtttctggaggtatccacgaacaactcaccactacgaagagcaagcacagaaaggtgtaccagaaggttgagagagtggtggttcagcatacctgcagctccagtggtggtggagaaagagaaagaggacaagaaaactagatgatacatccaatgtaatctttatgttgcttggctgatacgttgtgtaacgtatcagccaatgcccacctttgtacaaagaccgcaatatcaacaacgaggggcagtttcaatgaagatttcatctcacttgtaccacctgccctgtttacatggctcttgatgctttgttgcaagttgactagagctgaggccggtgtcaatcgccgctaataacacaaatccctttctctgggttggacatatcgccgtgcggacctgcgccccttcgtttgtaacatgaacagtattgattcttcgatattatgggattgcttctctaaaaaaaaaaaaaaaaaaggccccta

SEQ ID NO: 104158 - DNA, 436 bp, Zea mays
  Clone ID: MRT4577_26496C.1
ggccaaccagaaaaagaattacatttccaaaaaaaaaaaaaaaaaaaaaaaaaaaaaaaaaaaaaaaaaaaaaaaaaaaaaaaattaaaaaaaaaaaaaaaaaaaaaaaaaaaaaaaaaaatttaaaaaaaaaaaaaaaaaaaaaaaaaaaagtttttccttgccagggcggccgtttaaaagggaatttttgaaaatttccaaaaaattggggggggttaaaccatccatttaaagggccaaattccccttataagaagtcgattaaaaattaattggccgttgtttaaaaacttgttgattggaaaaaccttggtgttcccaaattaaatcgctttgaagaaaatcccctttttccaatttgggataatagcaaaaaagcccgaaccaatcccctttcaaaaaatttgcccaccctaaatggcaaatgaacccc

SEQ ID NO: 104159 - DNA, 482 bp, Zea mays
  Clone ID: MRT4577_26497C.1
ggccgcttttttttttttttttttctttattttttgttttttttttttttttttttctttttgtttttttttttgttttttttttttctgttttttttaacaaaaaaagtttttaaaaaaaaggtccgcacacgctttatggtgactaggaggtccgaaccgcgccccaaatgtttagaaaatttgcccacgcctgttttcgaatattttaagggcgacccagaggccctcaggttacatgaagtggcaacccgaaggcctcgccctcgtattgaaacttttaaggggccgggccaacggcccgtggcggttcacagaggacgggcggcgccgaggctgtctggaccgcttcaaagaaactcctgtcctcttcttaaatcgtgggtgggctggtccttgttattcttctcctacttcacggtggccttgttcttgacttccgccaccacgacgatgccagcggagcggcatacctttttgcg

SEQ ID NO: 104160 - DNA, 350 bp, Zea mays
  Clone ID: MRT4577_26498C.1
tttctcctcatttccgtcctaatcgggggggcggacgcgttcgcccactcgtccgggaagcgagtgggactgtgagtgagttggaaggaggtgggtggggatggggtttcagaatggtggtggtgtttgtggaccctgtccctcgtctgatatgcttttggctgctgccatcacttctcttctaggctccggagtggttgttactaccaatttcgacgacgtgtggcatcctagtttggcctacgaccactttgtgtacgactgtcaccttctcaagctcctgtctttactccatctttcggctgagggttcttgtcaaggaccaagttcctgtactgctaggccatctc

SEQ ID NO: 104161 - DNA, 660 bp, Zea mays
  unsure (1)..(660): unsure at all n locations
  Clone ID: MRT4577_26499C.1
gggtaccctcgggnttcggccgggctaatcgagcatcgcagagaaggcgtcttggtactctactaccttcgtggttgaaacctttaaacccttctcacaattcactccgtcggccggcgttccatcccgaacgacgacactcatgaggaagagcattaggatccacatcgggcaggccgatattcaggactgaaacgcgtgctgggagctgtactggcttgagcatggaattgaggctgacggtcagatgcccgatgacacgaccattggaggaggtgatgatgctctaaaaccgtcttcagtgagactgttgcgtgggaagcccgagccccgagctgcatttgttgaccttgaaccaactgccataccagaggcgaggactgagacataccggcagctgtttcatcctgagtaagttattagctagaaggaggatgcatctaacaactttggcccggacactacccatttcttggtgactgatgacctatgcctagatcgaatcaggaatcttgctcgacatctgcactgggctgcagggcttgctagatttcaacgctgcagcgggaggaacggcctctggccttggatgcctactgctagancgcctgtctgatagactacggaatgaagttcaagcttgtgatcactgcgtaccct

SEQ ID NO: 104162 - DNA, 370 bp, Zea mays
  Clone ID: MRT4577_2649C.1
gaacaagctaaaaattgctcttcaactttttgagcctgctcatcaacacttccaatgtctcatttaatctttgggtcaaatggccatttggtgaaaatagttctcttctacatctgattagcccatgccatctgccagtcaattcgtagaacgcaatcaccatctgcaatgacgcatcaattttcacattgtcttgcatcggtctccttttccctagcatggatttgttttgccaggtttctcttattcttcttccaattcataggtgtgccttttcctctttcctttctgtcaagtgcccttcatttattcaagggtcacacctatttgattccgaggcttgattttttttttgcgtcaactctgcctt

SEQ ID NO: 104163 - DNA, 279 bp, Zea mays
  Clone ID: MRT4577_264C.1
tttttttttggggttttttttttttttttttttcttatatccacacaaaaggtattgtatattgcattttttaaacatggggaaaggggttgccacccccaattttaaaagatctccaaaaatctgttacaaaaaatgaggtaacaagacccccctataaaccaaatataactattggggcgccccccacccccaaaaaaaacaccctttcgggggaccctaaagggtgcacaccctctcaaagaaaaaacacacaggaaggctcaacaccgctcttcc

SEQ ID NO: 104164 - DNA, 1361 bp, Zea mays
  Clone ID: MRT4577_26500C.1
ttcatcactcctttggaggcgggcggcttggcttggagctcagctgctgtaactctgtcggcgggtacggtgcgcgcaggatcggggcaaggacctgggcggcttcatcgaggaaggcttcgggcctcaggggctcggcatcgtctccatcgccggcgtacccggttacccagagctcaggaaaaggctgctgcgcttggcgccaaggatcgtcagccttcctgatgatgtgaagaaacaactggaggacccagatagcagataccactttggttggagtcgtgtagaagagaaattcgagtctgaaagatgggacacagccaaaggctcctacttcgccaacccagtttttgatgtcccaacaactgatgatgagcttgtaactagatacccatcatactgccgaccaaacatatggccaaaggatcatcttcctgagcttgaaatagcattcaaaggtcttggaaaactgatgttggaagttggcttgatgttggctcatcattgtgatcgctatgtaatacagcgaggggtgggacagtacattggtgaaagccttgagaagacacttgctaggtcaaggtgtcccaagggtcgtctgctgtactacttccccaaatcgtttagcaaacaggacgaagtttcgtcatggtgtggatggcatactgactatggatttttgacaggacttacatgtggcttgttcacgagaaaatcagaggaggtcccctgtcctgatattggaactgggctgtatgttcggactcgtgataatcaagtcgtcaaggtcacacttgtggatgatgagttggtctaccaaattggggagactgctgaaatactatcaagagggcatctatgtgcaaccccacactgtgtgaaggcttcccagcagggaaaatgcttctgacgttggtcgctcaactttcgttctgtttattcaacccaactgggatgagccgctgaagcttcctagtgaaatacgctatcaccaggagtgcattccaccaaccaggacacttgcgtacggcgagtactccgaaagagtcttggcgagttttagcggcaagagcgtggaacaaaccttgatgccacagtaagaggctccagccagatgaatactccctctgtttctttttatttgtcgctggatagttcaattttatactatccagcgacaattaaaacgaaacggagggagtatatcatatgtatgataccataccattcaagctacagataagtggacagaagcatatgctgttgtgggatggatgaatcgcacgcagcttaaaataatgcaacaataagactttgtttgcatacctaccatcgtagtgaggtgcgccagggtggaattt

SEQ ID NO: 104165 - DNA, 161 bp, Zea mays
  Clone ID: MRT4577_26501C.1
cctttcttttttttttttgaaagcggagcacacacaggattacttcctaaacacgggagcgtcgcccctgcagctacgcccgagccttgctgacaagcaccttgtccacaagggacaacaggggtatgtatggaaagctgacacacccgggttgagtggtg

SEQ ID NO: 104166 - DNA, 260 bp, Zea mays
  Clone ID: MRT4577_26502C.1
ttccggaggccacacttgtcatgcctaacgttatcctacactacgccttccacgccggtgagaccgtggggcgcatgcaacgccacgactgacccgaccttctgccggtccagtctaccgccgcgcggcaagggggacctctacaagtacggccgcttctcggtggccgagtcactggcgggcgcgcgcatgttacgagcaccttgtcgaccgctacctggcgcgccaccggcacctttactggagcgccatcgcggcac

SEQ ID NO: 104167 - DNA, 846 bp, Zea mays
  Clone ID: MRT4577_26503C.1
ctcgaggccggccaattcggcacgaggcgccgcctcccgttctctcgagtctcgacctctcctctcctctcctcttctcaggtctcacctgagtcacacctccacagacactgagacacacacatacgctatctctcatcgtcctccactcccgagtcccggcaacggaagtttcactgctgccctcatctaactccccgtctcactggccatcaccatattgtcaactgtgcgtattttcagtctgtagaagccatcttttaaagaacattttgggcagaaattgccagtagcatttcttgtggttaacatggacttctcagctggttcctacttctcatcatggcctatcaattctgcttctgagagctacagtttggctgatggttcagcgaatcatatggagaaggaagcatgccaccgtcaacctatttcatgacagctagatcagatcacaatttaaatttcagtgtgcatgaacaggattccactatgcttccaaacgaacagttgacctatgctggtgctggccagattgatctattacctgctgagactctatctagggataagcttcctgaaaatcttctggagcttcaaggacttcagaatatcagcaacctacagagtaatttagtggcccccaggggtgtttcagcacaatttaacacctggggtctttcatccacagttgaacactcctggactttcagaactgcctcatgccttatctagttcaattgacagtaattggaagtgaagtttctgcttttctcgctgaatctaacgctgtttcttcagcgccaactttatgttccacattccaaaaacgcttcttcgttcatg

SEQ ID NO: 104168 - DNA, 591 bp, Zea mays
  Clone ID: MRT4577_26504C.1
attgggtacctcgaggccggccgggaacaccatctttcagtcaatccatacaagaacttacgagacccgcggcccgctgagcacaaacgcagaactacgacgaaacgaatggcttactaccaacaagaggactactgctacggaggaagtgcacgataaagggccggtccgtcttcgggcgccgctctgtgaaagtccaccaaaaatcccacaaagagaagttcgaggaggaaaacgcggaatcatgcggcgaggacaaccaccaccaccatcatggcaaatacggcggccactgcttccgggcgtgccagaccacggttcaagaggacatcaacacctgacatccggcgagttccaccagcgcagggagagcttcctcgccaggggtaactgactcgtccgggggacggcatccacgtgcgctcgtgcttgcctgcgtgccttatggatgtctgtggatcgactgcactgtgcagggtcatgcctacttgtctatcgcacgagcacgcactcaactcctgaacaaatgaccacaataagctcgggacctgaataaaagttcttgcgtaatactaatacctacatcaccaa

SEQ ID NO: 104169 - DNA, 365 bp, Zea mays
  Clone ID: MRT4577_26505C.1
cgcgaactccgcacgacagaatgcgaattgggcaccgtcgcttccttaaacgcggtgtcgtccttagaagatgtgccgccctttgatacctactcgcggtccatatactcagtacagatttcttggaaacttatagcagatcacgtctaaatatcgccctaccatcactccaatcggtcatggagcctaccgcatcttctgctcggcgttgaactcggagacgaatgaaatggtaccggttaacaagataatcaactctttcgataatcacatggacgctaagcgtacgcttctggaaaataaccttctccgacatttggatcacgagaatgttatcacgatctgagatgtcactgcttgctctt

SEQ ID NO: 104170 - DNA, 280 bp, Zea mays
  Clone ID: MRT4577_26506C.1
tcgtgacccggcaccacagcgaagtctgaagggggacattttcaggggactccagggggttctaacccaaaacaaggtaggtattacctgctgaaatgacgttatggaagagctaaaacgcaagaaaaggccctgcaacttcaaggagaaactcttcatgcaggaggccagccacacctcacaggatatcacagtgaaccatgctcctttgcacgaaaacgggtattccagtaggctaaatcgccacacatggcacatagcagacacaggggtgggcctg

SEQ ID NO: 104171 - DNA, 1780 bp, Zea mays
  Clone ID: MRT4577_26507C.1
cctcgaggccggccgggccggatacccaaaatcctacgcagagacatgagtggcggcggcggcggcggcggggaggaccggatcagcatcctcccggacggcgttatcggcgagatcgtcacccgccttcccaccgccgatgccgtccgcgttcaggtcctctctcgccgttggcggcacatatggatctcctgtccgttgaacctcgatctcggttccccaaactactacaccgactacaagcgcgtcgtgtccggaatcctcgcggcccaccctggcccctgccgccgcctcaaagttgactggccgtacgacgacggcgagtcgtacaaccactggctccagtctcccgccttggtcggtcttcaggagctcgggatcgagccagagtactcttccttgtggctagacaagaaaacactgccgcggggagacaacacgagagcactgccagagcgggcattattccagttcgctcccacgctgcgcctcctaaggattggctaccataccttcccctctgtcggtgccgtggcggcgctccggttgccacacctcgagctcatctcgttctgctgcgtggacatctcggaagccacgctccactggatgctcgccgcctgccctgtgctcagaaccctcgtcctcgacggctgcacaggcttcgccacagtccggatcaactcacccacccattacaagtttgccatctcacctgcggattcatccataacgaacgactacgacccgtacttcttggactacgactacgaaaatccgacggtgagggtgacgacgtggcaagtcatcatcgaggatgcccctctcctagagaagctggtcctctgccgccgctcggctgctgttgaatctttccagctactagtggtcagcgctccaagaataagggtcctgggatccctgtccttcagcatccccaagttggagattggtggcaccgtctttcaacccaccgtgcgccgtgtcaaccgtgtggggcctgacgatgttatcatggagaagcgcttgctgatgcaggccgtcatgctggcgacgactctgcgaaccgtcaagattttggcgctggaagatgcagattccatcgacgtcgtcagcgactacttgaagtgttttccatgcttggaaaagctatacatctcggcatcacaaggatacagaagtgctggaagctatgataaacagaatcccatcgagtgccttgagcgtcatcttaaaatggtagcattagatggatatgacggcatgggaccacatgtcaagtttgcccaattctttgttcgaaatgcccagttgctagagttaatgaagttcagaatctttagaaactaccactgtgaacctgggaaaaccaaggcatggattgaggatcagcaaaggcaactgcaagtcaggagcatgacttcccgacctgtgaagtttaagtttgtacatgattctagatataatcaggatgtttactgtggtgaggatatcagtgacctgtcagagcacatccacgatgacccatttgatcaatggtttgaatcagagaaggaagccccccggcatgctgaaggaaaagaagatgctatagtttggaactccagccaaaggcttgattcatttgatcaaagctgaataagaacctcgtcctgaacttttatttaattcgttatgtttgtgtgctttcagttgataacatcacattttctgttttgatgcttcagtaccacatcatattgttcacttaatatctctcattaaacagctgtctttccac

SEQ ID NO: 104172 - DNA, 382 bp, Zea mays
  Clone ID: MRT4577_26508C.1
gtgggggttttgtttttagctttttttatttttttaatgggagcgcgtggatctgctccttcccgtcgttgccggcgacgtagtatttggtctgaacagccgcgcttgtcaagaccgaggaacttaaacccgatctcgttatagacggtggaaccctccaggggggacaaggagatgttgaaatagagtcccgtcttgacccccgccagcgcgcagatcgtgccgcccaaaggggtggcggacaggagccaaacaaacgagcgccagtgcgcgccgtcgcccacctaacaaaagacgcgcatctcccccgcgttttgctcgtggcggtacacctgcggacaaaatttcacggggatccgaagtataagtttggcgccgttgg

SEQ ID NO: 104173 - DNA, 278 bp, Zea mays
  Clone ID: MRT4577_26509C.1
tttggtggacttgttaagaaatgctgttcaccctgcaacagggaagacaggtcatccggccacaggtctcagcaggccccagcctccgagagataaaataagggcccatggcccactatgggaaaacaagtcggggctactctactctagagcgaccggtatcgagaagcacctcaatacaagtgacggcccggatcgagcgaccgagcaaggtgacgagggccgacaccgccacgcaaggggtacatcacttgaccgacatggagcgagacaacggc

SEQ ID NO: 104174 - DNA, 185 bp, Zea mays
  Clone ID: MRT4577_2650C.1
aaagcctgtctgtgacagcacagttgcgaggatcacattttggccggcgaatggaggctcgtgaaccgcttatacgtcacagaggagggggctataagcgaatcagtaccaggtaacatacagtgcgtctttaaggcgttggagcagcacctttacacctctgaaggaattctggaaagttatga

SEQ ID NO: 104175 - DNA, 130 bp, Zea mays
  Clone ID: MRT4577_26510C.1
ccgttgaaacgacgatgaccctcttgtgtgcaattaacttgggatatgtccaatgaacaacccagctatagttccaaaggtatgtaaagtaggaggcgggggaacattaagtctgatatccttatcgctg

SEQ ID NO: 104176 - DNA, 300 bp, Zea mays
  unsure (1)..(300): unsure at all n locations
  Clone ID: MRT4577_26511C.1
accgggntggaaaacccgggccggccgacgcgtacaaancacactnatnttgctgtcctgctcgacaatgangccatctatgacatctgccgcctttgccttttcattaagcgcccaacgctacaccaacctcaacangcttgtctcccaagtcatctcatccctgaccgcttccctgaagttccatggtgctctaaaccttgattttaacgacttccagaccaacctcgtgccctacccgagcatccacttcatgctttcgtcctacgctccatacatttctgctgagaaggcctacca

SEQ ID NO: 104177 - DNA, 345 bp, Zea mays
  Clone ID: MRT4577_26512C.1
aaaaaaaacagctttaaataacaaaacgggcggggggaaaccaaacccaacgggcttaaaaggggaatacatgggttcaacagggcccaaggggcccaaaaaggccatttatacttgggacttggcgggttttttaggggaaaacaattggggggccggcccattcaccagtttggccagtttttaaccttgtttttaacccatgggatacttttgggtccaagagcgggggggggactaaaacttggccctgggggttttgtacatgggaacaatttcagggacaaaaggatcattagggtttgggccccggagccgggaccaaattgacaggaaaacccgccc

SEQ ID NO: 104178 - DNA, 339 bp, Zea mays
  Clone ID: MRT4577_26513C.1
atattataaatgtcaccttgatttggttttctgcatctcactttgctctttagaataagtttttctttcatgtgcgcttgagcgtaccattctcttattggaccatttttcttaaaaaccgcaatgcttacttctcgctcataggaggcctacattttcataccactcccaatgcattttattttctgtctcctatatgttcctcataaatatttttgatatttctaaatttcttatttggcctttttctacccttttttttcttcacttattatttctaaaccccatttctactatttatctgttatttcatccttattctttttacccccaaaactt

SEQ ID NO: 104179 - DNA, 260 bp, Zea mays
  Clone ID: MRT4577_26514C.1
cgtcaggagacgcccataactggctcgggacgagaagatcgcgtcgaagctgcccgccattgacctgaagaagatcaaggtcacgatcgcggtcgccatcgagtgggttgacatcgagcagactagtgccgccacggagctcgaggacacgatgccggacccggtgagcgtctacaaacttgatgtaccaggacctgttccagggagccgcgacttccgtggaggttctacacgtcgcgaccgggggacggggccgcttc

SEQ ID NO: 104180 - DNA, 265 bp, Zea mays
  unsure (1)..(265): unsure at all n locations
  Clone ID: MRT4577_26515C.1
cctattcaatacttaagnatatcatttaatttataatcatgccangcntcatgggctggggctactttttcctcctccataatcacatattttctcccaaatatcaacccttttctgctgcccaaaaagacgtcttaaatggtgtccagtggcggtagcaaggaggcaaagtcgcccaaaaaggcctccaattcctctaaaactcattaaactgactgtccgtaataacctttttttctctttcccatttttttccatttttcat

SEQ ID NO: 104181 - DNA, 444 bp, Zea mays
  unsure (1)..(444): unsure at all n locations
  Clone ID: MRT4577_26516C.1
gctgacctgctctctccgcgcgcctgcgcgcccctgcgccccccgcggagacggagcggaacggagcctactaagaagacagaaaagggggcggtgctgctctaagcagagagtaccgaagcgttaccatagggagaggcattgtacatgtcaataagcatggtagtaggtgagcgggacacgtaaatagcaataagacataggnctcgagctatgaaaaaggccgactctgacaaaaccaagcccgtccccacctaaatgaaggttcgaggatctacctatttaggattgtgatggaactgctaaaaggcaatcacgtttcgcatgtctcaaaattcgatggtcatgtttgggaatgaataaattctgctgaacggcaacattactggatatgctgttgcttcttactgctcgcatgtaccagttcaataccacattcataat

SEQ ID NO: 104182 - DNA, 303 bp, Zea mays
  Clone ID: MRT4577_26517C.1
aataccacaaatttaataagtatcattagtaattattttatcggggtttcagaaataatacccataaattttaatgcatgggaaataactaacggggaaaacccagtaacatggggaagcctggccacgctacttcttctgggcctctcctgcggaagcaataaccctgtagaccatttataccggtggcaggggtgaagggccagtcacaccatcaacaaatcatcctaaggggtccctttaatttaacacttatatagggtttgctgggggaggtactcgtttggcgagcatacactggtt

SEQ ID NO: 104183 - DNA, 270 bp, Zea mays
  Clone ID: MRT4577_26518C.1
ctttaatgcttgcctatattaatttcgatgtatagcctcacattttcatctatgtgctatctcattcatgatttccttggaacattttttgttcattcttcattgttcttacatgtgaagtaagtgaacttttaaacaaagaaagacaaacagaaaatgttttgaatatacacttctgaacctaacaccttggaatcgtgtatactgatagatttgcatgttcttatcttgtagcattgcaagtaactaacatgaccatcttacaattca

SEQ ID NO: 104184 - DNA, 445 bp, Zea mays
  Clone ID: MRT4577_26519C.1
ggcttggaacctttgggctgatttatgtgcttgaaaaaaataagaaaaaaaaaaaaaaaaaaaaccaaaaaaaaaaaaaaaaaaccaaaaaaaaaggagacaaaaaaaaaaaaaaaaaagaaaaaaggataagggtcgctgacccataagacttaagcccatgcatgtgcgaacgtaaagctacagtcccctcacattgcaattcaaaccaaccctatcggttgcatacccataatatcgggaacgtgaaaattccgttgcatttaaatccaccgtttccgacgtataccttttccctcttagccagtgcaacaaggattaggttggcattgaccgttaccattaatatccttctaactcgaacggggaacggtatctctttcgcattccaataccaaatgtcgtggccgccatggccatgtgtattgccattgccgtaaccgtt

SEQ ID NO: 104185 - DNA, 272 bp, Zea mays
  Clone ID: MRT4577_2651C.1
ggtgaatcggttgttctttcctcacatttggatgattgtcataaggtttttagcatgttcctccttttcttcaccctccccttttttcttctattaatcaagagaaacttcaaagttaatgggatggtcggatctcacaggctgagaactcgttcacctccaagcatttcatgaaaaagctgcttcttattaatcatacaaactctcacaatgatgtgaagagtttcacaattcattacaaataaagagtagtgctttagagaaaaagaaaa

SEQ ID NO: 104186 - DNA, 486 bp, Zea mays
  Clone ID: MRT4577_26520C.1
ccggccggggttgggcaaatcatgaaggcagcttaacatttcttctgacgccgcccgccgccgccagccggaacgcaacaccgcagcggttacctgcagcggacggcaggaacctagtcctccagcgccatcagcgtccgcggtgggccatgatcgttggggccaaggttctttttagaggtacacactggcttagattctgggcccagctacaaaaggatgaagctgatggagttttaataaagaatgtctgtcgtcgcctggaatcggtggccatgcaattttgtgttaattttggttggaggttttctaataggattgccttgtaatcatctcactggttttattaagtttaaagaacctttagtgtgttagtgtgtggctgtgtggaggggtatgtcccttcattgagcagtgtgatataacaatttgtgttggctctaacctcttttgagggcaaaaaaaaaaaaaaaaaacccgcggcca

SEQ ID NO: 104187 - DNA, 337 bp, Zea mays
  Clone ID: MRT4577_26521C.1
agaaagaacacaaaaaacccccgggggtttaggaaaaacaaaaaaacaaaaaaaggtgggaggggggggaaaacacggtttaacaaattataaaaaggggaattaaagcaatacaggtaagctggaaaagctgttcaagaaccaaagggaacaaaactgggtgttaaaacgttttgggaaggggggtctatattcttgggaataaaaaaaaaacttggcatagcaaaaagcttcaagcgggacatttaaagaacttatgccttggaaaaaaactgggcaaaaaaaaagggcctcctttggttcttggtgaagctgagtttggaacccttgcccttgg

SEQ ID NO: 104188 - DNA, 444 bp, Zea mays
  Clone ID: MRT4577_26522C.1
acgggtggacacgggccagagcgaggagccgcgcccccgagagcgcgacagccaccaaagcccgacaggcaccgaacaacaccacgaaaccacccagccacacgcacggcaccaccacaaggactaccccgagaccgcacacgaagcggagcggcccgccgtcacaggccaaccagggggggggggaacggacgcaaccatcaccggacaggaacaaagacaaggacagaagaccaaaagcagggaagggcagcaacaacggaaaaagcgaaagaatgaagggaaacaaagagaagagcacgaggcgaaccaaagggcaccgcaaacacagacagaaggaggccgattggcaggaacgcgagaagatcaagcaacacacacgcaagcaaccaggggagagccaaagaaggagcaaacgcaaccaggaatgcaggcaactggaag

SEQ ID NO: 104189 - DNA, 119 bp, Zea mays
  unsure (1)..(119): unsure at all n locations
  Clone ID: MRT4577_26523C.1
cctagacctatgcgatcgtcccgtcatctatcacaantcagagcccagtccatcctgatatggctgcgcgggcgcacacatctcaactcccatgacacaatatcatagatccgcgatca

SEQ ID NO: 104190 - DNA, 327 bp, Zea mays
  Clone ID: MRT4577_26524C.1
gcggaaaaagccctggaggaacaggaagcgactgcaggaggtatgggtatggtaagggaaaggaccgatatatcttgagacggaaatggcgatgcagcctccagaggagtaggtataggatgattatcaggagagggaacgggaggataattgagtggaaggttagggaacggatggatactgataagtttgatacggctcagtaggaataagagagtacattattgtactaagaacggggcattacagcgtttgtgctcaaaggaggagagagaaagaggatgtggagcgtgcacggtgactcgaggaggaagaaagagagaggga

SEQ ID NO: 104191 - DNA, 336 bp, Zea mays
  Clone ID: MRT4577_26525C.1
cttcgaacacaaaaaaaaaaaaaaaaaaattgtgaatttataggaaaaaacccgaaaaacccaaaaaaaaaaaaaaaaaaaaaaaaaaaggggcggccgcacaagaggacccaggcgcccgcccccgggcgggccccgccaaagccccccgagggggccaccaaaaaccaacccacgggccgccgaaaccaccggcggggcggggaaaaccccggcgttccccaacgaaaacccctggcagcccacccccctttcgccggcgggcgaaaccccgaaggggcccggaccgatcgccctacccaacagctgcccagcctgaagggcaaaggggacccc

SEQ ID NO: 104192 - DNA, 582 bp, Zea mays
  unsure (1)..(582): unsure at all n locations
  Clone ID: MRT4577_26526C.1
ccggccgcaccaggcaccacacgcggtgacgcggcacgccggacgcagacaccgccatccgcccatccgccgaacgccatccctccactgctcgtcctccagacctccactccactgctcgcccatccgcggtccgctcatccgccatccgccatccgcggtcctccagacctccactgctcgcccatccggccatccgcggtctccctgtctccacggttgctcacagcagtaccgcaccaagctgcagtgtgctgtccagggctgctgattgctgaacacctgctgtccaggggctctgctctccacttcggctagccggctacaactccattcctcagatgacgcctccggttggaaataatcctccctcaggctcagccataagattggccaagttgatgtgtgctagtagacttatatgacttcttatgttagccaagagcccaagacttatcacttatgtgctacattaaactatgtgtgctccggatttatatggattttatctatgtttaattaagacttgtgtttacaatttttaaaaaannaaaaaaaaaaaaaaaaanaaaatttgcggac

SEQ ID NO: 104193 - DNA, 260 bp, Zea mays
  Clone ID: MRT4577_26527C.1
cttgattaatacaatgggtagcattttgagtcgtgtctccagcaaaaaagtactactaccactaccaaagaagcaaaaatggctcccgttggaatgacttattatgaaaaggcccagagcaccttcaagcctcctctgattgccaatgataatgctttcttgggtgatatttccagcagtgaaaagaatgacgccgacaaacccatttcttgcggtctctaccggttagaaaaaggcaccccactcgtctacgagtacac

SEQ ID NO: 104194 - DNA, 1671 bp, Zea mays
  Clone ID: MRT4577_26528C.1
tttgtgtcccgcacggtggacgcggggttcaacagccagcacggggtgaccttgaccgtgacgcaggggaagcaggtgcagaagtgggacaggatctgcaaggcggccttcgagtgggctgaccaccccaccgctgtgatccccgacatgcataagcttggcatcaaggataagaacgaagcagcgaggatcgttgcgctcgttaagaatcaaactactatggcgccgaagaaagcttcagcaactggggctgcagctctgcaaccgctggaccccaatcaggagactctctctcttcgggaggcccgaagccagaagaggaaggctgtcagcccgacaccgcaagaggatgagctagaccaagaaatcagagaaatggagatgcttcatcaacaggtgcagaggaagaaggaaaagatggccaggctagctgaactgcaaaggcagatagacgaagcctctgaagaagttcgccatcttactcaggatgagcagaaccgaaggcctcagcacaaagatcttcatcaggaggatttcttcaacgaagatgactggtatgagaatttccaccatggaaattttgcttttgatgatgcttctcctctgtctgctgagctgcaggctacaccttggcctccgtcctacaagccaccccaacttcccatattcgacggccattcagacccgaagcagtttttgatgagctacaaagcaacagtatcttcgtatggtggcaatattgcagtcatggcaaaatcttttgttatggctgtcaggagtattgctcaaacctgcttccaagggtttcggacgaaaccagtcactgctcaagctctattccagtgcacccaggaccacgaagaataccttcaggcgtatgtccggaggttcttgcgtttgagggcacaggcaccaacagtgcccaacgaaattgtcattgaggtcatgatcaagggactctggccaggaccttcagctcagtactttgccaggaagcctcctcaaactttggagaagttgctccagaagatggacgagtatattcgtgccgacaatgattttcgtcaaagaagggaggaggctttcaggttttccgaaatgaccaggggcttcggaggaagattttatccgaggcacgtcaggtcaattcacaactctactcaaaatgatgataaggggagtcagcagcaaaggccacagggctcttcacaggcttcggggcaacagcaaagctccttccggccgccagctccaagaggcagaggcgccaggggcttcggcggaagatttggagatcaaccaaggagaacattttgcttgttctgtggtgaaaacaagggccataccaccaggatgtgccaggttaccatccagaagcaaaaggagatagccgaagctgcagcacaacagggtcagccgaagcagatcatgcacactgcttcgtatcattcgccttatatccctgaatatgtaggcaaccaccctgcagtttctgtagcttcggcgagtcaacctcaagcttcctggcaacagcctccgcctccaccaccgctgcaacaaggccagcagccagaagggggccaatatgctcaacaccaaagggacttcagagaacagtccgaagctcgcacagtcaatagcactgtgccagagtcaaagcacatttattga

SEQ ID NO: 104195 - DNA, 1377 bp, Zea mays
  Clone ID: MRT4577_26529C.1
atggcgccgaagaaagcttcagcaactggggctgcagctctgcaaccgctggaccccaatcaagagactctctcccttcgggaggcccgaagccagaagaggaaggctgtcagcccgacactgcaagaggatgagctagaccaagaaatcagagacatggagatgcttcatcaacaggtgcagaggaagaaggaaaagatggccaggctagctgaactgcaaaggcagatagacgaagcctctgaagaagttcgtcatcttactcaggatgagcagaatcgaagacctcagcacaaagaccttcatcaggaggatttcttcaacgaagatgactggtatgagaatttccaccatggaaattttgcttttgatgatgcttctcctttgtccgctgagctgcaggctacaccttggcctccatcctacaagccgccccaacttcctatatttgacggccattcagacccgaagcagtttttgatgagctacgaagcaacagtatcttcgtatggtggcaataccgcagtcatggcaaaatcttttgttatggctgtcaggagtgttgctcagacctgcttccaagggtttcagatgaagtcggtcactgctcaatctctattccagtgcacccaggatcacgaagagtacctccaggcgtatgtccggaggttcttgcgtttgagagcacaggcaccaacagtgcccaacgaaattgtcattgaggccatgatcaagggacttcggccaggaccttcagctcagtactttgctaggaagcctccccaaactttggagaagttgctccagaagatggacgagtatattcgtgccgacaatgattttcgtcaaagaagggaggaggctttcaggttttccgaaatgactacgggcttcggaggaagattttatccgaggcacgcttcggggcaacagcaaagctctttccggccaccagctccaagaggcagaggcgttaggggcttcggcggaagatttggagatcaaccaaggagaatattctgcttgttctgtggtgaaaacaagggccataccaccaggatgtgccatgttactatccagaagcaaaaggagatagccgaagctgcagcacaacagggtcagccgaagcagatcatgcacactgcttcgtatcattcgccttatatcccagaatatgtaggtaaccaccctgcagtttctgttgcttcggcgagtcaacctcaagcttcctggcaacagcctccgcctccaccaccaatgcaacaaggccagcagccagaagggggccaatatgctcaacaacaaagggacttcagagaacagtccgaagctcgcacagtcaatagcactatgccagagtcgaagcacatttattga

SEQ ID NO: 104196 - DNA, 290 bp, Zea mays
  Clone ID: MRT4577_2652C.1
tgacactatataacatctattacgcgccatccacacactcgtatcccttaaatcctccacacctttccttcctttttttttataggtctcaaactaaatgtgtgacaaaactatatcaggggtccctttaactattactctatcattatatttatcattttttatttacagcaaacccaactaaataaatattttataccaccccccctcccttttttctgacttaaaattccaaacacatacaattaaccttccccccttttttttttaaaaaaaaacttttaaaaatt

SEQ ID NO: 104197 - DNA, 2533 bp, Zea mays
  Clone ID: MRT4577_26530C.1
ctctttcccagttgatgcgcgtcggatttgcttgtccgctatgggacgctggttcaagcccctttctcacccgccacactccatcacttgtcgctactcaccagattgccccgcgcccatgctgctgtggccgcctagctcgtgatcctgttctcctacccacaagttgcgattcgcagatctctggcgcagccatcgaatccatcctttgtccttgactcatacttctgttgcaatttgcgtgctggttcctccggtggtgcatgtgcacgggccatgttcgacgaggtgggtttgagaagttctgttacatggtaatccccgtccttgggcttgtcatggtcgattgggaacagtaggattggttgctgagcatggctggaccggagaagactgttgtttggttcaggagagacctcaggatccaggacaacccggccttggcagcggcggcgaaagggggctctgtcctccctatcttcatatggtgcccctcagactacgggcagtactaccctggaaggtgctcccggtggtggctcaagcagtctcttgtccaccttgggaagtcattagagctgctcgggtgcccactcgtgctgatccgtgcggaggacagcactcttgcagctcttttggagtgcgttcgttccatcagtgccactagagtggtttacaatcgtctctacgaccctatttcacttgtgcttgacaacaaaatcaagaatgagcttccagcccatggaatttctatccaaagtttcaatggtgatttactttacgagccgtgggatgtttatgatgagaatgggcaggcatttacaacctttaacaagtactgggagaaatgtatgagcctacctattgagatatcacaatatcttgcacctacaaggctggtggcagcgccaggtctagcaaatgttcgctgttgttcgattgatgatctaggtcttgaatctagtaaggatgtggaatcaagcaatgctttgctaagcagggcctggtctcctggctggcgcaatgcagagaacatgcttgaggaatttgtgtcttatggtcttctagaatattcagaacatggtatgaaggttgggggaagtactacgtcattattgtcaccgtatctccatttcggggagttgagtgtaaggatgatttatcaacttgttaaaatgcgtcaagtcaagtggcaaaatgaaggaaaatctgaagctgaggagagtgttcgattgttcctacgatcaattggttttcgagaatattcacggtacttatgctttaactacccattcacacatgagagatcatttttaggtaacttgaagcattatccttggctattggatgagggccgtttcaaatcttggagacagggaatgactggatacccattagtagatgctggcatgagggaactctgggctactggttggacacataatcggataagagtgattgtctcaagtttcgctgtaaaatttctacagataccctggatttggggaatgaagtacttttgggatgtgcttctggatgcagacctagaaagtgatattcttggttggcagtacatatctgggagtttgcctgatggacatgagctcagtcgtcttgataatccagaggttcagggtcaaaagtacgatccggacggtgaatatgtaagaacttggattcctgaacttgctagaatgccaacagaatggatccatagtccatgggctgcgccaaactctatattacaagttgctggagttgagctgggctttaactacccaaagcccatagtagaacttcatatggcgcgggaatgtttagatgacgccatctccacaatgtggcaattggacacagctgcaaaacttgctgaactagatggtgaagttgttgacgacaatctgaataatatcaggaattttgatatcccaaaggtggttttgaacaagaaattatcaccaagcacttcatccatggagcacagggtgttgtctactaatggcaaggacgaaaagtcgcagcctactgaagtgaaggccctgtacaaacagattattcgagatgatatgatgaatgactcaaacatggatgacacatgctctactgctaacttgaaagtgacaaggaaaagatctagcagtgatagctacttccagaagacagcagacagagatggcactagtaaggttgaagataatgacagtgaagatagtggtacgagcatctctaggccatccaagaaagctgcttagcattagcgcattgaagatgttgcaaatcttcaatgagaaatatttaccgtcacatgtaatttagctggtgcgtttgtagtgatcatgcaaaagctgttctgtgaattataattagttttacacggcctatccttattccgatagaaggcaatttttgtttggtgaaaaaacatcgctcacggacaggccatagtttgctgtcgctgctgaacagcctaatgcctggtgtaaatgactcatcaacgttacgacactattagcgctggttggttttgctatcc

SEQ ID NO: 104198 - DNA, 1098 bp, Zea mays
  Clone ID: MRT4577_26531C.1
attcgggccgataatgattttcgccaaagaagggaggaggcttttaggttttctgaaatgaccaggggcttcggagggaggttctacccgaggcatgtgagatcaattcataactctacacaaaatgatgacagaggaggccaacagcaaaggccacaatgctcctcacaggcttcgggacaacagcaaagctccttccggccatcagctccaaggggcagaggcgccaggggctttggaggaagatttggcgatcaaccgagaagaatcttttgcttattctgcggtgagaacaagggccatactaccaggatgtgccatgttactatccagaagcaaaaggaaatagctgaagcagcagcacaacaagctcagccgaagcaggtcatgcatacagcttcgtatcattcgccttacatcccagaatatgtaggcaatcactctgcagtttctgttgcttcggcgagtcaaccccaagcttcttggcaacagtctccacgccaccaccaatgcagcgagggccgcaaccaccacggagtcagcacacctacctacgaagacgacgacgacactagtacaggcgtcgcataggcaataggactgtgcgctgctgcaggcagcggctgaccccaaagccgaggagaagagcaacctggcgaagctagtgatcatggtatgcgaggggctgcggttcttcaccgtgtcccgcaaggtagacgaggggttcaagaagccgcaagcggtgaccatatcggcgctggaggggaagcaggtgcagaaatgggacaggatctcgaaagccgtcttcaggtgggccgtcgacccgaccgctgagatccccgacatgaaggatcttggcatcaaagataaaaacgcagctgcgcagatcgttgcgctcgttaaggaccaaaactagtgctgctgctgctactacatatgagaacaacgaggaggtctctgatgatccatccacgtggtacagtagcagtatactcctagtgctagtatataggagtatgttactgtgcaaataaatacacccggcgtacgtggtgttcctcgtaaaaaaaaaaaaaaaaaaaaaaaaaaggggcggcc

SEQ ID NO: 104199 - DNA, 2721 bp, Zea mays
  Clone ID: MRT4577_26532C.1
cggggctgttggctctctttctagttgatgcgcgtgggatttgcttgtccgctatgggacgctggttcaagcccctttctcacccgccacactccatcacttgtcgctactcaccagattgccccgcgcccatgctgctgtggccgcctagctcgtgatcctgttctcctacccacaagttgcgattcgcagatctctggcgcagccatcgaatccatcctttgtccttgagtcatacttctgttgcaatttgcgtgctggttcctccggtggtgcatgtgcacgggccatgttcgacgaggtgggtttgagaagttctgttacatggtaatccccgtccttgggcttgtcatggtcgattgggaacagtaggattggttgctgagcatggctggaccggagaagactgttgtttggttcaggagagacctcaggatcgaggacaacccggccttggcagcggcggcgaaagggggctctgtcctccctatcttcatatggtgcccctcagactacgggcagtactaccctggaaggtgctcccggtggtggctcaagcagtctcttacccaccttgggaagtcattagagctgctcgggtgcccactcgtgctgatccgtgcggaggacagcactcttgcagctcttttggagtgcgttcgttccatcagtgccactagagtggtttacaatcgtctctacgaccctatttcacttgtgcttgacaacaaaatcaagaatgagcttccagcccatggaatttctgtccaaagtttcaatggtgatttactttacgagccgtgggatgtttatgatgagaatgggcaggcatttacaacctttaacaagtactgggagaaatgtatgaacctacctattgagatatcacaatatcttgcacctacaaggctggtggcagcgccaggtctagcaaatgttcgctgttgttcgattgatgatctaggtcttgaatctagtaaggatgtggaatcaagcaatgctttgctaagcagggcctggtctcctggctggcgcaatgcagagaacatgcttgaggaatttgtgtcttatggtcttctagaatattcagaacatggtatgaaggttgggggaagtactacgtcattattgtcaccgtatctccatttcggggagttgagtgtaaggatgatttatcaacttgttaaaatgcgtcaagtcaagtggcaaaatgaaggaaaatctgaagctgaggagagtgttcgattgttcctacgatcaattggttttcgagaatattcacggtacttatgctttaactacccattcacacatgagagatcatttttaggtaacttgaagcattatccttggctattggatgagggccgtttcaaatcttggagacagggaatgactggatacccattagtagatgctggcatgagggaactctgggctactggttggacacataatcggataagagtgattgtctcaagtttcgctgtaaaatttctacagataccctggatttggggaatgaagtacttttgggatgtgcttctggatgcagacctagaaagtgatattcttggttggcagtacatatctgggagtttgcctgatggacatgagctcagtcgtcttgataatccagaggttcagggtcaaaagtacgatccggacggtgaatatgtaagaacttggattcctgaacttgctagaatgccaacagaatggatccatagtccatgggctgcgccaaactctatattacaagttgctggagttgagctgggctttaactacccaaagcccatagtagaacttcatatggcgcgggaatgtttagatgacgccatctccacaatgtggcaattggacacagctgcaaaacttgctgaactagatggtgaagttgttgacgacaatctgaataatatcaggaattttgatatcccaaaggtggttttgaacaagaaattatcaccaagcacttcatccatggagcacagggtgttgtctactaatggcaaggacgaaaagtcgcagcctactgaagtgaaggccctgtacaaacagattattcgagatgatatgatgaatgactcaaacatggatgacacatgctctactgctaacttgaaagtgacaaggaaaagatctagcagtgatagtgcgttcaatgttccctcatgttcatcctcattagtcatggaatcacggattcatcataatgaacctagttctgttctgtattcaggctacttccagaagacagcagacagagatggcactagtaaggttgaagataatgacagtgaagatagtggtacgagcatctctaggccatccaagaaagctgcttagcattagcgcattgaagatgttgcaaatcttcaatgagaaatatttaccgtcacatgtaatttagttggtgcgtttgtagtgatcatgcaaaagctgttctgtgaattataattagttttacacggcctatccttattccgatagaaggcaatttttgtttggtgaaaaaacatcgctcacggacaggccatagtttgctgtcgctgctgaacagcctaatgcctggtgtaaatgactcatcaacgttacgacactattagcgctggttggttttgctatcaatccgtattcatggattgggtaagattgagtagatttaaatatcaaataaaaaaaaaaaaaaaaaaaaaaaaaaaaaaaaaaaaaaaa

SEQ ID NO: 104200 - DNA, 1518 bp, Zea mays
  Clone ID: MRT4577_26533C.1
atggcgccgaagaaagcttcagcaactggggctgcagctctgcaaccgctggaccacaatcaggagacagtctcccttcgggaggcccgaagccagaaaaggaaggctgtcagcccgacaccaccagaggatgagctagatcaagaaatcagagatatggagatgcttcatcaacaagtgcagaggaagaaagaaaagatggccaggctagctgaactgcagaggcagatagacgaagcctctgaagaagttcgtcatcttgctcaggatgagcaacaccgaaggcctcagcatcaagaccttcatcaggagggttttcccaacgaagatgactggtatgacaatttccatcatgggaattttgtttttgatgatgcttctcctctgtccgctgagctgcaggctacaccttggcctccgtcctacaagccgcctcagcttcccgtattcgatggccactcagacccgaagcagtttttgatgagctacgaagcaacagtatcttcgtatggtggcaatgctgcagtcatggccaaatcttttgttatggctgtcaggagtgttgctcaaacctggtattcctcccttcgaccaggaacgatcacttcatggcagaagctgaaggacttgttgttaactagcttccaagggtttcagacgaagccggtcactgctcaggctctgttccagtgcacccaggatcacgaagaataccttcaggcgtatgtccgaaggttcttgcgtttgagggcacaggcaccaacggtgcccaatgaaattgtcattgaggccatgatcaaggggcttcggccaggaccgtcagctcagtactttgccaggaagcctcctcaaactttggagaagctgctccagaagatggacgagtacattcgggccgacaatgattttcgccaaagaagggaggaggctttcaggttttctgaaatgaccaggggcttcggagggaggttctacccgaggcacgttagatcaattcataactctacacaaaatgatgatagaggaagccaacagcaaaggccacaatgctcctcacaggcttcggggcaacagcaaagctccttccgaccaccagctccaagaggcagaggcgccaggggcttcggaggaagatttggagatcaaccgagaagaatcttttgcttattctgtggtgagaacaaaggccatactaccaggatgtgccatgttaccatccagaagcaaaaggaaatagccgaagctgcagcacaacaagctcagccgaagcaggtcatgcacactgcttcgtatcattcgccctacatcccagaatatgtaggcaaccaccctgcagtttctgttgcttcggcgagtcaacctcaagcttcctggcaacagcctccgcctccacctccgttgcaacaaggccagcagccagaagggagccaatatgctccacaccaaagggacttcagagaacagtccgaagctcgcacagtcaacagcactgtgccagagtcaaagcacatctattga

SEQ ID NO: 104201 - DNA, 468 bp, Zea mays
  Clone ID: MRT4577_26534C.1
gtgggtgtttttttttttttttttttttttttttttttttttttttttttttttttttttttttttttttttttttttttttttttttttttttttacccccaccagaaggaaagagggggggccccccccccgataattaacccccgggggcgtgggccattcttcaaacccccacaaacagctttttatcccgggaaaatcaaaaacgggatgcaacaacccatgacttggcattgctcggggggggggcgcccccccttacaggctaggcgtcccctcgggggcccccgaaataaccgggaacaagtttttccccaagggggccctaaggggcttggcgaggttctccacggggccctcccccgggacctaggcccggatgaaaaaggcgaacatggaaaacatggcccgccggcccttcttgatctccttcaccctgaggatggcggcccggtcggggtccctg

SEQ ID NO: 104202 - DNA, 464 bp, Zea mays
  unsure (1)..(464): unsure at all n locations
  Clone ID: MRT4577_26535C.1
acactataaaaaactatnacatcgcgtgcacgcgcacagaagcaaggaccctgaaacaacggccatcctaaaaatttttttagttatgtaattttttggtttgaatcgagcacaagaaatgttaagaagcagcagagtatcctcctacaagcatgcaagcagacagcaaagcctagggcgtctactcctacggaacttacacttttagggcatccaaagcagcagagtttcctactacaagcatgcaggggggtggggatctccgattccttggcctagtcttgctgttcgtcgatggagagcatgtgtcttcctgttgattctagaggccaagccctccaattttcttcaacagggagcgtttcgttttctccattctcgcgggagcagggctgataacgggccgtaactcagggaaaacaagattcgagagaatggggtaaatgacagcgggagatctttat

SEQ ID NO: 104203 - DNA, 2838 bp, Zea mays
  Clone ID: MRT4577_26536C.1
aacgcatgcttgtcgttagtgaaccactgttgattggtggggactattattcacgtgttgaaggctgggggatcatctcaaacctttgcaaagcagcttggcttgctactatgatggctgctatgcgaccctccatcgataacattcatgatcttgtgagacacaacactgctagggcgttcagtgtggtgttttttgctttgggtatccctgcccttttaccattcttgaaggctgtctgtcagagtaagaagtcttggcaggctaggcacactggtatcaaaatcgtccaacagattgctattctcatgggctgtgctgttttgccacacctcaagtcactagttgagatcattgagcatgggctgagcgatgaaaaccagaaagttcgtacaattactgccctttctcttgctgcacttgctgaggctgctgcaccatatggtatagaaagttttgatactgtattgaaacctctgtggaagggtatcagatctcaccgtgggaaggtccttgctgccttcctaaaggccattggtttcatcatccctcttatggatgctctgtatgctagctactacacaaaggaggtgatgcaggtcctcattagggagttccagtctccagatgaagaaatgaagaaaattgttctcaaggtggtgaaacagtgtgtcagtacagagggtgtggaggctgattatatccggaatgacatccttccagatttcttcaagcacttctgggtgaggagaatggctctagatcgcaggaactataagcagcttgtggaaactacagttgagatggcaaacaaggttggagttgctgatattgttgggagggttgttgaggatctgaaagatgaaagtgagccctacagaagaatggtgatggaaacaatcgagaaggtggtagccaacttgggtgcatcagatattgatgctcgtctggaggagctgcttattgatggtatcttgtatgctttccaagagcagactagtgatgacgcaaatgttatgctaaatggttttggagctgtggttaatgcacttggacagagagttaagccctaccttcctcagatttgtggtactatcaagtggcgattgaacaacaagagtgcaaaagttaggcagcaagctgctgatctgatctccaggatagccatagtaatgaagcagtgccaggaggagcagcttatgggtcacttgggtgttgtgctgtatgagtacttaggagaggagtatcctgaggtgcttggttcaattcttggagccttgaaggctatcgtcaatgtcattggtatgactaaaatgactccaccaatcaaggatcttcttcctcgtctgacccccattcttaagaacaggcatgagaaggtccaagagaactgcattgatcttgttggtaggattgctgatcgtggagcagaatttgtgccagcaagggaatggatgaggatttgttttgagctgctcgaaatgttgaaggctcataagaagggtattaggagagcaactgtgaatacatttggttatattgcaaaggctatagggccacaggatgtgctggccaccctgttgaataacttgaaggtgcaggagcggcagaaccgtgtctgcacaactgtagcaattgctatagttgctgaaacttgctcacctttcacagttttacctgcccttatgaatgagtaccgggtcccagagctcaatgtccaaaatggtgttctgaagtcactctctttcctctttgagtatattggtgagatgggcaaagattacatatatgccgtcacccccttacttgaagatgctttaatggatagagatctggttcaccggcagactgctgcatctgctgttaagcacatggctctaggtgttgctggcttgggttgtgaggatgctcttgttcatctgcttaactatgtttggcccaacatatttgagacatctccccacgttataaatgctgtcatggaggcaattgaggggatgagggtcgcactaggtgcggctgtgattttaaattattgcctgcaaggtctcttccatccagcaaggaaagtacgagaagtgtattggaagatatacaactctttgtacatcggcgcgcaggatgcacttgttgcttcttatcctgccctggaagacgatggggataacatctttagtcgtccagagttggcaatgtttgtctgattaacggtacctcatgttgcagctgctgaagcgttacactggatttaggaccaatcctaaggctgcagcatgccaattaatccatcaagatcctatattgtgaaggacaaatgacaatcctagcgcgctgtcatctttttatgaatattaggcgttgggcatttaccgtgttttaaaactttgtattacacatggatgttgtattatgtggtgtggacaatggaacgttgcaagctgacctgaacctgattccttactgtattactgagatgttgatatgcatgtcatgttagtgtacgttgtgttctaaaaaaaaaaaaaaaaaaaaatagtccgtgttgaagctgctgaagagttccactggattgaggaccgatttcgaggctgcaaagttttcaggaattaatccatcatgatcctatgttttgaaggagaaatgacgatcctagcgtgttgtcttaatattagacgttggcaccttctgtgttcttgaactttttgtaatagccgtggatgttgttattatatataggtgtggacagtggaacattgcaaacccctctgtgaccttgattcctcgctgtattcctgagatggctgttattagcgtgccttgatcttaaatagcttgtgt

SEQ ID NO: 104204 - DNA, 1704 bp, Zea mays
  Clone ID: MRT4577_26537C.1
gaggccggccgggaaatgcctactgccagcaacccatccatactttcagctgttgatacaaaaagagaagagagaatggcggagccaaacccagagttgagtgatcttattactcaaacaaagaagaaaaatatagtgccaaagttcaccgaaatcttccccgtggaggacacggcctacccttacagcgccttcatcacctccgtccggaaagacgtgatcaaatactgcaccaaccatacaggcatcgtccagcccgtgctgccgctggagaagaatgtccccgagctctggttctacaccgagctcaaaacgaagaccaggtccatcacgctcgccatacgtatggacaacctctacctggtcggcttcaggacccccggcggggtgtggtgggagttcggcaagatggcgccgaagaaagcttcagcaactggggctgcagctctgcaaccactggaccccaatcaggagactctctcccttcgggaggcccgaagccagaagaggaaggttgtcagcccgacaccgccagaggataagctagaccaagaaattagagacatggagatgcttcatcaacaggtgcagaggaagaaggaaaagatggccaggctagctgaactgcaaaggcagatagacgaagcctctgaagaagttcgtcatcttactcaggatgagcagaaccgaaggcctcagcataaagaccttcatcaggaggatttcttcaacgaagatgactggagtgttgctcaaacctggtattcctctcttcgaccaggaacgatcacttcatggcaaaagctgaaggacatgttgttaaccagctttcaagggtttcagacgaagccggtcactgctcaagctctattccagtgcacccaggatcacgaagaataccttcaggcgtatgtccggaggttcttgcgtttgagggcgcaggcaccaacagtgcccaacgaaattgtcattgagggcatgatcaagggacttcggccaggaccttcagctcagtactttgccaggaagcctcctcaaactttggagaagctgctccagaagatggacgagtatattcatgccgacaatgattttcgtcaaagaagggaggaggctttcaggttttccgaaatgactaggggcttcggaggaagattttatccgaggcatgttaggtcaattcacaactctaatcaaaatgatgataaggggagtcagcagcaaaggccacagtgctcctcacaggcttcggggcaacaacaaagctccttccggccgccagctccaagaggcagaggcgccaggggcttcggcggaagatttggagatcaaccaaggagaatattttgcttgttctgtggtgaaaacaagggccataccaccaggatgtgccatgttaccatccagaagcaaaaggagatagccgaagctgcagcacaacagggtcagctgaagcaggtcatgcacactgcttcgtatcattcgccttatatcccagaatatgtaggcaatcaccctgcagtttctgttgcttcggcgagtcaacctcaagcttcctggcaacagcctccgcctccaccaccgatgcaacaaggccagcagccagaagggggccaatatgctcaacaacaaagggacttcagagaacagtccgaagctcgcacagtcaatagcactgtgcctgagtcgaagcacatttattga

SEQ ID NO: 104205 - DNA, 633 bp, Zea mays
  unsure (1)..(633): unsure at all n locations
  Clone ID: MRT4577_26538C.1
natcggcnnncgccctcttttcttcttcttcttctttcttcttgcacgaaatgaactagacgatgatagtggcacataaatttcatataagttgaaacagacaggatataagtctaacaaggatacattcaatcattcccaggagtgctaaaaacaatatgtacattgacagctcctgcaaggttaatgatggtggcgagttctcatgaagaaatatttcatggattgtcttaaccaaaacataaaaaaaacttacatgtgggcaccttctcccaaaataacacgctctgggtgtccaggacattactggacctgataatctacgtaccttcttcatggtactttttagggaagccacatccaacaccggggctgctttgatgtctccaaaccagcttgctttgtttttcgttcccatatgttgcaaatgtaagtttttgtctcgctctcttgtcaagaggagtccatgttggctcgatggatggcattatgctcttttcatgatttatgctaggttgtgccttgaaatcctttcttaccctatggctctgtgctttagttcctcccctgcctttcccatacttacgaacctcatttgaagggctctggtccctcaaaagcgtgtttatatct

SEQ ID NO: 104206 - DNA, 881 bp, Zea mays
  Clone ID: MRT4577_26539C.1
ggcttgggttgtgaggatgctcttgttcatctgcttaactatgtttggcccaacatatttgagacatctccccacgttataaatgctgtcatggaggcaattgaggggatgagggtcgcactaggtgcggctgtgattttaaattattgcctgcaaggtctcttccatccagcaaggaaagtacgagaagtgtattggaagatatacaactctttgtacatcggcgcgcaggatgcacttgttgcttcttatcctgccctggaagacgatggggataacatctttagtcgtccagagttggcaatgtttgtctgattaacgctggatgtgcatgtccatgtgtcttcatccatattcttatgaagcttgaactgggtggtactctgagttagagctttgtattttacttggtgacacctcttgtgatgcatgtaattgaagttgcatctatttttttgtatttgcaggattgttccttctgaagggggtgcaatgtttaggaattttttttcctggtttactataatgcaactcaaaatctctatcatagtctggtcttactaacgatttgggaactgttttgttttcagggtacctcatgttgcagctgctgaagcgttacactggatttaggaccaatcctaaggctgcagcatgccaattaatccatcaagatcctatattgtgaaggacaaatgacaatcctagcgcgctgtcatctttttatgaatattaggcgttgggcatttaccgtgttttaaaactttgtattacacatggatgttgtattatgtggtgtggacaatggaacgttgcaagctgacctgaacctgattccttactgtattactgagatgttgatatgcatgtcatgttagtgt

SEQ ID NO: 104207 - DNA, 240 bp, Zea mays
  Clone ID: MRT4577_2653C.1
ggaaggacataatgaagatttataactgaacagcaagtcatgaaaccacacaatgtccaaaccacactcaggtagttcatactgtgaatctgggaaacacgagcttttgtttaacgacccaccctggtgggaaacacacttctaacaccacgctaattcaaacgacggtggagactgcactcagggtgaccgctgccatattagaaaataagcatgctgtcaaggctgctactgacagcc

SEQ ID NO: 104208 - DNA, 409 bp, Zea mays
  Clone ID: MRT4577_26540C.1
acgcgtccgaccaagcgtccgcgaccacacgccaagggaagaagcagcagcgccatggccgcgccgctcacggccgtccgggcccgcctcctcctcctcccagtgacctgcacggcagccggtaccaccggccggccggcccctccgtccaagagcagcaggccgcgtctactaccaccaggcaccacccggtgccggtgctccaggcctcccatggaggcggtggcgccggtgtccgcggcggcggtggcggcgctgctgctgctgccggcggacgcggcgctggcggtgggcggcgagttggggatcctcgagggccgcagcttcgcgctgctgcacccgctcatcatgggcgggctcttcgcgtacacgctctgggcggggtacctcggctggcagtggcgccggg

SEQ ID NO: 104209 - DNA, 840 bp, Zea mays
  unsure (1)..(840): unsure at all n locations
  Clone ID: MRT4577_26541C.1
cctcgaggccggccgggctttcctagggtttcgtcgcttccagccgccgccgcgtccgcctcgccaagcgcagcagccgccgcagcacatcgctctctcgatctcagccatggcggaggtggagcagcaacaggacacgccgaagctcttcaaccgctggaccttcgatgatgtccaggtgaacgacatctcgctgaacgactacctcgctgtgaacgcgacgaagcacgcgatgtacctgccgcacaccgcgggacgttactccaagaagcggttccgcaaggcgcagtgcccgatcgtcgagcgcctcacaaactcgctcatgatgcacgggcgcaacaacggcaagaaggtcatggctgtccgcatcatcaagcataccctggagatcatcatcaacagtggaccccgtgaggatgccacccgtattggttccgctggtgttgtgaggaggcaggccgtggatatctcacccctgaggagggtgaaccaggccatctacctcctcaccactggtgccagggagagtgctttccggaacatcaaaaccattgccgagtgccttgcagatgagctgatcaacgctgccaagggctcatccaacagttacgccatcaagaagaaggacgaggttgagcgtgttgccaaggccaaccgttgaactgagcttgtatcctggtgcactctgcgctggaaacttttatgtcgctggcagtcgtatcggttcttgttttacaatgtttagagttttttgaaactatatgcggntttggttttcagtgcacattanaatactgagtaatgtagttgattgggacagaaatgtttggtgcctggttc

SEQ ID NO: 104210 - DNA, 299 bp, Zea mays
  Clone ID: MRT4577_26542C.1
cggacgcgtgggcggacgcgtgggtgctaccgcaaaacaacaacatggatcttattggctgccacgatatacaaaaaaaaaaaaaaaaaaaaaaaaaaaaaaaaaaaagaaaaaaaaaaaaaaaaaaaaaaaaaaaaagaaacgcatataaaaaataataaaaaataatgtagaggggcatataagtacaaaacattacgaaagtttaaaaaaaaatgaatagcgaaaaaataatggcaacacaaatcaatatagaagagcatcatataaaacctttcaaaatggcaaaacatagaaaa

SEQ ID NO: 104211 - DNA, 945 bp, Zea mays
  Clone ID: MRT4577_26543C.1
cgcacaccgcggggcgttactccaagaagcggttccgcaaggcgcagtgcccgatcgtcgagcgcctcacaaactccctcatgatgcacgggcgcaacaacggcaagaaggtcatggctgtccgcatcatcaagcataccctggagatcattcacctgctcaccgatgccaaccccatccaggtcgtcgtcgacgcgatcatcaacaggtacagtctcactacctcctgtcctcactctcgatctcggctaataaccgttaaacctactcgttactatatgttgattccattcagtatgctggatccccccccccccccgaaccgtgtgtgtattcctgtgtaattgagcttattcctataaaattcatctataatttctgtcttccaaagggtatttttctttgatagacctatatattagttccatgctggttgctgctactcttttatatctgatagcatggtcctgtataaatgcctagttgctgaaattcaaattgaatgctatgacaaagtttcccatcatctcagagtatgctgttgtgcttcctggtatatctttaagctgtgtcatgctagtttaaccatatggcgatgcactgcactgtttcaagttccatataaaatgtggatatgtagtctggtgtattatctcagagtgcttttgtgcccatctgttttcatggctcatgttagttcccttcaattgtcattctttatgccaagaatgctctttgtagccatttacatatttgagctgccaaattatcatgcaccatgcaccacaaaagtcatgtgcttttgatatgggaaactatagctcaatatatagcttacatgttgggtcgtgagatgtgaaactgttgtgatgtgctgctattgtcttgcagtggaccccgtgaggatgccacccgtattggttccgcttgggtttggaggaggca

SEQ ID NO: 104212 - DNA, 2867 bp, Zea mays
  Clone ID: MRT4577_26544C.1
gggctcttctcttctctgcctgtccgccgcaccagctccagcctgcagccagccggcggagaaaagcaggggattcgactggagtcaccctcggagcttgcatctggcagtccagagcacagcaaaagcaaagcacccgattcgattcctaggcaccaggcttttccatccatgtcttccttgctcgacctttcctcgtggcctttccatcttcccctggctcctctcgacctttccggtggttggaggaccagaagctgagctagccgcccaccttccggacgctgatgtgattgacccagtcggctggttaggaatttagcatcgcgatacctccagcggtccagcccagcttccagcacggcagtcggttgagtcaccgtccgccactccgttagcagctgccggtcgatcttgccgcgcaagcagcagaaaggccggcccagcggcgctttcttcagccatggcgtgcgcggcggcgcacatgttcgtgtacaacgccactctctgcgcctgcgaccccgggtactacctcttcaccaattccacgcggcggcggcaacgcaagcagcgccagtaccagctgcgtgtcattgccccgcagcggcgacgggttcggcgactggcaggtcggatccgtaggcgcgtcccggaaccagagcttctacttcctgaccccggtcctctctctcgacgtcgtccgccgcctcacccagtcccaggccgtcatcctctgggtcgcgctcctcacgctgctctcctggctcgccttctgcgccgccgccaggttcgccggccaggaccccgagcgccacaagaagctcttcggcgcccggttctgggtcagccgcctcgactgcatcttcgacaacaaccactatgcgaatgatcagcaagtactgaggaaaagaaaaacagagctgggcggcacgttctcagtggctaccttgatactattccttggattagtcatagttctgctgtatcaagccatcaacaggcgtaacgcccaagtacatcgagtgaaaccctagggtttcgtcgcttccagccgccgccgcgtccgcctcgccaagcgcagcagccgccgcagcacatctctctctcgatctcagccatggcggaggtggagcagcaacaggacacgccgaagctgttcaaccgctggaccttcgatgatgtccaggtgaacgacatctcgctgaacgactacctcgctgtgaacgcgacgaagcacgcgatgtacctgccgcacaccgcggggcgttactccaagaagcggttccgcaaggcgcagtgcccgatcgtcgagcgcctcacaaactccctcatgatgcacgggcgcaacaacggcaagaaggtcatggctgtccgcatcatcaagcataccctgatcattcacctgctcaatgccaaccccatccaggtcgtcgtcgcgatcatcagtggcaggaaattctttcgatcaccggtcgagtcccggggtcgggcgcgtgggcgtacgcgtgcgctggcggcaggccgacggctacggagacggaagtggcgaccggttccggcgaggcgcaggcgacagataggggacagggcgaccatttctagcgaggcaggagcggggaagatccggaagctgcgatgtcgaagcggctgctgtcgcggctgctcggcatgttccaatcgcggacgcaggtgggcgtcgacaaggccggcaaccgctacttcacccgcgttgaggaggtcgacggcacaatgaaggagaggcgctgggtggagttcaagggcgcagaccaggactcgaccaccgttccagtcgagtggatttgctggctgaatggccaaaggaagaaagctccaacaccagaggaattggctgagctggaggcaagacgtgaacgtgtcaagcaaaacattcagcttctcaaaaagaaagaagaagaggaaagaaaaactggtatccaaccagtcaagaaaattgggaaagctgaatctccaaatctccaaagtttcgtgaagcagcagttctcgggtactcctccagatcagcagaaaggacctgaggataggcctaaggacacaactcatacagaagatgctacgacagacaatgagaggtatactgaaccaacgggaactggtgccactttcaagccagggacttggcagccaccaacatgaatgccaacatgaactttagaagatgaaggacggtgtaccggagcattttcctttcacctatctgtgtaacattttaacatttgctctgaaagaatcactagcctatgttccttctttcagatggttacccatctgatggagttatagccttaagttccttcttttagatgcttacccatctgatggagttataggtgatcgggggctcccacggtatgctgttttttttgtggctaaattgtcctctgtaatctttactgtgatagcaactgtaataaactggaccagtgttttgcatcagaactctcttagagacactgttcaatgaccttgagtttcacataaccactgtctcaagcatgtcttgcgcccaacatgaactttagaagatgaaggacggtgtaccggagcattttcctttcacctatctgtgtaacattttaacatttgctctgaaagaatcactagcctatgttccttctttcagatggttacccatctgatggagttatagccttaagttccttcttttagatgcttacccatctgatggagttataggtgatcgggggctcccacggtatgctgttttttttgtggctaaattgtcctctgtaatctttactgtgatagcaactgtaataaactggaccagtgttttgcatcagggctctcttagagacactttctac

SEQ ID NO: 104213 - DNA, 1845 bp, Zea mays
  Clone ID: MRT4577_26545C.1
gtctccgtaccttccgttccctttctcccattcgcacgccgccccgtgccgtcctcctcccagatctcgtggtctcgtggccgtcgccattcccccccgctccgctacacgccgagcgcaccgattgcaaatcagtcgtctccgctgctcctcgccctcgccccgcccgcggcgtggtgaggagaggagatcccccctgaggttgtacgagacggtgcttcaggaccgccctctggcgcggaggacgcataagctcggcggcggcggcggcgacatgaagggctcgaccatcccttcggtcgcgatcatgccctcgccgctcttcctctggcggtttaaggttgtgttgtttcttctatggggcttatgttgttgcaagataggttgggactcagttatgagaatgagtgttgatctcagagacctatttctttatgaggctttcttgtactataatcctcttcttcttgtggccttgatgatttggttgtggggagtaaatctatgggtctttgcacaatcatctgtgaattatgcaaaagtgtttgatcttgcacaaacacatttatctcaccgtgagatatggaggtgtgctacttggttgacgttaattgtccccactagcatgacagcctacctatatctgtactcacatggagaagtgtcccttgcagcatctcaaccagttctcttgtatgctattcttctgatgatcctcctttctccttttgatatgttttacttatcatcacgcttttactttctgagaacagtctggcgtataatactgcctttacaagcaattacatttcctgacttctttttggctgatatttttacatccatgtcaaaggtgttctcagatctggagcgttcagtttgtcgtatggtgaatcgccaggttgcaacaatcgcttggtttgaagcagattctatttgtggcagtcattccgtagctattcctcttgttctcgtgtttccctacttgtggcgtttcttccaatgtctccgtcagtacaaggatacaaaggagaagacatgtcttttcaatgctctcaagtactcgacagcaattcctgtgattttcctttccgctctcaagtatcatgtatatcctgatcaatgggttggcttctaccgccccctctggcttatctctagtgttgtaaattcactgtattccttctactgggatataaagcgagattgggatttgagcatcctaaccaggattttcatgttcaaaaatccaagcatatggactaatcttctttacgggcagaactgggtattctactgggtactgggcagcaacttggttctgcgatgcacatggacatacaagctctcggcgcatctccggcacaactacctgacagtgttcaccatagcagctctggaaatcctgagacggtggcagtgggtgttcttccgggtcgagaacgagtggaacaagatgacggccaaacaaaacttggagatgtcatctgacatgccttccgaaggggacaggctactggattcgagtaaccacacagtgtgagctgaacagcagcctcacatttctcgatacagattcattgccattcttttagcgtgaccattgtggccaatcttacgtcgacggttcagattttgtctgtagagctcaaaaggtcaaagggatacacaataggtttctatataaaaaagttgaaatttgttggcggcttcggatgttatacctcttgaggatgtatactgttatagccctcttgaacgattgaatctaacaggaggtattcgttgagacatgaaagaataaaagtaatgctgaaattttaggcgaaaaaaaaaaaaaaaaaa

SEQ ID NO: 104214 - DNA, 277 bp, Zea mays
  Clone ID: MRT4577_26546C.1
acactcttactctgactcatggaccccctgccctccaaagagctcgcaagccccatatagggctgcgcgtctaatagcgggcaagcaccaccaaccttgcaaaagaatcatctatgcaatacacacaccgagaaataaactaatattatgcacattctctaacaccaattttttataccactaacacctgcaaatttaatcatcagtattctcatatcttgacattactttgatgtataattgtttcgaactcaaagtcaaatgctaagagccaacc

SEQ ID NO: 104215 - DNA, 1125 bp, Zea mays
  Clone ID: MRT4577_26547C.1
cctcgaggccggccgggccggggtcttccctagggtttcgtcgcttccagccgccgccgcgtccgcctcgccaagcgcagcagccgccgcagcacatctctctctcgatctcagccatggcggaggtggagcagcaacaggacacgccgaagctgttcaaccgctggaccttcgatgatgtccaggtgaacgacatctcgctgaacgactacctcgctgtgaacgcgacgaagcacgcgatgtacctgccgcacaccgcggggcgttactccaagaagcggttccgcaaggcgcagtgcccgatcgtcgagcgcctcacaaactccctcatgatgcacgggcgcaacaacggcaagaaggtcatggctgtccgcatcatcaagcataccctggagatcattcacctgctcaccgatgccaaccccatccaggtcgtcgtcgacgcgatcatcaacagtggaccccgtgaggatgccacccgtattggttccgctggtgttgtgaggaggcaggccgtggatatctcacccctgaggagggtgaaccaggccatctacctcctcaccactggtgccagggagagtgctttccggaacatcaaaaccattgccgagtgccttgcagatgagctgatcaacgctgccaagggctcatccaacagttacgccatcaagaagaaggacgagattgagcgtgttgccaaggccaaccgttgaacggagcttgtatcctggtgcactctgcgctggaaacttttatgttgctggcagtcgtatcggttcctgttttaccaatgtttagagttttttgagacctatatgcggttttggttttcagtgcacaattaaaattactgagtaatgtagttgattgggaacagaaagtgcctggtttaccgaactccatttctcttgtcatttttctttattctgtagtctgtattatgtatgcgtatgagtattgagatgattctgcatttgaattgtctgctttgttgctgtcgccgtttgtgtaccaatggtaacagggtaattttagtggttagtatttcttttgaaaaagtgttgcagaagggtacatgtaaaaccccgaaatatcattttgggtaatttaggaaaaagttat

SEQ ID NO: 104216 - DNA, 2454 bp, Zea mays
  unsure (1)..(2454): unsure at all n locations
  Clone ID: MRT4577_26548C.1
attgggtacctcgaggccggccggnaacccaggcaacgcacagcaatcagcagaaaaacatctccttggccttccatccatatgatccatccccaggctccagctaactccaaactaccctctggttcgactcgcgttcgcatcgcaagcagcagcgtaccatcgaggcaatggcggtgatggccgaagtagtgtcgaccaccggcgcggcgctccggagcccggccacgcagcagccggcggcggcgggcgcggcgaagggcaccgacgctgagaagctccagttcatcgaggacatgacctccaacgtggacgccgtgcaggagcgcgtgctgggggagatcctcgcccgcaacgcggacaccgagtacctctccagcaggtgcggcctcgccggcgctacggaccgcgccaccttccgcgccaaggtgccgatggcgacgtacgaggacctgcagccgtacatccggcgcatcgccgacggcgaccgctcgcccatcctgtcggggcacccggtctccgagttcctcaccagctccggcacgtccggcggcgagcggaagctcatgcccaccatcgaggacgagctcaaccgccgccagctgctgtacagcctccagatgcccgtcatgaacctgtacgtgcctgggatggacaaggggaaagctctccatttcctgttcgtcaagtcggagacgaagacgccgggcggcctcgcggcgaggcccgtcctgacgagctactacaagagcaaccacttcaggaaccgcccgttcgacgcgtacaacaactacaccagccccacggcggccatcctctgcgccgacgcgttccagagcatgtacgcgcagatgctgtgcgcccgcccgcgccgaggtgctccgcgtcggcgcggtgttcgcgtcgggcctcctccgcgccatccgcttcctgcagctcaactggcaggagctcgcgcacgacctccggacgggcaccctgagcgccaaggtcacggagccgtccatccgggaggccgtggccgaggtgctgaggcccgacgccgacctcgcggactttgtggaggccgagtgcggcaaggagagctgggagggcatcatcacccgggtgtggcccaacaccaagtacctggacgtgatcgtgacgggcgccatggcgcagtacatcccgacgctcaagtactacagcggcgggctcccgatggcgtgcaccatgtacgcgtcctcggagtgctacttcgggctgaacctccggcccatgtgcgacccgtcggaggtgtcctacaccctgatgcccaacatgtgctacttcgagttcctgccgatgggcggcgccgtcgacgcgagccagctggtggacctcggccgcgtggagcgcgggcgcgagtacgagctggtgatcaccacgtacgcggggctgaaccggtaccgcgtcggcgacgtgctccaggtgaccggcttccacaactcggcgccgcagttccggttcgtgcgccgcaagaacgtgctgctgtccatcgagtcggacaagacggacgaggccgagctgcagcgcgccgtggagcgcgcgtccgcgctgctccgcccgcacggcgccgccgtggtggagtacaccagccaggcctacaccaagagcatcccgggccactacgtcgtctactgggagctcctgcaggccaaggggggcgccgcggtggacggggagacgctggaagggtgctgcctcgagatggaggaggcgctgaacgcggtgtacaggcagagccgcgtggccgacggctccatcggcccgctggagatccgggtggtccggccgggcaccttcgaggagctcatggactacgccatctcccgcggcgcgtcgatcaaccagtacaaggtgccccggtgcgtgacgttcccgcccatcatcgagctcctggactcccgcgtcgtgtccagccacttgagccccgcgctgccgcactggaccgccggccagcgctccggctccggctccggctccgactagacacagcggcagggcggcgaggcgtgtccgtgtccaggcgcgcttaattagactgtggaatcatctgctgcgtgtcgcagacgtagaagaatgcccgtgaaaacttaaatactatttgttaattttggagttttgagtacgtgctgccagttagaagcgtgagggtaacttaactcgatgcgatgagagttgggctgcttctgcttgaaccgatcagctgaagcaacagtggacgcatatgtatttccggtccggtagtagtggcactgctgtccgtatcacttagcagtacggagaacgaacgcagctaattttaacgtccatccaaatctgtgcgggctgtgcgcctgcacaagacaagctagatcttgctgcaatattccgattactacaaccggctaggagcctgtgaagaaagattcgtaatacatgattcagtgaagc

SEQ ID NO: 104217 - DNA, 682 bp, Zea mays
  Clone ID: MRT4577_26549C.1
atcgcacatatattgagaccaactagcaacatagaaagcgcaatccagtaccaacaacggcagaacaaagattacgcctacttatgctcttcgtaatctctgcgagcgctgtgacggcgaccatactgccagcaatgcccacaagctgctatcgctctcctatttcccccgtacctctcaccaacggtgcattaaggtatgcgaaaacccaatgataaaaccctacaggatccaacagggaatcaaagagggcatgtatacctgcatcacaccttgatcctccaacaatgatcaaacactatgacagcagtaaccttgggggcattaatgggaccaaaaaataagggaccaacaacgacaacaacttgggctagcaaacccagctgactactctcagcaacagtagcttcttacattcaaccaactaactgcattgaactctgccaacttatttgcaacaacaacagctaccaatcagccagatacctgatgactacccacagaaatagcttccatctaaccaactggcagaatagaactctcctgcatattatacagcagcaacaactactaccattcatccagctagctggcgagagccctgataccttcttgacacaaccacaagtgctgccgccttaccagcacactgagactaacggtggcactctcatacaactgc

SEQ ID NO: 104218 - DNA, 735 bp, Zea mays
  Clone ID: MRT4577_26550C.1
ggaccctcgaggccggccgggaaggaccggtacaaaccctggcctcgtctcctccggatcgattcctggccaaagcgacggcgagacgttggcgacgcatgaggacggtgcgaggtcactgcgtggcggcgcgaggtgacggcgggccggcgccgcgcagccccgacggcaagcctccccggcaccttctcaccgattacaagggggaagaggcgaactcaagagccccaaaggcgagtttcccgaattttgacagcagcagtgaggatagtgatgacaagagggaaaacattggcaacggagaagaatactgatgaaggttgggacagtgactgaatgacagggctcaaggaagagaaatgttgatacgtgatgcatcaacgaaggccagcaccaatggttgtcaatgcaggttctttcatcggtggtcttgctcacgtacttgtccaaacgaaatctcgaggaggtagaagagtactcgtggtttccatgagaacaactgtctgaaagttgttgaagcggatgagttctcataaaatgtccttagattgtttagcccaaaaatgcacgaggtgatgtgtttattttcactgaacctagtagtagccaggagcggtctgtgcaagtctgtatattcagcaacttcttcttgtatatgtttatgatgaacctaggtgtgatatatgatttgtctatgtgtgatctgtgatttcaaaaaaaaaaaaaaaagcggcc

SEQ ID NO: 104219 - DNA, 1875 bp, Zea mays
  Clone ID: MRT4577_26551C.1
cattgggtacctcgaggccggccgggcctttcctagggtttcgtcgcttccagccgccgccgcgtccgcctcgccaagcgcagcagccgccgcagcacatcgctctctcgatctcagccatggcggaggtggagcagcaacaggacacgccgaagctcttcaaccgctggaccttcgatgatgtccaggtacgcgaacgagtcttcgcatctctgcatgcttcgattctttagccttgccgctactagcagtggatggaaccgacgatgaaatctgcaggtgaacgacatctcgctgaacgactacctcgctgtgaacgcgacgaagcacgcgatgtacctgccgcacaccgcggggcgttactccaagaagcggttccgcaaggcgcagtgcccgatcgtcgagcgcctcacaaactccctcatgatgcacgggcgcaacaacggcaagaaggtcatggctgtccgcatcatcaagcataccctggagatcattcacctgctcaccgatgccaaccccatccaggtcgtcgtcgacgcgatcatcaacaggtacagtcttaatctcggctaataaccgttaaacctactcgttactatatgttgattccattcagtatgctggagttcccccctgaaccgtgtgtgtatttctgtgcaattgaactttttcctatgaaactcatctataacttctgtgttccaaagggtatttttctttgattgccttatatattagttccatgctggttgctgctactcttttatatctgatagcatggtcctgtataaatgcctagttgctgaaattcaaattgaatgctatgacagtttcccatcatatcagagtgtgctgttgtgcaacctggtatgtctttaagctgtgtcatgctagtttaaccactagtttaaccatatggcgatgcactgcactgtttcaagttccatttaaaatgtggatatgtagtctggtgtattatctcagagtgcttttgtgcccatctgttttcatgactcatgttagttcccttcaattgtcattctttatgtcaagaatgctctatgtagccatttacatatttgagctgccaaattatcatgcaccatgcaccacaaaagtgatgtgcttttgatatgccaaattatagctcaatatatagcttacatgttgggtcgtgagatgtgaaactgttgtgatgtgctgctattgtcttgcagtggcccccgtgaggatgccacccgtattggttccgctggtgttgtgaggaggcaggctgtggatatctcacccctgaggagggtgaaccaggccatctacctcctcaccactggtgctagggagagtgctttccggaacatcaaaaccattgccgagtgccttgcagatgagctgatcaacgctgccaagggctcatccaacaggtacatatgttgcctgtttgcttcttgtctatctgtgattccacacgatgtgaaattgttctcattcgtggcaattcttgttaccagttacgccatcaagaagaaggacgagattgagcgtgttgccaaggccaaccgttgaacggagcttgtatcctggtgcactctgcgctggaaacttttatgttgctggcagtcgtatcggttcctgttttaccaatgtttagagttttttgagacctatatgcggttttggttttcagtgcacaattaaaattactgagtaatgtagttgattgggaacagaaagtgcctggtttaccgaactccatttctcttgtcatttttctttattctgtagtctgtattatgtatgcgtatgagtattgagatgattctgcatttgaattgtctgctttgttgctgtcaaaaaaaaaaaaaaaaaaggccccta

SEQ ID NO: 104220 - DNA, 2927 bp, Zea mays
  unsure (1)..(2927): unsure at all n locations
  Clone ID: MRT4577_26552C.1
ggtaccctccgggtcggccggggacccaggcaagaggcaacacagcaagcagcagaaaacatctccgggagtccgaaccaccacccacagcgcggcaggccaggcagagccgcgtaggcgagaggcaacacagcaagcagcagaaaacatctccgggagtccgaaccacccacaggcggcaggccacaccacaggttccgcttccgcacagctgctagctagctagcgttcgcaagtagcagtagcgttccatcgaggtcgaggcaatggcggtgatggccgaagtagtctcgaccaccggcgcggcgctccggagcccggcctcgcagccgctgccggccgcggtgaagaacgcagacgctgagaagctccagttcatcgaggagatgacctccaacgtggacgccgtgcaggagcgcgtgctgggggagatcctcgcccgcaacgccggcaccgagtacctcgccaagtacggcctcgccgccgctactacggaccgcgccaccttccgcgccaaggtgccgatggcgacgtacgaggacctgcagccgtacatccgccgcattgccgacggcgaccgctcgcccatcctgtcggggcacccggtctccgagttcctcaccagctccggcacgtccgccggcgagcgcaagctcatgcccaccatcgaggacgagctcaaccgccgccagctgctgtacagcctccagatgcccgtaatgaacctgtacgtgcccgggatggacaaggggaaggctctccatttcctcttcgtcaagtcggagacgaagacgccgggcggcctcgcggcgaggcccgtcctgacgagctactacaagagcaaccacttcaagaaccgcccgttcgacgcctacaacaactacacgagccccacggcggccatcctctgcgccgacgcgttccagagcatgtacgcgcagatgctgtgcgggctgtgccagcgccaggacgtgctgcgcgtcggcgcggtgttcgcgtcgggcctcctccgcgccattcgcttcctccagctcaactgggagcagctcgcggaggacatcgaagccggctcgctcaccccgcgcgtcaccgacccgtcggtgcgcgaggcggtcgccggcatcctccgcgctgaccccgagctcgcggcgctggtccgctccgagtgctccaagggcgactgggctggcatcatcacccgcatttggcccagcaccaagtacctggacgtcatcgtcaccggcgccatggcgcagtacatcccgacgctcaagtactacagcggcgggctcccgatggcgtgcaccatgtacgcgtcctccgagtgctacttcgggctgaacctccgccccatgtgcgacccctcggaggtgtcctacaccctgatgcccaacatgtgctacttcgagttcctgccgatggactccgcggcggcgtccggcggcgacgcgagccagctggtggacctcgcccgcgtggaggtcgggcgcgagtacgagctggtgatcaccacgtacgcggggctgaaccggtaccgcgtcggcgacgtgctccaggtgaccggcttccacaactccgcgccgcagttccggttcgtgcggcgcaagaacgtgctgctgtccatcgagtccgacaagacggacgaggccgagctgcagcgcgccgtggagcgcgcgtccgcgctgctccgcccgcacggcgccgccgtggtggagtacaccagccaggcctacaccaagagcatcccgggccactacgtcatctactgggagctcctggccaagggccccgcgggcggcgccgcggtgggcgaggggacgctggagaggtgctgcctggagatggaggaggcgctgaacacggtgtacaggcagagccgcgtggcggacgggtccatcgggccgctggagatccgggtggtccggccgggcaccttcgaggagctcatggactacgccatctcccgcggcgcgtccatcaaccagtacaaggtgccccggtgcgtgacgttcccgcccatcatcgagctcctggactcccgcgtcgtgtccagccacttcagccccgcgctgccgcactggacccccggccagcgctccgactccgactagacacgcgggccggcgagcggcgaggcgtgtccggccgggtccggcgcgcttaattagactgggaattcgttccttgcgtatcgcagacgtagaatatgcccgtgaaattaaaatatttgttaattttggaattttgggtactgtcagttagcggctttgagggtaacctgacaacctgtgatgtgatgagagttggagtcactactgaaggctgagctggtcagctgaagcaacagtcgacgcctgaaggtgttttccggcagtaaaaaaatccggcagtaatggcactgttgtccctatcactttagtagtacggaggacgcggctaacttaaacgttcttccaaatgcaaatcccaaatccaaatctgtacgaatcngtnaaaaaaaaaaaaaaaaaaaaaaaaaaaaaaaaaaaaaaaaaaaaaaaaaaaaaaaccctaaacatggacgccttccacggggacaaggaccacgggggcgtccacgacggcaccaccggtggtgctttgggagtgggccaagggcgacaaccagcgctggaagatcctgccttggtgaacagagacgatctagatgaatccaaggaaccttacctagttgctgccgccgcctaattcgccctcctccgctttagctgttctctgtctgggtcttcgcgccctgattggccgaataatatatagcatgcatgtacgctagcgaccttgtttgaatgacattttcttggctgttacagttagctactgttacctgtttgtttgggtgttttaaaagactctgatggagtggtttttgaatgtcttgcttttcaatt

SEQ ID NO: 104221 - DNA, 170 bp, Zea mays
  unsure (1)..(170): unsure at all n locations
  Clone ID: MRT4577_26553C.1
attggagctggtcgcattggctccgnctatgcacgcatgatgattggcgggttcaagatggacctcatgtactacgacctggattaggccacacgtcttgagaatttcgtcacagcatatgggcaggtccttaaagccaacggtgaagaacctgtcacctggaaaaaggc

SEQ ID NO: 104222 - DNA, 174 bp, Zea mays
  Clone ID: MRT4577_26554C.1
cgtccgagaatgatggaggagcgaggcattgaatcatatctcgataccggacattctacattgggtggaggggatatatagtggatgctggagctcgtgcctgctactttgagaagcacttagacacatttacccattccatgattaatgcaaatctcagatacatcgttgcct

SEQ ID NO: 104223 - DNA, 266 bp, Zea mays
  Clone ID: MRT4577_26555C.1
cggacgcgtggataggaattcttttccgggcacacatctcttcatgcagaagatcaggagaagaattgctctacaacctcaggagtttcaaatgatgttgatctggctctgtcaattgcagatgttgaagcagctattagacaagcagaagatgaagctgactatatggctctcaagaagctggaggaggaagaagccgtggacaatcaagaattcagtgaggaggctgcgggcagacaagaggaggatgaattggttaatgagga

SEQ ID NO: 104224 - DNA, 405 bp, Zea mays
  Clone ID: MRT4577_26556C.1
aaaataagcggatccaaacggcccataatttgtattgaacatgtgggtccttttaacatcaaataaacgtttgtcaggtactacccaacccctacccaccgaacaaaaatatagattacatatcgttaaaaaaattacataaacagaagacacattttaagcacctgataacccacggctgactgacggggagcaatcttgtccttgggtatgaatgaatattcacgtagcccgaaaactaatcctaccatgaggtttagtttatgaattacagtatgaccttttgggtgttcctcggatgcatgtatcttatttacattgcttgggatttttatacatttttcgggtgattaacggactgcacttgctggctttagacgaaacaaaaaccaacggttccagcgc

SEQ ID NO: 104225 - DNA, 160 bp, Zea mays
  Clone ID: MRT4577_26557C.1
cggggacactgtacaaccgattaacgggcgaatacgactctgctatgttcgcgacccaaagcgtcgccccttctcgcattcttctgtaattaatcaccaccgacgtcgctgccgtctttctacaccatcatgagggagcggatcccaatccacatcagac

SEQ ID NO: 104226 - DNA, 355 bp, Zea mays
  unsure (1)..(355): unsure at all n locations
  Clone ID: MRT4577_26558C.1
ggccatctcgcggcgctggtcnttataggcatcgctattgcctgttggggagggtgccgtctctcccctgtcgcgcgtaggtcaggaaggccacgcattgtaatcggcgcgtccatcgtggggcgcgctgcgaatccggcggtggaagtntgctccccgcctcgaactcatactggccgctagttnccaggcgaactccgggagcagtcttgtcgaagnttgcccnnaccgaatcggcgtcgatcgaagtaacgatgcaacaatctnagggagcagtcttgtctaanactcccctngtcaagtccggtgtcgttgaaattacgattcatgaatacgaacgccgcggttttcgacc

SEQ ID NO: 104227 - DNA, 486 bp, Zea mays
  unsure (1)..(486): unsure at all n locations
  Clone ID: MRT4577_26559C.1
caacataacctcggcaactacctgcaaagtcttacanaatagnntatgggcaggaaagcctattcacttttccttttcatttgacnngatttctnattcaagttacctagaaaannaaaaaagaaccctaaatatgatacctagcgaggcaactaaaactaagctactttagaacgtggctttaccgctatnncggtgcttaccnnngcttcctanntgtctttccagagggatcctgcgtcacttgcctctattatnncttagaactctgggacctatactcgagctctttgagaagctagccactatggtnnctgagactgttgcttaactaaggatactctagcactcgcnctgaaactcctgagaaacgagttccagcctcaattccttcttctttgcgaatcaaagaaaactatttcctagcggctttgggaatctannattgatgtggctttgcattgaaaggtttgttgataaatctgg

SEQ ID NO: 104228 - DNA, 394 bp, Zea mays
  unsure (1)..(394): unsure at all n locations
  Clone ID: MRT4577_2655C.1
ccccgcgtccggcaccaagtgttcgagatgccgccgctgacggtggaggaggcgctggagcagctggacaacgtgggccacaacttctactgcttcagggacgaggcaacgggccaggtcaacatcctctaccgcaggaaggaaggcggctacggcctcatcatccccaaggaggacggcaacttcgacaacaaggacaccgtcggcgttgcgcaaccaccaccaccaccaccacccgccgctccggagccgtccttggccgtgcacaccgccgccgacaacaactgatgatccttttctttttttttttttttgcttgcttgcttgctgctactgtaaaacaaactccacctagaactcgtcgacatctcatctccatcagttgcntgcnnaa

SEQ ID NO: 104229 - DNA, 365 bp, Zea mays
  unsure (1)..(365): unsure at all n locations
  Clone ID: MRT4577_26560C.1
nnttttaggcccaggggagggcgggaaccaggagtgaacattgaaannagaggccggtgcccacgcaccacaaaggaagaaggactggcgcccacgcggagggggaacactgcacagggaacaacaaaccacacaacccaggcccagaaagccgaaaggagggagagctcaacgaggcagcagaaactcaagaaggaaacgaacgggagtgggaagaggagagcgggcaaaccaagacagcgagggagcagagggggcacaacgaccagatgaagcgcaaccaaccaggaccaacggaagaacaaggggagatacaagccggcagggctgccaagggaggacacccaagggagaccaggcgcagg

SEQ ID NO: 104230 - DNA, 316 bp, Zea mays
  Clone ID: MRT4577_26561C.1
gggaccctcaaaaaatagtttaaaccaacacagggcccatttttaacgggcaaatcccaacccataacccaaccaaaaaagggcaacccccccggccaacaaaatgggggacccgggtaaaaggacaaagaaaaatcttttttttccctgccgggaaaaaagggccttgaccaaaaaaaaggcgggggggggaaaaaaaacaattgtccctttgccaggggaccccccataaagggaacggggattttctttccccggggatacccgggtttttggcggaagaaatgggttttggccccccaaatgggcgagaaaa

SEQ ID NO: 104231 - DNA, 421 bp, Zea mays
  Clone ID: MRT4577_26562C.1
gggggaaaaaaaaaaattttggggggggataggagaaagcaagtttcctttggggtcctcgtttttcgcaaaaaaggaaaaaggggggccaaagtccatacaggccaaggccaaccctagggggggatttttttttttacggtttttcccaaaaaaaaaaaacccccgagggccttaaaaaagcttccaagggggggggctaaaacccggggccttccaaaaaacccggaggccccccccccttttttttttaggaaattttccccccaagccgcgggggggccccccacacaaaaatggggggggaaaaatatttttttttcccaggggtagacttggaggggaaccggggccccaaattccttaaggattttgttttcgctaaaccctgtttggggaaaaagccccccccatttttttt

SEQ ID NO: 104232 - DNA, 406 bp, Zea mays
  Clone ID: MRT4577_26563C.1
tcttctccaatccatactattctcaatctgctgctactccgaacccagacgatactgggaccatatctctcctgtactgtagcttactcccctatccagaaccttatatctcaacctgcaaattggcagatccataccctgctgacccatatctctgctccgaccatgactgaccgccacagcctgagccgtacccttctgacccatatctctcattcacctacgatctcattccatatccagagccgtatctatactcctactgcttcttcctcccatacccggatccgaatccagatccatagccaccatacctcctacgcaacaggctcgttcctgaatccgtaacctcttccgtaagaccgcttttgatactgctttgatcagaacccatatttggacttta

SEQ ID NO: 104233 - DNA, 423 bp, Zea mays
  Clone ID: MRT4577_26564C.1
ttttttttttttttttttttttagacgcaacgcaacgcaagatcgataatgtctagcagctcaaagcgttggaagttcagaatacatgaatgaatgcctcgagccgtcgagcgcgactggtaattgatcggtcagttcggtacagtttggaaccaaacgttgatgaaggaagattcatctcgatccgtgcgcatgtgttctgttcagcataaacttctcgcgaaatgagcccttgatctgggaacctactggaagcagaacgatcggtccgtgggcacgggcacgggcttccggcgacggggggttctcttcgactcctacctgagcctcgactcgtcggcgaagcgggtggcgagcttggcggtgtcgcgccaccggcacgcctcgcgctccgtctcccgcagcttccagcgcgcgctctcc

SEQ ID NO: 104234 - DNA, 557 bp, Zea mays
  Clone ID: MRT4577_26565C.1
ccggccgggatcacacatacaccaccacatatgcctgcaacacacaagcacataaaagcaaatacatcgatagctcgccacaacaatgggctccaggaagtctatcctggttgccgctacggctcgtaggctatgttgatcgaattgccatcgtgcaccaccccactcaccttgcacgacgcgaacgactccaagaactggccacctgagactaacccctatcattaccacaatctctgacctgcaaataaagcagcatggcaccctacccatatctctcctatacatctcaaagaggatccatgtcctcattgaaagctcgacaccaaggtcccggtccatcaccccctatgcatacgctaagctaccaagtcagctccccaccaaattcccgatgatgtcatcccgccgattatcaagctcgctccacctacaagactactctcagcatataactccttctctgataacggacaacgactacatatttcaagacagctcatctgacgcacccgatagcaagaccaatttcttctccgcgtataatatgacaccca

SEQ ID NO: 104235 - DNA, 589 bp, Zea mays
  Clone ID: MRT4577_26566C.1
actctagagatacccccaaataccactacttccaataacaagggtagctctagtgatgataatgatgatttaacttctctttttgcaaaccttaccaaataccaaaataaaaagattaatgaattgatagaaaccattaacgagaaggatgatatcttggaatgccgagaggacttgctcgttaaggaaattttttttgttaagctaaaggatgcgtatgctcttgaaatagaaaaaatgtgaaaacttgtccaaagagcttattatttgcattgattcaatttcttgtcttagaactgagaatgctaatttaatcgctaagatagaagaattgaatgactgcaaaccctctacatctactattgagcatgtcactatttgcactagatgtagagatgttaacattgatgctatgaatgatcaccttgccatgattaaagaacaaaatgatcacataactaaattaaatgataaaattgccgaggatgaactagaaaatgaaaaatttaaattttgccccgttgaaagtcgcctaaggggggggtgaatagacgggatcttgaaatttataaactttagcacacactac

SEQ ID NO: 104236 - DNA, 812 bp, Zea mays
  Clone ID: MRT4577_26567C.1
gtaccactccggtctgtccgggcatacagtgaactctcgttacacccaagctactgtcctccccacctcttttgtttccgtagggggccatccgcggcctctgtaccgctgccggctgccccccatcagcaaagttttgtctgcacatcgaagccccgaactatgaaacagtagacatgtatcacaacagaaaactaacaaaagtccaacggcgtcgaaactttcgacggccaccttggacaccgtcggaggttacgtcttgtccgatggtttctaagagccgacgactgtcagaatatccgtttgagattaaggttatgttcgacaaataaaatttaaggtaacagtgctcggcgttgtttcaattatctcttcacgcgttctctctcggtcttctccgtcgccgttgccaccgcgcctcgccgccaccgccatcgatgacggccacctcggctcggccagcgccctcgccgcctaccccttcgagcgccatacgtcatccggccagccctggcctcgctcatgctcgcgcctggtgcctccgttgatcgtggtcgtgccatctcgacggctcgtctctactacatcggaggattgtcgatgaatgtatgaaggttggaagaagagaggtgctctatcaagtgagtgggtttgtcaagaccgacgcgtttctctaccatgtttttgttcggccatgttttttttcggccagagaccagaaccgaggtgcccttgtagctagtgtcggaacatttattttcttgacaagagaactatgtcaatagatctttgtaaggatggctatatgtctg

SEQ ID NO: 104237 - DNA, 386 bp, Zea mays
  Clone ID: MRT4577_26568C.1
ccaaaacgcgagaccacctccctcctgcgctctgcaagccctgctccgtcgacggtttaagcgaaaccgtgtgcgtgcccgggctctcgttcttcttcttcttcgcatccgataaacaggggcccaaaaccagccgtgtttcggagcgactggcgactgggaccgattggccaaacgcccgcggtggaacgtgtcaaaaatcttgcgaaaaaaggaagagggcaacggccgggaggtgcaggtggagccgtgcaacggaaggcggcggtcgcgtccggcgcaaggaaaggaaagctggcgaccgccgcgccgctgcatgccggcggcttccccctcactctacctatccgcgcgctcgtgctttgccggattcagaccaaccaccg

SEQ ID NO: 104238 - DNA, 371 bp, Zea mays
  Clone ID: MRT4577_26569C.1
ctccgcgaatgaagaagaatcccttcgtttgaaccctcgcggccccattgccgccacggccacggctactcccattcgcccaccccaactcctcccggcccgcctcctgctccccgtcgcctcctcggcggagcggaatactggcttctggagccctcgacgaagagggtttcgtccccgccggagacccacctctcatcaccaccaccaccgtcgttcacgaggtcaccttcctgacgctcgtgtggagggttcttctgaacaaagaatacaaaatgaagtgcaacgcttgctggcgggagttggaaggacaagccataacaacaacttgtggccatcttttatgtacagaggatgcaaagaaaatactc

SEQ ID NO: 104239 - DNA, 716 bp, Zea mays
  Clone ID: MRT4577_2656C.1
gtgccgcgcccgtcggaattcgtgatctcaattccgtgctctcgagaaagttcatcccctttcacctctgtcccgagagccaatccgcccacagatcaagccttacaaaaccccacttaccatgataccacctcgaccctaaccggctaatcgacctgagatcgatctcgagtgacgaaattgacgacaggaagtaagatccggcaagatgttcttcttcttcgtaggcggcgtagagcagggggccgggcgggtgctcaaggaagcggcggggcggtgcctccggtgcggcggcgccgcggacctggtggagacggagaaggtcctcaagctcttcttcgtccccgtctggcggtggccggggaaggaccccgcgtacctctgtcgcgagtgcggcctcctcgcaccgggctccctcggcgcggagtcgggaccctcgctgctgctccgggaggcaaggtgcggcgcgtgcagccgcgctgtcgatccgcagttccggttctgccccttctgcggctccgccctctgaagtgattgccggtggcgaactggcgatggcgactacatgagcagaggtgacgccttttgccaatttggttttactagtttgtacactcaggttttactcgtgtaaaaactatgtatattatcgcaaaaaataaaggaaaaacaccaccaccatttcattttgtaaaaaaaaaaaaaaatgcccctaa

SEQ ID NO: 104240 - DNA, 308 bp, Zea mays
  Clone ID: MRT4577_26570C.1
attcggatcgagcaccgacaccccttttttggtcaagctggaggcggacaccaacgggggccttctaaaaaacaaggggcgggaaacaacaaaaagggaccaggcaattgtggccaaaggacaagcaggaccacaggcacaccaccgcggggctcaacccgctgagcaccaagccgatgaccgaatcccccaaaaagaacaagcaagacccggaggaggacgggccagcggagccccgcatcaccaaagagaccccggagaaccagaagaaccgccccttgaccgaagaccaagccccggcagcaaag

SEQ ID NO: 104241 - DNA, 779 bp, Zea mays
  Clone ID: MRT4577_26571C.1
gggtacctcgaggccggccggattttcttccccgtcacctcgtcttgcgctcctctgtctcggcgacgactgtgctaccgccgccgccgccgcaagacttcgtcgggcactttgccggcgacgatttcccaccaggtatactacccaccctattttcccttacttctgtgcgaaaaaccgaggacccaatgaccctaacttaagctatctagctatttctactcggatccgatctatttacaagcccaacaggatcagaggaggtgatggcgaggagtgacagctgcctggcgcgcgtgggtgccggaattgctatcggtggcgcggtcggcggagccgtcggtaaccttcgtccctaaacccctaaacactaggcttgcagcatcaatccgtccgtgcgagccgcttcacccgtcggtgtttttttttttttggttggaagtagattagtgtgcgatttcaggaatcttctcgagctagctagtagctacatccctggtttgtgtggttagctagcggcagatgtaataactaggtggcttttgttaagagttactagtgcttaggtagcatcatctggaggtggaagatatcgatgctcgagttggagtttgtttgcccccaattgcttgtgctctaagggctgttgctgattcggtctgccgtggtttggttaacttcctgctggtgcttagaacttgggatggaaaatgtaagatttttgtatttgccctttgatttgactgaatgaatgacttctaatgtcaaaagcttgttca

SEQ ID NO: 104242 - DNA, 713 bp, Zea mays
  Clone ID: MRT4577_26572C.1
gccggccgggttccactctgtgtgacaacgcgcaacagggttccaaagaggagagcgaccgcacgggggtaccctgctcggagacactctgtcttgcctgttcctagtacggccaagcgtgcggatacgcccggaccagcggtgacacccgcgcccgctcaacgaccagcgtctcgtacaggacacccatctgattcctccgtgtaactgcgatcgactgtcgagatactgaaattgaagctgcacgctgtgttatcttcgtcagggacgacgatattgagtattctgcactaactttcaccaaagaagattgtagctgatttcagtgatgaagatgacaatgcggataatgggttaagaaatgtttgcttccttgaccagatagatccagatagagctggatttccgggctggattgattggactgctcttcctgtagtgtcatgatttgccccttacatattagatggtgaaatcggtctggactatcgttcctatcttgctacttgttgtataaaatatggtgatgatgaataattatgcttatgtctgaattgtcgtattgctcccacttgacaaaaagagacggtgacttcctgttagtcttgaaatgcatgtatgcaagcgtttctacatgcattcagaagttggagcagcggtatcctgggatgatgctctgcgatcattgatgatactgttgattttgaccgact

SEQ ID NO: 104243 - DNA, 341 bp, Zea mays
  unsure (1)..(341): unsure at all n locations
  Clone ID: MRT4577_26573C.1
ggttgctagagntgctccatttgataagctaaaagtatacgtagacaattaactatacatggttgcatgcataattgagcagnagcatagccactttaaatatactacttgcatgcatagntnctaagctggatgtgctatntaaagaactgaagntgagatattttacctttatatgctaattgagctgaaaattctagaataataggctgattataaaatattncttttggacctaaaaaagacctccctaagaacttaatttatttggaaaggagtaataaaaaaaggaacaaaagaagaaaaataaaaaaataaaaaaagggggggaggacattaaa

SEQ ID NO: 104244 - DNA, 1539 bp, Zea mays
  Clone ID: MRT4577_26574C.1
cattgggtacctcgccggcggccggggtgctccggcgggcagaccacgcggtacgtgagttccaccacagagcacaggggcggaacacacgggcactagcggcggacgcgtgtggccggggatctagatctcccatctcctccaccaccaccaacgcgcgcgcctcgcctcgtctccctccagtccaaaccgccgtcgaccgccttgcccccgactgtcgcggcgcccgcactcccacccgctgctgccggatcccctgcccctaccgtacggtctgcccgctttcaccgcccgcccgcccgccgccgccagcctagctggggtcgggtggagatccaccaggaaaagagggtgctctcttctcctcgtgcgggtgttgtaattttgtcaagccagaagggcagcagtacttatagagttgttccaccatggccaatgatggagacgatggacaaagccaggattatctcttcaaaattgtcctgatcggggattcctctgttggtaaatcgaacttgctggcaagatttgcaaggaacgagttctacccaaactccaagtccactataggagtggagttccagacacaaaagttggtaatcgatgggaaggagattaaggctcagatatgggacactgctggacaagagcgctttcgagcagtgacatctgcttactaccgaggcgctgtgggagctcttctcgtctatgatattagcaggcgtcagactttcgacagtgttggtcgatggctcaatgaactacacaatcattctgatatgaatgtcgtcacgattctggtgggtaacaaaaccgatctgaagcatgcgcgtgaggtgagcaccgcggaaggacaagcactggccgaggctcagggcctcttcttcatggaaacctcagctttggattcgtcgaatgttgcagcagcttttcaaactgtggttaaggagatctacagcatactaagcaggaaggtgtttcagtcactagagcagaagaaaagcgagctgcagtcgctaagcagcgggaaagccgtggtgctgcagggtgaggccaaccaaacaagcagtggtgggaggtggtgctgttcctcgtgacctgacacgaggactgcagctatggagggcgatcggattgtgagacattcgggtgtgtaaccctgtaggtccgatttgtgaaaagttgcttttcccccatgttcttgttctaaaggtaagctggcgtggctgcttgtacgaaagctggtgttttccgtcggaggaaatcaatgtatagttcgattgatccttgggaggtgtcgatgatacacatgattgtgtaaagagaaaaagcgcgaccaacttgactgttgcgtcattctgcatcattctagtcctagaaaccgttctttcattttgtggtgttttccgtcggaggaaatcaatgtatagttcgattgatccttgggaggtgtcgatgatacacatgattgtgtaaagagaaaaagcgcgaccaacttgactgttgcgtcattctacatcaaaaaaaaaaaaaaaaaaa

SEQ ID NO: 104245 - DNA, 495 bp, Zea mays
  Clone ID: MRT4577_26575C.1
cttattacaatataacaagtacatatatggtactaatttttgtatcttattgtaaataaaaagaactataagtacacataacactggtactctcgaccaactgtggtgttgtttattttagcaaatgaggatggattaacgtttatagcaaacatagctagataacgactgtgtatagtagaagctgcgtgtagtaaacaactttttttgccacgacattggacgactacttcttccgtgcaacatggaccctggtacgatactctgctaaagcccatatagggaagatgttcctgtactgagagtaaccaatcatgcaattttggttgaagactccaatgatctcctgctgtggaaattctccgtctgctaactgcaagttgatcaaaaccttcgctgctcgatcaatggtggttggatctctttcagcctgtcctgcaccaattaaggccagcatggcccaacttgtgttcaactgcgtgaggtcgcatgcct

SEQ ID NO: 104246 - DNA, 436 bp, Zea mays
  unsure (1)..(436): unsure at all n locations
  Clone ID: MRT4577_26576C.1
gctgcctgctgtgccctcctctatctctctcgcctgtgtactcgcgtcgaaccacaagatgcagagctagccattactctctctctctcatatactattcagagcaaagcaaagagcgagacgtcgaggagagaagaaatcaagaaacaattagtttgtcttgtcctagtagctggccggcctgcacaagaggatcgatcggccggatcggagcggagtggatcagatcaggcgatagatcgctgatgaagaggatggtgatcctgaggcggtgccacccgccgcctcctccggcggtgctcttcggcgggtgctgccgcagcgcaggcggcgtgcgctacggggagtgccggcggaaccacgcggggaagcttgggggggcaccccgggggacggggggccgcggggtttttttngggggggggggggggggggg

SEQ ID NO: 104247 - DNA, 276 bp, Zea mays
  Clone ID: MRT4577_26577C.1
gcgagtattcttttaatggggatttatcaggtgaccaaaacgtcgcatcattttctacagaaaagctcagaaatcgcttgcacgtcgaaggtgttggtgaggcagttattaaagactgtgaacagattattcagtcagaattttcgcagtaccaaacacagatgaagcagcgttgcgaagagtatttgagttttattggcagtcttccacgggaagttgaggtagttaattcagtagattcaactgtccctgagaagtcacagctggaactgttca

SEQ ID NO: 104248 - DNA, 1068 bp, Zea mays
  unsure (1)..(1068): unsure at all n locations
  Clone ID: MRT4577_26578C.1
cggccgctcgaggcggcgggcgggatccatccacgccgcagcacacacacagcccgccgcgggctaccatgcgtacacagacggcaatggcgaccaccctcctcttcctcgcgctgctcctcgtcccgcacctcgccgcggccacgcccggccaccagcgccggctgctccagagccacggcgccgacgacggcagcgacgtcttcgtcgacccgtcctacgccttcgccaacccgcgcctccgcgacgcctacgtcgcgctgcaggcctggaagcgcgccatcctctccgacccgcgcaacctcaccgcctcctggtccggccccgacgtctgctcctactacggcgtcttctgcgcgccgtcccaggcggaccactacctcaccgtcgtcgccgccgtcgacctcaaccacgccgacctcgccggccacctcccggaggcgctcggcaggctcgccgacctctccgtcttccacgtcaactccaaccgcttctgcggcctcgtgccggcctccttccacgccatgcacctcctccacgagctcgacctcagcaacaaccgcctcgtcggcgccttccccgacgtcgtgctccgcctgcccagcctcaggtacctcgacctccgctacaacgagttcgagggccccgtgcccaaagagctcttcgacctcccgctcgacgccatcttcatcaactccaaccgcttccgcttccagatccccgacaacgtcggcaactcgccggcgtctgtcctcgtgctcgccaacaacgacttcggcggctgcctcccggcctccgtcgccaacatgtccggcacgctcaatgagatcatactcatgaacaccgggctcaagtcctgcgtccccccggagctcggcatgctcaccgccctcaccgtgctcgacgtcagccacaaccagctcatgggcgccatccccgccgagctcgccaacctccacagcatcgagcagctcgaccttggtcaaaccngctcaccggcgacgtgcccggaaggggatctgccacctgccgcatctccagaacttcacctactcctacaactacatc

SEQ ID NO: 104249 - DNA, 321 bp, Zea mays
  Clone ID: MRT4577_26579C.1
aaggcatgcacgtgcacgcgtacgcaggctctcggctcgaacttagttttcttattgatttgtctgaaacattgaaactataattgattgcattctttaatgtatgtaacaaccaaccaccagcatcaagttctttaaggtaatcacttgcttctggtaaacttatatgtgtcttgattgatagctatttcagtaactatgatatcattttcttggaaaaactatgaatacatgtccaccctctatccgaaaaatatttcattggtggttttaaaatctcaaatacaagctaacatttgttattgtttacatggtagttct

SEQ ID NO: 104250 - DNA, 389 bp, Zea mays
  unsure (1)..(389): unsure at all n locations
  Clone ID: MRT4577_26580C.1
ctgngacccgggacgcacgcggacgcaatctctaaattcgcctctagctttttcttttcaccatcaagaaaactccaccttcagcactngcgtggccatatataagtcttacagacccaaaaacctnctcttccatcaactcacattctaccacacgcacaacctatcaaatcaaaacacaaaccctccaaattttaattaacacaaaattcaatgtcatacacaccctccatacctccaattccaacaacatttcaaactcttccacaaatttaattaaaaaaagcctcccatccatccacaacaacaacaccactaaccacatcaacatcaattcattcaaacaccacaatatcaacaaattcaattacataaccattttcacaact

SEQ ID NO: 104251 - DNA, 482 bp, Zea mays
  Clone ID: MRT4577_26581C.1
cgttgctgtcggtcttccttgagagggcttcctctccatcccgggttcatcctcgccggcgacaacctcatcgccaagtgcccctcctggttctggtgcattctttactcatctcgccctgctcttgtgatttttattcctagatacgtcttttatgctaatttgaatgtgttattatgctcaattaccagatctcgtgtacgctccgcattataaacacgtagaccaccagttctatatcatttttatgttcttttggtaaatacgtagatccaagttatatttcccctaaataaactggacaaacctaggagcaactacatgatttatataaacaagatataggcaccccaattctgtatcggctataactctgatttgggtagtctgtgtgtacatccacactttcaataagctcagttgtcgcgaccctctatcagttatgataatgtgttttgaagatgcttgaatggtttcttggt

SEQ ID NO: 104252 - DNA, 2608 bp, Zea mays
  Clone ID: MRT4577_26582C.1
gggtacctcgaggccggccgggccgcctgcctgccgcaacctgcattgacattcgacaatagcaccaattcaagcaaccccccgtctcgtcctccttcctctcaagagtcgagacccaggcagccaggcttccagttccagccccacctcgcctctaccctcctcaaaccctacaccacgccccccggcccccagcccccggccttcgcccaacccgatagcgtagcgccggcgcagaaccggaccctgccgtgcggttgtccaccccgctcggcgccgcccgccgccgccgccgcctttgatgtctcctacctgcgacctcggcttcctctgcccccggtcgcagaagagctcccaagaggtcccccgagccaccgcttccggcgcccagcgattggcttccccaccgcagccgagatgagcagcggcggcgagaagatgttgttgtttgggtcctttacggaggacgagactaagttgttacagggtcagcccctcaaaagtccaactaaaagtgtcagcaaagaatgtgaacggacggagatccagtttggcaccctgaacttttcagtgctgaatttagagaaaatatctacttcaagtgttgttcttcctgcaaaatcagcaaaaggggaaaccagtgccatcacgaaggagaatgcatgcaataatgaaaagaaagctgcagggtcaagcctttcaaacggtggaccagttctggctaatggatgccctcctgttaatgttcctgctaacaatggtttatttgagaatgtgaagacagaggctgttgtcccaccagttatacctgtcaaaatcatcagcaatccaacaccgcaaatgacgttggagacgcataaggatggcaccaaacccactgaaagcagaaagttaaataaggaaagggaaattactgaaaatggtagtccaattgtcgataaacacattgttgctgctccagcagaagaggcagtcacaagcctaaataagaaagcctctcagaacatgcccttgcttccacatggtttgaggaacacaggaaatatttgctttctgaatgcaactttgcaggcattgctttcatgctcgccttttgtctaccttttacaggatttgaggaaccgcaggatacctaaggttggctacccaactctgagtgcatttgttgagttgatatctcaattggatgtgcctgatgagtcagttatcaagaaaaatgagaaggttattactgttgccgcaaaaccacttaatcctgccatgtttgatgctgttctcagaaactttacaccagatgtgccggctggaataactgctcggcctaggcaggaagatgctcaagagtttttaagttttgccatggatagaatgcatgatgaactgctgaaacttaatggagatggtttgaattcaaaggaggggatggttgtttcatccgctgatgatgatgcttgggagacagttggaagaaagaacaaatctgcaatagttagaacacagagttttgtcccctctgagcttagtgctatttttggagggcagctacagagcgttgtgaaagctgcaagtaacaaagcatcagctactgttcagcccttcctactgctccatcttgatatattcccagatgctgttcagacgcttaatgatgcacttcgtctgttctctacccctgaatctttggaaggatacagaacagctgcgggaaaggctggtttggtgacagctagaaaatcattcaagatacacgcactttcaaagataatgatactgcacttgaagaggttcagttatggaaatcatgggagcactaaagtctataagccactccacttcccatctgtactggttcttagtcgtgatctgctgagctcaccatcacaagagggtagaaaatatgagcttgttgcaaccatcactcatcatgggagggacccttacagaggtcactacaccgctcacgcaaagcatgccgacgggcaatggcttcgttttgacgatgacgctgttgtgcccgttggcgagaaggatgtcttgcatgaccaagcatatgtcctcttctacaaacaagtctgaaagcactacgtagttgaatagttagttgctctttcgtattgccgctgcttaaacagccagatatcatcatctaactatcgtcctgttaatgtagccgctgagtaacagcagagtattatgtggagtgcaccctggtgctgcccgtgtttattagcatattatttgactggtcgtatagcgagagggggattcgtcgtcagcccattttgaggttctgtaaaatttcaactgcgcatcattgtaatgaccagcgaagtaatgatgggatgttatgctcaatgagcagcgaagtaatcatggtcagccctgtcgctggcagctgccgaaaaaaaaaaaaaaaaaaaaaaaaaaaatgggttgtgtgcatgtggcatgccgtggttgggaattggttgttgagaagacattgccattagcttagccatgtgccctgtctctgggagtgtcaagaggtgcagggcaatgttagctggtgtatgtgccttgcaagcatgactagcatgttataaaaagcttcgaattattcgttttg

SEQ ID NO: 104253 - DNA, 504 bp, Zea mays
  Clone ID: MRT4577_26583C.1
agagagagaagaaaggagaggcagaaggagtgaaggacaacaatcccaaccggagagtgcggccatcccatatggggaatggacgttggcgcggcggtggctttgcccacatctgctccctctcctcctaatctcctggcaatccccctctctcctctctcttacctccacaggtggcacgttgcacacccgcagacacattggccgccgaggagggacgcaaagggacaccacgagaaggtggaaaagatcctggaggcgatgtacggcgtggtgtacaaggagctgatagacgacagcaacgagattatcgcgctcaagaagatcctcctcgagctggacgacgaaggcgtctagttcatcgccatccgcgagatctctctcctcaaggagatgaaccacagcaacatcgtcatgctactatcgatgccgtccatcagcgagaaggggatatacctacgactacgaggacctgaatctggacctcaagaaggtcatggactc

SEQ ID NO: 104254 - DNA, 3129 bp, Zea mays
  Clone ID: MRT4577_26584C.1
atgcagcagattactcgtagagatatcctctccattctgggagttgagttttcggactttgttttcctgccttcgatgggtgccagtggaggatttcttgtagcttggaagaggaatgttggtcacacagggttaacaagaatagatgatcattgtgtttctgttcaattctgtaaaaatgatggcacatcctggtggttaacttgtgtttatgggcctcagtcagatgcagataaaattcttttcctccaggagattaaggaaatcagagttgcttgtgctggaccttgggtcattgctggagacttcaaccttatttataatgcttcagataaaaacaacacaaatctgaacatggcaatgatgtctagattcagaaagctcaaagagacctcaagaaggctgcacagctggagtgataagaaagtgggtcatgttgcctctcagttggcacttgcaaaggagctcctccataaatttgaaactgcccaagatcacataatgctttcaccggctgagaattggctcaaaaataagctcaagatgcaatccttgctgctggcctcctttaaaagaactatggacaggctgagatcaagaataagttggctgaaggaaggagatgctaataccaaatactttcatatgcatgcaaggcatagaaagaggaaaaatttggtgactaaacttaaggatggggataacatcttgaccagtcatcatgagaaagctggagtggttgaccttttttactcaaaacttattggtcatgaggttgaaagggatagatccatcaaccttgaagctctcgagcttccggtgcatgaccttgctgatctagagctacctgtttctgaactggaaatctgggaaaccatcaagaccataccttctgacaaggccacaggtcctgatggtttcactggaaggttctataaagtttgttggaatatcattaaacaagaggtgatgaatgttgtggcagctttatggaacagaaactccttaaatttgagcaaacttaatagtgcttatatcactatggttcctaaagtggagggggctgatcaggtcaaggatttcagaccaattagtctggttcacatctttgccaaattagtcaccaaaattcttgccaacagattgggaaaaaagttaaataatatggtttctccgattcaaagtgctttcatcaaaggcagggctgaggaagctggattacttcaacagctatgtttgaggaaaaaacttcagagaatttcaatttatgcagatgatgtagctttgttcctgcatcccactcattcggacatctccattactctggatattcttgaattggttggggatgtctctggacttcataataacacccataaatccaatatctaccctataaggtgctctgatgagattatcttggatgtccagcatatgttgccttgtgacattgcctccttcccctgcaaatatttgggcctccctctatctctgcacagattatccaaccaacaactctggcacttggtggataagattgctaatagattacctaactggaaggctgacttgttaaatagggcagggataagaattctagtacaacaagttctcactaggatgtctgttcatactgctatggccattgatttccctatgtgggtcattaaggaaatttacaaaataaggaaaggtttcttatggagaggcagaagagaggttaaaggggggcattgcacatcgcccccaacttgtccccacagcggcaccgcacctagctgcgcgccaaacgtccaagacacggctgatatctggcatcgagctacagccggagattgactacaagcatactttgagtattgcctcaaatggtgtgtactcagccaaaacagcatgtgaaggactgttcctaggatctgtgagatttgaacattataaaagaatctggaagtcctgggccgtgccaaaatgtcgtttattcctttggttggtggcccataagagatgttggacaactgatagattggcaaagcgaggcctaaatcatcctgagaaatgtctgctatgtgaccaagaggaagaaaatatagaccacctccttgtgcaatgttccttctcccgagaattctggtaccttttactcaggaaatttggtcttcattctcttgcaccacagccgactgcaaactccttcctgggatggtgggaagtggtgggaggagcagtacatggtctcacaaaaaagggccttaactctctcatcattctgggagcttggactttatggaatcatgaacctgaatgaaaaccgagtggcttatcggatgccgacaagataacaaaacctgatttagtgtattatgcatgatattagtaccttatataatacgtagcttggagaaaaggccattcaccgtttctcattgttgggaggttctaaagaatgaagccaaatggttacacttggagcagggctcacaaaatattgatgtgctggtgaacaaaggtgtagggttttctccaagatgtcggatttgacactgaagaagattgagtattggaagaggtccgattgaacatttggcactgacattcaccaacttgttcaaatagaggaaaaggatatggaaatggagaaagagcgcatgtatgcatgtgtaggtcagggagtggctcggatcagccttgagtcaatttccactgcgttttcttcggttatggatgagcacgaggagtaaaagaaacagaagaaggctgagtgtgattctcatatgcttattttcttgtcctgtgtaatggatgtgtgtatgtgaaccatatgcgaacttaaacgtctttgtttgtaccggtcaggccattctgagtgagggttccgtctcttctttttaggactccactgcgaggtgtcggtgtgtgagaaatggtgcaaacaagtttctgagaaatggtgcaaacgtgtgtatgaaactctacgaggcatactcttacctagtattgtgtctagtgaaaaatgggacacatccgatgctactgtaaactcacttgttgcactcactttttgagttggatttttctttcaaaaaaaaaaaaaaaaaaaaaaaaaaaaaaaaaaaactcgagagggggccc

SEQ ID NO: 104255 - DNA, 734 bp, Zea mays
  Clone ID: MRT4577_26585C.1
cccacgcgtccgattactttttatgcacattgttttacactttaaaaggcatgtatatgctcgcttatacgagcacactaattaaaatcattgacgtataggtgacactcaaatttcaaactttttattattagggcttaatgtttttatgctctcatggatattatatgtgcagttgttacaaaacatttagaaaatatgaagttcaatcctagttatacttttctacataattttttacacaacaaaatggcatttagttattctcactggtacacggttacatgacacacgcatttgttttttatagttttttgttctatattcatggttcaatcgaatctttttttgttttgcaatgttcttcacaatatattcagtgctccagggaaaaggtgtctcactatcataaaattaacatcgctgattcatttattcttatgcacacaaataattatgctcatccaagcacttgtttacaataatcaagttgagtttttatgattcttggattatagcagtacacacgtgtacatatcacagtttttatgattctaggattcatctttcttccaagtaatcgttgatacaccagcttcagcaactgaccatgatgtgtttacagagatgacatttgtatgcctcgctctgcattgctttgcttggcctggcatcaatatacactggttaatcaccttatccttgtgatgttcacttccattaaaatatcatta

SEQ ID NO: 104256 - DNA, 689 bp, Zea mays
  Clone ID: MRT4577_26586C.1
gtgaagatgaaggaccgttccatctaggcctgctaatggcaaaaaatccaatccactcgcaccggtacccaaatctaattactttgatatccatcccacacccaaccaaaaatactagagggaagttaaacccaacccacccaataacattattgatcccaaaccaacccgtaattgggtggaaatccatggaaaacccgtgggtttaacttattgtctcacatcgagcccacgcgtccgtaaaaatcacattttaaagcagtaaattaattcaaatgaaaaagttttcaactacaaatttgtataactcatcatgatgtacattttatattttgaatatttcttcatatgataaactaaaaataaatttgttcataaaacctatatctctctcatagtttatgtaactacgagagatatgtataaaatttgtgcatattgttagaactatcatgtgagatgaataaatgatcaaacaaccaaaataaactttatagatcttgaaaagttatagaagtttgtagttgacaactttttcatttgaagtcatattgtcaacgaaaactatgcctgaatttaaaaaatttaaaatttgaattttgaaaacaacctcgaaagaaaaatctcataacatgaaaaactacgagagatatgtatagaatttgtgcatattgttagaactatcatgt

SEQ ID NO: 104257 - DNA, 3409 bp, Zea mays
  Clone ID: MRT4577_26587C.1
gccaccgaggaaagtggcgaggaaaacctccgggagaaggtgcaggttggtggcaaggtaaacctcacggaggtggggcaggaaggtggcgaggaaaacctcacggagaaggtgcaggaaggtggcgaggaaaacctcacggcaaaggagaatgaagggctagtggaggtctcaaaacccccccaaaggcgccggaaggatcctgttgcagacccctcttctcttgagtctagtggtttcatgcgatttcgggagaggaggaatgcttcagcgggtcaggagcaggggcctaagaagagaaggattactgaggattcaaacatgtgccatcagtgccagaggaatgatagcggaagagttgtacggtgccaaggctgtgccgtccgaaaaagaaaatacagatattgtgtgaagtgcattaaacgctggtatccacatttatcagaggatgattttgcgaacaattgcccagtttgtcaaaataattgcaattgtaaggcttgtctgcggggagacataacccgagccaactcgaggaaaaaaaagaagttactgcaaataaattctggaggatatagtgtatctgaacaagataaaattaaattctcaatgcgtatcgtgcactttttgcttccttggctgaaacaattccatcaagagcagatgcaagagaaaagtgccgaggctgcaactaaaggtattgatgcagacaaactggaggtccctctaaccatttgtggaaaaaaggaacggatatactgcaacaactgcaggacatctattgttgacttccacagaacctgcaataaatgtaactatgatctctgtctccagtgctgccaggagcttcgtcgaggccttgtttctggtaatgatggcaaggttgatggtggaggcaagcaagattttctatcgggagttagtcatgataaaatcataagcaaagggccatccgatggacagaatgacatgttgatagatagtgtagttcctggtgaaaacaacacttctagcttgagacagtggagtgtgaataaagatggaaccataccttgcccaccaaatgcatttggtggttgtgggagctctcttcttgaactgaagtgcttgtttaaagagaagtttattgctgaattactggagaaagctaattcagcgctcaataatgaaatggaggtgaagatagaaggatcaaaatgtccctgcttcactgaatccggtgacatggatgatggtatatcacggaaatcatcttgcagggagaattcctgtgataactacatatattgcccaaccgctacagatgtccaaaatggaagtttagaccatttccaggagcattggttgaagggtgaacctgtaattgtccgtgatacacttgcgttgacttctggattaagctgggaaccgatggttatgtggcgtgccttacgagaaaagaaagagaaagttgagaggctctcagttcttgctcttgaatgcttgggttggtgtgaggtttgtaatattctcatgactgttaatagctcgaaataataagacattctgggtccagacgatttgcccctgttgcttaagcttaaagattggccaccacatagttcttttgaggagcggctcccaaggcatggtgcagagtttatgtctgcattgccatttcgtgaatacactgatcctaaatggggacctcttaatctggcagtaaagcttcccgataatgttaataagccagaccttggtccaaagacttatattgcatacggtgtttccaaagagttgggaattggtgattctgtcaccaagcttcactgtgatatgtctgatgcggtcaatatcctcacacatactgatgaaataaaactcaaagcaaaaaggattgccgcggtggaaaagaagaagcggtgtttaggaatgaagattctaatctaccaaggaagcaagtggaggccttcaacggtgtgcagattatgttggtatgccaacagctcccagtgaatctaacaaggagccaaggcctgaagagtgtgtaaatgaactgggcattaaacaaccagtacagcatgttgcttccgaggagcaggaaggagttcaagatgatgccaaggcagatgcaaatgttatgaatgtttcttttggtaagggaaaatcagaagattcttttggcacaattaatggtaccaacagtggagataaaatagaatctcctagtggtttagcagaaagaacattgactcagcctaccactaagggttgcagtaagcagcgtggccgtagttctaatggtagaggaaacaggactaaaaaaatagaagaggggaatgcgtctggactaattgctgtggctcccgagtcagaagatgatgatgatgccccatttatagatggaaaccaagcagagggtggtgcactgtgggatatttttcgacgggaagatgtgagcaaactgcatgattatctaatgaagcatgctgatgagtttagacattgcaactttgagccagtgaagcaggttactcatcctatacatgatcagtgtttttatctaacaattgagcacaagagaaagcttaaggaagaatatggagtcgagccttggacatttgaacagaagctaggtgaggcagtatttatcccggcaggatgtccccaccaggttagaaatttgaagtcttgcataaaggttgcactagattttgtttctccggaaaatgtccgagagtgcatcaggttaacagaaggtttccgtctgctgccgaagtggcataaggtgaatgaagataaactcgaggttaagaagatagctcttcatgcattcaatcaagctattaaagatatcactgatgaatcatctaatagcaatgaaagaatgaagccaaatggttacacttggagcagggctcacaaaatattgatgtgctggtgaacaaaggtgtagggttttctccaagatgtcggatttgacactgaagaagattgagtattggaagaggtccgattgaacatttggcactgacattcaccaacttgttcaaatagaggaaaaggatatggaaatggagaaagagcgcatgtatgcatgtgtaggtcagggagtggctcggatcagccttgagtcaatttccactgcgttttcttcggttatggatgagcacgaggagtaaaagaaacagaagaaggctgagtgtgattctcatatgcttattttcttgtcctgtgtaatggatgtgtgtatgtgaaccatatgcgaacttaaacgtctttgtttgtaccggtcaggccattctgagtgagggttccgtctcttctttttaggactccactgcgaggtgtcggtgtgtgagaaatggtgcaaacaagtttctgagaaatggtgcaaacgtgtgtatgaaactctacgaggcatactctt

SEQ ID NO: 104258 - DNA, 447 bp, Zea mays
  Clone ID: MRT4577_26588C.1
aattcggcacgaggcatatattgcccaaccgctacagatgtagttatcacaagtttagaccatttccaggagcattggttgaagggtgaacctgtaattgtccgtgatacacttgcgttgacttctggattaagctgggaaccgatggttatgtggcgtgccttacgagaaaagaaagagagagttgagaggctctcagttcttgctcttgaatgcttgggttggtgtgaggtcgatgtaaatattcatatgttttttgcggggtattcaagtgggcttgttggtccagacgatttgcccctgttgcttaagcttaaagattggccaccacatagttcttttgaggagcggctgccaaggcatggtgcagagtttatgtctgcattgccatttcgtgaatacactgatcctaaatgggggtctcttaatctggcagtaaagcttccc

SEQ ID NO: 104259 - DNA, 2763 bp, Zea mays
  Clone ID: MRT4577_26589C.1
tgcatacggtgtttccaaagagttgggaattggtgattctgtcaccaagcttcactgtgatatgtctgatgcggtcaatatcctcacacatactgatgaaataaaactcaaagcaaaaaggattgccgcggtggaaaagaagaagcggcgtttaggaatgaagattctatggatttctgatatcagaggagctttgtcagtgggggttttgacatattaccttcagctttgggatttgatatctggcatcgagctgcagccggaggttgacgacaagcatatcttcagtattgccccgaatggtgtgtactcagccaaatcaacatatgaaggtctatttctgggatctgtgacatttggacactataaaagaatctggaaatcttgggcattgccaaaatgtcgtttcttcctttggttggttgcccataagagatgctggacaactgatagattggcaaagcgaggcctaaatcatccagagcaatgtcttctatgtgatcaagaggaagaaaatatggaccacctccttgtgcaatgttccttctcacgggaattctggtaccttttactcaggaaattcggtcttcactctcttgcaccacagccgactgcaaactccttcctgggatggtgggaagtggtgggaggagcagtccttggtctcacaaaaaagggccttaactcatcattttgggagcttggactttatggaatcatcgaaataaatgcatttttgatggctgcaatccaagtatgtccttatgtctcagagctgctgatgggaaataagaagatgaaagagctggggcaaaagcctcgcttagggttttctccaagatgtcggatttgacactgaagaagattgagtattggaagaggtccgattgaacatttggcactgacattcaccaacttgttcacacagacgtccgtatctaccaaggaagcaagtggaggccttcaacggtgtgcagattatgttggtatgccaacagctcccagtgaatctaacaaggagccaaggcctgaagagtgtgtaaatgaactgggcattaaacaaccagtacagcatgttgcttccgaggagcaggaaggagttcaagatgatgccaaggcagatgcaaatgttatgaatgtttcttttggtaagggaaaatcagaagattcttttggcacaattaatggtaccaacagtggagataaaatagaatctcctagtggtttagcagaaagaacattgactcagcctaccactaagggttgcagtaagcagcgtggccgtagttctaatggtagaggaaacaggactaaaaaaatagaagaggggaatgcgtctggactaattgctgtggctcccgagtcagaagatgatgatgatgccccatttatagatggaaaccaagcagagggtggtgcactgtgggatatttttcgacgggaagatgtgagcaaactgcatgattatctaatgaagcatgctgatgagtttagacattgcaactttgagccagtgaagcaggttactcatcctatacatgatcagtgtttttatctaacaattgagcacaagagaaagcttaaggaagaatatggagtcgagccttggacatttgaacagaagctaggtgaggcagtatttatcccggcaggatgtccccaccaggttagaaatttgaagtcttgcataaaggttgcactagattttgtttctccggaaaatgtccgagagtgcatcaggttaacagaaggtttccgtctgctgccgaagtggcataaggtgaatgaagataaactggaggttaagaagatagctcttcatgcattcaatcaagctattaaagatatcactgatgaatcatctaatagcaatgaaagcaaatggatccggagatagtgaggatcatgaaggccattgaatccatgcttgatgtcatggaagttagcaccacccgcattcgacatcttgctatcgagaacctgaatgaaaaccgtagtggcttatcggatgccgacaagataacaaaacctgattttagtgtattatgcatgatattagtaccttatataatacgtagcttggagaaaaggccattcaccgtttctcattgttgggaggttctaaagaatgaagccaaatggttacacttggagcagggctcacaaaatattgatgtgctggtgaacaaaggtgtagggttttctccaagatgtcggatttgacactgaagaagattgagtattggaagaggtccgattgaacatttggcactgacattcaccaacttgttcaaatagaggaaaaggatatggaaatggagaaagagcgcatgtatgcatgtgtaggtcagggagtggctcggatcagccttgagtcaatttccactgcgttttcttcggttatggatgagcacgaggagtaaaagaaacagaagaaggctgagtgtgattctcatatgcttattttcttgtcctgtgtaatggatgtgtgtatgtgaaccatatgcgaacttaaacgtctttgtttgtaccggtcaggccattctgagtgagggttccgtctcttctttttaggactccactgcgaggtgtcggtgtgtgagaaatggtgcaaacaagtttctgagaaatggtgcaaacgtgtgtatgaaactctacgaggcatactcttacctagtattgtgtctagtgaaaaatgggacacatccgatgctactgtaaactcacttgttgcactcactttttgagttggatttttctttc

SEQ ID NO: 104260 - DNA, 471 bp, Zea mays
  Clone ID: MRT4577_2658C.1
ccgcactgttcatcatcgtcagtatgaattgtctattgccttcaaagctttctttcttggtcagctttacattgaagaaatgttctgctcaacctcacaattatatactatacataactcatatattatcttgttcaacttgcactatatttcatttgagtacttaccttttattgatctctctttaatctaaactagtgttcaagttaaaatatttatattatataattaattaaatttttattttttatattttattatatttactctttcttttcttatttttccaattattacctttcttaattttattttgtttatttttctttcttaatcttttatccaatttttttatttatttttttattttatttaaatattttttattcttttatcttaattctaaatttacaatttttattttttctctatcttatctttactttcttatatttttcttttatttatctt

SEQ ID NO: 104261 - DNA, 366 bp, Zea mays
  Clone ID: MRT4577_26590C.1
agctggacagcaggaagagccttggagttctacgcgaggagcgagctagtgattacctcgggcgtgctgtgcacggaaagttacccagcagatcgatcggactaggcgggtatgacaggatccagaggttgctagccatggcggaggaagcatctgcgcctgcggcgggaacagaagctccgtcatggatgatgactatggtgttaggggtacacaagagcgatcacagctcttactcgctgcaatgatcactgctgcacttttttccgtcaagccatatcgcatcagtccgcctgctcgcgtcacgcgaaataccaccgacggctgcgactgtggccttgacggtccaaacgctatagatgtgct

SEQ ID NO: 104262 - DNA, 180 bp, Zea mays
  unsure (1)..(180): unsure at all n locations
  Clone ID: MRT4577_26591C.1
gctagcccactcctctttttcacctgatcgtacactctcgcagctcgatcattcttagctccgctatctttaactggagcttgggcctctaaccctancccctaactagtaactagccactcgatcgtgaattcatcatccttctgatcgacacccatggccactgtctatgaccatacc

SEQ ID NO: 104263 - DNA, 389 bp, Zea mays
  Clone ID: MRT4577_26592C.1
acccacgcgacggatgaagcttctcctcaggagacgcatggaaatcttcatcaacatcctcgcggggtcgactatcaccctcgaggtggtctctgctgacatcaacgacaacgtcggcgtcactctacacgacaaggagggcatttctccagacaagcagctcctcaattgtgccaggatgcacctcgacgacagtcacacggtgagcaactacaacattcagctggatagcacgcgccacatgcagctgcttctcaagagccggatgcacatcatcatcaacactctggtcgactcgactaacacccttgatgtcgtctctgctgatatcaatgataatgtcggcgtcactctggacgaccaggagggcatttctgccgaccagcagc

SEQ ID NO: 104264 - DNA, 395 bp, Zea mays
  Clone ID: MRT4577_26593C.1
cgttatttgttgcaaaagacgagagcctctggaaatgcgtgaacgttacaaatacgaaatcaaagaatcccatagaggagctaggaacagtttataactacatttcatctccagacggccgctctgcaatgatgaattctcagtcaaggtaccaagctgcaatgatcttgaagaggtcgtgcatgcagcagtatgcactgggcgacattctccaggttctgcatatcgttgttgttcgaaagaaatggctcgtgcctcattcttcaggctggcagccgctgtccttaaaacgcaacagcggatcctgcaactactgatggtacaggaaaagttaaatcttcttttcctgtggccgtctaggattctgcaactactgatactactgaactactgat

SEQ ID NO: 104265 - DNA, 407 bp, Zea mays
  unsure (1)..(407): unsure at all n locations
  Clone ID: MRT4577_26594C.1
gggacctcataatttccatcatatcttttattgcgactcatctgancgatcctggaagcaggaatttttttttcttgatgtcttttgagatttattgttgtttttttttaaaaaaagatcattatatctttctcaaattaccaagtgtttgcatagaattagggaaagacatgtagttcacatgcatctgtctttttttctggatgtctctccttacactctctgtattttctccttctttgaagaagggaaaaaattgaaataatcttctatcttggaatggaaatgagggaaagggtggacattgttgaattaaaacttacaaaggctggcttagaactccatttccctttgattcgggccccgctatcttcccaggccccatcaccctgcacccaccccttctg

SEQ ID NO: 104266 - DNA, 298 bp, Zea mays
  Clone ID: MRT4577_26595C.1
acggcttcttcaaccggggcctcgtgccgggcctctgcttcggcgcggtgagtctctctctgccgattgccgacggttcctttcggacctttcctgccgtcgctttctcgcctcgcacacccgcctgccgactccactcggagctggagtcggtcccagaaaaacattagaatttgacccaggcgtacgtgttgaactgaacgcggcccagcaaggtcgccgctgatgattcggtggcgcccgcccggagctcggatgccgcggcgccggcgtcgtggatcgactagaagctgcttgt

SEQ ID NO: 104267 - DNA, 412 bp, Zea mays
  Clone ID: MRT4577_26596C.1
gcttccgccagcaacgcggacgcgcaaagcctcgccgctgacgccacgtctccaatgctcgccggcgtcggcagccgacggcgatgccaacgatcccgctgaagcgcccggcggcgcatgccgcctgcgccgcctcctcgcgtcaatgcgcccgccggggcctctcccggtccagaccggcttcccgacctccctcgcggacatcgtcgtcaagaaccacggccgcatcaggaacaccaggaagaggcgccgcgccgctgccgcggagccccagcaaaggcgcaagctttcggtggctcgcgacgcggcagcaccggcaccggcacgcccatccaaaggcgcgggcttcagcgtccgccagggctcctcttggtcttcgctggtggcgatctggacagcagcttgggggggc

SEQ ID NO: 104268 - DNA, 426 bp, Zea mays
  unsure (1)..(426): unsure at all n locations
  Clone ID: MRT4577_26597C.1
gcaagcctctaaactgagtcctattagatgtgtctcatcctagaccattcgatttccatcatcatactctcccaccagcagttccttctaaccagcagccttctaccattcctgttgagaatgctccagtacctcatcataacagatggccagagtattctggtggtgttggtctatcctattcatctcatcggcctccatatggtcagcatcaacctcctgggaatcttgattcaggaagtaacttggtttatccctctttccagagatatccatcaaatctaccagtcagtaacaatattggtcccttatctgatgccgatttgactaaatcgtctatcanaccccactacaatccatttgcatctacctttgataaaacagatccaagtctagatattgggcctcctgtaagccctaatgcag

SEQ ID NO: 104269 - DNA, 451 bp, Zea mays
  Clone ID: MRT4577_26598C.1
ggaaaaaaaccctgaacttgttattacaaaaaaaaggggggcggggggacaaaaaaagcaggggggggggccgggggcaaaacacgactggattaaagcaactccatacaaaaaaaggggggattgggcatttaaacagaccccaatcccaaaacctgggtcggggggggaaaggaaaaaaaactaggtgttcttggggagggggaaaaaggggaaaaaaaaccccgggatttaccccaggaaggggggggggggggaaatccaaaacttggggccccccccctccttgaggaacacccccaggggggggaggaaaaagggaaaaaagatgtccacccagttgggaagcccccccaacaagggggcgaagcttttttttccccccctttttttttttttttcccttggcttggcttggaaggaacggattccttttttccggacccggggg

SEQ ID NO: 104270 - DNA, 397 bp, Zea mays
  Clone ID: MRT4577_26599C.1
ctccctccctccttccttccttccccgccactgcgcagcgcgagtgcggcgacagccagtcacacactcccactccctcgaccgctctcggccctcggccccgtccgcgtcgccgcagggcgaggaggcaatggcggcgggcgggaatggcgccggcggggacaccagggcggccttcgcgcggatctacaagacgctcaaggaggagctgctcaccgacccggccttcgagttcaccgaggagtcacgccagtggatcgaccgcgtaacgatccctctctatctctctctctcgctgtcgctgccgtccttccttcctttttctgttcctgtttcctggcttgatccttgtggcgtgcgccgtgcggtgcgggggctccctgtgccgttcgtcacc

SEQ ID NO: 104271 - DNA, 331 bp, Zea mays
  Clone ID: MRT4577_2659C.1
agagatatggtgatatgagctgatgatttttattaaaaaaaacaaaaaaaaaaaaaaaaaaaaaaaaaaaaaaaaaaaacaaaatatagataaaatataagattaaagttacatggggtgggcttcaagtggttccaaggttacgttcgctttcttcacagttcatacttcttcaatgtggtcacgtgaattcccttcagcgtccgtagttttacctcttcttgctggggaacaccttggtttctacgaattttatcgccttgcactagatcctatttttgctaattgggttgctattgatgagggctatatggattggccttccgaaaag

SEQ ID NO: 104272 - DNA, 228 bp, Zea mays
  Clone ID: MRT4577_265C.1
ccttctcgccggcacgcgcaggggcacgcgtgcgttacttgctggaaagacgctagtgctcgacccgccaagaggatcagggcaaccgaggcactcgagcacccgtgcatgtgtgcggtctatgacccgagcgcgaacccgtccgcgcaggtgccgatcgacctcgccatcgacaagaacctaggcgtccacaggatcacggagatgatgtggcatgagatgatccac

SEQ ID NO: 104273 - DNA, 310 bp, Zea mays
  Clone ID: MRT4577_26600C.1
aggggacttctcggtgtctctcgaacgtttcgacgactacgaccaacctgccttacttgatgttttattaactctcagggggccgtgacttcttaacctaatgctcgatgatcacaatgatttgattctggtctctcttaaccttagtcatgagctaaaacttgagattgactaattccatacagatacacattttgatagcacccttcgtgaatcacctgaggatgatctacatggacgatcccacatgttttataatgacaaccatatagtattcgatatcacagagggacacttctagactgatgac

SEQ ID NO: 104274 - DNA, 699 bp, Zea mays
  Clone ID: MRT4577_26601C.1
cattgggtacctcgaggccggccggggtgcgctgatgacgggtcggatctgagacgaggagagacgaccccccctcccctaaacggaacttgtgttaccccatctcatcccactgactccacccacccgacccactggctccgccagatatcgacatgactcgtgatccacgcacgaccgccgccacggcgcgacgaccgacgcagcgagtacaaaacagatcacgaggagataggcggactacgacaccttcctcttcacctataagttccggaacgatggacactcgctgagaagctctgcgaccatggctcggatgctggtctgcacgctcgtcttgctgaggacccagatagcctagttgattgccgagacctgtgccaaaatgataatggacatgggatttggtgcagcatcaccaccaaagccaatgtacactaccagaagattgtcatgcatacatgccacaacatttggtgtcgtgtcgaaccatgcaggacttgacgctgagcactgacaaggtggttgtgaacattgagcactggcaccctgatattgctcagggtgtgcacggactgttcaccaagacacgcgaagagattggagctggtgatcaggcgcacatgtgtgcatgatgcgactgacgagacctctgagctgatgtgcctcagtcatgtacttggcaccaagtttggagct

SEQ ID NO: 104275 - DNA, 367 bp, Zea mays
  unsure (1)..(367): unsure at all n locations
  Clone ID: MRT4577_26602C.1
aggaacaccacccgggaccacccancaaggaggagagaacaancaaagcacgcaggggaggcagagacagacanaacaaaagcanacncncnccanaccaannanacaacaacaccacaanacancgaggggggggngcacanagcaaangacaaagncgnccggcncagaagggcgncagcgcacagcgncacggcccagaccanaancnccagcgnccaccgananagcnccggcnccggcacgggcagggcgacggacacgaggccggggncggcancgnagcngaaccccaccnncgccgaggccaaaagacaccncgccggcncccgcgagcagaaagcgccgaaccgaccggacccgcgaa

SEQ ID NO: 104276 - DNA, 406 bp, Zea mays
  Clone ID: MRT4577_26603C.1
aaaaaaacccccccgggccggttttttttttttccaaaggggccatttttcccccccccttgggggggggaaattttttttttagaaaaaaaaatccttgtttgccctaggattgtttagcccgatcttgaaaataaaacaaaaagaatgggttttggttaaaatttaccacccccccccccaaaaaaatttttaagccggaaaaaattttttggggggttggcccaaaaagtcgggctttttcccaaaaaatggttgttttttaccccggggttgtataaaaaaaaatttttcccgcccccaggttccccatggggggaaaagccctttggaaaaaggaaacggggccttgcacccggggaaagggaaaagggttacaatttttaagggaacaggggcccccggg

SEQ ID NO: 104277 - DNA, 675 bp, Zea mays
  Clone ID: MRT4577_26604C.1
tcgagttttttttttttttttttttttttttttttttttttttttttttttttttttttttttttttttttttttaaaacccaatcccttggttatcctttttttccttttccggggtgggggggaacccccccctataaccacggggacccaacccaaaccaacccaaaagtttttgggttttagggacccaccaggattaactccatccggccaaaaaaaaaaaacatgcctgttttaaaaacaaaagaggccaaaatggtttattactaaaaagggagcccggtttatttaatcaaaaccagaaggggctgggcttggaaaagtggcaaaaccctacagggggggtttaataaatcaaaagaagggccccgggtttaaaaaaaacgtgggtttttggatcggcctgcctgaaggggggggggcttacatacccaggaaggatcggggtgagctttgttgccaaaaaggggaaaaacggggaccccacgttgggggggcccattgggaacccccccccgggggggggaatctttttgaacaccgtttcggagtccaggcccaggcccccgttggtggactggcccacaatcccccccacaagggacgcccccggccaacggtttttcacccttatacccttccccaagggggcctggcccttttgcccggggg

SEQ ID NO: 104278 - DNA, 776 bp, Zea mays
  Clone ID: MRT4577_26605C.1
ttcgggaaaataaacgtcaagtcaaccgcccgcacctcccacgacctcgcacgtactaaccacagtcgttcaaaatggcctcccaatccgtgcaatgcttcggcaagaagaagaccgccaccgctgtcgcccactgcaaggccggtaagggtcttatcaaggtcaacggaaagcccctttcccttgtccagcccgagatcctccgcttcaaggtctacgagcccgtcctcattctcggcctcgacaagttcgctgacgtcgacatccgcgtccgcgtctccggtggtggtcacacctcgcagatctacgccatccgccaggccatcgccaagtccatcgtcgcctactaccagaagttcgtcgacgagcactccaagaaccagctcaagcaggccctcgtccagtacgaccgcacactcctcgtcgccgacaacaggcggtgcgagcccaagaagttcggcggtcagggtgcccgctcccgctaccagaagtcctaccgttaagctactcttctccctgggaacaggaggaggttgcttggcggcaaaggcggcggctatcaccaaaatcggatgcgatctggtatcttcgacgggtatggaatggtgttcatgggctttcagcatggtcgggccactcctgcgacgaagtgggcccggctggttgtgttgttggggcgtctgagcgcatctcagtccttgtaacgataaaaacgaatcaatcggttgcaaaacacgctgcggatgatggacagcacgtgtgcagattatataccg

SEQ ID NO: 104279 - DNA, 276 bp, Zea mays
  Clone ID: MRT4577_26606C.1
gcgaagtaccaagtcgtgaattgcaatgaagaatgagtaaagtgcagtgctgagaagaataattttcatgtatcttgtgtactcaataatgataaactttatatgactgagaaggaaactgtcgcaaattgtcaaaaaaaaaaaaaaaaaaaaaaaaaaaaaaaaaaaaaaaaaaaaaaaagtaagaaaaaaaaaaaaaaaaaaaataaatcccggaataaatacctgcacccgtccctgaatgcacctataactagccctatttagagctggact

SEQ ID NO: 104280 - DNA, 203 bp, Zea mays
  Clone ID: MRT4577_26607C.1
cgtccgaatcccgggcgcccatcgcgtccgcggcgcgttgttaccgtacaacatgtgtttcgtcccgtggagcgagcgagtgactctcaagtgtgttttcttgcatggtgattcgtcatactgttcctgcaaaactggatgacccttgtccatgcagacaaactctctcgtgagacacctagccgacaaaggaaaaataacat

SEQ ID NO: 104281 - DNA, 662 bp, Zea mays
  Clone ID: MRT4577_26608C.1
gccggccaaggctcaaaaaaaaaaaaaaaaaaactgtagtgcattacgcggtgcgtgttcatttaaccgtggcgtttgattgtgaggatgaaataaaacacatgtatgaccacatctgattattagtgatacaaaaaaaaacttgattgaacaaaaaaaaaaaaaaaaaaaaaaaaaaaaaaaaaaaaaaaaaaaaaaaaaaaaaaaaaaaaaaaaaaaaaaaaaaaaaaaaaaaaaaaaaaaaaaaaaaaaaaaaaaaaaaaaaaaaaaaaaaaaaaagaaaaaaaaaaaaaaaaaaggcccccaaggcccccgcccgccaaaaaacaagaaaaccccccggggtgcagaaattcaaaaaaaagttaatcaaaacccccccccccaaggggggcccagaaaccaaatccccccaaaagggaatcaaataacccgggcccaagggacgcctttaaaaaacgacggaataggaaaaacccgggggtaacccaattaaaccgctttgaagcaaacccccttttccacagttggcgtaaaaacaaaaaggccccaaccaatcgcctttccaaaaatttgcccaccctaaaggcccaaggaaaatggaaaccgtaaaaattttgaaaaaatccccgtaaattttttgaaaaaaacaacaatttttt

SEQ ID NO: 104282 - DNA, 404 bp, Zea mays
  Clone ID: MRT4577_26609C.1
cccacgcgtccgctcgttcgttcgttcggcggctgggttttttcaatttcaggtggtgtttgcaacttcggatcggatggatcatttatttgaacatgtttttggtttggtcagagttggatcatcatgaaaacatggaggtgacatatcagtcagacagtcaccaccaagatttgcaacgctttattcgtggatgggtcgtcgtggatgtttgcaaacaaaattccagcatatttctatcttttagtatatccgaatagagtagatggattggatagagcatggcacttgctttctgaatctgaacaccgacttttggaagtgctcttctgctcgatcaggtgggaggagtgaagttggttggactccagaccaagtcgctcgaaattattgatatatcaatt

SEQ ID NO: 104283 - DNA, 677 bp, Zea mays
  unsure (1)..(677): unsure at all n locations
  Clone ID: MRT4577_2660C.1
actccatagggcgattgggttcctcgaggccggccgggatatagcagcatcgatcacaacaatcttgctctgcaccaacaatgccacgacacccttgttcctcctggtcctcttctgctccttcatggtgagaaggaactaccaaactccatcaatgatgaaatctgcctgccctgctagcggacttctcactacaccaacgtgctttgctccgctgatggtcagacttacaggcactaaggctagagcaagaagcctgcttatcggactgctatcctactgaaagatatacaatcctcatacccaacgaggacttccatgcctgacaagtcaacttcagcacgtccttgcaatggtgacagatcacttcggaggatggcaatctgctgcttaccacacacctaaaacagtactacgaccatgagtaattgtatcgagattctactcgagaataacctgtgcatcacgcgtgaattgaaatcttgacgggtcttgcccagccgctgggagcaagaactcctgcaccaataactacgactgaaagattcttcccaaatctgtgctaatggacttctagtaccacgaccaggcgtcccggntcacgctgttcaactccaagttcttctactgaacatggaccggtgcaacagaatgctgatctaggacgtgaccgtgac

SEQ ID NO: 104284 - DNA, 593 bp, Zea mays
  Clone ID: MRT4577_26610C.1
gatcaaaaagagaacagacacttaattttcaaatgttatttaccgtagcaacacaggcaattttgctactgactgcacaccaacttcacaacaacataggctacctcacaccactacaccagtgtccaaattacaaacgacaacaccaatgttcctaaacctgttacatgagaatctgtgcatcttctaactgaattttcttcggacacgggacaccgcaatgtgcgtttgctacatccttaacacctgtcgtttctatcaacagttggcgggcaccaccaagtactaatcagaactccaaaccgtacccattaacgctcgttgaaaaatatggcctacaagaattgtttgtggcaattactatctctcagcaaggccaaaccggaattgatgcaggagattgttggtgatccacaaaagatggaatgccattgttcatgaccttaactagctgatccgaagatcgattgcggctgttctgctgcagtaactgaacaagtgatagaaatatatccatcctcgtcacgttcttgtttgcctcaacaagaaatcgagccattatttttccatcacgaagttccatcaatcccttc

SEQ ID NO: 104285 - DNA, 299 bp, Zea mays
  Clone ID: MRT4577_26611C.1
gaaaatgtcaagacaagcattgaaccgtagctacgttgacccccgacagactttcctggataggattgactctcataacatcttatgagactacagtgcccacgctcgaggactgacagatccaaatccctccctgctcatcagcagaggacacgggcctactcaaccatcgcaggtaaactcattgccatgagggaaagctggctaagctaggctgcgagctggtgctgaatgagcctagtggagcttggtgggactggctagacacctgtggagacggcacacctagatggacagct

SEQ ID NO: 104286 - DNA, 656 bp, Zea mays
  unsure (1)..(656): unsure at all n locations
  Clone ID: MRT4577_26612C.1
agaccacggtgaatagacagatggggagttcgcgcaagatcacctctcttctcctcatgttctgcctggcggtgctggtgagagcggagtatgccaagtacaaggatccgaagcagcctctcgccgttcgcatcaacgatcttcttggccgtatgattctggccgaaaagatcggccagatgactcagattgagagggtgaacgccacggcagaggccatgtccaaatacttcataggcagcgtactgagtggtgggggcagcgtgcctgctcctcaagcatctgctcaggcttgggcttcgatggtgaatgagatgcaaaagggttctctttctacccgccttggcattccgatgatctatggtattgatgctgtccatggcaacaataatgcctacagagctactatctttccccacaatattgggcttggagctaccagggaccctatgctggtgaagaggataggagaagcaactgctcttgaagttagagcaaccggaatctcttacgcctttgctcgntgcattgcggtttgtagagacccaggatggggacggtgctacgaaagctatagcgaagacccaaaggttgtccaatcaatgaccacgctcatctctggcttgcaaggcgatgcgccatcagattacacagga

SEQ ID NO: 104287 - DNA, 338 bp, Zea mays
  Clone ID: MRT4577_26613C.1
gcggattaactggctcattgttcataggtactgatacgaaagacaaagtgctcatgtattaaagctacaatcgccatgccgagcggttttaagtctttttgacaaaattttttgcggggccagcttaaagcctgggtacgcggctctatttcggggccccgacataatttttaagggctggtctaattttgcgacccacccggggatgaaacaagcttcacccttgcggtaccgaacgggaggggccaacctttaatgctgcccttatggcccaccgggctccagggcaaacaccgctccttaggattgtagcggccgattggactggaaccccttct

SEQ ID NO: 104288 - DNA, 355 bp, Zea mays
  Clone ID: MRT4577_26614C.1
gggaggccggtcgccacgcgtccgatttggcatcaaacacaccagcgaagcgcctacacacctaacaacaatggtccaagatatatcctcttgcgcttttgcgcttttgcgagcgcacaagcgtcattattcacaagctcactgctctagtcatattcacagttcctccaccgtacttcaatggccttgaacacccactgtgcaagcctataggctacaacaagcgattgcggcgagcgtcttacaacaaccaattgccaattgcaacaacaatccttggcacatctaacaatacaaaccatcgaacgcacagcaacaacagtctaccacctgagccacctagccaggtgaacct

SEQ ID NO: 104289 - DNA, 297 bp, Zea mays
  Clone ID: MRT4577_26615C.1
atgggtgctaaacaactagccgaagctgttggcttcgctgaacaacttgggtacccttcggggtatacaatctccgggggagggcctgaggattatttgtatcgctactcggatagcttggagactgaagtataccgctacatggcgaacaacataggttttccgaagttagaggccatattatcaatgatgcccttcaaagattttttggattgcctcacctacatgcattggaagggcctgattttaagcaaggagctaaagaacaagaaaaatattgagagcgaagcttcctag

SEQ ID NO: 104290 - DNA, 425 bp, Zea mays
  Clone ID: MRT4577_26616C.1
cgtgctgccatacgcgtatggaactgggttccattcgctggtttatttcagtgcaggtatagcgttgcgagttaagtttatcatggttgtagaaccgatctaggacatttatgtgaagactacaataggatgcgcaggagcttactcttctatggttcgcataaatattgattggcacttcttagaggctagagctgttcaagtaaatctcatgttgaggaatagcaacactcagtgtggtataacatcggtgaaacaaggtcttatcagctgaccctgttttctctttctggtttaaccgacatgctgatgaaagagaaggtggtgaaattgcgtttggtggaatggattctaaccactacaagggtgatcacacgtttgtcccagtacttggaagggatactgtcagttcaacatgggtgatg

SEQ ID NO: 104291 - DNA, 699 bp, Zea mays
  unsure (1)..(699): unsure at all n locations
  Clone ID: MRT4577_26617C.1
gttgcagtggcacagttccacgcagcagatcagagagacacacgcactagctacctgcagtctggtctgcaggtacgctagcgatctagctaccgctgtgctgcgtacagtacgtagtaccatggcgaagaaagtggccactctgctggccctcaacctcctcttcttcgcctttgccgacgcatgcggctgcaggtgcggcggatcctgccctagtccaggcggcggtggcggtggaggatctggtggtggaagcggtggggggggatgggaaaagggggttgatcnnntggtgggagcggtgggggtgggagtggaggcggaggatctggtggaggcggcggatcctggtggtggtggcagcggtggtggaggcggcggatctggtggcggcggcggcggcggcggtgggacaagcggtcgttgccccgtggacgcgctgaagctgggcgtgtgcgccaacttgctgaacgggctgatcaacgcgaccctggggacgccgcccaggacgccgtgctgcacgctgatccaggggctggcggacctggaggcggcggtgtgcctctgcaccgtcctcagggccaacgtcctgggcatcaacctcaacctgcccataacctcagcctcctcctcaactactgggtgaggccctgtcccctcggcgctccagtgcttctgatcacacccatcgatccatct

SEQ ID NO: 104292 - DNA, 1070 bp, Zea mays
  Clone ID: MRT4577_26618C.1
accccaaccccagcagaggcgacgacgctgtaccccaccacctcgcggggcgtccgcgtccaggccacagttccacgcagcagatcagagggtctgcacgcggccggccgggacaagttgcagtgacacagttccacgcagcagatcagagagtctgcaggtacgctagcgatctagctgccgctgtgctgcgtacagtacgtagtaccatggcgaagaaagtggccactctgctggccctcaacctcctcttcttcgccttcgccgacgcatgcggctgcaggtgcggcggatcctgccctagtccaggcggcggtggcggtggcggtggaggatctggtggtggtggtggtggaagcggtgggggtgggagtggagggggtggatcgggtggtgggagtggaggcggaggatctggtggaggcggcagcagcggtggaggcggcggatctggtggtggtggaagcggtggcggcggcggatctggcggcgggccgacgagcggtcgttgccccgtggacgcgctgaagctgggcgtgtgcgccaacttgctgaacgggctgatcaacgcgaccctggggacgccgcccaggacgccgtgctgcacgctgatccaggggctggcggacctggaggcggcggtgtgcctctgcaccgtcctcagggccaacgtcctgggcatcaacctcaacctgcccatcaacctcagcctcctcgtcaactactgcggcaggcgcgtcccctcgggcttccagtgcttctgatcacgcccatcgatccatctgcaggctaaataatttgtccaagctagtatatatacgtacgtacgttgatatatatgatgtagtattatatatatgtccatgcatgcaatgcatctcgtcgtccatcgcatgttgttgtcgttgttgtgtgtgttttcgatgatcctgtctctgttataaatatcattattattacagtaaaaaaaaaaaaaaaaaaattgaaaaaaccacaaagggcggccgccaccgcggtggcaaaaaaaaacaaatctaagggaaaagaaaaaaaaaaaaggcggcccttgg

SEQ ID NO: 104293 - DNA, 587 bp, Zea mays
  unsure (1)..(587): unsure at all n locations
  Clone ID: MRT4577_26619C.1
ccggccggggatcacaagttgcagtgacacagttccacgcagcagatcagagagtctgcaggtacgctagcgatctagctgccgctgtgctgcgtacagtacgtagtaccatggcgaagaaagtggccactctgctggccctcaacctcctcttcttcgccttcgccgacgcatgcggctgcaggtgcggcggatcctgccctagtccaggcggcggatctggtggtggtggaagcggtggcggcggcggatctggcggcgggccgacgagcggtcgttgccccgtggacgcgctgaagctgggcgtgtgcgccaacttgctgaacgggctgatcaacgcgaccctggggacgccgcccaggacgccgtgctgcacgctgatccaggggctggcggacctggaggcggcggtgtgcctctgcaccgtcctcagggccaacgtcctgngcatcaacctcaacctgcccatcaacctcagcctnctcgtcaactactgcggcaggcgcgtcccctcgggcttccagtgcttctgactatcacacgcccatcgatcgatcgatctggaggctaaataatttctccaagct

SEQ ID NO: 104294 - DNA, 437 bp, Zea mays
  Clone ID: MRT4577_2661C.1
tcgtccacgcgtccgatcagattctgattgtccaaaagttgatgaaagaagacctgttgctcgctccttgggacgtaaaaaagcactggcatcctccaagaagcagagccgaagttcaaagaaaccattatctacttttcactctacacccaagaagaaaatgctggacaatgtgtttatctttaatgagaaatgcacacctaaaacagtggatcagggtgaaacaaataaagcgactgagtcacgtggtagcaggtctcctgattctgccaaaaaaagagtaaacaggaaacagacatacctttctccaactgaggatgaagggattaaaagttctgaaacaagttttgcaaaaggatataaatctcacaaatggccttcagatattgatgttcctgataaatctcctgttgagcatatgggtaggaaatcaaatc

SEQ ID NO: 104295 - DNA, 646 bp, Zea mays
  unsure (1)..(646): unsure at all n locations
  Clone ID: MRT4577_26620C.1
ccggccatgcgcatgaatgaatcgtcgattgcttatatggttcctcaatcaatcaactaaagttggatgcgtaaaanaaaaaaaaaaaaaaaaaaaaaaaaaagaaaaacctggagatactcaccggcaagttcccggcgaactacctccggcaggggcggcagggcaacgcggacctggccgggtgggtgcagtcggtcgtcacggaggagcgcaccggcgaggtgttcgacaaggacatcacgggggccaggggctgcgagtccgacatggtgaagctgctccaggtcggcctggcctgctgcgacgccgacgtcgaccggaggtgggacctcaagacggtcatcgcgcgcatcgacgagatccgggagcccgagcccgccgccgccgccgccgcctccgagtcgtcatcgtcctaggcgagcacccgcgcatgtactagaccaagcaaatcccactgatcgatcagcaagccgtcgtgcgtgcatgcctgaggtacctcctccgagacgaggatttacatacgcggcggccatgcgcatgaatgaatcgtcggttgcttatatggttcaatcaatcaatcaactgaaaaaaaaaaaaaaaaaaaaaaaaaaaaaaaaggaaaaaaaaaaaaaaaaaagcggcc

SEQ ID NO: 104296 - DNA, 1773 bp, Zea mays
  Clone ID: MRT4577_26621C.1
gctccttcagcattgttctagactgttgctgttggacgttccaaaactgaagacattaccatgtctgccaccctcgaggccggaaggtgtcaatttgtggcctcaccctgcttacgtttgtcaccaaaaatcagctcgaacaacatgactctagggaaaatataatgatggcagaccacctggcatctaaactttcattgatgtgggaggtggattcaggatctagtgttaggagtgtactgtcgaaagactattcatctcttaagcagttgatgacattgatgatagatgatgatatatcaaagcagcttcaaattattgaaactggtctagaggaaggagataaagtatggatgaaagaaaacatcatcaaggcatggctcttttgccatgagcagaggataagattcacttatggaagggccatggagctgcaagtggttctaccattaggactttgtaaactttccctttcgtcatgcaatattatagatgaagctttagctatttgccttggaggcctcacttcactggcaactttagaattggaatataatatggcactaactacacttccatcagaagaggtgtttcaacatttgacaaaccttgacatgttgattctaagtggttgttggtgtctcaagtcactggggggcttacgtgttgcttcatctctttccattcttcactgttgggattgtccttctttagagctagcacgtggagcagaactaatgccgttgaaccttgctagcaatctcagcatccgtggctgcattcttgcagctgattcgttcattaatggcttgccacatctgaaacatctttccattgatgtctgcagaagctccccatccttgtcgattggccacctgacctcccttgaattattagatctaaatggtctccctgatctttgctttgttgaaggcttgtcttccctgcaccttaagcacctaagtttagtagatgttgcaaacctcactgccaagtgcatctcacagtttcgtgtccaggaatcgctcacggttagtagctctgtattgctcaaccacatgctaatggctgaagggtttacagccccaccaaatcttactcttttagattgcaaggagccatcattttcatttgaagaacctgcaaatctctcatctgtcaagcgcctggatttttcgctttgcgaaatggagtccctgccaagaaatcttaaatctctctcaagtctagagagtcttcatatagggcgttgccccaacgtagcatctttacctgatctgccatcctccctccagcgcatagctatatggtgttgtcccgtcttgaagaagaactgccaagaacctgatggggaaagctggccaaagatttcgcaccttcgctggaagcacatctactaataccaaacttgcttctttagacttgccacttgaaatgaatgagaaggcacctcgatgtcaccccaacgcgacgctctctcctcttgaagctccagagttcaggaccaagtcagaagcgaatgcgtcagctaatgctgttgtccccgcggttccctgtctttttccgcttgcatttgctccgctatttcacttgttatatcattccttgattgtgaacaattgccaatgtgtatttctccgacagaatgaagtaactaactgtggctatggcttttacttttcatgtggcaattagtcctacgtgaggctaattagagtatggaatgtctcatacctttactgtctttctttgaagaaagtaagaatattggcc

SEQ ID NO: 104297 - DNA, 1027 bp, Zea mays
  unsure (1)..(1027): unsure at all n locations
  Clone ID: MRT4577_26622C.1
ttttttttttttttgtttagtgtgtataaaatttacgatttttctttcggccaacacggaaaaataattcagcgagatgtcgctaaaaatctgaaccatgaatgtgcatgcatcaggccaaatacaaacattcaggtcacacacgtactgtaataataatgatatttataacagagacaggatcatcgaaaacacacacaacaacaacaacatgtgatggacgacgagatgcattgcatgcatggacatatataatactacaccatatatatcagaagcactggaagcccgatgggacgcgcctgccgcagtagttgacgaggaggctgaggttgatgggcaggttgaggttgatgcccaggacgttggccctgaggacggtgcagaggcacaccgccgcctccaggtccgccagcccctggatcagcgtgcagcacggcgtcctgggcggcgtccccagggtcgcgttgatcagcccgttcagcaagttggcgcacacgcccagcttcagcgcgtccacggggcaacgaccgctcgtcccaccgccgccgccgccgccaccaccagatcctcctccgcctccaccaccgctgccgccgcctccaccactgctgccgcccccaccagatcctccgcctccactcccacccccaccgctcccaccacccgatccaccccctccactcccacccccaccgcttccaccaccaccaccaccagatcctccaccgccaccgccgcctggactagggcaggatccgccgcacctgcagccgcatgcgtcggcgaaggcgaagaagaggaggttgagggccagcagagtggccactttcttcgccatggtactacgtactgtacgcagcacagcggtagctagatcgctagcgtacctgcagaccagactgcaggtacctagtgcgtgtgcctctctgatctgctgcgtgtaactgtcactgcaacgtggtccctgccggcctcgagttttttttttttttttttttttttttttttttttttttttncccgg

SEQ ID NO: 104298 - DNA, 1177 bp, Zea mays
  Clone ID: MRT4577_26623C.1
ctcgagccggccgggaaatgatgtgatgatctaattgtttccctattggtttgattggccgccatgatggctcaatctgtattagctctatctgatcataacaagttgcagtgacacagttccacgcagcagatcagagagtctgcaggtacgctagcgatctagctgccgctgtgctgcgtacagtacgtagtaccatggcgaagaaagtggccactctgctggccctcaacctcctcttcttcgccttcgccgacgcatgcggctgcaggtgcggcggatcctgccctagtccaggcggcggtggcggtggcggtggaggatctggtggaggcggcagcagcggtggaggcggcggatctggtggtggtggaagcggtggcggcggcggatctggcggcgggccgacgagcggtcgttgccccgtggacgcgctgaagctgggcgtgtgcgccaacttgctgaacgggctgatcaacgcgaccctggggacgccgcccaggacgccgtgctgcacgctgatccaggggctggcggacctggaggcggcggtgtgcctctgcaccgtcctcagggccaacgtcctgggcatcaacctcaacctgcccatcaacctcagcctcctcgtcaactactgcggcaggcgcgtcccctcgggcttccagtgcttctgactatcacacgcccatcgatcgatcgaatctggaggctaaataatttctccaagctgctagtatacgtacgtacgttgatatatatgatgtagtattatatatatgtccatgcaaaaaaaaaaaaaaaaaaaaaaaaaaaaaaaaaaaaaaaaaaaaaaaaaaaaaaaaaaaaaaaaaaaaaaaaaaaaaaaaaaaaaaaaacctgggggttggtttgttttaaaagctcgttccccctctcttttctccccgccaaaaaaggggggaattaaaacccaggaaaaaaggccatccttcccccgccgggaattgaacaaaattttctttcccaaaaagccgggggtccccgccgccctaaatcgccccctgaattgaatccaaacgaaaacccagttgaacctgggggggccccttccttttcccaaaacaaaaagaacctccccagggaaaaggaaatcccccaggttgaaataaagtcccaagcccagggggccggaataacc

SEQ ID NO: 104299 - DNA, 235 bp, Zea mays
  Clone ID: MRT4577_26624C.1
tgaaggttgaaccgtaaataactcttaaaatgaactcccagaacctgttttccttaggcttggttggaggcgcccatttcccgatccgaagacctctggggtagaaccagggttagggggaccgccgcggtcttacgccctacggcaagttaacctgattttttcaggcccggttgccggtcgaaactatcgaaaccggaattggggctggctaccaccccaagactggcaatag

SEQ ID NO: 104300 - DNA, 250 bp, Zea mays
  Clone ID: MRT4577_26625C.1
cggcagaagatcctggaccgtcagaagccgagaaagctcgcaaggaacttttggagctggaggctctgagcatggccgtggagagcaccgggactgccaaggcggaggccgagtcccgtgcggaggcagcccggattgagggagaagggtccgtgctgcaggccaagctaaaagcacaggccttggccattgaaacggaggctgagctccagagggtccaaaggtccgagagctggaactggtctatgcc

SEQ ID NO: 104301 - DNA, 336 bp, Zea mays
  Clone ID: MRT4577_26626C.1
gcgggtatttcttttttgtggtttttttattcttcttacagtagtcggtttttttgcattgcatacccgtttttcattagaggaaataccagaacaaaaccttggtaagtaaaccaaaatacatggaatttttcgaaatcacgcagcatcggataaaaaaattgacgttgggataaataaccgggctttaatgcccaaggtggcaacgattgacgttgctcctaaaagggtttttaaaaacacctggataccaatccgatttctttaagctagaccatctcgtattacgacccttaagggtggggttttttttttagaggtaagtggccccacccc

SEQ ID NO: 104302 - DNA, 450 bp, Zea mays
  Clone ID: MRT4577_26627C.1
ggagggagaggaagaggaggaacacctccggcgtcaatccagcaggcagcaaatcgatgagagagaagaggagagacttcaagagagaggtagagagagagagagcggactaagcggcgatggctgcaggcagcagattggtgagagagaggcggatcggcttctcggtagagaggtgaagatcgcgtgagggaggagaggcttccggagagggagccagacagcgtacagcacgggggaggagaggcttctagagatggagccggagagcacacgcggccgcgccgagcgtggaaggaggcagcagtcacaggagagggcttttgggttgagccttctgacacgtgggcttagtgggctgcagactcatgaatagaggatgaagaggttaaaggctgctgcacggttgaccaatatcatgttgggttaccccttcatcacctgagatca

SEQ ID NO: 104303 - DNA, 231 bp, Zea mays
  Clone ID: MRT4577_26628C.1
ggggcaggccgaaaacggccactctggttttttattaaggtaaaaacttttatccttttataaaacaaggatacgcaacgctgttgggtatttacaaaaaaaaaagggcaagctacttttcctgagggacaaggccaaactggacgtgatacacacaaggggggttccacatccaaagaggacactgccccttttatttaacccaacccagaccagacaaccagagaaaaa

SEQ ID NO: 104304 - DNA, 146 bp, Zea mays
  Clone ID: MRT4577_26629C.1
cctacatctagactctacaatccagcctaatttcatctcaacttcacttttattatgttgaaagaagttgcagtgcatattattcagttttacaacttgtcataaatcccttgttctttttgtgcttcttcatagttcaagcttgg

SEQ ID NO: 104305 - DNA, 1051 bp, Zea mays
  Clone ID: MRT4577_2662C.1
cccacgcgtccgcccacgcgtccggtggactacttcgcgacggcggtcacgatcatcgtcgtcgccgtccctgagggcctgcctctggctgttactctgagcctggcgttcgcgatgaagaagctgatgaacgataaggcgcttgtcaggcatctctcggcgtgcgagacgatgggctctgccggcactatatgcaccgacaagacggggactctgaccaccaaccatatggtggtcgacaggatatgggtgtccgaggtttcagaatcagtttccagcagtggcaacggtctggaagatctgagctccgccgccgtctctcggccggccacactgggcctgctcctgcagggcgtgtttgagaacaccagcgcggaggtggtcagagagaaggacggcgggcaggctgttctgggaaccccgacagagagggcgatcttggagtttggactgaagctagaagcacgacgtcgtgatgctggagacaggagctgcaccaaggtcaaggccgagcctttctactcggtcaagaacgtgatggcggtgctggcatcgttacccgacggcaggtaccgctggtacgtcaaaggcgcgtcagagatcatcgcgcagatgtgcgacgccatggctgacggtcacgggaaccgcgttccgttgtcccaatgtcggaggaaggacgtcttaggcaccatcaactcgttcgcttcagacgcgttaacgacactgtgcctggcgtacaacgaaggggatgggttcactgacgatgcacatagtcccgcaggaggctttactctgatatgcatctttggcctccaggatcctgtgcgccccggagtcaaggacgctgtcaaggcctgtatgtctgccggtatcgtggtacgcatggtgaccggcgatcacatcaacacggctaaagctatatgcaaagagtgtgggatactgactgacggtggcataccgatacaagggtcagagttcacaaacaatagcccacaggagatgacggacctgatacctaagatccacgttatggatcgatctctggcgcttg

SEQ ID NO: 104306 - DNA, 214 bp, Zea mays
  Clone ID: MRT4577_26630C.1
cctttgaggtgccgttggagctcttgttatactacttcctacgactcagaacgacgccacacttgacggactccagggtcactgtgactgtacacaggaccgagatgagcagtgatgtagcctgtgtgcacctgtgatcaacaacgaggatggacatgcccttgaagatgtggacaacacctagtacgatcacagggtccccgagcgagtggag

SEQ ID NO: 104307 - DNA, 530 bp, Zea mays
  unsure (1)..(530): unsure at all n locations
  Clone ID: MRT4577_26631C.1
ccgttttaggtagctcagggcattgaaagagtcagggctctctctctcttttccggtcccttgctgttgcgtgtttggattctgtgaatatagctagctctacgagaaaccgcataggtttgattgctcatccatggacaatggatctataataattttcttagtgatgtataacatggttctgtgctgaaacccctgtgaactgttctctaagtaggaccctgagccctacggagaaatttggaatagtgccattatcaaacttagactgtaaggtcttcgctagttcaccattctcacacgttacagacagagtgccattcgatacatcaacagagaaaagatcacctgcttggtctttttttgcccctcttcgaaatcagaacgtggctgacaccgttcgtggagatctcccgttcacttgacggctcgagcctgcgtcgagtctgccgctcctcccgttcgatctgcttcttcttccccgncgnncgtgagattgcaccagtgacatttcctcgcatagatgggaa

SEQ ID NO: 104308 - DNA, 377 bp, Zea mays
  Clone ID: MRT4577_26632C.1
ctaagactcacatctaaaactctcatcgcaggtggaagatcacgaggtgctgacctgttgcctgtcttattgcatagccgatcccattgccgatctacgttgttggatgtagagtaaagggcagagcagaaaaggtagactgagtaatgcattgtgtagagcacagtcgggtagcgcctacagataggcctgcttaaacgcacattgaggcaaacgctgtggatcatgctatctactagtctagctacgtgtcgagagacaattacccctactcatatcactcatcatataaagattcaacacaagcttactctcaagctctctgtgaacaactgagtgaagcattgaacattgcaaatgacaatacaagtgatgaa

SEQ ID NO: 104309 - DNA, 760 bp, Zea mays
  Clone ID: MRT4577_26633C.1
acgttccctctcgtccccggcggccagccggacgccgaacctgaaatcggccgtggctccgtcaccatctccatccactcgccgggcaccagcagatgcggcgtcggcgtcgatcacggcggagtcgaaggcacggttcgaggcttacaaccggctgcaggcagcggcggtggcgttcggcgagaagcttcccatcccggagatagtagtgattggaggccagtcggatgggaagagctccctcctagaggcgctccttggcttccgcttcaacgtccgcgaggtcgagatgggcacccgccgtcctctcgtcctccagatggtccacgaccccactgccctcgagcccagatgccgattccaggaggaggattccgaggagtatgggagcccgatggtggtggctacggccatcgcggacctcatcaagcagcgcactgaatcacacctccggaagatccaggctgctgtctcatccaagcccatcgtcatgagggctgagtacgcccactgccccaacctcacaatcatcgacaccccaggcttcgtgcttaaggctaagagaggcgagccagagagcacaccggatgagatacggtcgagggtgaagtcactcgcgacccctccccaccgcctcgttctgttcctccagcagagcagcgttgagtggtgctcgtcgatctggctcgacacgcttaaagagatcgatcccactttcaggcgcaccatgatagtcatctccaagtttgacaaccgcctc

SEQ ID NO: 104310 - DNA, 304 bp, Zea mays
  Clone ID: MRT4577_26634C.1
agcacagcaccgcatatagcgtacaggatatgtcttgagcgctggcactggcgtaccaaggaggcgcgcgtgaggaagctccaactgctgcggtcactgatgtcactgcaactgatcgaggagcacccgtcagactctgcagtgcacgtcacaccacgagctgtgcgagcgcaacatgagcgagttcatggtggagctgatacttctcgacatggctcctgccgatgcatagactagacgaagtgcgctacaacgcatctacaatgtacgagcggcatatgctggtcgtctgcatgaaacacac

SEQ ID NO: 104311 - DNA, 372 bp, Zea mays
  Clone ID: MRT4577_26635C.1
ggtggctagggctcgggagggtggatgggcggaaactccaagggttgtccggctaacccacgcgacagctcccgaccgcaacgcaagcgtcaaatcaaataaattctactgccctagttgtgaatgttttccacaaaatcccaaatccccaaaacagcaaccggatgaggaaaaaaacaaaaagaacaacccccaacttttcttctttgcaaaccgggtatcacatagtgcttggcaatgatgatgagctatcaatcagatgcttttttctgattctattcaattgacttttttttccttctgcttcttggggcattacaaacaatgaggtactaatgacttcaaacatggcccgaatgctgatattgactg

SEQ ID NO: 104312 - DNA, 575 bp, Zea mays
  Clone ID: MRT4577_26636C.1
tccgaattcccggtccactccttcttcctgtgctctctagcctcccctcacatatcgcactgacgagtgattcattccggttgctggattgatccagatattcgcagctgaccggctcctcgagcgcacgaaaaaaggtcgttgctgcctacttgcttgctgtactctctgggaacgccagcccctcacctgtagattccattgccattctgagaacatttgcatgtgaatttgacaacgaaaggatggaactcctgctgacctaactgaccggtaaggacatcaccgagctcattggcgagggcacgcaagaagctagattgaggaccaatgagcagaacctcagtgtcaataatgcgatagataaacctagctggtgacggcagctgcttctacagctgaggcacacatagaagagacgccgaacacaaggactaaatccatgatgattttggcttcaacctcttcgactacgctgcacaaccatcacagcattatgtcagtgcagtgaaaccacatgaaaaccatagtcatgttcagattacaaccttgttgtatgctgggaaagtactgat

SEQ ID NO: 104313 - DNA, 312 bp, Zea mays
  Clone ID: MRT4577_26637C.1
atggaggcggatgcggcgcacaacaggatgggcgagacgggggatgaggaggtcgagagggatcacggcatggtcggtgccggtgtctcctatgacggtcatcgcggggcgcgcggggacgagggctgtcttgggcgccgactacgacgaggcacctcatgcgaccgagctcccgcgccgtgccgatctgtgcatcacatcatcatagcgaggggagagggagaatcaggtggcaagctcaaagaaatcacccagcaacataagtatgtagaagtgacgccgcttgcgcacaagtccacgaccctcacatag

SEQ ID NO: 104314 - DNA, 324 bp, Zea mays
  Clone ID: MRT4577_26638C.1
accgggagccgtcgtagttggagatagggaagatgctggcccccatcgatatgggcttgtttatctgtatgaaaaacgggcacaagggctgctgtattccgtagaaccagacgaccggcatgtccagttgatgaaactccttctgtggcagaccgagtgcaagaacaatctaacatgtcaacaacgcacacacgtagtcaactagggggccagtcgagcaacccgggggccagtgctagcacaaactagcctaacagaccggatacaaacaaaagaagtcacacatcggtggcagcctaaactcattgacccgatgcacgaatg

SEQ ID NO: 104315 - DNA, 258 bp, Zea mays
  unsure (1)..(258): unsure at all n locations
  Clone ID: MRT4577_26639C.1
gtcgtttcgccttctccttctacaccgactgcctccctcagcgagcggtttcantttcagagaggcgtgctagatnctatcnccagatcaataacaagccgtaccctaagtccagttactgccgtggtgtccctgaccccaagatcaggatctaccatgtctggatgaagaggaaaggttgttattacttcccctactgtgttcaccttgtttttttggaaaatgaaaatgtttccattttttctcctcaatcttccc

SEQ ID NO: 104316 - DNA, 460 bp, Zea mays
  Clone ID: MRT4577_2663C.1
ggaaaaaaccaataaatccaaatatatttatataaactcatgtatgatgggcttactttcaaactaaaaacaacaagggaaatatttcaagaccctgtgttagtcaaaagtacagacaaacgaaaattaaactttttcagtagcaacttcaaaaaccacctctttatattccttagtctcttcatcgaacctgtaccattttccggttgttgcgtagcaataaagtccagtgttcgggtcataatagtaaccaaggctgctgcctgaagattcatcaaacacataatcagaattaagctgagtgccccaaatggagctaaacggttgtaaatcaaaggaaggttcaggagcatttttatcatcgccaaacatatcacaagatactatattggcaggcccattttctttcgcttgagctaggctctatatccttctgcttcacgttggaaaacttcttgct

SEQ ID NO: 104317 - DNA, 848 bp, Zea mays
  Clone ID: MRT4577_26640C.1
cattgggtacctcgaggccggccgggcctacatctggtatcgaagacatcgatcacctccctctaatcgtgtgtttcagtctagatttcgcttctcatcactcctacttcactcgcctctagaagagtcgtgccgtcatggatccgaataccaagctgattctcgatgagatgcaacgacaattcgccgaacaggacgcgcgcatcgctcgtcgatttgaggaatctgatgggtgttgggaagctcgcatttctgcggtcgaggtgcaggctgcacgcatggagcaagccgtggatactcgccttgctgaggttgagcgtcgcacggctgatcggttcagcatagtggagaaattggccggcgacctggacgaatggcgacccagcatcgagggcacgtaggacgacctatggctcgaagtcaacaagctcgcccgccactgggaccggtcagtcctggaacacgcctcgtcgtcgccaggcttgatccgcctcccttcggctgctccgcgcccacccgcggatgaagcagcatttaggccaaatcggcaccacgttgacaacactatccgggagaccggattcggggttgttacaaccctaactctggccccggtcaagggtacgtctgttcctccacagtacccttcacatgatactttccatggtcctattcgtgatcgttcttgtacacatgaccctgggtactcccaaactggtcaactacccaagatgtcgtttccctgttttgatggtactacccacgattgtggatctcgcgcgtggagtcttactgtgacatgtatggtggtgatcctacaatttgggtttgggtagcaatgatgtatt

SEQ ID NO: 104318 - DNA, 850 bp, Zea mays
  unsure (1)..(850): unsure at all n locations
  Clone ID: MRT4577_26642C.1
gccggccgggtcgggactccctccctcgtcctggtggtagctgccgtcagcgctgcgtgcgagcggagcgcatcagcagcaccagattcgacgcccgaattctccctcattggctcgccaccgccgcgcccttgactagcccgcctcatccaatctccctcctcggggtcagggtcctgacggcgacatcctaccgcacacgcagccgcagccgcagctgagaaacaaacagggctgggctgggcaggaggagagcagcggcgggcctgctcgagcgagcgagcgagcaaccagcaccagctccttagtcagcagcagcgacagggggtcggatcaggccgctctctctgctacactcgggcgcctccaccagcagcagcagcagcaggaggatcaaaaggccaatgggggcgcacgccaccgcggccgcggccgccgtcctgctcgtcgccacctgcgtcgcggcggcggcggcggcgccgctgcagcagcacgagcccggcaggatctcaggggacgcggtgggcgtgctggacgacgaccccgtggggaagctgaaggtgttcgtgtacgagatgccgcgcaagtacaacaggatgctgctggacaaggacagccggtgcctgcaccacatgttcgcggcggagatcttcatgcaccagttcctgctgtcgagcgcggtgcggacgctggacccggaggaggccgactggttctacacgcccgcgtacaccacctgcgacctcacgccgcagggcttcccgctggcgntccgggcgccgcggatcatgcgcagcgccatccgctacgtggccaccacgggggccttctggaaccgcaccgacggggc

SEQ ID NO: 104319 - DNA, 454 bp, Zea mays
  Clone ID: MRT4577_26643C.1
gcccctgaaccagggcggtgccatggtgcccggtgacggtgcacacctgtgctcatgtacaccgagcacgaggagaccggaaccaacaaccagatcgccgggctcctgagagagacacgtcctcaagcccgtgatgcctggcacagcacctgaaccagagaataccatctttcacctacatactgagcgggcgctgagctatacctgggaccccacaagacacgcctgactaaccgggccgaggaccatgatactgacccacggagaactgtgagcccacggagtgaggctgcctttatcaggcaggaaccccacacaaggacggaccgaaccggtgcctacttcgacaggaatggccaccagaccatcggggccagtgacctaccccgccggtgcctccagcatgcgtatggcgctattgacttacccaagcccatgtgccactgcgttaact

SEQ ID NO: 104320 - DNA, 262 bp, Zea mays
  Clone ID: MRT4577_26644C.1
accaattacaactacacacacctgaaccttttgtatgagaagtacaacgaccaacgttcggggatccttgcattcccatgcaaccagctcggtgggcaggaccctcgcactaatgaggagaatgtccaccttgcttgtactcccttcaaggctgagtatccaattttcgacaaggtgaatgtcaatggggacaatactgcacccattcacatgtgtgtgaagtgcagcacaggtatgctctttggcgataacataacatgga

SEQ ID NO: 104321 - DNA, 734 bp, Zea mays
  unsure (1)..(734): unsure at all n locations
  Clone ID: MRT4577_26645C.1
aaaagctgagctcgaggnnccgcccctttttttttttttttttgggtgtagatgtatataaccaaatcggcccgcgaagaaacaatggtctgaatttagatctggtcctaccctctaggaaggagctcatgaaccaatctccgtaagggcccgttcgtttccgtcggattgggccgtttctggcctggttccgggcggaataaattggctcggattggaatttggtcggtgtcactgttcccgttcgtttgggccttaaccggaagtaaactcggcccggttttgactttctcttccctccaaggcccgacacaaaccctggcctcgtctcctccggatcgattcctggccaaagcgatggcgagatgctggcgacgcatgaggacggtgcgaggtcactgcatggcggcgcgaggtgacggcgggccggcgccgcgcagccccgacgacgagcctccccggcaccttctcaccggtgagtactgagctctcccatcctcatttttttcttgttcttgatggatatggaagggggcgagagtagcgagcggtgtgtaggcggcggtggaggccggtcgtggccggtggtgacgaggatgagagggtatgcttccgatgaggaatgagaggagcagatccagtggcagggagatttccgttcctgggggatgcagagggtccaatcggattccagggagttcagtcgatgctttcgatggcactatcccggccgg

SEQ ID NO: 104322 - DNA, 161 bp, Zea mays
  Clone ID: MRT4577_26646C.1
atggagcgcagaaaaagaaaaagaataggctaaggcaaaggagggagagtcaggcaagcagaaaggaagaaccagatgctgcgaacggagatgtgactataaataatcgaagagcaccggtcgggcagctaagtgcaccgttgtcacgagctgcgctagcg

SEQ ID NO: 104323 - DNA, 303 bp, Zea mays
  Clone ID: MRT4577_26647C.1
gtaccacttcgtagaggaatgagtcaaggtcggcgcaccggcgaagtccaaggtgttggacgacgacgcctcggcgcgtttcgaagacgcatgctccatcctggagaaggacgccgtcaacgtgtcccttgagaacctcaagtcctagccgttcgtcaaagaacgactggagaaagggacactcaagctggtcggtagccattacgagtacgtcaatggaaagttcgcgacatgggaaccctaagtggtcataggtacaaatacggctcatcggacttatttgccgagtagagagcttaatta

SEQ ID NO: 104324 - DNA, 722 bp, Zea mays
  Clone ID: MRT4577_26648C.1
aactgtctgccctcatttcggtttcccccattccccttcgcacccccgcggcggcggagccttcccgggcgctcaccggacacgcgcaacaacactatgaggaggtacagccccccacaccgtagtcccccgaggaggggatatggtggcagccccgcgcatcgtagtcccccaaggaggggatatggtggcagccccccgcaccgcagccccccaaggaggggatatggtggcagaggaagaagcccccctaggaggggtggatatggaggacgaaaggagcagggttctggaagtctcttggtccgcaacatcccattaagcgccagagcggaggatctccgtgttccttttgaaaggtttggtcctgttagggatgtttaccttccaaaggattattacagcggggagccccgagggtttgcgtttgtggagtttgttgacccttatgatgcctctgaggcccaataccacatgaatcgccaggtattttttggccgggagataactgttgtgcttgctgctgagtcacggaaaaggccagaggatatgcgcactagaactagagtcagggggtactctggaggtcatgaagggcgccgttcctctcattatgggaggtctcgttcccgttcacgctcagcctctccccgccctcgtggcggtggccgtgctcggtcaaggtcatactctcctgctcccagacgcgagatgactactct

SEQ ID NO: 104325 - DNA, 453 bp, Zea mays
  Clone ID: MRT4577_26649C.1
ccaccctatgtgactgacggtgagttttttttggagattccgggcgatacagcccaagcgataaaagcactgcaagccgtctctaaccatattctgtaggctgtggttgaccgtaccgcacctgcatcattcgaaacaactcatactgatatgaggcaagatcacactggtgcttggagtgacatgtcacatgctagatatggttctgcactagtgcatgaaccaccctcagcggcagatgaatctatgattccagggtacagggatgctgcgagtctggaacgagaacctttgctagaacataacatcgatggctgatgcgcatgactctatggacgggatgcagcccagtcaacactacgaccacctgaaagacatggtgcaggtccgctccttacacataaaagccaatgcttgcaggtcccacttacctattgctgagacaggatctga

SEQ ID NO: 104326 - DNA, 377 bp, Zea mays
  Clone ID: MRT4577_2664C.1
attcggctcgagcgaagccgaagccgaaaatgactacttgctaataattcccatttttttctccgaaactcaaaactttttcatttcaagagttatcatgggatcggcttgttgtgttgctgcaaaggatcatactattcccagcactagcagaactggaggtgaaagtttaaatagaaatgctgtatgttcgccaacatggagttttcaatgggatagttggggccgtgttgctggcgaaattgaggatccttcctttcacacatctcacagagtcagcagaaatgtcagcatggagttaaaagggtcattaagctctgaaagaggcaatttatctgattggggaagcacccttgataattctgtaacacccatgt

SEQ ID NO: 104327 - DNA, 671 bp, Zea mays
  Clone ID: MRT4577_26650C.1
tcagcgcttaaagactcgccactgtaactaacttttacatagctgcgaacttcttttaataaccacctagggacttcatacttttctcaagtgaatccacacacgcttaaaattataataagaaaaagcccctcacatagcaccacaatcattttttttttcaaaaaaggtacgcataaaacaaaacatcaaagtggccacaaaagtctctttacataacaatctcctacatcacatttgcttatggtacatgtttggtcaattgcatgaccgttcgtcagaagcaagcccaaaacaaaatccagcctggctctgacctgcaccacattcaacaggccttggaggctttcctgagtccattgctgatgaaccccgcttattgaagccattacatgatgacacctctgcctcctttactatagtagtaggaggggaccgtggtgagcatgttctacttttggcttgcccctgaacctgatggcccttagcagtcccattgcagaatcctgaatcaatatcagactggaacatgtcgacaaaaagctgctgcagctcctcaaagctttcctgcctcatcggccgcggacgggtcatcatctgggtcatctcaccaatgaagtcccccatcccctgcatgctatcctcgtcgtcctcgtcatcggacgcgtggg

SEQ ID NO: 104328 - DNA, 422 bp, Zea mays
  Clone ID: MRT4577_26651C.1
accaacaccatttttttatttgttaggtttttaatttttgaacccccggggaaaggtgttttacaaggtccgaggtcatagtggtgcaataaaatggtaccaacaaaggcccctgatacccataaattgcattaacagtgattcactgcgcacacctgagtaaaacactctaggggtactggccactgctaccacctgctttagcccccccgaccaacagcagtttaataaccaaggggtcaacctacactgcgaccaaacaggctgcgtacaggacaatgaagtagtccaaccccaatgccccaaacagctagaggctgcctaaacattatgtgcgtggtaagccaaacttgatatagatgctaatgaacctctgtcgaaccagattgagacgggaacactacattgccgccgcacagaaa

SEQ ID NO: 104329 - DNA, 1305 bp, Zea mays
  unsure (1)..(1305): unsure at all n locations
  Clone ID: MRT4577_26652C.1
gctagcagnanacagcagcagcagcaggggggagaggagcaaggagagcgcgagttcgaggagatgctgctgcgggagcactcggtgtcgacggacatgggcagcctggactggaagcgcatgaagatcccgccggtgctcacctcgtcgcagagcgcgcggctcttcaagaccatgcagcccatgaaggagagcttgcgagaggagctgcagagggaccccaccgacgcggaggtcgccgaggccaccggcatgaccgtccaccagctccgccgccgcctcgacgtcggccgggccgccaggaacaagctcattaagcacaacctccggctggttccgtacgccctgaacaagtactaccctgacatgggcggcgacgagaggttcgacgagctgtgccaggcgggcgccaacgggctgatcaccgccatcgatcggttcgagccgaggggcggcttccgcatctccacgtacgcgctcttctggatccggcactccatcgtgcgcgccatgacgctgtccagcttcacccgcttcccgttcgccatggagtcggaccggcaggagatcggcagggcccgggaggagctggcgttcgatcgcggccggccgcccacggacgaggaggtgcgggcgagggtgggcctctccccgcagaggtaccgcgacgtgctgcggatggccaggcccacatactcgctgcacgcccggaaccgcgtcacgcaggaggagctcatcggcgaggtcaccgacgccgaagccgtcggggtcgacgccggcggcaagcacgacgcgctgctccgcctcgccatcgatgacctcctggactctctgaaacccaaggagagcctggtgatcaggcagcggttcggcctggacggcagggggaggcgcacgctaagcgaggtcgccggcaacctcagcatctcgcgggagatggtgcgcaagtacgagctcaaggcgctcatgaagctcaagcaccccacaagggtggaatacctgcgcaggtacatgtgatcgggctgagctgagcttcttctgctgctatggaatgcattgtaatccgaattcttctattattattgtataataataatacaagactatagcagatatatagacgaaatgtacgtgtacaggaatgaatggtgtgtgcgtttggggatccagaaaaaataaaaaaaaaaaaaataaacatgtaattaattcttaacgtacatacatacgaccgtcgtttatgtccatttnctagataaagttcaagaaaaaaaaaaaaaaagggcagccgctcgcgttctagacgga

SEQ ID NO: 104330 - DNA, 1878 bp, Zea mays
  Clone ID: MRT4577_26653C.1
ggtcttgatctgttttttttttttgagacaaccttaagatagcatatagggatgctaaaacaagcagtctagtgcaaaacaaacaagtcaccggcggcgatcaataagggttcactcgacacccctaacatttagcaccacagctcccggttcttcacccttaaggccttaacactggctgaatgcgcttactagttcctagtacaacacaatgggatcaaccattggcaagcgttcagattcagacctgatggtggtgtggcaacttgcagcaactgcacaatgatcatcatccaacttgctgcagatggcacaggacaacttcatgcaggaagacaacataacatggtaccttagtgacgacacacttttaactatgggtattaccccatacaatcaccaagctactgtctaacgccatcgcgtggctcttcagccttcacatctccagtgccggggaagcccgcatccacctcccgcccatccagtcacagtgcaacctcagctgcgcatgctcgaactccatctcttccttccaaggcctgaagtagaccgtgcacctcttctcgccgaggaccttggataccacaccgacccaccacgcgtcgttgcagaaggcatcgacctcgtcaagtagtttgaatccatcagtggcagggatatctggagggcaaggtctgatgtgccgtgcttctacagattctttcagaggcttggtcccgtcatcggccttcagcgtagcatactccacgaggaacttgctgccgacagctttaacaacagtcgcctcgaaccaggccccacgaaaaccttcatcgtcgctgcagacttcaaccttgacaccttgtgtaaattttgccttgggcacattctttgattcttgttcccattgatcaccaacccagtcatatcgaagcctcagaaatttctggttcacctcaacttccgtccctaaatgcgttgacttaaatgtgtacttgaattctggaagaacattagtaatcacccctagccaccagcaatcaccttggaatgcttcaacctcatcattgatgcagaaactaatctctgatgcttgtggtgggcgaggcctcacatgcttcacatcaacaatctcctcagacaatgtagtaccgtaacactttgaaagagtgtagtcgactaataggttattcttccagataatctttgcgacaactgcaggtgaccaagcaacaacagaattgtcttccaacttggaaacttcaatttgcattccttttgcatatggcattgtcttgggtatctccatgttatctggggagcgccactcgccgtcaacccactcgaggtgcgggcggacgtcggcggcgtcgaactccatgacctccctggtctccgggaagcataccctgaccttgctgggcgcgccggcgcgggcgagggcgaccccgagccaccaggcgtcgtcgatgagcgcgtcgacggcggcgtgctccgcgggcggggcctccgatgcgggcgcgggcggcggcggtgggcgagggcgaaggctccgcgccggcagtgcctcccggagcgggcggtcggagccctcggactcgaggagggagtcgtattcgacggtgtagccgcggggcttggcgctgggccccacgacgacggcagcgaagtgggccccgtgcaggcctgcctcgtcggggaccacctccacggggtcgcccgggttgaacccctttggcgtctgcggcgacgccgcgtcgcggcggccggggattcgcggcgaccgcatcgtggctagcagcggtggtgagctggtggcgcggcgggagcagcgtgcggcagaggtactggagtggactgactgctccagtcgagggcaacaatggcagaagagaa

SEQ ID NO: 104331 - DNA, 335 bp, Zea mays
  unsure (1)..(335): unsure at all n locations
  Clone ID: MRT4577_26654C.1
ggtgccggaattcgccgggtacgacaccacgtcgtggcgtctagcgaaccatatgaaaggcaccaanntagtgtacccaacccaataggcagcccannaaatattttagcattcgctctatgacctccttaggtcatcttctaggcaagtgggttgcntacccccgcaacnccatnctttgcccaccaatagggctcacaaagcntnncctatangnncttccctttcnnttcccccaatacncnntctcaccnnngcggtgtnncttcaatgggtgtgaaannnacccaatnttgttcaaaaccctaccaggaatcctatacaggnncaatcgc

SEQ ID NO: 104332 - DNA, 1187 bp, Zea mays
  Clone ID: MRT4577_26655C.1
gccggccgccggccgggcgctaacacacatgcatcaacgaagctagctcttgcttctacgagaggatatagagaggaagaacagctcgtctgacgaccagctggtcgatcgccgccggccgagaccatgaagagcagcccacacctggtgctgatcctgtgcctccaggccgctctggtcatgggcgtcttcgccgctttggctaaagaaaatgccatggtcgagagcaaggccatcgacatcaacccggggcagctcaagtgctgcaccaactgcaacttctccttctcggggctctacacctgcgacgacgtcaaaaaggactgcgaccccgtctgcaagaagtgcgtcgtcgccgtgcacgcctcctactcgggcaacaacaagttcaggtgcaccgacaccttcctcggcatgtgcggccccaagtgctagatcagagaggaagaacgcgcgctgctgctagctgctattagcttcgttcttgcgccggccggcccggtgcatggttcacgtactgtgtgttgtgctactacgatacgtactggcttcttgtgtgttggcttcttgttcttctctcgacagtgcaccttgcgcgccaacaataaaccgttgtttgccatgaataaatagtactatgaagttatttgcaaacaaaaaaaaaaaaaaaaaaaaaaaaaaaaaaaaaaaaaaaaaaaaaaaaaaaaaaaaaaaaaaaaaaaaaaaaaaaaaaaaaaaaaaaaaaaaaggggggggaggtatttaaaaaaaggaaacaaaaaaggggtttgggaaaaaaaagcccaaaaaaaaaaaaaataaacttcgtaaaaaaaacgcgccaaaaaaaaaagtaaaaaaccctctgaatgccaacaaaaaaaagggcaaaggccaaattgccccccccccccggggtttccctcttcggggggcaattcccccccccccccgggaacaaaaatttttgaatccccaactaatccgccgccgccaccccggggggtaacccgggaaaccccccaaagaagggaaccgccaaaaatttccaaaaggggggcctccccacccccggaagggggttaaaacccttaaaaatcccccggggttgggccggggtaacaactttccccggcctaaaagggttgggaatcccccccccgcgaatgggaatggccccggggggg

SEQ ID NO: 104333 - DNA, 241 bp, Zea mays
  Clone ID: MRT4577_26656C.1
cccacgcgtccgaaaaaaaaaaaaaggacaataaaaaggaaaatataaaataaagggggataggggggactgaaaaaaaaatgcccattgactttaattgacgctataactacaactttataggaaaatatgttgatgaaatatatgataatcaaatgagtttataattagagatttaatgttaacaagtatccaaaattaatatataaggatactaataatgaaacttgctattttaagt

SEQ ID NO: 104334 - DNA, 280 bp, Zea mays
  Clone ID: MRT4577_26657C.1
gagagagagaggagaaaggcgcccagctcgtagctttggagctgctgcttgcttctagagatcgagcagcaagagctcagctagtggtggctcttgctagtattccccctccttccttttcctttgatgacatggatatgcatccatctccagctggggtgtctaggatcggttgctgcttcttgatcgccattgtcacccagttggtgctgctgctgctgaggtgttgtgtgtgtacatttgttcattaatataataataatctgacgattgtataaga

SEQ ID NO: 104335 - DNA, 261 bp, Zea mays
  Clone ID: MRT4577_26658C.1
aagctcacatctagggtacatcgctcctgggttcgccactcgtgggatgggctatgctactgtcatctgatgacagggtacaaaccaactgtgggacgacaagcacgaatatcacgactgatgatggcggaactactatgtagatatacaaataaatatacccataataagcgtccgtatgtggatataatgtaccagaaattttggactaccgattgtaaatacaaaaataaaaggctgcctgtgtagaaaacctgttta

SEQ ID NO: 104336 - DNA, 245 bp, Zea mays
  Clone ID: MRT4577_26659C.1
gtctctcccactccttagatgtccgatgacgctgacccacctctgaattctactaggggtgcgttgcccttgtccctcttatccacatagcgaggagctcacatgttgcccttttcgtgttgaccttgccacccccgtctctaacatgtaatccccgaccacgcccctccagacggaccctacgaagctggtcatcagccactacacctaggcgatggtgaaccatggtatgcactaactcttgg

SEQ ID NO: 104337 - DNA, 484 bp, Zea mays
  Clone ID: MRT4577_2665C.1
gccggccgggttccgagtacatactgatacccagaacctgtataaggccacgacgcctccggagcttacaatccagcactcctactagaaacgaacaccaatcaatgccatgggaacgtgcattagcgccgccgaaggtgtcgtccccgcaccccaaggacgagctactcctgaaccccttccgctgggtgtaagtgacgttcctcgcagtgagggacttagagaaggcgttgtggatcgtgtagcagaccagcatgctcgagatgagcctgaacacggcagagttcatcctcttggacctctacatctacggcatcctacaaccgaagatgcagtccaagcacaagacggaaaagaacatcaacaccctgatccatgacgaagacgtgcggaacaaggtgctcgcagacctgctcaatataaaacagcgagggattcgcaaactcggtaatcacgtcgactggcattaagtccatgagatcga

SEQ ID NO: 104338 - DNA, 607 bp, Zea mays
  unsure (1)..(607): unsure at all n locations
  Clone ID: MRT4577_26660C.1
cccacttgtcncgaaaaaaaaaaaaaggggagaaaggggaaaaaaaaaaaaaaaaaaaaaaaaaaaaaaaaaaaaaaaaaaaaaaaaaaaaaaaaaaaaaaaaaaaaaaaaaaaaaaaaaaaaaaaaaaaaaaaaagggggggcctttttaaaggatcaaaatttaattacttttaaaaccggggggggggtttttttatggggaaaccaaaataaaatcaattggccgggttttaaaaaagtgaaaattggaaaaaccttgggtttaccaaataaaatcgctttgaaaaaaattccctttacgcaagctgggtaaatacaaaaaaggcccgaaccgttggcctttccaaaaagttgacaagcttaaatggaaaagggaaccccccctgtaacggtaattaaagccctaggggttggggggttaactccaagtgtaacctttaaatttgcaagcgccgaatcccccgttcttttcgtttttttcgttttttttttagaaaattccaaaaaattttccccgagaagcttaaaatggggggctcctttaagggtacaaattaagtttttaacggaccctgaaccaaaaaaaattttataagggggaggg

SEQ ID NO: 104339 - DNA, 205 bp, Zea mays
  unsure (1)..(205): unsure at all n locations
  Clone ID: MRT4577_26661C.1
acgaagccgcacgcggacggaggcaggaccctcgagagcggccgccccnagcgcccgggggggggccccaaccgagcggccgaggggcaaaggagagagcgcaacgcacagcagcgcaagcgagggaagcccaagaggacaagggggcccacagaacggcnccacgcacaaggggacgccgcgccaaacggacaagcaaagcagg

SEQ ID NO: 104340 - DNA, 237 bp, Zea mays
  Clone ID: MRT4577_26662C.1
cagttccggagccttcagtgaggggtagctacatgccccatgcctgccctttctttccttctttgctcactttactatgggtgtattttaatcttgtataaaaatatgcatgaatgagtcatgcacatgtatacgttatgtatttgacaagtggtggtgaaacaaaatcaaaacagatttgatttgtgtttttgaaatgtcagtacattttgtgccactaacactgtgatgtataaa

SEQ ID NO: 104341 - DNA, 333 bp, Zea mays
  Clone ID: MRT4577_26663C.1
aaaaatcttcccaaaccctagctcccgatcttgatggcgaaccctcgcgtcttcttggaggtgacctttggcggctcccctgcagtcctgatcgtgatggagctgtacgccaactaggtgcccaagaccgcggagaactttcgcgcgctgtgcacgggcgagaagggcgttgggcaagtcctgtaagccgttccactacaagggcttcacgttttaccgcttcatcccctatttcatgtgccatggcagcgacttcacccgctgcatctgctcctgctgcaagtccatctactgctagaagttcctcgactagaagttcgtgcgcatgcacat

SEQ ID NO: 104342 - DNA, 365 bp, Zea mays
  Clone ID: MRT4577_26664C.1
atctactttatatgcatacctttagttctcttccacgttcgagagatagacagagactctatctctccctcgaaacgccgtgactcatatccactgccttcccgcacgcctaggtaacgagaagaaacgtcaaggaattaaaggacctgcaaaaggaccctgcaacgtcatgcagtgcaggatcctgctggtgaggatatgttccactggcaggcaaccatcatgggtcctcctgatagtccatatgctggaggagttgctcataatataccttaatttcaccacccaaataaacctcctctacctccgcttcccccccctcaataattaaactccatcacaactttatcctctcctcccccaaa

SEQ ID NO: 104343 - DNA, 343 bp, Zea mays
  Clone ID: MRT4577_26665C.1
gataagcacacactacattctttggcagctgctgcagctgcagtggttaagcctgggaaaggaggtgaaatgaaaatcgcagacaatgaggtaaagactgaacaagatgaaaactcagaggaacgagattttccaaagatcaggaggctttcagacctgtactgtaggccttcggaggacagcactgaaatttcccagcctatgcctgcacgcttgcccgacaagtttcaggagcagagacccgagaaacgtcttgtgcatccacgggaggaggtcgggcggcgatgatacctacaaaggggccgatggcagcatcgccaggtggtcgtctggatagcgagtg

SEQ ID NO: 104344 - DNA, 187 bp, Zea mays
  unsure (1)..(187): unsure at all n locations
  Clone ID: MRT4577_26666C.1
gaggcgaatcagtagcttcgctccggcctccgggggntccgcggctccgctagtccgctccggcgccacggcccggctcggaggggcgtttcgggnagggcgaanggacgcnagcgtttccgtttggttggcntaaggnnanctgttgttgnnagcgaaaccgggtttccnncggtaaanaagggcc

SEQ ID NO: 104345 - DNA, 528 bp, Zea mays
  unsure (1)..(528): unsure at all n locations
  Clone ID: MRT4577_26667C.1
tctttaagatcaagtgtagtatctgttcttatcagtagactgcccctgctttcatgtcatacttcttaggacctggcaatctattttgacctgtattgctcttcttgtttataggcacatgctgttttagcgattttgaattttagtgagaattgtacacaagaaatcggcgaagcatcatggctcctgacgaagcaatgtggtactatttttagattgccaacacagattacacttttcctgggaggcccatctgcttgtggcccagagcagcccacccccgcgcgccgtaccccttagcgcacagcctcccgtacgcgccctcgtcgtcccgccgcgcgcgctccacggcgcggacgatgtccttgagctccgcgccggtctccgcacccgggccacggaggcgctgcagcgaggcccgggccccgtcggcgtcgccgcgcaagatgaggctgctgngggtgtccggaacgagcaaggcgcccaggacgacgatggcggctgggacggcggcgaggccgagcgaca

SEQ ID NO: 104346 - DNA, 174 bp, Zea mays
  Clone ID: MRT4577_26668C.1
tctatcacacgcccgaccacgcatccgttgggggggattaaacaggcctatagccctactacaaataagagccggaacggtcgcctaataatttcctgtaacttgagcaatattctatattgagggaaccaaacacccccaatgatcacagtgcagtaatcatggagaggtagg

SEQ ID NO: 104347 - DNA, 163 bp, Zea mays
  Clone ID: MRT4577_26669C.1
ctatacatcaagcagcacaagtagcacagcaggtttcaagtacaagaataagtacaaggaatcgaaatgtacagcctgaagtaaaccagtcacaaagttatgaacaactaaggcggcaaaagaaaagcacagaaaatgaacaaagcatgacaagagatgaaaa

SEQ ID NO: 104348 - DNA, 365 bp, Zea mays
  unsure (1)..(365): unsure at all n locations
  Clone ID: MRT4577_2666C.1
tagcgggcnctagtacgtctcaatataggcgaatgatagtacgactgcatgtactggacgtgactttccgggattccccactcgaccgactcgtccgcaaaagaaggcacgcagggatctgatctatgtagtaagactgctgtaggagaaagccatactattgcccttgcctcttgaattcctggaggttggttgtacatcctcttctcttcgcctccttctctctctcgctctctattcggtttgcatcgttgcgtctactagagtctagtcgtcgtgtgcggccattgccaccatcctggagaacatccacgaggcgaggttcctgccgaccaggccgctcaaggacgaactgcgcagcttcc

SEQ ID NO: 104349 - DNA, 201 bp, Zea mays
  Clone ID: MRT4577_26670C.1
ctacaacggcaagtggctcaccgctagggccacctggtacggtcagcccaaacgggccggggctcctgacaacggccgtgcgggcgggatcaagaacgtgaacctgtgcacctacaagggcattactgcgtgcgggaacgttcccatttttaaagaccggaagggcttctggctaagcctcgaagtgagaatccagggaaa

SEQ ID NO: 104350 - DNA, 411 bp, Zea mays
  Clone ID: MRT4577_26671C.1
gaataaaaataaataaaaaaaaaaacaatataaaaaaaaacaaacttacaaacaacaaacaaacaacagaggtggctgttctatagggagacctaaatttacattcctgtcccatacaattacaaccttcattactggtaaaaccctaacatatcccaacttcatccccttttagcccatcccctcttttacacctggccttatctctaataagtcccctccgatcacctttctcaatagttgcccaatcttaatgtcaaatgggactctccctttatccttccatttaaacacccttgtctttttttattattacatcgtgcctgctacaatttttttaatcctttctttcttatatttttactatctatatctttctttcttctacacattcgcctgaccttccccttc

SEQ ID NO: 104351 - DNA, 332 bp, Zea mays
  Clone ID: MRT4577_26672C.1
gagcacaacatattgttttgtacatattattcaaatgttgtcgattaaaaagtttatacaggggagaaacgggggtacacccaaatagagagggcgggcctaaaaaagccaaacatattgccttacagcggggctcccattagacgttgagacatttttgctgccttccaaacataaaccccacaaagggattactagcagggattatagctctcagtgtgtggaatcacgaaaccacccaagaccatattctactgcttggaggcgtgcactggggacacggaacagaccatggactggaccccgaacttgttgctaacgggggaacccct

SEQ ID NO: 104352 - DNA, 408 bp, Zea mays
  Clone ID: MRT4577_26673C.1
aaaaagagctgttctagcagattgtatatgagtacctttagctttgccgagagtagtgatgaacactgtacctaggtttaggcgccttatctgggtggttcatgactacatgagcaggcttttacttttttttaaatgggaaaacccttcttttagaggggggagtgttttttttttaaatttcctacctcccatattggtgtggatgggtcactgcgctatgccattttgtctttttacacatatgcaatgtctaaatggttaatgatatttgttcttgattacacatctgtacactttctctgtgtgatccacactgagtatcagctgattgttatttcttatgatggttttgcgagtctttttacttgagattgcctctctaaagatgatctttagactcccaac

SEQ ID NO: 104353 - DNA, 307 bp, Zea mays
  Clone ID: MRT4577_26674C.1
cggttttattgacattttcagcaacaccaaggtggccattagcaatattcaggacataaccatgagcaacaacctcaacaacaataccagggtcatgacaagcagcaacaaccacaacagccacagaaatatcagcagggccaggaaaaaacacaacagcaacaatgtcattgccaggagcagcaacaaacaacaaggtgcagctataactactataacagtagctcaaatctaaaaaatagacatgaattcctaaggcaacagtgcaaccctttggtaaatgcctttctccaatcacgtttgatac

SEQ ID NO: 104354 - DNA, 198 bp, Zea mays
  Clone ID: MRT4577_26675C.1
atggcagtcgaagttacaggatgctttacggccggttcagcagtaccgatggtttctgtggatagcatgaaggatcatttactttccaaagcaaacagtagatggaagtcgaacgctgttccaactcaaccaggacactccattgcaactgcattatgccgatcatcacatggcacttgtaacataggcttggtctaa

SEQ ID NO: 104355 - DNA, 432 bp, Zea mays
  Clone ID: MRT4577_26676C.1
ccccgcgtccgtctgctcagcatggcagctgcggcgctcggcgctgtgcgcttcttttgctgctgcggccctcttcggtgatcgggcactctgcgtgagcctgggggacgtcaactgactccttgagcccatgctcgctgcctcatgtgatgagcaagcgctacctcctgatggcttgctcatccatgatgatcttatctgtctcctgacggtaactgcccatgggtcgctacatgtgcatgcctgcaagaccttcgctgatgcacattgtctagaatcattcagatagagctgcttcctggactgctgatgctgtgcgttgttagcgccgcatagagatgtaaagagagagagatgctgatggatgcgccgatagattacattcatatctgctgccagtgtacatcttgcgaaccactccagcctaattat

SEQ ID NO: 104356 - DNA, 1241 bp, Zea mays
  unsure (1)..(1241): unsure at all n locations
  Clone ID: MRT4577_26677C.1
gtannccctcgaggggccggccgggaaaaaaaaaaaaaaaaaaaaaaaaaaaaaaaaaaaaaaaaaactacgacgcggcccgattgtcccaaacgaggccggccggggtctctccaccacccctatcaaccccgcacgcgacatcaatagtccctaccattcggcgaacgtacaaatcaaagtgcggcgtgcccgctcgcaaacttggagtacgtactgctactccggctcgtcctcctctcttctccatcgccgttggttctctcacgccacacggtcatccgatccctgtccaccgcgttgggagcggcgcagcccatggacgacaacgagagagagaaagagaatgagaatgagaaggagaagcactacgggactgacgtcgaggatgaagaagaggacgaggaaggtaacaagcgagtcgtggtgcttggcccccaggtccccctcaaggagcagctcgagctcgacaaggatgatgagagcctgaggaggtggaaggagcaactccttgggcaggtcgacacagagcagctgggagaaactgcggaaccagaggtcaaggtgctggacctgacgatcctgtcacctggcagaccggacctgatccttccgatcccgttccaggctgacgagaagggctatgcgtttgccctcaaggacggcagcccctacagcttccgcttctccttcatcgtctccaacaacatcgtgtcaggcctcaagtacaccaacactgtctggaaaactggagtcaaagtggagacccagaagatgatgctggggacgttcagcccccagctagagccctatgtctacgagggcgaagaagagaccacccctgctggcatttttgcgagaggttcttattctgccaaactaaagtttgttgatgatgatggcaagtgcttcctggagatgagttactactttgagattagaaaggagtggccaggaactcaatgatgtgtggaccagcatggctgactcgtcggagtatgttagagctcatagctaagccaagcacaagatgtggactcatcttcaagaatgattttcattcgctacttcatcgttaatcgcattttaatttgttttgaattgtcattgtacgtcgtttatgacataaaactgtttattcatcacatatataattcatgtatcgagatatatattcagatattttttttagtgttattgttcaatttctcaacctgatgcacataggattcatttacctt

SEQ ID NO: 104357 - DNA, 112 bp, Zea mays
  Clone ID: MRT4577_26678C.1
gatggattatagatcctgacatatttatcttttattttgcaagacttccgctgtgtaataaggactctgattatattgtgtcatttatctctattcaccttgtgattttatt

SEQ ID NO: 104358 - DNA, 219 bp, Zea mays
  Clone ID: MRT4577_26679C.1
tgaacactaaaactatgaaacaattactttttatattaaaaagaccatggatttaacttatgaaaatccaaatgcaggatagtaatttttgtttacttttttaaccaaactgaatttttgaaagactattgcaggtgtttaaaaagaaagaaaagttgttttatctaatactgtaagtagttgtcatattctggaaaatttaatagttttagagttaag

SEQ ID NO: 104359 - DNA, 118 bp, Zea mays
  Clone ID: MRT4577_2667C.1
agaaatagaggtagcccatttccttgggcaggtcaacagatactgggaccttggtggcggtaaaaaatggccaccttccggctttgaggacatgaactacgtaatgcccggagggggt

SEQ ID NO: 104360 - DNA, 205 bp, Zea mays
  Clone ID: MRT4577_26680C.1
ttaatatttaatccagcgctaggaagaagtaggcggtgtcttcgacgggggtgagggcatattagatcattttacacactaatttcttgttcacagaggtgaagacttaactgtaccatgcaggcctacacatgctcaattcctaggtaatggaggctataatgatcgcggttttcttttgagcaacggttactgttaggtagcc

SEQ ID NO: 104361 - DNA, 407 bp, Zea mays
  Clone ID: MRT4577_26681C.1
cccacgcgtccggcttcagcgtttttcgcgttattatttacataatgtgacgatcaactggtgcccagccaaaagagcgattgaagacttgatcatcaattcttcggattagcctgcttctcgtcctccagcatccttcttggcatctctttctggagcagcgcccacgagttcaacgaaaaacaacattgaatgaagatattagcgacattgatgacattctttccattaaaacaattatcatttctgattttccagattgtccataaaactgcactacagccagatgtcaaacatctctttagcatttcttggaaaggatggagagttcttcggattaactgattttttttgaggccacacaatcagtttaattcttcggattaactgattttccagattaactg

SEQ ID NO: 104362 - DNA, 363 bp, Zea mays
  Clone ID: MRT4577_26682C.1
aaaacccaagcctggcaaatgcttttatttatgtcccaacaaatttaagggtctccctttgggactgctttactcttacaggaaaacaaggggggagactttggacttcctgacctaaataaaactttgggcctgggaaataaaaatcaaacccagttcctccctggaggcagtaattttattgattcccccccccgggggcatactgggattagcaaaccccaggccttgttaaaatcttggggttgcgcgcaatctttaaccacccggtggggaaaaaaccaggcttgtgaacccttttttacgtgggagcgccaaaatatttttttttagccctccccaggttggggggaagcctttccc

SEQ ID NO: 104363 - DNA, 238 bp, Zea mays
  Clone ID: MRT4577_26683C.1
ttatttattatgcacccaatacaaccgagcgggggctttaaattacatggcgggccatgcacacctaatgacaagggaggttaccttggatcgaataaagggacatggaatgaagcttatatattgaggctgctccactgtgcggaagctccatgcattagggcaacaaccaaacctcctcgtcagggcgtgtaaagaaggaccatctctgttccgagagcacgaagcaaatgagggg

SEQ ID NO: 104364 - DNA, 362 bp, Zea mays
  Clone ID: MRT4577_26684C.1
agttggttcacagtatggtttatagcaaattgtggtcttctgcaggttgtcctgtatactgtttttttttacaaagcatcgtgggacgaagggtccccacctgatttcatactgataaattggaggggtaacctcccatgggaagggcagcagatcgactggttgcggaggatatcaactccaacgcttgtccagagggggtgacgatgctgttctgtcggtagcagcagcgtgttggaggagcttgtataatcttgtgatcttcagacttccatcaggcccaatcagtggacttttcctctcatcatgttggtcagtgagggagactgagttgaccaaggtttcaatctccatcagatcct

SEQ ID NO: 104365 - DNA, 210 bp, Zea mays
  Clone ID: MRT4577_26685C.1
ttccgacagaacgcccaatccgaagcttctctacgacggagatgggcgattagttagtgacgtatgacaccacacggattcccgactgcacatgggatcccgagtctcccgcgactagtgccagttacctcactcttcagggctacccacgcttccacacttctatgctgtccggcgtctgcactgttcgtgggggaatggtcgagcaga

SEQ ID NO: 104366 - DNA, 649 bp, Zea mays
  Clone ID: MRT4577_26686C.1
cgggattagcttatatctaggatcatcacatattaattgaatttgcatagaattgagaaaaacgagtgatcttagaataaccttgaccattttatggtcatcccatttgatgctcccgaggttgcgcacttgattcaccaaggtcttgagccggttgtatattgcttgtggctcctctccggcccagttctgctgcttcccatgccaggatctgatggagattgaaactttggtccatgatgagaggaaaagtccactgattgggcctgatggaagtctgaagatcacaagattatacaagctcctccaacacgctgctgctaccgacagaacaggtactgactttgtctggggcacattctcaccacctaaagtaaagatcttcatctggactctgatccaagacaagatcaatcacaaaaaaaaggggtgatcgccaatgcaacacgtgatctatgccactccgctgatgaagattctgctcacacgttcctccgttgccccagcatcgtcacccccctctggacaagcgttggagttgatatcctccgcaaccagtcgatctgctgcccttcccatgggaggttacccctccaatttatcagttaatgaaatcaggtggggacccttcgtcccccgttgctttgtg

SEQ ID NO: 104367 - DNA, 531 bp, Zea mays
  Clone ID: MRT4577_26687C.1
gcacgggaggatatttttaaggctaaataatcaaccatccattgaattgacagcattgagccaatacacgtttggtccgttacagccggaacacacaaagagctgtgcagtgcatgtcgtgtgcagcaaaaaggtaacatatggccgtatagaagtcctgtaaaggaaacgcgatacagaccctatggcgtttgacactgtgctcggcctaatatgcgacctgacaatcgttttggaccgagtcctgaacttcatgcctcgaagcgcggggatgctgagcatatcctctgtggtgtttatgggaacaaaccatagcactcttctgtaccaaagacctactacaagttttatttccatcctaggccgtattttcatgaaacctacttttttctttcacctacctgtatacaaccacagttacccgtaacaagagactcttgcatgccaatgaaacatttgatgctaaacgcaaatgctaaattgagaacaaactcatgaatagacattgattatccccaaaacatctggaac

SEQ ID NO: 104368 - DNA, 836 bp, Zea mays
  Clone ID: MRT4577_26688C.1
attgggtacctcgaggccggccggggcccctgtctgcccctgcccctgcccctgcctgcgctcacacgctgcgatgcctgccctcgcccctgcgaatctcgcctacctcgcccctgcccccgccaatctcgccgccaccgttatctcaacccctgcaccgcctcctatccagcagcaagcgccgccgccgcctcgccgcgcgggagcgggagctgaactcgactgacgatgtacctgccatcgttgtcgtgtcagtccatggaccccgccgccgtcgtgcgcagcaagtaccatcgccgtccacaccaagtcgtgcccccgctcccgtaaccacagtcgtgccctcgccccgaccccggatcttgtgattgtcgctgtgccctcgccctagctcatcatccccctttgcctccctcccagcgttgtgctctcgtctcgtgactaccgccgggccgggtggcagagacgacactgggaggggagcgttttgcgtcccctttctcctcaccctctccgtcgtcgtctacgcttccatctcagcgtcgtctctgccaccctcaccctttgcctccctcccggcgtcgtgtttgccggcctgcccctctgcctctacgctgtctccgtcgcccggccagtgccgccgctctcatctcgacagtcctccgctcgtctgacgtaccaatcgatgaagttgttggagaggcagtccaagaagtccccggagaagttgcgactgtcacagcccatgcagcgggcgggctcgctgatggccaccagcgtccttccaagcatggccggcaccaccaccgtcgtccttgtcccgtctcgcggctgct

SEQ ID NO: 104369 - DNA, 343 bp, Zea mays
  Clone ID: MRT4577_26689C.1
ggccgcttttttttttttttttttctttttttttttttttttttttaaacacaaaagctgctcatgataacacaaaattgtgctcttgttcgccacaacacaatactatacccaaacacacagcattgtcttaaaaaacacagcataaccccgtctgggctcttttaagaacacaaaagaggcgaagcaaatcctccccaccgggtagatcaaatgaaaacttatcctcactgcgctgctctcccctctcctcttcttttcttatatgatctttccctttattatataatgtgtttctagatgtgatattgctcatgaaaaatctttttttttttttccaaac

SEQ ID NO: 104370 - DNA, 1650 bp, Zea mays
  Clone ID: MRT4577_2668C.1
cattgggtacctcgaggccggccgggacttctcgtgcgaagaagaaagtgttctcttgcttgatccgccattcagaagccggccactaatccgagctaggcacgctcccatccgacgtcgtcccagctagcacagccatttccgtttcgtttcttccactgcagtcagaactcagaagcagaggccgccgttgcaagcatgccgccgatggaggccgccgaggacgtcgtcatcgtcggcgccggacttgccggactcgcggtggctctcggactgcacaggaaaggggtgaggagcctggtgctggagtcgtcgccgtcgctgcgcgcgtcggggttcgccttcaccacgtggacgaacgccttccgggcgctggacgccctcggggtgggcgacaagatcaggaggcagcaccagcaggcgcaggcgctacgcgtcatggcttcttccaccggagaaatcgtacaggaagtggacctgacgcagcaggggaaacgagggcccaacgagatccgttgcgttcggcgggacctgctgctgcaggccttggaggaggagctaccgagaggcgccatccgctactcgtccaggatcgtgtccatcgaggaggaggacggcaacggcgacaaggtcctgcaactaaccgatggttcagtcatcagagcaaaggtgctcgtcgggtgcgacggggtcaactccgtggtggccaaatggctcggcctcgccacgccgtcctactcggggcgctcggcggcgagaggcttcgcgcgttacccggacggccacggcttcgagcccaagttcctgcagttcgtcggccacggcttccgctccggcatgctgccgtgcaacgacaccgacatctactggttcttcacctggactccttccgagaacgacaagggcgtcgacgagagcgcggccaagatgaagcagttcgtgctggccaagctccggggctccaataaggtgcccgcggaggcgctggcggcgatcgacaggagcgagatgagcgacgtgctcgccgcgccgctgcggttccggtcgccgctgtcgctggccaccgcgagcatcgccaggggcagcgcgtgcgtggccggcgacgcgctgcacccgatgacgccggacctcggccagggcggctgctcggcgctggaggacggcgtcgtcctggcccgctgcctcggcgacgccctgctgccgccgccagctggcagtggcagtggcaggggcaaggaggaccgggtccaggcggccttgcgcgagtacgcctggatcaggcggtggaggagcgtcgagctcgtcgccacctcctacaccgttggcttcgtccagcagagtgacagcgcggtcgtcagcttcctgcgggacaggctcctgtcgggagtgctcgctcgaaggcttctgaaaatggcggactacgactgcggcacgctcgaaagctactagcccccttgtactgtttcctgtgtgtacatcagtacacgtgttgtgttgtgcctgctgctggaataatatgcctactgttatgtgttattagtagaaaattgtactgcaatatcatcacctctgttgcacattttttttctacccttgtttatgcatagcataggaaccgtcacatcgatgtaacttttgatttctctgctt

SEQ ID NO: 104371 - DNA, 293 bp, Zea mays
  Clone ID: MRT4577_26690C.1
ccgtggttttttgttttagcatgaaacgggaatttcagttctcatagcattatcatgaatctcagaacataacaggtgaaacacgaatcaagcagaggcgccttggggttcacagatccacacctaaacctttttttttaaccgcgagcgttttttggtgggcggagaccaccactcaggtcaccaccatcttattccgatccgaaggaacggccgcagggggagtgggcgatgacggggggagggcgggcgttcagaccttttcagggagatctatgagagctgtcctgtag

SEQ ID NO: 104372 - DNA, 366 bp, Zea mays
  unsure (1)..(366): unsure at all n locations
  Clone ID: MRT4577_26691C.1
cgaacatagcgaccgacgacacaagaaggcaagcgggacgagcacagagccgagccaggggcgcaggaggagcagnagcagccaagggggcagacgagacgaccaaaccggcaaaccaagaagacagcgccgagagcaaggcccggaagacngaccagcngangcggaccgacaaggggcaggagaaagcacaagcgaggcagcngcggaacaacgaggaacncaagaggagccaggcgagcaacnacggagaccgagcgcagcgaggaccgcaagacggagagcgacggcaacacgcggacgaggaagcagcacgacgacagcacggcggacggaaacacaaacgagcgggcgggcagaacgagg

SEQ ID NO: 104373 - DNA, 316 bp, Zea mays
  Clone ID: MRT4577_26692C.1
acgcagccggtttcgccaccagtccttactggtgatctgagaggtgacatggcctgtgtggatgacgttagaaagctcaaggtactggttaacgccgatactaatgatgatgcattgactgctccaaacactggggcacacggaattgcattatgcctgacagaacacatgtcctatgctatatactataggattaacgatatcatgcagattattatggctaccacgcttgatctgacgcatcaggcgctggaccgtctgttgccgcatcagatgtctgactataaatgcattttccgagctatggatggactta

SEQ ID NO: 104374 - DNA, 568 bp, Zea mays
  Clone ID: MRT4577_26693C.1
cggcacgaggtcaactgaaaattaaccatgcgcgacgtgggctaaaatcacgtgtaatttggtttgtctgggccttgagtggtatagactcaagagttctttatgcccctggcagtctgtaaaaggagaggttgagccagaggacgatttattggggaggagccgaagagggccagcctaactgttgctgtagtagaaggaacagggctgcggtgatgtttgcacctctctcatggagatggagacatggagtagcccttggttgcgttctggggtcttggcctttgtgtgccagacagggaggagagagagagcctggacatcaccgtcccttttcctctctcctttcactgcagagtgagtaggtacggcgcgtgtgtgcttgctgggaacaatggtggcaaatgccacgacgccacgtaccggcctagcaataggtatccttaactagtaaggtgtgtagccgtgtagggagggaaggggatctttttgcgctgctgaggctagaatagacatgtgtagatgctgcgtctactgacaaaagtgcctttggttcgttgtaagctgg

SEQ ID NO: 104375 - DNA, 988 bp, Zea mays
  Clone ID: MRT4577_26694C.1
aattcggcacgaggcacccatcaccccttccttcctttccattctctgtcgccttcgcccctccaaggttctctgattccagacgcaaccccgcggggtcaaggagccagagggggggtgcacagcgatcgttctgccggagatcgaaaccctaaggtagggtttgaggcgccgggctgcggccgccgagatgtcgacgccggcgaggaagcggctgatgcgggacttcaggcgcctgcagcaggacccgcccgccgggatcagcggcgcgccgcacgacaacaacatcatgctctggaacgccgtcatattcgggccggatgatacgccttgggacggaggcacgttcaagcttaccttgcagtttacagaagattacccaaacaagccaccaactgttcggtttgtctctaggatgtttcatccaaacatatatgctgatggaagcatctgcttggatatcctacagaaccagtggagtcctatatatgatgttgctgcaatcttgacttctattcagtccctgctgtgtgatccaaacccgaactcccctgcaaactcagaagccgcaagactgttcagcgagaacaagcgggagtacaaccgcaaagtccgtgagatcgtggagcagagctggacagccgactagtgcataaggatgctcgtcgtgcccgataggggcacaataagaaagcgtgaaaaaaaacacacccactccttgtgtttctagttcgccaggcttgtcgaaacattgaagaaccccagtgattggtttgtagtctgtcgtcgtcgttctgccccgatcaagagccccggttgctcatggtggtggctgtcgtaatgtagcggttgttgacctatcttctcatgaattgaaaggatcctgcctatgtacaaaaattatagcgtgggaatggttgtttcaaaaaaaaaaaaaaaaaaaaaaaaaaaaaaaaaaaaaaaagtgctctgcgttgttaccactgct

SEQ ID NO: 104376 - DNA, 1040 bp, Zea mays
  Clone ID: MRT4577_26695C.1
gccggcctgtccggggacacattccgcccacccatcaccccttccttcctttccattctctgtcgccttcgcccctccaaggttctctgattccagacgcaaccctgcggctgcggggtcaaggagccagagggggggtgcacagcgatcgttctgccggagatcgaaaccctaaggtagggtttgaggcgccgggctgcggccgccgagatgtcgacgccggcgaggaagcggctgatgcgggacttcaggcgcctgcagcaggacccgcccgccgggatcagcggcgcgccgcacgacaacaacatcatgctctggaacgccgtcatattcgggccggatgatacgccttgggacggaggcacgttcaagcttaccttgcagtttacagaagattacccaaacaagccaccaactgttcggtttgtctctaggatgtttcatccaaacatatatgctgatggaagcatctgcttggatatcctacagaaccagtggagtcctatatatgatgttgctgcaatcttgacttctattcagtccctgctgtgtgatccaaacccgaactcccctgcaaactcagaagccgcaagactgttcagtgagaacaagcgggagtacaaccgcaaagtccgcgagattgtggagcagagctggacagccgactagtgcaggaggatgctcatcgtgcccgaaagggcacaataaggaaccatgaaaaaacatccttgtgtttgtggttcgccagacctgtcgaaacattgaagaactctagttctagtctgtcgttgtcatggttttggtctgatccagagcaccggttgctcatggtggtggctgtcgtaatgtagcggctgttgttgacctatatcttctcaagatttaaaatgatcctgcttgtgtacgaaaactatagcgtgggaatggttgttcgatgggccaaaaaaaaaaaaaaaaaaaaaaaaaaaaaaaaaaaaaaaaaaaaaaaaaaaaaaaaaaaagggcgccgctcgcgattaatacgactctctatagggtgt

SEQ ID NO: 104377 - DNA, 939 bp, Zea mays
  Clone ID: MRT4577_26696C.1
atgtcgacgccggcgaggaagcggctgatgcgggacttcaggcgcctgcagcaggacccgcccgccgggatcagcggcgcgccgcacgacaacaacatcatgctctggaacgccgtcatattcgggcggtaccctagaaatacatggggtacaagatatttggttgccacaggaactaagactcatttggcacctcatgactgttttagcatgttccggccatttaatctttcatgtccgtattggggagcattcggctcatttagctatcggttgaaatttgtctttggagcatatgtctctgcagaacacagggtaatcataactaaactaaaaggcacgttcaagcttaccttgcagtttacagaagattacccaaacaagccaccaactgttcggttcgtctctaggatgtttcatccaaacatatatgctgatggaagcatctgcttggatatcctacagaaccagtggagtcctatatatgatgttgctgcaatcttgacttctattcagtccctgctgtgtgatccaaacccgaactcccctgcaaactcagaagccgcaagactgttcagcgagaacaagcgggagtacaaccgcaaagtccgcgagattgtggagcagagctggacagccgactagtgcagggggttgctcatcgtgctcgaaagggcacaataagaaatcatgaaaaaaaaaaccctgcttgtgtttctggttcgccaggcttgtcgaaacattgaagaacccagtgattggttttctagtctgtcgttgtcgtggttttgccccaatcaagagccccggttgctcatggtggtggctgacctgtcgtaatgtagcggttgttgttgacctatatcttctcatgaattaaatggatcctgcctatgtacaaaaattatagcgtcggaatggttgtttgatggacccctg

SEQ ID NO: 104378 - DNA, 179 bp, Zea mays
  Clone ID: MRT4577_26697C.1
tatcgagaataataaattttcttattttaccaccccgaccgtccccgcgagtcgggctatttttctttccgttacccacctttatctcattctatgctctagctaggcaagctagctttgcatggattcacccgctgttgcatcgacgctgttccaggaccactcttgccgtcgctctt

SEQ ID NO: 104379 - DNA, 804 bp, Zea mays
  Clone ID: MRT4577_26698C.1
gccggccgggcggggaggtgcccctgtttcggctacagtgcacattgctaaacgctcccgcagtcccgccgtctcgcaagccgccgccgggtccttacgcaagtccgcgacgtgcatcgcctggagaggctcccgtctcgccgccctgcggatctcatctcatctgtgcagccgcgcgtggcccaacggagccagaagcaaagaggacgaaccttattcttcaggtgatatgtcgtctgaggagggtgcgcaggtcacttgtttcacagaggatcttcacgatgtaacacttcactttcagatagtgaggttttctaaacagatatacgtgtgggttggatgcaacacagcaaagtttggccatttatatgctgctgcaaccactagaccggataacagagtgagtgttacctctgtactaggaggaacatctgataacaccggatcaagtatggctcgccgtctagtgctgaagaccggcctgaacatagtcctggcatgcaacatcccaaaggacagccccatacttgaggctgctgcggagaggaagctggttgagaagctgaaaggtttgggctacattaaaaccccagctgtggaggctaacacttcctcggcacaatgatccgtggtgtgatctagtgagctttcggtcgacgtgtagcttcatcactacatgcagcagagagcgggtgtgatttttcgcgggctttgactgtgctacctgttctctcatgtggcaaaggttattgtgaacatgttcgttgtgatgcaaaaaaaaaaaaaaaaaaggcccctagggcc

SEQ ID NO: 104380 - DNA, 1896 bp, Zea mays
  Clone ID: MRT4577_26699C.1
ttcggccgggaagacacccgacgcgtagcacagtccattattgccgtctcccttttgcgtgagcaaagaaagagagcgagaagagcagtcgccatgtctggcatcatccacaagatcgaggagaagctccacatggggggcgaccacaagaataaggaggaggagcaccacaagaaggccgaggagcaccacaagaaggaggagggggagcaccacaagaaggacggcggggagcacaaggaaggcatcgtggagaagatcaaggacaagatcaccggcgagcacggcgacaagtccggcgaccacaaggagaagaaggacaagaaaaagaagaagcacggcgagggccacgaccacgacggcggccacagtagcagcagcagcgacagcgactgagatctggtgtcgcagcacaggtgcaacacatgtatgcttgctggatggaggattcataccagctgatgctgatgtagtgtttcactggtgtcatgcatgtatcgtgctattataatcaaaaagaaaaaagaaataacagtcagggatggtttgtttgccaaaaaaaaaaaaaaaaaaaaaactccctccgtccctcgaagcttctctggtttcagacgcaaccccgcgggtcgcgggatcaaggagccagagagcgggacgcagcgagcgttccgccagagatcgagaccgtagctagggtttgaggcgccgggctgcggtggacgagatgtcgacgccggcgaggaagcggctgatgcgggacttcaggcgcctgcagcaggacccgcccgccgggatcagcggcgcgccgcacgacaacaacatcatgctctggaacgccgtcatattcgggccggatgatacgccgtgggacggtggtagtttgattcggaattgtgcaggtggaaccgtagaaattcatggggcgttaagatatttgggtgccacaggaaccgagactcgtctggcacgttcaagcttaccttgcagtttacagaagattacccaaacaagccaccaactgttcgatttgtctctaggatgtttcatccaaatatatatgctgatggaagcatctgtttggatatcctacagaaccagtggagtcctatatatgatgttgctgcaattttaacttctatccagtccctgctgtgtgatccaaacccaaactcccctgcaaactcagaagcagcaagactgttcagcgagaacaagcgggagtacaaccgcaaagtccgtgagatcgtggagcagagctggacagccgactagtgtgcataaggatgctcgtcgtgcccgataggggcacaataagaaagcgtgaaaaaaaaacacacccactccttgtgtttctggttcgccaggcttgtcgaaacattgaagaaccccagtgattggtttgtagtctgtcgtcgtcgttctgccccgatcaagagccccggttgctcatggtggtggctgtcgtaatgtagcggttgttgacctatcttctcatgaattgaaaggatcctgcctatgtacaaaaattatagcgaaaaaaaaaaaaaaaaaagcggccgcgtcaacttcgcctcggcgcccaaccggcttggcaggaggctcgtggcccgggccgacaacgaggccgccgcagctgaggcggcggaaggggagggtgccgtggccaccaagcccaaggccgagaagtcgccgccgatcgggcccaagaggggcgccaaggtgaagatccttaggagggagtcctactggtacaacgggatcggcaacgtcgtcaccgtcgatcaggatcccaacacccgctacccggtggttgtgcggttcaacaaggtgaactacgccggcgtgtccaccaacaactacgccttggacgaggtctcagaggtgaaatgagtgggg

SEQ ID NO: 104381 - DNA, 610 bp, Zea mays
  Clone ID: MRT4577_2669C.1
ccggccgggacttctcgtgcgaagaagaaagtgttctcttgcttgatccgccattcagaagccggccactaatccgagctaggcacgctcccatccgacgtcgtcccagctagcacagccatttccgtttcgtttcttccactgcagtcagaactcagaagcagaggccgccgttgcaagcatgccgccgatggaggccgccgaggacgtcgtcatcgtcggcgccggacttgccggactcgcggtggctctcggactgcacaggaaaggggtgaggagcctggtgctggagtcgtcgccgtcgctgcgcgcgtcggggttcgccttcaccacgtggacgaacgccttccgggcgctggacgccctcggggtgggcgacaagatcaggaggcagcaccagcaggcgcaggcgtatgtcgtcgtcaccaccaccaccagggtgtttccccgtgcctgctgaacttgtctccatatatatgtgtttgtttccaggctacgcgtcatggcttcttccaccggagaaatcgtacaggaagtggacctgacgcagcaggggaaacgagggcccaacgagatccgttgcgttcggcgggacctgctgctgcaggcc

SEQ ID NO: 104382 - DNA, 2404 bp, Zea mays
  Clone ID: MRT4577_266C.1
cctcgaggccggccggggatttggtgtccgtccctcaggtcttgcagtcttgcttgcttgtcgtctccatccgtgcatcgtcttcctcctctacctcctctcttctccttcggctgggtttgggttaacaaaggcagagggaccagcggcagcgaaggtcaattgcatcgcatcggatcagatctcgactcaattcccgcggttaatccacatatcgactcaattcccgcggttaatccaccgccaacacctaagttaaaaccacggcggcggaggcatcggccatgctggcgcgtgtggctgcggagatagccgcgctcccggagccgcgcgggcccatgcgccgcctctgcggggacctcgcgcgccgcatccgcctcctcgcgcccctactccagcacctccaagacagggacctggacgacgccttgcgtctcgcagacgcgctgggggccgcgcgcgacctcctccgcgcagttcacgacggcagcaagatctaccaggccatgcaaggggatgccgtgctccaacgctttgcaactgtcaacagccacattcacttggccttggatgccttgccgtacaagaccttcgacttgcctgaagaagtgctggagcaggtcgatcttgtgcattctcagttcaaaagggctgcaaccacagctgctccaccagatgcacagctgtcaaaggacatatgctttgctcttgctgacaaggcctttgaccctcgggtcctcacgaggatctctgataagctgcaactgcacagcatggccgatatcaagaaagaatccctcgccctgcatgagatggtcatctccagcggcggcgaacctgatgcctgcgtcgacgagatgtcctccttgctcaagaagcttaaagactgcgtcgtcactgaagcccccaccacagagacgcccaacgcccagtctacctccataaagcatacatctcctatcatccctgatgaattcagatgcccgatatccctcgagctcatgcaagaccctgtcatcgtttccagcgggcagacatacgagcgatctggcatccagaaatggcttgattctggacacaagacatgccctaagacgcagcagctcctctcccatacatcactgacaccaaactttgtcctaaaaagcttaatagctcagtggtgtgaggccaacggcattgagcttcctaagaacaaggcaaactcgcgagataagaaagcagcaaaaagctctgactatgaccatgctggtttagtatccctaatgaacaggctgaggagtgggagccaagatgagcaacgtgcagctgctggtgagatccgtttgcttgcaaagagaaatgtcaacaaccggatatgcattgctgatgcaggagctatccccttgctagtcaatctgctttcctctacagatccaagaacgcaggaacatgctgtcacagcgctccttaacctctccatccatgagaacaacaaggcaagcattgtaagctctcatgctatccctaagattgtggaagtgctcaaaactgggagcatggaggctagagagaatgcagcagccacactgtttagcttgtcagttgtagatgaaaacaaggttacaattggtggcgctggtgcaatacctccactcattaatctcctgtgcgatgggagcccaagaggcaagaaagatgctgcaacggcaatttttaatctgtgcatataccagggaaataagattcgagcagtgaaagctggaatcgtcatccatctgatgaacttcttggtggatcctactggcggaatgatcgatgaggcactcactcttttggctattcttgcgggtaaccctgaagccaaggctgtaatttcgcaatcggatcccatcccaccacttgtcgaggtcattaaaactgggtctcctcgcaacagagagaatgctgcagccattctatggtcactttgttgcactgatattgaccaaacgagggctgcaaaagctgctggagcggaggatgcactcaaggaactgtcagattctggcacagaacgtgcaaagagaaaagcttctagcattctggaactcatgcggcaagctgaagaagcatgaagctgaccgtagtagatttgcgaggttgtggttttgttatattgtactcttagacactaaatgtttctggatagtgttggtatttgagatatatctgtaggcagatgcgttaagaattttctgtaaacatataaattggatgtataataatgaaagtcagcccaaactttgtatgtgattcagcttggtggttatcattgtttcaggtttcatgcttgcaaaaaaaaaaaaaacttgcagaacatttcaataagtttaagagaaaggaaaaaaaaaaaaaaaaggaaaaaaaaaaaaaaaaagcggcc

SEQ ID NO: 104383 - DNA, 393 bp, Zea mays
  Clone ID: MRT4577_26700C.1
gtgccatgttgtcttttcgtgtcccttttaggagggcagagtgagtgttacctctgtactaggaggaacatctgataacaccggttcaataacagaaaggttgcaccctacatgtcccagtgctgaagactggcctgaacatagtcctggcatgcaacatcccaaaggacagccccatacttgaggctgctgcggagaggaagctggttgagaagctgaaaggtttgggctacattaaaaccccagctgtgggggctaacacttcctcggcacaatgatccgtggtgtgatctagtgagctttcggtcgacgtgtagcttcatcactacatccagcagagagcggttgtgatttttgggggctttgactgtgctacctgttctctcatgtggc

SEQ ID NO: 104384 - DNA, 1039 bp, Zea mays
  Clone ID: MRT4577_26701C.1
ccggccgggccccgcgtgggcgtcgcagcttccactcttcccccgtgaaacttttctcacgcccacccattccacccaccacccaccttcctttcctctctctctgtctgactgtctccctccgtccctcgaagcttctctggtttcagacgcaaccccgcgggtcgcgggatcaaggagccagagagcgggacgcagcgagcgttccgccggagatcgagaccgtagctagggtttgaggcgccgggctgcggtggacgagatgtcgacgccggcgaggaagcggctgatgcgggacttcaggcgcctgcagcaggacccgcccgccgggatcagcggcgcgccgcacgacaacaacatcatgctctggaacgccgtcatattcgggccggatgatacgccgtgggacggtggcacgttcaagcttaccttgcagtttacagaagattacccaaacaagccaccaactgttcgatttgtctctaggatgtttcatccaaatatatatgctgatggaagcatctgtttggatatcctacagaaccagtggagtcctatatatgatgttgctgcaattttaacttctatccagtccctgctgtgtgatccaaacccaaactcccctgcaaactcagaagcagcaagactgttcagcgagaacaagcgggagtacaaccgcaaagtccgtgagatcgtggagcagagctggacagccgactagtgcataaggatgctcgtcgtgcccgataggggcacaataagaaagcgtgaaaaaaaaaacacacccactccttgtgtttctggttcgccaggcttgtcgaaacattgaagaaccccagtgattggtttgtagtctgtcgtcgtcgttctgcccccatcaagagccccggttgctcatggtggtggctgtcgtaatgtagcggttgttgacctatcttctcatgaattgaaaggatcctgcccatgtacaaaaattatagcgtgggaatggttgtttgacggaccgtgttgctctaaaaaaaaaaaaaaaaaagcggcc

SEQ ID NO: 104385 - DNA, 1054 bp, Zea mays
  Clone ID: MRT4577_26702C.1
gtgccatgttgtcttttcgtgtccctttattgagcacctcgggaccgtccggggcgccctaggtttcccctccctgctgctgctgccgcgagccgaggactcgtcggctacagtgcacattgctaaacgctcccgccgtctcgcgagccgccgccgggtccttacgcaagtccgcgacgtgcatcgcctggagaggctcccgtctcgccgccctggggatcccatctcatctgtgcagccgcgcgtggcccaagggagccagaagctaagagttagagaggcgcgtgatgtcttcagaggaggcgagggcaagcttttcggagttggtggttggttcgccaacccggacagagggcgaaacttattcttcaggtgatatgtcgtctgaggagggtgcacacgtcacttgtttcacagaggatcttcacgatgtaacacttcactttcagatagtgaggttttctaaacagatatacgtgtgggttggatgcaacacagcaaagtttggccatttatatgctgctgcaaccactagaccggataacagagtgagtgttacctctgtactaggaggaacatctgataacaccggttcaagtatggctcgccgtctagaaaggttgcaccctacatgtcccagtgctgaagactggcctgaacatagtcctggcatgcaacatcccaaaggacagccccatacttgaggctgctgcggagaggaagctggttgagaagctgaaaggtttgggctacattaaaaccccagctgtgggggctaacacttcctcggcacaatgatccgtggtgtgatctagtgagctttcggtcgacgtgtagcttcatcactacatccagcagagagcggttgtgatttttggcgggctttgactgtgctacctgttctctcatgtggcaaaaggttattgtgaacatgttcgttgtgatgtactccgccctaaaataaacccccttcgtatttcaaggagaaacaatcttaattctgactaaatatataccaaaaatactgatatttatgatcccggataacacatcg

SEQ ID NO: 104386 - DNA, 820 bp, Zea mays
  Clone ID: MRT4577_26703C.1
gggtacctcgaggccggccgggaaaaaaaaaaatcctcctcctcggacccatggcgcccagtttcgacgacgattttgtctacaccatctctgaccatgatgatgtgtccgacgatggtggcgccgacgagtctgcggcggcgagcgcaaagctagcaggcgctggcaagaagaggaaatacacagaggatccggacctgggtgtcaggcccaaggaggtcgcctcaaagaaggcaaagaaggacaagaagaagggaaaaaatggaaagcacgccgagcctgaaccagagcccgaagaagacgaagacgaaaccgtaacgccacaaccaggcgaagacattgagcaaaatgacgacattgccagcgacttcgagtttgctgtcggtgatatagacacgggatttgtggaggagttcgacggttggggaaacgacaatggcacggtcgcacaggagtctggaaagaagagcactgctgtggacgtcgacgacatcattgagcgcagacggaacaagcagagggcaaagcaaactgctgagccagactcctcagatacctcggtcgacggtgactttgagggtttcggcgacgatgacgagctcatggcggaggacggcttcggtatgggtgctcccagcgactctgaagacgaagaggatgaggaggaagcttcagacaatgaacaagacagggcaaacgaggactctgatgaggagaacgggtcagacggcaatcaagatgaagacgaagatttacctcatgttccccaccctatggatctcgaggctgccgagacagaagatgaggatgcgagcgagca

SEQ ID NO: 104387 - DNA, 579 bp, Zea mays
  Clone ID: MRT4577_26704C.1
cggccgaggtacaagcttttttttttttttttttttttttttttttgctttttttttttttttattttttttttttttttttttttttttttttttttttttttttttttttttttttttttttttttttttttttttttttttacccgccccggcgccccctccaaagggccaattccccccccctgggggccctttctaggggaccccaccccggcccccaccttggggtaaacatgggcaaagctgtttcccgggggaaattgttttcccctcacaattccccccaacataccaccccgaaccataaagggtaaaccccggggggcccaatgggggggccacccccccttaattggggggccccccccgccccctttccaaacggaaaacccggcggccccccttcattaaaaaaaccccccaccccccgggagggggggtttgcgttttgggggcttttcccctttcctgctaaataaccccgtggccccgggcgttcgggtggggggagcggttttacctcacttaaaggggggaaaaccggtttccaaaaaatccggggttaacccgggaaaa

SEQ ID NO: 104388 - DNA, 364 bp, Zea mays
  Clone ID: MRT4577_26705C.1
ccaatctgctccggcggcgaggtgaagtcagctgatatgatgtacctcatttggataacaatttgactggcaccagattttacagatatatgcagaaggggctagggcaaaggatgcatgtacagcagtgggtaaaacggagagtacgcgggtcttccatgccctttcaggcgcaatctttcattgagcccagtaccggagaagtgaaccctcctgtaacatctgaaaacttatctgctaactcacaagctgttaatgatgttggagcagttgaaggtactgacatgaacgaaaaatcggttcaaaaaccaaaaaaaaaaaaaaaaaaaaaaaagaaaaagtactctgcgttgttaccactgct

SEQ ID NO: 104389 - DNA, 160 bp, Zea mays
  Clone ID: MRT4577_26706C.1
gaacatgctcctcacttatcctatggtgccgtcgtcgtgacgcggcggcgtgtgaggaggccggaggttaacacaacgacgccaatcaggggctctcacgttctatcctttcgcctgcatcagccttatcaccgcacgagcatcatcatcaccactcact

SEQ ID NO: 104390 - DNA, 119 bp, Zea mays
  Clone ID: MRT4577_26707C.1
ttaggtgcactataaagattatgagccatgccctcgtaagctgatccttaagcggcgcctggtcgccccgtcgccacctcgacaacaagaagatgtgtggctaacaacgcttttggaaa

SEQ ID NO: 104391 - DNA, 145 bp, Zea mays
  Clone ID: MRT4577_26708C.1
aattctctatgaaagagggaattcaactagttgggatgttgggggaacaccaaatgacttatctaatctggttgcaacaacctgcaacaagaattttggtagtaaactcttctaatgcctttattcttgcggcttgtgccccctt

SEQ ID NO: 104392 - DNA, 511 bp, Zea mays
  Clone ID: MRT4577_26709C.1
tttttttttttttttttaactgaaatttctttgcagatgctagaagactgaaacttttggatcatgttaattacaatctggctgccccatagaatagggtgatagagatgcatgcaagatcttctagtttaaatccagaacaaagggcatgcaattaatactgtagcaaagttgcagctacgataataacctaagatgagttctaaattactcttccaaactgaagtggggctgtattcaaccagtcaagctttcttggaaactcaggaacatatgtggcagaacccccagattcaaactcagctagatacttctttatttgttgaactcttgatgacagagattctccttcatttctggcaaaaactgaactatttccacccatgagaaaattcagtaggcctttgggagatgcgaactgcattgccttccaatttctgactgcaacaaaaaggcaggacaaggctattcccagacttccatatctcaatatttcgcgtcgagctcgtgc

SEQ ID NO: 104393 - DNA, 114 bp, Zea mays
  unsure (1)..(114): unsure at all n locations
  Clone ID: MRT4577_2670C.1
gagagcaaagaaaagaatgggctgacatactcctaagtacaactgtgtaatggcctatattataaagcgtttttnactacttgtgatatttcttatacaatagtaagcagactt

SEQ ID NO: 104394 - DNA, 364 bp, Zea mays
  Clone ID: MRT4577_26710C.1
gtcgaaaacactttttttttttggcaattttttcacatggggagggggaaaacattcaaagggacggggggataaacaggcggggggagcaggctacacattacaagggccctaaaccaaaaaacaaaatccccggaaacaaaaaagaaatatcaggggtaatttaaagacccatttttttgggcctaaaaaaagtggcacccttgttaaggccgggcataacaaccggggggggcggcttaactctcttgtccgggtcctttttcttttccatgcgcgcggtctttgtttgctagggcctaagcttttccatttccccccccaaaggcgtctttttttccttcgggctttttttggggtcaac

SEQ ID NO: 104395 - DNA, 273 bp, Zea mays
  Clone ID: MRT4577_26711C.1
tgccactgcactgcagcctgctctacagaacagaactctgtgccataataagaaatattgtatcagcagatagagtagatatctggtaccataggtcagattggatgaggtgcagatgattgaaagttggcaactggggcacctaagaaaacataatcatttgaaatgatgtcaaggatgcgcacatcatccaatgtggctaagtcatctttttaagatggtggatggcatgtgatagttagaaatctactgcaaagcgtataaaattgctca

SEQ ID NO: 104396 - DNA, 365 bp, Zea mays
  Clone ID: MRT4577_26712C.1
aaacaaaaaccattaccgtgcatgcccgcctaccttaacttcgaatttcggttcaggcgggcttcttgttgccggtggcgaccatgtcgttggcttgggcgatttatatccggaggctggcctacgcacggagcctctgtctgaacaccacggtgggcaagtgggggttcaccattttcacgctgctctcacaattcatgctgaaaggcctgaccctcgcgttcttgatggtggacgacatcaacttcttttacgaccagtcgccggagagcatgatgagcctgtgtaccgacatgtacttcaccgtgttcggaatcgtgaacttcttcagcagattactgctgtacacggtcacgcgcgtcacg

SEQ ID NO: 104397 - DNA, 128 bp, Zea mays
  Clone ID: MRT4577_26713C.1
acacgccagtcagaaagtgagatcctagcaccgagtcgacgatacaagtctcacctccatcctccattactcctcatcctagatccctctctccgaaccccgccgctcgtcgcagatccgaagggcat

SEQ ID NO: 104398 - DNA, 145 bp, Zea mays
  unsure (1)..(145): unsure at all n locations
  Clone ID: MRT4577_26714C.1
cgcgtccatgnctaaagacacgcatgccgtatccgcctccgctgccaccacggcccatgttactgcgtaccgtcagcagagatggatacggcatgcgtgtctttagccatggacgcgctgtcaggctctcggccggtcttgagat

SEQ ID NO: 104399 - DNA, 360 bp, Zea mays
  unsure (1)..(360): unsure at all n locations
  Clone ID: MRT4577_26715C.1
gggccgaggangcgnncgaccggcctccacnaccctttgaaatcgctcttgtaaccatacacaaacaactcggccaacgtatcttttatatattccctgccctccccctaaatcctatcgcaaccacatcaatagcacaagttcatctaccaactctcgcacatcgcacacaagcattattcaaaattcatcatgatggtgtaaacgacatcatattacacgatctgaacaatgcaaaatacataattgaatcgatagcatctgcacaccctcaaaatcattttaatcctaagattgatgaatgccccaaagagactccaaaggaacttgatttcaaccatcaattcatataatactaag

SEQ ID NO: 104400 - DNA, 980 bp, Zea mays
  Clone ID: MRT4577_26716C.1
gcggcacagctcaaggacagcgcagcacgcaagcgggaccgcaccgaagcagcacacagcacacaagatcacacatcctactgctgcgccgcacaatgggcatctgcgtgtcgtgcgacgcggcggacgagggcgccgcgacggcgagggtggtgctccccagcggcgagctccgggagtacgccccgccggccacggccgggacggcgctgcaggcggccggcggcgagggcccctggctcctctgcgacgccgacgggatggcgttcgagggccccgtcgccgtcgcggcggtcgcccccggcgaggagctccaggccgggcagatctacttcgtgctccccgccgagatgcggcgccgccgcctcacccgcgaggaggtcgccgcgctcgccgtcagggccagctcggcgctcgtcaaggccgcgcagccgtcctcgccctgccgccggctccggcgcggcgcggtggcgccgctcgtgttcccggtcccagaggaggagtacgcggcggcggacgcggtctcgcccgtcgcggcggcgaagccgcaccagaagcggagggtggcgtgccggggcgggagggcgtccaggttctcccccgacctgaccgcgatcccggagagcgagtgatatgtctctggtggtgagtggtgacgggttgctcgccggcgctcggtcggacggtgtggccgcgccggagcggagatcgacggtgcgggaagtgttgtagatgcagagctcataaatgagaaatgtgagtaggtgtttttggcgcggcggcaacaggatacgcgtgtagagtgtacgttacgtgtaggtttaggtgcatgcaagtgtaaatacacgggatctccgtgcggtgtgcccagtcacagtttggaactcagcttttattagtgctcgtgttcaggctttgtgtcgtgcatcatggaataaatctctccttgtttgtgaaaaaggaaatctctccttgtcgcc

SEQ ID NO: 104401 - DNA, 362 bp, Zea mays
  Clone ID: MRT4577_26717C.1
ggccccccccaaaaattcaaggtcctacccttggcccgtgtaaaaaacattttttcacccctaaaaaccggacctggaacaatgggcttaaaaaacaaatggggggggaaaaagggccatcattcttaacacctcaaaaaaaccccaattattttttccccccccccccctcccaaattaattgggcccccttttccaaccccccccagcccggtccttggaaccttaagaagaggggaacttggggaccgccttggcgcccccagaaacggcgttttttgttagttcgcccgggaggaccaagcccccccaggtctgaaactcccaagagggggcggggggtttttttttattgccccccc

SEQ ID NO: 104402 - DNA, 183 bp, Zea mays
  Clone ID: MRT4577_26718C.1
ctcgtattactattcccaatctagcaaacggtaccatccttttgcaaactaagagaggggctcgatggtactcaaggcggataagaatcggtctgctaataaactagcagtggaagatcgcgcagtcctggcagaaaaggcccttggtgggaagaagcaagaggcggtgaatctgctcccggc

SEQ ID NO: 104403 - DNA, 344 bp, Zea mays
  Clone ID: MRT4577_26719C.1
ttattggtttctcttctcccgcccacctttctctctattgttttgttttcttttaattcccccaagaaactttatcccggcgcacgagccttttggccgatttcgtaccggtgcctggggcctgcccccccctaatcccagtttcaattccctgcccatcctgtctaccctcttcctacttaagggccgcctggccatccccaacgggctgtgattcccgcccccgggcggtcctatttgccctggcgaggaaaccctccctgccgcccggggacctcccccggtcaagggtcgatggccccttcgaccccgggctcgccccccacgtaaccggggccccccgt

SEQ ID NO: 104404 - DNA, 130 bp, Zea mays
  Clone ID: MRT4577_2671C.1
gaatgtaaatgaggggatattgcctatggtgttttttaaaacaagggagaggattggaatgcttagttctgccaatgtgcacctttgaaaaccacgcctttggacctgtaatctatgtacctggccttga

SEQ ID NO: 104405 - DNA, 440 bp, Zea mays
  Clone ID: MRT4577_26720C.1
ggttcttctttacacttaatggtttaagctttttttctgttgatttacattttctaactttgtctggatgtctttgttcctttttactttacacaaagccccacaaagttttgttggcgggaaaaaaaaaagaggcctttaaaaaaaaaacaggattaatgaaggttcccccccccaaaaaaaaggaacagtgacccggtgctcgcaaacacaaaatgggattctccctccccctcggggggggggcaaacccggaaatttatattctggaaacaacccttcaaggaggtaaaaataggtccccagaccaaacccggggatttttttgaaaaattcaaaaaaaacacacgtgctctaaaaaacactcacaataatggacagggcggccttttataatttgtcaggcaccttgagtatctccttcttcaaatgttgccaac

SEQ ID NO: 104406 - DNA, 435 bp, Zea mays
  Clone ID: MRT4577_26721C.1
gggactgaaaaacaacttctctgattcaaaacatattggtggcacagttacctatctttacaaagctatgataaaatggcgtaatcgcacaaaaaggaaactctatgatgctggtgtgaaaaaacccaaacaaagggatttgggacatatcatgcttacacctgaataaactcataaaaaggggcatttcattttgagagggctatgagcaccttaactgccacttccttaggcggtttctccgatgacaaattaaccaccaagccctctttaaactaatcatcatacacaggctcattttgtttgtcaaaggcataaacccttgactctataaactcggcagcgtcatccatgctttcaatcaatggttctccagtttcatgataaactcctgaaaactttggtagtgcaaattttcgattgtaagtcctacca

SEQ ID NO: 104407 - DNA, 128 bp, Zea mays
  Clone ID: MRT4577_26722C.1
ggcccaagccgtccgggccgggcttccaagggggctctccccggccgccatttcccctttaagaaccctccccctttacaatttttggggtcctaccggccccttcttggccggttttttttccgcgg

SEQ ID NO: 104408 - DNA, 607 bp, Zea mays
  Clone ID: MRT4577_26723C.1
ccctcctcgagtttttttttttttttttttttttttttttttttttttttttttttttttttttttttttggcaaacaggcatacaatttccttggctccaaaaaaacgggtcgtattagggaggactttttgcccttgcccaaacgggctacaatcccctcaacatcactacaaaaaaaacccggcaccaaggataaaattaaacatcctaccgtctacatgaccatcatgttccatggggagaatcaaaacccagggggtttcacaaattacccacagggcgggagctttttgttgcctgccccacaagggttgtcatccttccagtcgccccacccttttgttttttcctcctgggggccctcatccttttgggccgagctggtgccatccttgggccacgcggaggttgattttttcatcacctcaggggcccttttttgccatttctccatcattttaatttcgcccaaaccagttttttaaatgctcattgggggcatcctgtaactaggctgaaaaactggggctggcattctttccctttcacttggtaaacccccaccaacaatacttgcaggcccaaatatcaggggctggggtttg

SEQ ID NO: 104409 - DNA, 229 bp, Zea mays
  Clone ID: MRT4577_26724C.1
ttttgatttcattttttcatattctttgttagagagatcagcaccttggcccgtttcttgtttatatgaattgcactcacagtgggtgaactcacaaaaaaaaacactgtgctgttttttttctggggaaaaacacactctttgtggaaaaaaaaatatgggggttgtcaacagaccacacgatttttttctcaaaagtattttacgctgtggggccaggttttttttt

SEQ ID NO: 104410 - DNA, 342 bp, Zea mays
  Clone ID: MRT4577_26725C.1
actatagaagagctatgacgtcgcatgcacgcgtacgtaagctcggaattcggctcgagcagcttctgtgagccagctacaagccggttcactgaggttcgcgcctgctaggtaagtaatgtatatacccacatttccatgctgaatgaagagagtatgtatagataggcaatcgctaacccaaaaaggatctgtagataccagtgtgcatacaatgatcatggcgcagagccattagcaagaaaggacagggcataggcagaggagatgcttacgttacataacagtgttgccatgataacgcccctaatctcctagttattctattggagcatgtcattt

SEQ ID NO: 104411 - DNA, 490 bp, Zea mays
  Clone ID: MRT4577_26726C.1
aaacacaaacaccatttttattccttaaaaggaaacacacaggggcccccttttatttccggggtttccaccataaaagggtctttgccccccaacaccggccgcagggttaacccatgcctttggcaatatacccataacccccccagggggagaaaaaaaaaaaaaggaaatccttgccaaacttaacatttttgcccaaaaaaacacggcctatttcgtcatcatcattgtcccgagttattggatttaaaagggggacttcactgactgggggaatcggggggggtcgtctttgcccaccccgccctaaaaccccccctggatggagtcattgagccggttaaattcctccttgggctgggccacccccgggcccacaaagtccccgagggaaaccatccccaaaatccccgggccgtcaaacacccggatgtgtttgacgcggttttttgtcatgagctggattgcctgcaagaccttgggggcg

SEQ ID NO: 104412 - DNA, 3118 bp, Zea mays
  Clone ID: MRT4577_26727C.1
tgcctggttcctcagctggttcctcgagtggagtcatgctgcctggggttggtgcttcattgggggagatatgccgggactacatgaatgggaggtgcacaaaggtggagactgactgtaagttcacccacccaccacaacagctgctgatgtcgatgcttgcagccacgagttctgtcagtgctcttgggcatgcgccgttggcgccctctgcggctgctatggcagctgcacaggccatcatggctgctcaggcactgcaggcacatgctgcgcaagccaaggccgcaggtggggcttcaggctcagtacacaaagctgatgaagctgatgccctgaagagaacagttcaaattagcaacctgagtccacttcttactgtggattatgttaagcagctatttggattgtgtggtaaagttgttgattgtaccatcacagattcaaaacacattgcttatgttgaatactccaaacctgaagaagcgactgcagcgttggggttcaataacaagaatgttggtggtcgtccattgaatgtggagatgactaaatctcttccttctaaagcaaataataacttgcctatgatgatgcagcaagccattcagttgcaacagatgcaattccagcaggcactaatgatgcaacagtcaatagcaacccaacaggctgctgcacgtgctgccaccatgaaatctgccactgaagcagctgcagcaagggctgctgagataagcaggaagttaaaggcggagggctttggtgcggacaacatggaagaaaagcatgccaaagggaagtcaagatcaccatcgccctctactcgcagatcaaaatctcggtcgagatcacctatcaaataccgtaggagcaggcggtcccgctcctactctcccccagttagacgctcaagggagcagcgatcacgatcaccatcaaaatctcgccactcaaagtacggtagtgatcgatcgcatagggatgataaggacaggtatagcaggtccgggagaagggagagtgaacgatctcgtgatcatcattcatctagttcaaggaggaacagaagtaaaagtagaagtccaaggcataagaagccctccagagttgattctaggtcacccaagaaacaaagagaggaaagtttaagcccatcaaaatcaaggtcagcaagggctggttcaagatcaccacaccatcataagggaagcaaatcatcaccaactcgtgaccgtcattctcgccatagcaggcattcaaggtccagatctcctggcagaaagcaccgtcacagtgataaaagggacagcagaaagtctgagattcaggacgacaaaagaagatctcatagaggtagcagacacgacaaagatgaaagttcagtaaaggacgaaggggaaagatctcatagaagcaatagaggtgacaaagatgaaaggtctgtaaaggatccagtggaagataaagggatggatactaaagttgttgcacataagaggagctcaacagtatctgaagatgaaattctgaacaacaatagtagtaaccataagaaatatcgacatgaagttggtttggaagttgatggaaatgatgtgtgctctgctgcagctgaccttgataggaaacatgaaactggagtagatggctctttggggggcgctgcagaatcagctatgtgatggctgctgtatcattgagtttgctgtttacaaatggattgatgatgatggagaatgctgaactggtgtttattatctccttttctgatttaggagttttatttgcagggcatgaagatcttcggagaacttgagtgctgttcggagtgctcatctgatatattaaaatgtattcctcattaacttgagattcgctccttggagcaaacttctaaatgtaaagctggtgttgtaaggcgatttcatacagtgaggtagaaaccaaccatgtatttgtcgtttcaggctcatgattccatgaagagttcttggagcacatttctgggatgtcggttgaagatacaagggagtatacacttcctcaagtaaagtacacatatacaagactaataaacaactcatcttctaggcacttgcatttgaatcggaatgctttggctagtaaaatggtccaaatatgcttgtctacatacttctgatgcacttaatttgcttgaagttctgtttttatatcttgtatcaggaatggttcaaaaagtttgacttgctataccaatacttgtactttatcttttgacagtcacaatgaattgtgatgtaggttttatccatcttgtctactgctttttgaccagtctacctaaagttggtgcccttggtagctccagagataagctgtgaatcttgaaagttgaaacaattgcattgttacaaatttttttttttaaattttttgcttcactattgtttctgcttttgtctgcattgttcgctgcaccttaccatgctgtgacggttgttgtcatgctggaaaacctgtgcaggtttttcaagggggttgacattggagtatgttttgagggaagtcagtgcatacttcattttgtgaatgaggactatgttgcggatgctcaaccggtgaggattacatgttctatcaggagtgaagacttgtgcacgagagctgcaagtgaacctttctgcatgtggatgcttatttatatcaacatgtgtctcccggataatatagcttgccgcttgcgagttgggatatgagcgctaatctaagcttggagtgattcaccaaaccgctctaagattaaggaaatatagggatattcaaacaacaaatggagttaatccaggtcgtgcctgtgggaaaaacatccatagacttcaatttgttagggaaaaatattttctaaaataagggtgaaatacactgttttttctctttcttttttgctcagaaagaataaaattagagtaaggaggtgctaaattctgtgccctggttcttttccctaaattttcagatttgtttttgaggtaactttacgaaatctggtcgatgtgaattgcaaatgtacaaatttgacgtgataaatgacgggaatcaaaatcgagtgtaaacaactatatcttgacacgtc

SEQ ID NO: 104413 - DNA, 1334 bp, Zea mays
  unsure (1)..(1334): unsure at all n locations
  Clone ID: MRT4577_26728C.1
ggtaccctccggtctggccggggataccaattgcgccttttggagttttagctattctacaccttgagagttctaaccaattaaggtgaatctatcaagaccaaacaagaaataaatggatcgtccaattaacatctgtacatcaccaaggatgcccttgtcgttgtacgagcaacaaacgataaaagaattttggaggaagaaacaagaagaaattgaggcaattgaggactttggagagcacacaatccccgtgacctgtctcaaaaaggttatttgtgctaagaagggtaaaatgatgatgacgtctgacaccccaacattcatgacaaaggcatgtaagatatttgtgcaggaactttcactccgtgcttggatgtgtgccaattcacacaaccgtagcatcatactagattctgatattgctgaggcaattgcctccattgagtcatatgattttctaaatgatgttctatgcgtacatcttgaaaagtacaagtctgatccacatctacaatctataaaaaatcctcatcataatagggttataaatcagtcaccaacacctctccaacctctttctcatcaataccaaatgacacaatttattcctcagtctactagatattgtccctttattcacattcctccaattttgccacaaactaatgcaattcacatgcatctacccttgccactcccacctatcacatacatgaccaaggatcttgtgttctttggaaaacgcattagcagcaatgatgatgctatagatcttgtgactcctccacaattacttccagaagcactatccaatattccaaataagtgctacatgtgtaacattgcttctgctgatacatattgtgttggtagtgctaagacttgtaattttgttgctgaagatggagacatggcgttccatttcccatatgttccttcaaagcctatccaattatcaacctcattatcaacgactaacagtggttgttctatatataccgatatcaccgagctgaatcatatcaaactaaaggttacacatattgaaaattctacatatggcattaatcctgaggctactttcgatgttaatgatggtcaacaacatgcgggagatgaaaccactgctgccaatcatatgcatactgaacatggagagctagatgcagaatttgttactactactaatgccaatgcagatgacaacaatataaattggnacgaagttgacatggcaagtgattccatgttgatggagttttggagagatgtaatgatgaaagaagacccaacatctttacctgacattatctctaccaatgatactattt

SEQ ID NO: 104414 - DNA, 792 bp, Zea mays
  unsure (1)..(792): unsure at all n locations
  Clone ID: MRT4577_26729C.1
tttgnccggacgtcaaatatgtcttggaaatcgctgcgaaagaatataccgaagaaaacggttctttttagaaagggaacagaaaagagaatcggtatagaaagaaagaaaggaaaatagtacctgggatcagcccaaaatgaagccttatccaactccggtacgatgagagtaacgttcagataccttgcgatggttaccatgtcacaaatctgtctcaacaacaacaacaagaaataggtggaaccttgaggcctgaattttcagtatcagacacattataaagcttaacgatggcagacattcatagatgtaacttgtgacaattgtatttagatttcgatacacagtgcttactgctgctcgcatctggttaagcccgccgttgcaggagaccatcagatagccgttgttcctgtagattcctgcacgtagtattggtaaaaatcaaacgatcgtccatgcttttactggtgcctcgacgtaatgcgtaggtacatgaagtcatgaaaaatacatggagcggtcaaatggaattaatctgcagagctaggccggcaaataaattggccggtgactagacaaagcgaacacagaattgaattggactagaaataacctacatcgaatacgtacactgcaactgaaatgagaaagattagacaattcaaagttactgaggggggagaggtgtgggggaaaaaaaaaaaatctctttcgcggtaagaaggggagaaacgactcacacccgaaaggttctcaagggggaaggacagaaccaagaaattcctg

SEQ ID NO: 104415 - DNA, 349 bp, Zea mays
  Clone ID: MRT4577_2672C.1
tcgggagaatgggcactgacaacaccatctagatcatctctctactctcatccccgtccattgacaccacatcgctcatggcccccgccccgagcacgcacgtgtggccagcatcacaagaatatatccgcactgcatttgcatcagccgcccgcggcgacccgctacgggctgcggtacgtgtctacgtcgatgagtcccggccgccggatgccctgcagcgccaggtggcctcgctcgcccgcgagcgctacgtacgaagccgcacggtcgccaagttcctcaggcgaggcgagttccccgacctcgtcatgatcccgaagcatttcgcgctcctccactccaccca

SEQ ID NO: 104416 - DNA, 221 bp, Zea mays
  unsure (1)..(221): unsure at all n locations
  Clone ID: MRT4577_26730C.1
cccataatacaaaatgaaatgcattttttttaccacaacatcccattcataaacaataccacccatctantacctaacaagcatcaccacacaaaccttaaactgactaattctaacaaccatacaaggaatattatatctgtaccaatcactgcagaaaatgacttaggtcactacctctttttcctcctactcctcccggacacatgggtcaaccctta

SEQ ID NO: 104417 - DNA, 138 bp, Zea mays
  Clone ID: MRT4577_26731C.1
catcaatccatattctttctttctcaccataacttcctacacccttgtatattttaaaaggatctctcctccatcacacaatccattctatcttccatcacccatcctacaaacatcccaactcaaatttcacctcac

SEQ ID NO: 104418 - DNA, 463 bp, Zea mays
  Clone ID: MRT4577_26732C.1
aaaacaagcaaaaagaacccgtttttcatcatgcggttgaccagctacataggacttggggggggaaaaatttgcctaaaaaaaaagaaacttctgagcaaaacttggcaggaaaaagggtttttcactgaactaggccttgagagggtacttcctcagggggaaaaacttttcacgctttttttccctttcgggcttaaaagaaagctggtgcttggggagggccccgcggatgggccgggtttttttgggggggggggcaagcgggaacaattttttttttttggacccccaacccaaggccgatttttgtttttgggaaaaaacgggcaacaccccccccatgggggggcccccaaccttgatcttggaaagcttgttgggagcccccccggggaacttggctacccctagcagggagagcccccacttaaactccttaagctgggcttggaaaaccccc

SEQ ID NO: 104419 - DNA, 209 bp, Zea mays
  Clone ID: MRT4577_26733C.1
cctgccgcagaccgcagtgaggcagtgtcagtgacagccagcggcgctcgtctcaggaccctgtagccgcgttcctgaggcatgccgcgccgcctcctgccggatcccaagcactacgctcgcgtgtgggtagatataccacatgaccccccaattccgcgcccagatgccgtggttcctccactagcggagctagtcggtactcccga

SEQ ID NO: 104420 - DNA, 445 bp, Zea mays
  Clone ID: MRT4577_26734C.1
cccacgcgtccgtccacgcgttcggtaatttcccccaccttttgctcctgccaaatactaatgtttcaaataccctgccaaatactaacatcatatccatggctgtgcaaattgtaggttttgatggggttgagatccatggggctcatggctacctgcttgagcaatttatgaaagataaagtgaatgaccgaacagacgaatatggtggatcccttgagaaccgctgccgatttgctttggaagttgttgaagctgttgttaatgagataggggcggacagagttggaattaggctatcgccattcgcagaatattcagagtctggagactctaatccaaaagaattggggctttacatgatgaatgccctcaataagtatggtattctttactgtcacatggtggaaccaagaatgaagactcgtggagaaaaaactgaatg

SEQ ID NO: 104421 - DNA, 675 bp, Zea mays
  Clone ID: MRT4577_26735C.1
gcctggccggaaaaaaaaaaaaaaaaaaaaaaaaaaaaagttggctgccgctgcctctcttccgctcccctcctgcagtggagtcctcctcctttcccacttgccctgccttccctcgatcgaggcccttccttgttcgtcgaggagagatcgaaatcgagatcgggatcgggatcgggagatccaaggaggcgacgcggaggaaggattcttgaggtagccatctccagtaatccatctcatccaccatggcggtggcggcgccggcctcggacgccaagccgcgcctcaacgtgccaccgtccatggcagccgcgctccgcctcgatcccgtggggctgggggcgggaccctctatgccgtcccccctccgccgactcgccgagccctcccagacgcccctcccatccaagaccacctacagcgacccgttcattcccttgccgctcctcctcccgcctccagaacttcgcgctattcgactcccttttttccccagccagggacgacacgccttactcccgcctcttcggggccgggttctttggcccggtttcgcccaatccaaccaccgccacttccgaagcctccgcctggcccaacaccaaccttttccgtttaaggaaggacaattcggttccaacttaacctttggttaaggttgccgccggcccc

SEQ ID NO: 104422 - DNA, 1069 bp, Zea mays
  Clone ID: MRT4577_26736C.1
ggtacacctccgaggtctgccgggcactcgcacggccgcgctcgcaaaaagatccaggccgggtccacgcgcccacgggcacgggcggggatcccttccgttgtttcctaggccgcacgccgcccacgccgcctccgtctccgtccgttcgtcgggcgcaatagagacaccacggcacgcgccgccgctcctgccctgcacttttctaccaccgaaggcgagggcgagggggccaaagacgagcgctttttcgtgcccgcctgcctgcctgctggtcattgccgctgctcacgagcctcccgccccgtgccgccctgccctctacggctctgccccaacgagccccaggggagccaggaaaaggagccgtcaaaagccgccgccgaggagagcgcgcaggtcaggcatggcatcaaccgttaccttcaacccagtgagcgcccaagctgcgctgatccaaaagccaaggaaccttggagccataagctatgctggcttaaagatgccggcatctgttagctctggctcagagtcgtcattcctgggctggaatgcatcccttcgggcagctgttactccaaggattgtgcccaaggcaaagtctggatctcagatatctccacaggcatcttacaaggtggcagtgctgggtgctgccggtggcatcggtcaacccttgggcctgttggttaagatgtctcctctggtgtccgagctgcatctgtatgatattgctaatgtcaagggagttgctgcagatctcagccactgcaacacgcctgctcaggttcttgacttcactggaccctcagagttagccaactgcttgaaaggtgtggatgtcgttgtcatccctgccggggtcccaaggaagcctgggatgactcgcgatgacctttttaacatcaacgcaagcatcgtcaagacacttgttgaggctgttgcagacagttgcccagaggcgttcatccatatcatcagcaacccggtgaattccacggtgccaattgcagctgagggtcttgagcagaagggtgtctacaatcccaagaagcttttcggggttaca

SEQ ID NO: 104423 - DNA, 1918 bp, Zea mays
  unsure (1)..(1918): unsure at all n locations
  Clone ID: MRT4577_26737C.1
atataccgggtccacgcgcgcaagggcgggcgggaatccccctccgttgtttcctaggccgcaccgcagtcgccctcgccgcctccgtctccgtcggttcgtcgggcgcaatagaaaaaccaccgaacgcgccgccgctcctgccctgccccccgtatctataccaccgaaggcgaggaagggggggccaaggacgagcgctttttcgtgcccgctggccattgccgctgctcacgagcctcccgccccgcgctgccctgccctctgcggctctgccccaacgagccccaggagagccagccagccagttaaaggagccgtcaaaagcccccgccgaggagagcacgcaaggtcagacatggcgtcaaccgttaccttcagcccagttagcacccaagctgggttgatccataagccaaggaaccttggagccacaagctacgctggcttaaaggtgccgagctttggctctgagtcatcattcttgggtaggaacgcatcccttcgggcggctgttactacaaggattgtgcccaaggcaaagtctggatctcagatatctccacaggcatcttacaaggtggcgctgctcggtgctgctggtggcatcggtcaacccttgggcctattgattaagatgtctcccctggtgtccgagctgcatctgtatgatattgctaatgtcaagggagtcgctgcagatctcagccactgcaacacgcccgctcaggtacttgacttcactgggccctcagagttagccagctgcttgaaaggcgtggatgtcgttgtcatccctgccggggtcccaaggaagccgggcatgactcgcgatgacctttttaacatcaacgcgagcatcgtcaagtcacttgttgaggctgttgcggacagttgccccgaggcgttcatccatatcatcagcaacccggtgaattccacggtgccaattgcagctgaggttctgaagcagaagggtgtctacaatcccaagaagcttttcggggttaccaccctggatgttgtcagggccaacacatttgtggcgcagaagaagaaccttaagctcatcgatgttgatgtcccagttgttggtggccatgctggaatcacaattctgccattgttatcgaagaccaggccatctgtcaccttcacagatgaggaaactgaggagctgacaaagaggatacagaatgccgggacagaggtggtggaggcaaaggctggtgctgggtctgctaccctgtccatggcctacgctgctgccagattcgtcgagtcgtctctccgtgccctggccggcgacccggatgtttatgagtgcacatttattcagtccgaggcaaccgatctgccattcttcgcatcaagagtcaagctcggcaagaatggtgtcgagtccatcgtttctgccgacctcgagggagtgaccgagtgcgaggccaaggcgcttgacgcgcttaaggccgagttgaagggaagcattgagaagggtgtcgccttcgccagcaaacagcaggaggctgctgcatctgtttgaagtgaagcaagtgaaatgtatgtccacaagagaataaagggacaatggtcttgaatggcttttaagttttgcagcctagagtttttttgttttggtgtcaacgtgtaggaggaagacgcagagatggttgctgttgctgttagtttctaattactacatggggactggacatccatccccccccaagttatcgcatgtttctaaaccaggccctgcttaacaccacatatctattttttttctactcttgtattgtggttctgtttgtagcttgttcgagtttacgaactacaaagaagctaataaaaacacttgtattgaaaaaaaaaaaaaaaaaggcccctaaaaaaaaaaaaaaaaaaagaaaangaggaa

SEQ ID NO: 104424 - DNA, 187 bp, Zea mays
  Clone ID: MRT4577_26738C.1
gaatacaaagctttttaggaccacaatttaggtaggcacatgggtaatatctaattataaaatattcattacctccccaacactcacacactctacacaccccataacctgttactcgattccttaaaaaacaagccacaaatttcttttcatggcctgcacatttaaccttaattactatgcatgc

SEQ ID NO: 104425 - DNA, 413 bp, Zea mays
  unsure (1)..(413): unsure at all n locations
  Clone ID: MRT4577_26739C.1
cgtccgcttnagcactttcccaagnatgaaattttggcgtccacactttttgccatttcaggccatnntttttgttttgtttntgttacaantagcaattnntggttcccnngttgggaagnnctgatatcggttagnatgcctggtnnatagaggaaatnnctgagttttggnncagcacgacctatnnttttgcatggtgnncttctgcttcagtgctnngttaggtccattttgtatcgaatatnngccgttgagaatggcacccccatgtattttttattcctgtaatgttntgtaattatttcttcctggtgcgaaaaacaatcaattgttaaatcctagtatagacagaactttccgtttcaaaaaaaaaaaaaaaaaaaaaaaaaanaaaaaaaaaaaaaataaaa

SEQ ID NO: 104426 - DNA, 312 bp, Zea mays
  Clone ID: MRT4577_2673C.1
cggctcgagctggccctttgccgcctgtgtcgctcgccctcgcccccacccccaccccatcgctgatcagccgccgggaagaagatgcagcagttggcggagcggcagatgggagctgcccatggatcgcatcgatcggcggcaaccgagtcggaggatcatggtgtgaaggaaaaggaggagctcctcggcgtcggtctgggttgaagccggaattaggcaccaacgtttcatcatgtttttttttctttctctgtcccagacgacggacaggcctcatgaatcatgatgtctccgtcgtctgggacagag

SEQ ID NO: 104427 - DNA, 331 bp, Zea mays
  Clone ID: MRT4577_26740C.1
ttcatgtttagggcaaaaggttcgggattgacaagccacttatacaactatgggcgggtcaatcactaatcccagttacttatgctggagcagtgtcaacaatcgatgacctatagaggataaaaaacgcaagcaaaagtcgattctatataactcttcggagtactctacatatatctgaaggacatttaccctacaaagatactgaccttaggcacaataagcaaagtattgatgcccaattgtcaaagaacatatggtaacgatcaatattgtcataatttattgcaaataccttgctcaaagcatatttattttcattaccaagtat

SEQ ID NO: 104428 - DNA, 309 bp, Zea mays
  unsure (1)..(309): unsure at all n locations
  Clone ID: MRT4577_26741C.1
actctgtccaaatggccggcactgtcgccgccacagccacggtctgctccatgtgcggcgacgtcggcttccccgagaagctcttccggtgcgcgcgctgccgccaccgcttccagcactcgtacgcccacttcttttatttgcttccagccagctatagcctcttcttccccccgctccatcatatctatcctcttcttcatatcgcgtaagtatatgcaacaacgcgtactactactangactagcttaatatatcatgacgagctccatggcatctcttccgccgctttcttcttccgtatgtaca

SEQ ID NO: 104429 - DNA, 533 bp, Zea mays
  Clone ID: MRT4577_26742C.1
cattgggtacctcgaggccggccgggatattcctctcataattcctcacacgacctgcctcgaacagacatgaattcatcattagcgcgccgcgatggaactctcgctggcgagctccctgctcttccggttcccatccacgggcagcctccccgagcccaccgacatcctggttgccggctcctgggaagtctgctccgaaaccgccgggctcaacctcacctcgtcatgtatgactggatgaggaaacctcttgcttcgagaaaccccaactacatgcataaatcgctggccagtcagtacctttgctacttcacttttatccggaatgccgcctgactgaagaaaacttagataacttcgctgataataaaacagcccctcaaggatgcctgcgtgatcatctattatccagacgagtgctatccccacgaggcagcacacggaacagacatactgtgaggtgtcacctgcgcctatataatactcctggattattcatccacaaacgcatgaaacatgctctccagcct

SEQ ID NO: 104430 - DNA, 222 bp, Zea mays
  Clone ID: MRT4577_26743C.1
ggaaaaaaaaatctcgatttgtggagcatgggctgaatgttaagccgtttacatatacggtagttcctagcagcggaacctctgtttttgaaaatgagctttatttaacctgtaagttcattcactaataactacgtactctctccgtttcgttttagttgtcgctggatagtgcaaaattgaactattcagtaacaactaaataaagaaacggagtgaata

SEQ ID NO: 104431 - DNA, 167 bp, Zea mays
  Clone ID: MRT4577_26744C.1
atgagaatgatgaactcttggatagccaagagggaggtctcattaatgcaaaccacaagcgtgttttagggtgaacttttttttgctcccccaggtcggttaaatgcgaaatcggcctataaccttagcatttgtcatgacactatctccaaccttagaattgaaaa

SEQ ID NO: 104432 - DNA, 351 bp, Zea mays
  Clone ID: MRT4577_26745C.1
ggcttgtttgattggggaggggacatggctgatggggtgaaagagatgctagatgagtcgatcctcatggacgatgaagatacttatcaaagtactggcgtatgcaaattacgtaccatatgcgcataacttaaagtccgcactgacaagccagagtccctactgccacatgatgcccgggatctgaaactctatcaccagcacttcggcaaaatgttgatcgattgactaaatgctctgtccaaagaactcactatttgactgctacgatcatctgggcaccagcgcatattcagcacttttaagataattcccgacgacaggttataccaggatttgatggcgattgac

SEQ ID NO: 104433 - DNA, 244 bp, Zea mays
  Clone ID: MRT4577_26746C.1
ttttcttctctacagaagggtgtgtccctcagtgcagggctttctatcaaagctggtaggcccaccttattcatatctcttcttcttttcttcttgaaccgtttacttttgtactcgattaccttaagatctctcttttcttattcacacagcttctaccgtccttcgctttccttatctctttcagattctcgactatttctcgtctatctcttctcttatattctttttattcttctatttt

SEQ ID NO: 104434 - DNA, 151 bp, Zea mays
  unsure (1)..(151): unsure at all n locations
  Clone ID: MRT4577_26747C.1
gatcgacatgcnntaggcatgatgagtgaaggancccaggccccannganccngcgacnanagnggggccctgcnacaggcccctccctacatggancctgccgggcgcgaggccangtgannttgcanttgccaccacaancaacaaaaa

SEQ ID NO: 104435 - DNA, 727 bp, Zea mays
  Clone ID: MRT4577_26748C.1
gtcaactaaacccacgacgatggtcgattatggggtcctcgctgctctcctcccccgttaaacccaccatcaccaccaccaccaaatagcgaccccgaggcccgatacccggcctatccgcccatgtctatgtcctactcagtcgtgcgctggctcgggctacgactacgggggtcagatcattgtcctccgcctccgcacacccagcgcgcgcgcggacggcagcatcaccgaataccgaatggatcatcccaaatacgtgcgaaaattacggacaccaatgtgcgccatgaacaaggagctttgaggccgacacgcatgcatcagcgaggcaggaatcatctgtatgccgtcgtgtccagcatgtgacagcctcgtgggcgaccttatggaggttgctgtcccgggcgacaaccccgagattgtcgaccacgagaaggccgaggacatagaggttgcagatgaagagatctcctctatggatcttatcaagatgcgggagattgttggagcttaccttggtagcacgatcaagaatgctgtggtcacagtgcctgactacttcaatgactcacagaggcaggacacaaaggatgatggggagattgctggtcttaatgtgctgaggatcatcaacgagccaacagcatgcagctatcgtctatggtcttgacaagaaggctaccactgacgctgagaagaatgtactcatctttgatccttggag

SEQ ID NO: 104436 - DNA, 149 bp, Zea mays
  Clone ID: MRT4577_26749C.1
cccacgcgtccgcccacgcttacgtggacgctttttcggactcgtagactgtctctaatatcgcaagatattttggggtacatcttcatgtcggcgattccacaccccttctgcgcacggtgtcttgcaccatccaacctttaacattt

SEQ ID NO: 104437 - DNA, 725 bp, Zea mays
  Clone ID: MRT4577_2674C.1
gccggccgggtttcgctttatatatatagattaattaaacctaaaaatctgttaatctttttgggataatccacatcctattctagagataaggattcgatttttctcccgacaaattcctcgactagaggagaatggatggatgagcggcgggggaggagccaatgacaggggtagtaattggatggcggcgtcaccggctcactccttgtccggacactgtctgtctgtccctctcttatccgaatatttcctgtctcctccactctacgcagacgcagctcgtgctgcactacatcatcagatgctagttcgcacggtcaggtatctcaggcaggctcatgttgctggttggtgcactgtgcgagccaagattcatggctcggttgaggggcaaagtgggggccagatggaggcatatcctctgcctgcagtccatcctaccccgttttgttggttgcttttagggtttcttggtgttctgtggtggggttcccccgttgtggggattgcctgccatggtggtgctgccctgcttgtgcttaactgatctgttctggaataaaatattgaagatacagatcatttgaaaatccttcttgttagcgtctaccacggggcctgcctttttgtcattccttgtctccctggcagcaggcctgaaggtgatcgtcctgaggatatagttcagacatcaggaggcatctgtttttttctttttcaag

SEQ ID NO: 104438 - DNA, 279 bp, Zea mays
  Clone ID: MRT4577_26750C.1
ccgacgcgtgagttacatgatagtcattgtggactccggtgtatgcacaggaaggcgtgacaccttggggtagcagaggctccacatgacacaccgaaacagaacagtggcctgcatgaactaccacaggagagctcgtgactaaattataaaaccatttactagtagcatactgaacgctatcaacaaaaatatttacataaagagcgaccatgatctcatgttcttataatacaaatacgaagcagtgacttacgataatacaagtgcaattctgaa

SEQ ID NO: 104439 - DNA, 213 bp, Zea mays
  unsure (1)..(213): unsure at all n locations
  Clone ID: MRT4577_26751C.1
ccggcgaaatgtgtcgtnntcggcggcnngcggcggnngcggcgcanagtccccggcgccttcctggtcgtcgggcccgcgctccccggcgcacgccggcnngctgccgtgccttgggccctgcatctgtgcacccaagcgcggcaacgacatncctccacgatcccgtggtacaacaaaggatacgggcgttccccaatgacggggagcgcg

SEQ ID NO: 104440 - DNA, 676 bp, Zea mays
  Clone ID: MRT4577_26752C.1
gccggccgggtcgggatcatttccctcctatcgatctatcggacactttacttaggacggcactaaaaagagcaccctcctcggctaagacctacctggcacctctcctccacgtctgttcggcggatatgacttagacgtggcatccgatccgcgcttctgctgctgcctgtgtgacatgggaaatacccacagctatacgctcccactggcgagccagtccggatgaaccacgaggctcggccccgcactccatgctgagctgctgccactggcctggtgagcctccgaggtacctcaggcggatttccccgaggactaccagtgcgaaaacgcaacgtatccggtggtagccgcccaacaatcgccaaacacacctgataggtgagacgtggataactcccgcttcgttcatgccggtcgtggctctggttctcttcacctacctggttaaccgaaacgcggttaacctctggtggccgggggtgatgaaggcctcttccaaaacttcctccacggggggcccgtctaacttcggaaacccattctcattcacgccgagaacattctcggcatttgggtctgccagcgtcgggtcattggcatcctccagggcttcctcatcatcgacgggcccgtcttcttagacgaagaaccactctattccgggggcaag

SEQ ID NO: 104441 - DNA, 423 bp, Zea mays
  Clone ID: MRT4577_26753C.1
tcgagcggccgcccgggcaggtacaagcttttttttttttttttttttttttttttttaaattggaaacaaacctttttcctttcatttcaaatggttatttcaggcattggctaaactggccctggcacccctggggaagccctgcaccattattcctaattaatggccgtaaaaggcctcacctggttagttagccgggggaccctgggccggaacccccctagggccaaatttggcaattttcaataaaattgcgggccgttgaggcttgcttttaaggggcccaatccccccaaaagggggcggaatacaaattaattggcggtcctttaaaaaaatggaattggaaaaaccttgcggtaaccaaactaattggcttggaagacaatccccctttggccgcttgggtaataaccaaaaa

SEQ ID NO: 104442 - DNA, 827 bp, Zea mays
  unsure (1)..(827): unsure at all n locations
  Clone ID: MRT4577_26754C.1
ctggccgggagccgccgccgtttcttcattgtcctcgtcgagccgacactgcaacttccgctccctccccgactcgcgctcggcacgcaggcacgcgactgcggtggcgctcaggctcgggctctcagcaacggcggggcagtcccagactcagcgtctccctctcgccaatcgccttgcgccctcgctccgttcctctgctcaccggccgattctgcgttgcaagattttccagcatagcttgctcacctacttctcaatttagaagacctcaatttctggatctgagcatcaaatcaagaccataccactttagtcagtcctgtctgatggcactgactgcagctccagccagtggtgattcacagagtggtcctcagaggaactatcaggttgttgttgctgccacttgtgacatgggcattggcaagggtggggtattgccatggaagcttcttggtgatcttaaattcttcaaagaacttacactaactacaactgatcctgccaaaaagaatgcagttataatgggaaggaaaacatgggagagcattcctgttaagtcaaggccactgcctggtcgtttgaatgtcatacttactcgatctggtagttttgattttgcaacagtagagaatgttgtaatatgtggaagtatgaaatctgccttagagctgctagcatcaactccatactgcttatcaattgnagaaagtttttgtcataggagggtgggcaggtactgagagattatttgaatggacctgcatgtgaggctatccatctgactgatattcagtcaagcattgagtgtgatactttcatcc

SEQ ID NO: 104443 - DNA, 333 bp, Zea mays
  Clone ID: MRT4577_26755C.1
ggcaaaagcccaccccacttttttgccgaattaacttaaaaagggccagccctccccatacataaatggaaaggggccaggggcccccctcagggggctagctggggctaattgccaaaatgattgcccctccccccccgggttcctaagggcaaaaaaagcagcccgggaaaatgattgcccaatcattttttgttgaattaaacaaacaggggcccccggcataaatttcgggggggcttttttttcaatccttcatcatgtttaaaaaaaggccactgaattagctacatttccagggcttaaagccaatactttttttgcgagttcaaa

SEQ ID NO: 104444 - DNA, 336 bp, Zea mays
  Clone ID: MRT4577_26756C.1
cttattcttatcttatacttaggaggcttaaccagggacggggggggataaaactgaaaacaccactgccttacatgtgtgcatgagcttgaggagagcacctataatgcattatctgctccagcagtttgccacttcaacattacaaagaggttaatcaatcattcttggaagatgaaatctgtatcacgaattttatacattgggagaagtgatcaccttaacacacttgaggtgccttaccttcaaactttacacgcgctgcccaacaatgaatgaaaaagcccactaattgcatggatgagaaattcacacctattcatctcttcaaaatta

SEQ ID NO: 104445 - DNA, 375 bp, Zea mays
  Clone ID: MRT4577_26757C.1
agctcagctaatgaagtactaatatagtatttccactatttactgttattttacctgataagttattgaaccctttggcaattgaccatattgtgagcaaagaatcactggttattagtctttcaatgaatattgaattgaagataactattgtatttctatcatacattccttaaagtcttaccgaaaaggctgtggatttcgtatggaaataatgttttattagtgtgctgttgagggaggtatcctgttgttcttactcactcttctcataaaataggaaatattttagttctgtttcttggggaatatgttactctttaccctaggatgctatttaagttgtactgtattagaacactgggtgtgtcatac

SEQ ID NO: 104446 - DNA, 530 bp, Zea mays
  Clone ID: MRT4577_26758C.1
aattcggcacgaggctttttcccattttctctcaaaaagaagaaacagcgaaatttgtaattctcagtgacgccaaccctgactccgtttgacgcggctccgatggtcaccgccggcgacctcgccgctgccgccaactcctgagacctcgtcgcgcctaggccctaggggcgtgagcttgcctccgccgcgatccgggtaccagtcctcgaggatgcagtaccagcacgctggcagtcgaagccgcatgccgccattcgcgcgcggcggcggcgcctacagccgcggacggaagcagttctacccgccgtctcccctcccgtcggcggcgctgtctctgccgctgcagaacaagtatgaggtgctcatggaggcaggccgcctcgctgccgagtacctgttggcgaagggcgtgctcccaccgggctccctgcagcaacgcagcgggacagtcgtgcctggagggtggggccagcttcctcctccgcctccgctttccgtgactttggaagcccaagcttaccacgggg

SEQ ID NO: 104447 - DNA, 466 bp, Zea mays
  Clone ID: MRT4577_26759C.1
agagaaacacagggtataaatcgtataacggagaaatgaaaactaaatatgtaagaaatcagatacagttaacattatagaatttgactgtattgttcagtttcttgtgcctgtgctaggggtggtagagcgtggcatcatgtgtctgcgtggcatcatgtgtttgtgttgagttgtatgtgcttgactgtattgttcagtttgtaggggccaaaaaggctccctccctagattggaccgcctcccagaaaccgctcggcagctctgccaacattgtaactaattcaggcttttgcaaatgctcttgtgcacattcatccaagccacctaggggcacttggactcagaaatcaataataacttgtcttagtcttgtttctatccgaataaacaacgggttcctctcaaaatcttgtttgtcatgtgatggttcaataaaatttacttcaaatacaccaaccacact

SEQ ID NO: 104448 - DNA, 104 bp, Zea mays
  unsure (1)..(104): unsure at all n locations
  Clone ID: MRT4577_2675C.1
nggcaataaagggaatgttatgctttatacaaagaacggaataatggagagatattatgaacatatatggaacatatatatggaaccacactgctgagcaacaa

SEQ ID NO: 104449 - DNA, 554 bp, Zea mays
  unsure (1)..(554): unsure at all n locations
  Clone ID: MRT4577_26760C.1
accacgcgatgaattatactgggagcgtggaactagctactgtcgtgaactatggcctaaacgatggagcctttcctccttggggggaaacccgggtaaaggatcttttgaaaccccccacaaaaaggggaaatctttgcccaaaattttggggggggggggggaaaaaaaccttgggggggaaaaaaaaaaaggggagggggggtgtttttttannnnnngaaaaaaagaagagaggggggtttttttcttttttttttttttttttttaaaaaaaaaaaaaaaaaaaaaaaaattttttttttttttttgggcgtggcgcccgccccccgccggnnggnaagggaaaaaaaaaaaagagagaggaggggggcggcgctccccccttcttttttgtttttggttggtggggggggggggggacgcacacacacacccccccccccccacccctctctttctttttttttttttcttccctcncgcccccgcccgcggggaggagggggggggggggagagcgagaactatcttttttttttttttttttaata

SEQ ID NO: 104450 - DNA, 327 bp, Zea mays
  Clone ID: MRT4577_26761C.1
cccacgcgtccgcccacgcgttcgcgtacgcgtgggggcgggtataaaggccaccatggcggcttcagcggtggtggcggttctggcggtggtggtggcttcggcgctggcggctacggtggtggcttctgcggctccttatggaaccgaagctccgctggtggttctgatggagaagctggcaaccgctgcggtggaggatgaaacggtggcggtgacggcgctggtggacgatactgcagcttccgaactggcgatgaacttcatggcgtatttggatttggccacctaggctaagctagctctaatggcaagggaccctccagc

SEQ ID NO: 104451 - DNA, 986 bp, Zea mays
  Clone ID: MRT4577_26762C.1
cctcgaggccggccgggccgggaaaaatccccaaatctctccactcccagccgctgcacctggcttcttcgccactctctcctctcctcgttcactctgccaggtggccggccgcccctgctcccatctcccacagccgccgccgccctcagctcctcagccacctcccatggcctcgtctccctgctgcagcgaagccgaccaccgtttcctgcagcctcgatagctcccccccccccccccccccatgccgtccctgctcacctcaccttcgtcggccgtccttggacgccgtgctcggcgcccgagctccctacgccggccaccatccttcccatggcaggagctccgatcggcccctgctgaccttggcactcggcgtggctccaagcagcgccttctcccccaggaccggctcaccgtcagccgcgagctcctctccctcacgtcccctacagacaagcagtgtcgccggtgagcagcagccacagcaactccgcgctccgccggcttgcggttttgtcaagcccagtagacagcagcaaccccgatgtcttcacgtcgtgcgctccaccccgatttgcgcagcccctgcgcgacgtcgtccacccgctagatgttgacgctgtgccacgcgcaccaagcgttcgacgaaatgcccaaccaacggacagcacgcgggtctcgaacccgattcggctaggttgttcgatttgtattttgtggtctactctaattacgctttggtcgatgtcgcatatatatgtgtgtgaatatgtttgtatggattcgagttagggaaggagaagaaagcgaagtagaaaagaacccggatgtttcttaggttttcagaggattgtggttgtattggatgtgtgttgaaaatgcctcctcgcaaagagtgtatggtcccatgcatgcgatgtgtgatttttgttggtgaatgcgaaataagtttagtgtttcaaaacggttaattgatagtc

SEQ ID NO: 104452 - DNA, 167 bp, Zea mays
  unsure (1)..(167): unsure at all n locations
  Clone ID: MRT4577_26763C.1
ccccgcgtccggtgctgtctatgtatgtgattagatcagatcagatcagatctgacgcgccctgtacttttgattgatcgtgtctgtctctgcaggctcaccaagatgggggccctggtgtgggagaaggtggtgcaccgccnaccagggnnctggcnngcctcctc

SEQ ID NO: 104453 - DNA, 243 bp, Zea mays
  unsure (1)..(243): unsure at all n locations
  Clone ID: MRT4577_26764C.1
ttgtacatttctgacccccatnccctgggcagtgttgttttcaactgcacaaccagccccaaacccagcaacacccaatatattcttgtgagcatgatacaaattatattttacatctctgccttctatttcttaaacactctgaaacattgactactacctttctaagaagaattgctactgacccgagacaacaacaattagccagaccaaaattacttaaataggattaacaatatatta

SEQ ID NO: 104454 - DNA, 422 bp, Zea mays
  Clone ID: MRT4577_26765C.1
aacgggaagggggccccccttaatttttgttcccaggggcgggggaaggaacaaaaaagggggctaaaccaggccgggcctaaccaaattttttaaggggggggggcccccccccccctcgaaaaaaaaaaattacctttttttcccacccttaaggggggggggggcttttaaactccctttcgggggcccttaaaccaccttttgggcccggcccgccccttgaaaaaaaaaaacttgcccccaaaaaagggggccccaaaaaactggggtttgcccccctttttgcccccccccgtcctggggaaaaccgacaccgggtaatactgtttgccggcaataacggggggggggctctccaaaaacttggggggggccacggggccggttttaaaccccccctcgggaaatggtttttcccc

SEQ ID NO: 104455 - DNA, 796 bp, Zea mays
  Clone ID: MRT4577_26766C.1
cgaggccggccgcccctgctccatctcccacagccgccgccgccctcagctcctcagccacctcccatggcctcgtctccctgctgcagcgaagccgaccaccgtttcctgcagcctcgatagctcccccccccatgccgtccctgctcacctcaccttcgtcggccgtccttggacgccgtgctcggcgcccgagctccctacgccggccaccatccttcccatggcaggagctccgatcggcccctgctgaccttggcactcggcgtggctccaagcagcgccttctcccccaggaccggctcaccgtcagccgcgagctcctctccctcacgtcccctacagacaagcaggttcgaccgtcgcccaaccccctctccagcgcgcgcatggactcctccctgctcacgccggcctgtgcagtgtcgccggtgagcagcagccacagcaactccgcgctccgccggcttgcggttttgtcaagcccagtagacagcagcaaccccgatgtcttcacgtcgtgcgctccaccccgatttgcgcagcccctgcgcgacgtcgtccacccgctagatgttgacgctgtgccacgcgcaccaagcgttcgacgaaatgcccaaccaacggacagcacgcggggtctcgaacccgattcggctaggttgttcgatttgtattttgtggtctactctaattacgctttggtcgatgtcgcatatatatgtgtgtgaatatgtttgtatggattcgagttagggaaggagaagaaagcgaagtagaaaagaacccggatgtt

SEQ ID NO: 104456 - DNA, 625 bp, Zea mays
  Clone ID: MRT4577_26767C.1
aactcaaaaaaaccaaattttattcataaccaaaaggggtccacagatttttctccatccatccatgctgattgggggaaacccaactgaccccctaaagctgcttcctttcttattaaaactgacccaccttgggggcccgtaggaagttcacatgctaccaaacaacaaattttaataacaaaagcctggttgggttgtttcacaaaatacccacacccacacccacaaaattgcgactatttaaaataacccactcagaaccaaagcgcccccaaaagcccgttttacttatataagcactcccgcttttttctccatggcatccgcttcctcctcccagaaaaaaaaattacccagcttggagccctttttcaaaggaggaggagcactctccacgttctagccggaaaagcgggggaaaacaaatttgggcgaggaaccaccagggttttaaaaaaaacaaaatctttggaccacaaggagccctcctccaagcaattcctgctccaccatgttgttgcaataataaacctttgcaccaagggcctttccccatgtcccggcttggccacccccgccaaatatggtcacggcatcggaaaactctgaggggccaaaggcc

SEQ ID NO: 104457 - DNA, 198 bp, Zea mays
  Clone ID: MRT4577_26768C.1
ttagagcccccctatattctttctagtgtcttaagttccaagacttattccttacaatcagtaaactccctggtaaaatatatgattaagtcttggaacttaagacactagaaagaatatattttaccagggagtttactgattgtaaggaataagtattatacatgtttttatcaagtttttttttccttttaaaaa

SEQ ID NO: 104458 - DNA, 612 bp, Zea mays
  Clone ID: MRT4577_26769C.1
gttaagagatacagcactgaagaacatcatgaatcatatccattatgaagacgaaagtactaggtacctttgtgtatgcccagtaaacaaggcactaaatatgatttgttgttgggttgagaatccaaattcagatgcattcaagcggcaccttccaaggatctatgattatatatggcttgctgaagatggcatgaagttaaaggtgtatgacggcacgcaagcatgggatacagcttttattgtcaaagcatattgctcgactgacctggttcatgagttttctccaacactcaggaaggctcatgagttcataaaaagtttgcagatccctgaaaaccaacccgaccatgaaaattattaccgccatagatcaaagggttcatgggctcattcaacattagacaatggatggtctgtatctgattctacagcagaagcaattcaggcattgttgttgttatcaaagttctcttccaatcttgtgggggatcccataaaagaagaaagattatttgatgcagtggattgcttgctttcttttatgaataaagatggtacattttcaacatacgagcgtaagagaactgcatctttgttggaggttctcaa

SEQ ID NO: 104459 - DNA, 117 bp, Zea mays
  Clone ID: MRT4577_2676C.1
tcgtatacgcgtcggagagggacaaatgaagggattaagttttaccctgctggaaagatcaaggatgtggaaatagccaagacgtaatatgcactatttgaaatggatactgataat

SEQ ID NO: 104460 - DNA, 330 bp, Zea mays
  Clone ID: MRT4577_26770C.1
gggggcgggaaaaaacaccaacaaaagtcggctcaaacactttaatacataaattgccccccaaacatgatttcttacccatgcccctttccggggacccgatcaattagttatccgggaactcaagcccgggcaataacctttaaccccaaaataggagaatgtcgcattgtttaaaggatgctgtgctctcaagttaaaaatggtggacaaatacctaccaccctttgggtcctttctatgccctgaggaatacccctccatgctggtctttttccaaagggggcttttaacaaggacctccttcatggactaattcatatttcccca

SEQ ID NO: 104461 - DNA, 480 bp, Zea mays
  Clone ID: MRT4577_26771C.1
tccactcagtgagcaaaacattaatgtctacactagacatccctagaggggtgggcacaagatggctctcgacttactgccctgtctgaccatgtaacgcacgctcctagacccatatctggctcttactgaagccactctaatcaagacaccttcatatgagaggttctcacctcaccacctgcctgcttcttctgcacacagcaactaccgagcgtcgcaccttagctctactacactatctacaaaaataggtaatcacaatggagtacagatgattagccccgttgaaatcactctaagggacttgctcccctctgacttcaccttcagtgccgccacttcatcgcaccaaactgatggtgcttctaatgaagatagaacggggcatagcgactgggatcactaacgccacaatcctgcggaaaggatactgaacgagagcacttcagacattggagctaataataccatatgtac

SEQ ID NO: 104462 - DNA, 2022 bp, Zea mays
  Clone ID: MRT4577_26772C.1
ctcttttaacatatctcggtgactctgtggaccatggcagtggatcttctggtctcaaatcaccattagcttcacgcccttcttccttcccagggattggtgttccttctgaagcccttgtgagatggcacatgcgccttgaatattttgcttatgaaaccttgcaggacctacgaattggcaaactttttgaaataattgtagattaccctgagagctctcccgctattgaagacctaaagctgtgtttagagtacacgggccaacactctaagcttgttgactcatttatctcatcgcttcgatatcgcctacttactgctggtgcatcaacaaatgatatattgcaccaatatgtgtccactataaaggcattgcggacaattgaccccaccggggtgttcttggaagcagttggtgaaccaattagggattatctgagaggtagaaaagacactatcaaatgcatagtgacaatgctaactgatgggtcaggaggaagtggaagtggaacaggcaatgcaggtgacaatcttctggaagagttgaacagagatgctgaaaaccaggaaaatgctgattacgacgatcatgcaaacattgatgagaaacaagcatggctcaattctgaaagctgggaacccgatcctgtagaagcagacccattgaaaggcaacaggaacagaaggaaggtcgatatacttggactaatggttagtataattggctcaaaggaccaactagtcaatgaataccgtgtaatgctggcagaaaagctgctcaacaaatctgactttgaaattgattcagacattcgcacattggaactcctgaagattcattttggtgagagcagcatgcagaagtgtgagattatgcttaatgacttgattgactcgaagagaaccaattcgaacattaaaacatctttgctgaagtcatctcaaactgttcctgggcaagaggaggcagaagtgtctcatgatgttttggatgccactataatatcatctaatttttggccaccaattcagatagaagaccttgttgttcctgcttcagttgatcagttgctatcggattacgcaaaacgatttcaccagataaaaactccacgaaagctattatggaagaaaaatcttggaacagtcaagttagaactgcaatttgacggaagaagcgtgcaatttactgtagctcctgtgcatgctgcaatcataatgcggtttcaagagaaatctagttggacttcaaaggcacttgctacagaaattggcatacctatggattctcttaacagaagaataagtttctggacaagcaagggggtcctgactgaatcagcaggaccagatgccgatgatcgcaccttcactgttgtcgatagcatgtctgatgtcaacaaggacagtattgtgaatgaacgcatggcagagtatcagatgactgaggaggaaggtgaaagctctgtggcttcagtggaggaacagcttaagaaagaaatgacagtctacgagaaatacatcgtcggaatgctaacaaattttgggagtatgtcgctggacaggatacataacactctaaagatgttttgtattgccgagccatcgtatgacaagtcgctgcagcagctgcaaagttttctttctggtctagtagcagatgaaaagctagaaacgagggatgggctgtacttgctaaagaggtagcagccgtttctatactaggatagtgggttgttagactagggttgtacacttgtactatttgctaatgagttgtttagactagagatgtcaggtaatcagatataacacacttcattatcaaagctatgttatcgggttcagaggcagcttacatatcctatctcacatcctcgtttattttaaacttcattatgtaaacaatgactatgaaggtgttactatgaaggtatttgggatggctctaggttctagatccagtatggagctgtagtttatgtcagtttaaaaaaaaaaaaaaaaaaaaacaaccccc

SEQ ID NO: 104463 - DNA, 1563 bp, Zea mays
  Clone ID: MRT4577_26773C.1
gcattatgattgcagcatgcacaggagctacagtaaattgcacgcttcttccgtcaaattgcagttctaacttaactgttccaagatttttcttccataatagctttcgtggagtttttatctggtgaaatcgttttgcgtaatccgatagcaactgatcaactgaagcaggaacaacaaggtcttctatctgaattggtggccaaaaattagatgatattatagtggcatccaaaacatcatgagacacttctgcctcctcttgcccaggaacagtttgagaaccaattcgaacattaaaacatctttgctgaagtcatctcaaactgttcctgggcaagaggaggcagaagtgtctcatgatgttttggatgccactataatatcatctaatttttggccaccaattcagatagaagaccttgttgttcctgcttcagttgatcagttgctatcggattacgcaaaacgatttcaccagataaaaactccacgaaagctattatggaagaaaaatcttggaacagttaagttagaactgcaatttgacggaagaagcgtgcaatttactgtagctcctgtgcatgctgcaatcataatgcggtttcaagagaaatctaggtattcaaagaactgtattattgcatgtatcatttgtactcttttgactaaatctatcgaactttctagttggacttcaaaggcacttgctacagaaattggcatacctatggattctcttaacagaagaataagtttctggacaagcaaggtctggcacacatgtatcagcggataattgttgctttattttttttatgtgaaatatgcttgtcatcatgcagaacatgctaacatgactgttggagcataatcattattattgtatattggctgttgctgatagcttctgtgatgtgatgatatagggggtcctgactgaatcagcaggaccagatgccgatgatcgcaccttcactgttgtcgatagcatgtctgatgtcaacaaggacagtattgtgaatgaacgcatggcagagtatcagatgactgaggaggaaggtgaaagctctgtggcttcagtggaggaacagcttaagaaagaaatgacagtctacgagaaatacatcgtcggaatgctaacaaattttgggagtatgtcgctggacaggatacataacactctaaagatgttttgtattgccgagccatcgtatgacaagtcgctgcagcagctgcaaagttttctttctggtctagtagcagatgaaaagctagaaacgagggatgggctgtacttgctaaagaggtagcagccgtttctatactaggatagtgggttgttagactagggttgtacacttgtactatttgctaatgagttgtttagactagagatgtcaggtaatcagatataacacacttcattatcaaagctatgttatcgggttcagaggcagcttacatatcctatctcacatcctcctttattttaaacttcattatgtaaacaatgactatgaaggtgttactatggaggtatttgagatggctctaggttct

SEQ ID NO: 104464 - DNA, 242 bp, Zea mays
  Clone ID: MRT4577_26774C.1
tctccggcggccggtcgtcgccgcgccgtgagcgcgagcacggccgagaggaagaggaggagcgggaagaggagcaaggcggtggaggtgggcaaaatgcgaggagctacaggcatgtgaaatcccgcatcatagaaggctccgtcatcgtgaatccggcggtgcacccgaccgcgtctgtcgccggcgaagacaagaacctcgccgtcctctgcttcgaagtgaacgccagcttcgacgat

SEQ ID NO: 104465 - DNA, 241 bp, Zea mays
  unsure (1)..(241): unsure at all n locations
  Clone ID: MRT4577_26775C.1
cgacccacacctactcctactcataattaataacaactataaaatttaattttctgaaaaaaacatatcacacaaagacgagttaaatttataaaaaaaaaaaaaccaaccactaatngttctgccttcctaaagaaccaaatcttacttcccctttcatccaacataataactattccatagtgccacccaaattaaaaaaactccccgaacatttaacaacattaataacttaaaaacc

SEQ ID NO: 104466 - DNA, 325 bp, Zea mays
  Clone ID: MRT4577_26776C.1
tcttccgttcccatctcgcgtagccgccgctaaaatttcccctctcctccccgtgaaaccctagccgccacacaagagccaaatccctgccgccgagaccccccaatccgctccgtcggatttcttcccgcgaatcgaagtttccgtcgattcgcggtcgattagggcggggcctcgccgtcgctctcgtgattccgagggttcgcgcgtcgcgcagcgggattcacaccggccgccatgtcgaggtgcttcccctacccgccgccgggctacgtgcgaaacccagtggccgtgccccccgttcccgtgggggagacgaccgcta

SEQ ID NO: 104467 - DNA, 292 bp, Zea mays
  Clone ID: MRT4577_26777C.1
aaacaggccaacattcctacttaaccggccaaaccaatcccatggaaccagggggttttacagacccaaagaagcccgactcccgggcgacaaagcaaccagctcccacaactcctacaatacgaacacggggggggggccaaactaggcccacagatccgggacaccggggcggggaattccccacacctaacctagccgccgaagccataaagaggggggccccggcgtttgggggcgcacaccacgtccaaaggggggacgggtttgcgacgggcgggctccggggagg

SEQ ID NO: 104468 - DNA, 783 bp, Zea mays
  Clone ID: MRT4577_26778C.1
gccggccggttcgggccctctcgaatcctagacatctgttacttctccctccgccgccactcccctcccattcaccgccaccgcctattccataccgtgctccgccacctctgttgagatggagaacatatgtcaggtgagggtgatgggacggcaatcggcatcgatctcgggactacgcactcttgcgtcggagtctgaaaatacgaccgtggcgagatcatcgtcaacgatcagggcaaccgcaccacaccctcataagtcggcttcaccgactccgagcgcctcatcggagatgcggtcaagaaccaggtcgccatgaaccccatcaacatcgtctttgatgccaatcgtctcattgggaggaggtttagagactcctctgtacaaactgatattaaactgcgggccttcaaggtcattcctgggcccggtgacgaaccaatgatatatgatcagcacatcggcgaggagaaacagtatgcaccctaagagatctcctctatggtgtctcatcaagatgcgtgagatcgctgaagcttaccttggaagtacgatcaagaatgctgttgtcacggtccctgcctatttcaacgactctcaaaggtagggcacaaaggatgctgcattgattgctggcctcaatgtgctgcgtatcatcaatgagccaaccgctgctgctattgcctatggtcttgacaagaaggcaaccagtgtcccctgagaagaatgtcctcatttttgaccttggaggtggtaacttcgatgtctccctccttacaa

SEQ ID NO: 104469 - DNA, 623 bp, Zea mays
  unsure (1)..(623): unsure at all n locations
  Clone ID: MRT4577_26779C.1
agtgtggcaacgataaatctattcaatgtatttttaaaatacttgtcccttacacaaattaagagtttcaggttgttctttttgcggcgtcttaaagcaaatccaacacgactatctttagtctcttaccaatcctcgtcctcatatttaaactccgctctgcaaattagtgttttgtatggcaatatagctaacatataggtcttacaatacagcaagcagacatgcctaaaaatatgacagcattattttcctatgggcaaatcttccagctcaaccgcatgtgcaacggcaatggcgcaacaaagctcagcttctccagatcaaagaaatcgtggtcagcacctgaagactgcagcttctgcgtggccgctagatgtcaggaaaggatcgtctgcttgcagtgtagatgcaactgaggctgctgctcatctgtgcttccaccgcccaatgggacgcttccttttcttgagcatttcctcgtcgactgtttacggcatgggagcctgngaggaggcgtccagttcttgtgcgcttgccgtccgtacttgtaaagaaaaaaaagagaaagtatttcgtactaaccagatcaacccanaaaatgttgagatacgtttcaacat

SEQ ID NO: 104470 - DNA, 357 bp, Zea mays
  Clone ID: MRT4577_2677C.1
aggtgatgctatttgtatttgagtgcctttaggggtaaatgctttgaaattgcttttactatttgtgttcggagccacactttttttattttataacttgatggatgctgtcacagtattcatatgggaagctgcaggctccatccatttgttattattattattattatgctttttggctagttctctgatgccctatttggcacaggtaaggttgatggtcggtcttctaaaatctgttgggactggagatctaacaactgcagatgttgagagaattctggatgcaaagacggttactgctgcacccagtatggcaccttcttgtggtctgtaccttgctaacgttaaatatga

SEQ ID NO: 104471 - DNA, 545 bp, Zea mays
  Clone ID: MRT4577_26780C.1
gggaacaaaatcagcttgggttgggagccccgaacgttttttttgcaaagcgcccattctttttcaccatggggcttcgccaccgggcggggggggtcaggggcctccgtcgggcgttgtttttccctccctaattaaagaccaccggacgcctgcctaccacctggcgaagccctttttggccccggggggaagggccccggcccctttgaaccccgcgggggggcaggggattcttattacccccgggtgcttgaacccgaacttctccttggcctcccttaaaagcttgccaaacgtggggtggttgaagtacaccacgggcaccacgtaccggaaggactgggaccccttgcccttgccggcgacgtacacgggcacctgccccttgggcgtggtcaccgggggcttgccgccgccgtccgggagtattctttgcccgccgccgccgggcggtcttcacccgagccttaggggccgggccagggaccggccccaccgaagtaccggggccagttttcttggggttgcggttgcggtgcccc

SEQ ID NO: 104472 - DNA, 269 bp, Zea mays
  Clone ID: MRT4577_26781C.1
ggggccacaaggcaaaaaaaatgggggcccaaaaaaaaacctggctggaccccagagaattacgggtaaaaacaggggcccattttggccggaattttcaacaaacccatttttggacccaacccggggggcccccaaaggggcatccccaaaaattaaaccccccctttacaaaaaaatgaggggggggaaaaacctccgggggtaacaaaaaagaattggggaatttcgcccttaccttaaaaacaaaacgtatttctttacccccc

SEQ ID NO: 104473 - DNA, 711 bp, Zea mays
  Clone ID: MRT4577_26782C.1
agcatgctgttgagcaaagccttgaaaatgcagcaagattttgaagacaagaaacacgaagttataattgaaaatttagaaagcaaaataaaggaacaaacagctgctgttgagaagaactttgaactccaagcaactgaaggtttattggcggaggccgaagctaaaataacagaactgaacacgaagcttctccgccaatctgagcagtttgagcaagaaaagcaagatcttaatgtaaaacttgaagccgaagctcaacaaaattcagacttgaaaagactattaacgggccttcaagaaaaatgcttggaatttagcaacaaatgtattcaacgattaagaagaattttccactcagttggagccagcagtgagacattcaccccctcagctgaagatctaccgaaaacctttgatcatattgagggtgaaattgacgagctcgacgaagttatagctgggcatggtgacttctgtgcctgggtagcttctcggggcactgctgcagctttcctaaaagctggctgcgatcacggaaagattgtcaataggccaaatttcactttatcaccatcaatcctagatgacattcctgatctcgcccgaagtatctccaatagatttataaaaatgatatggacaaaaggtggacgagaaaaggctggagacgaagctcggagtcatcttgaaccagatgacgaagcctaa

SEQ ID NO: 104474 - DNA, 282 bp, Zea mays
  unsure (1)..(282): unsure at all n locations
  Clone ID: MRT4577_26784C.1
gtgttgaanctccacgacaccgtcgcacccattctttccagggagctccaacacgccgtagtaccattgtacgctagacatctgcaaacaccatgcgaaccaagtggaacatgaaactatgcgagatcgtatgaggaatcgccgtaacataaggctaacatctaattaggagcatcttgagacagaagatggagagattctcctgcaccatggaggtgacgaatatggatgatcgtatgcctttaaaaacgtactatcatgtacacgtaagcgaagtaaacc

SEQ ID NO: 104475 - DNA, 182 bp, Zea mays
  Clone ID: MRT4577_26785C.1
attcggctcgagcctgatgcagggcctggttttttttcatgcgcgacagctccgtcctcacggggctctacaaccggctgcgaggtggccagctgtggctgtaacctgttggggcgatgccatggtaaccgtgttcgttaacccccagggacaaccaccaggcctaggtgctgtctcgcgct

SEQ ID NO: 104476 - DNA, 274 bp, Zea mays
  Clone ID: MRT4577_26786C.1
ggacgcaccacatccgtcaagcaccaggtcatccctgccaactgggaggccaggacagcctccaccggcaggtgggtaactttagagctgactctccattccaccgacctatgcgatctcaaccaaagcgcggtggttcccgtgcatggcattagccatacatgcatcggcacttactgtcgagttgctgcgacaagccgattactccaatggtcccgtgacgagcagtcatcgcgacatcctccgtctacatcatcctcagctcgatccagtg

SEQ ID NO: 104477 - DNA, 152 bp, Zea mays
  Clone ID: MRT4577_26787C.1
gagctcactattcggtttgccgccctttatttttttttttttgagggggtataatttaactatgggaatgggcatatcaaaccagagggtgacataacacctacttcccaaaaaacttagacagcttttaaaactaacatgtaaactggccc

SEQ ID NO: 104478 - DNA, 258 bp, Zea mays
  Clone ID: MRT4577_26788C.1
ataggtggccgcaaatcaagagggggccgaataattacagaaacccccctttggggatacactgcccaaccacaacaaaaggtaacacagggggccccccaaccccacaacaaaacggtgtttcccctcccccccctctttacacatcattcggggggacccgggggtgcccccacacccaggaccacaaaaacccccgaagggtggagcaaaattggggtccccccctcccgggacaaaaaaaggcctccccccccc

SEQ ID NO: 104479 - DNA, 386 bp, Zea mays
  Clone ID: MRT4577_26789C.1
aaacacgcgtccgcgcccacgcgtccgcggacgcgtgggccgcgctcctctgctagtctgctctgcaactgcaagacgattcgtttccatcgccatcggtgctgctcgagctcgactgctgcagctgctaccagtagtgagctgtgtgtgtgtgtagtatatacaatattcgtataaactgctggtctcaatcgagtcgtcgcccaatcggttgaatcggggagcagaggcatcgcccccacgcccaatcatccgcccccaaatccccagaagcacccacccctccgcgcgcgagatcccacgcgcgttccttccacagtcccaccaccccccggggacgcggactccctcctccgtcctcccccccgcggtcccagcccagcggt

SEQ ID NO: 104480 - DNA, 1211 bp, Zea mays
  Clone ID: MRT4577_2678C.1
gcaggagcctcgaaggggccgggtccctttaattacaaatactgcaaccccttctcctcctcctcccccctccctttgcttcccctttactccccccctctctccttcatgtacgcaggtgcgcgccgtgctgggtttgccggtttctcctctttcgccacggagcaaaagccgctcgcccttgtccaggctccgcattccggcgccactgccagcaagccggaacagtaaggcgcctggcctctctccagttctgactgaggcctgagggcgcgcataggggagctcgtcatggagttctccttcaatggggtttgatgcgaggtgctggtgctgccaaggtaaataaagcggttgggataagtttgtaaattgctttgtcaaaccaggacaaggttctgaatcaggggcaggcaacctctcgcgtagcctgttcatcttcatcagacaggcccaaggatatgtcgtcgtccaacaactctgtcagcgcggcgctgtcaggaacgacgcccgtgttccggctgagagtatggcagctgattgccatcgccgtcgggatagtcatggcgatcctgctcgtcattgcgttgtgcctttcgctgcggaggaaaaagaagacagtgaaagggttcgacaacacttcgctggccgagatcccgatcgtctccaaggagatcaacgtcgacagagtcgatgcgcagagcctacatgacggtgaagcgcccttcatgccggtgcaggataagtactcgcagaccaaaggcgcagggcagctgggagggcgtagatccgtcgacgtcgacgcgttcagccagttcagctcagtgtacaacgtagagaagggtgggagctcatactctgaagattacagtcacagcagctctggtccagctaggaaaggtagctcaccatatgcatattcagcatcaccgctggttggcctgcctgagttatcacatctaggctggggccactggtttaccttgagggacctggagtgtgcaacgaatcggtttgcaaagagtaatgttcttggggagggtggctatggagttgtctacaaggtcgtctggtaaatgggaccgagattgccgtgaagaagaccttataatctgtaagtgtgcagtcttgctgagtttatgtcatggaccttcggtccattaggatagctgtcttctccggcgaggttattaccctctgccgtaggcttg

SEQ ID NO: 104481 - DNA, 879 bp, Zea mays
  Clone ID: MRT4577_26790C.1
cggccgctcgaggcggccgggcgggaaccttgcgagaccaaaccaaagctgcggcggcgcgcgcataggaggcgaatcagcagcggaaccaagccgccgacgccaccatgggtatctcgcgtgactccatgcacaagcgccgggccaccggtgggaagcagaaggcttggaggaagaagcgaaagtatgagctcggccgccagccagccaacactaagctttcaagcaacaagacagtgaggagggtccgtgttcgcggaggtaacgtgaagtggagggctctccgtcttgacactggtaacttctcatggggtagtgaggctgtgacccgcaagacccgtctcctggatgtggtttacaattcgtcaaacaatgagcttgtgaggactcagacccttgtcaagaatgccattgtgcaagttgatgctgcccccttcaagcagtggtacctgactcattatggagtcgaaatcggtaggaagaagaaagctgctgcagctgccaagaaggaacctgctgaggggcaagaggctgaggttgctgctgctgccacagaggaagcaaagaagagcaacaatgtccagaggaagcttgagaagcgccagcagggacgtacactggactcgcacattgaggagcagttcagtggtggaaggctgctggcctgcatttcgtctcgccctggacagtgtggcagagctgatgggtacatcctggagggcaaggagctggagttctacatgaggaagctccagaagaagaagggcaagggtgccacagcttaggccgaagagctgctgcatgttactcgttggattttcttagatgttgcgtccatgtcatgtttgcagacatactgaacaccattttctgtaaact

SEQ ID NO: 104482 - DNA, 318 bp, Zea mays
  unsure (1)..(318): unsure at all n locations
  Clone ID: MRT4577_26791C.1
aacacgccctatagcgatgtcgcgaacgaggcacaagcttctttcttccgggcagatactttcttatttctgggaagccacagacatcaggacttccctcagttgngaaagtttttgcccgggcggacggctggtacctcgaccgctgccactcttcgggcgacttccggccgctgggggggggtgctcntggccccgtgctcggtcccgtgcttggcgttgccttggccttggctggtgcctgcgtgaaattgttttccgttctcanttcccccccccctccgagccggatgctttttgggtngggcctggggtgcc

SEQ ID NO: 104483 - DNA, 261 bp, Zea mays
  Clone ID: MRT4577_26792C.1
gggtgcaagcgaaagcacaccaattgatctcctctaatcccctgttacggttctcggttgttcataacgtgaaagcaaaaccaacggttaaagaggtgaagcgaaccacatcgtcaccaagcctttccagctgtttagaaaaaggactattacctaactgttaatcgtccctcccaaaccgagtggggtgattttacccaacacctccctcttgacgtaaacaccgtactaggccatatccaaatgtatagcacggtttgg

SEQ ID NO: 104484 - DNA, 389 bp, Zea mays
  Clone ID: MRT4577_26793C.1
gtgtgatcagtgtcttatttggtattttttgttaaacccacccacaggaaacgaggggaggaccggggggctacccaaggaattaatggccggcccccgaagggaacccaatgttcccaaaggggagaggcaaaaaaagctgggagaaaaagaggcaaaagcaactactgggggaaaaagagatccctgaaaaatccacaaaagaaaaaaagcgggagcaaaaaaggtaaaaaccggggggccccaaaggggggggaaaaccaccttattggcggaagctaagaggccccttttcagaaggaaaaaccggggcgcccgcgggcttaaaaggagccccccaccccgggggaaggggggcttgccaatgggcaccacggggggtttttttt

SEQ ID NO: 104485 - DNA, 334 bp, Zea mays
  Clone ID: MRT4577_26794C.1
atttgtttttttaactgaacgaatcccatatgtacccatggcatacagagaccacggtgaaccctgccttaatggttctgacacttaaatccaatggtatgactgagtataatgagctgttacatatagatgctggtatgttggaccatcttcttcatgagaaacatggttaccatgtgtccaggtggaatcataacgcacagcaaaatgataaaccagccgggtctgattaactgtcccctgtaattctagagagatcatttgttaatgctatcattttgtgcatgtgttgctcccaggtttatggcactcctcctatacttgttggaacgat

SEQ ID NO: 104486 - DNA, 259 bp, Zea mays
  Clone ID: MRT4577_26795C.1
acccagcatccgcaattacccgaccacaccggtcctccgagtccagcagcagccccacgccatgatgaagttctgttcttttaacaatatgtctaggcaggataatgcttacccgccccaggtggcatgaccaagctgaaaggcatcaacacatgcatcaccatatgagacaaccaccatgagactgcacatgagcaagagctcagctgctcaagctcgcacccttctacctgtagcatacaacaatgtgacccgagct

SEQ ID NO: 104487 - DNA, 257 bp, Zea mays
  Clone ID: MRT4577_26796C.1
ttcttcttttcagccgcctccatcactcttaccgatcatttttagacaggatggcgggcttccacttccttctctctctgacacgctaccttttctctcgccccttccgcatataatggctacatccttctcaccacctaccttcgcacctacaagatcatttattacttctatgtcaaagtgaactattccgttcacaaagttatgccctacatgatttaccacttccttacccgttctcttctgtaacttaacca

SEQ ID NO: 104488 - DNA, 289 bp, Zea mays
  Clone ID: MRT4577_26797C.1
cttattctactcctctgcagcctggtggccaaagtggatttctcccttcaggggccgctgcgcatgagatgcttctacccatggtagactcacagctgcctgtggtgaactttggctccctgccgccagcaccacctcctgccccgcctcccctttctctgttacctgtgggccctgctctgcagccccccagcctggctgtgcggcccccacctgctcctgctactcgggtgctgccttcacctgccaggcccttccccgctagcttggggcgagcagagctgcatcc

SEQ ID NO: 104489 - DNA, 593 bp, Zea mays
  Clone ID: MRT4577_26798C.1
tttttttttttttttttttctaatattgcatgaacttagatatcaaggttcaaagcatctaaggatttcctaactaaatgagaaggaaaatgaagattacaagctaggaagatgttagagagatagttcaacggttcaactctctcctcctatttatatagggttattcatatttcataaactattcatagatacataaagtctatccactcatacaggatcaaaatggaccaaatcttggatttctttatctgacgaccacacactcttcacgaagttggttcacctcaacgcaacctttcgcgctgacaccacatgcgccttcgatttcctttagaaccgtgttgtcgggttttgaggctcaaattcggtgaaacccgtgaattgttgtgttgtctggttttgaggctcaacgaccaaaatcctcatgggtaccgtacgcaccccacatccttgacatgtgccccaccgcccccaaccacgttgacgatatatgatccacttctccatgtccttgcgtctgtcattgttcctaggtgtcagtcgccatggctactcatctggcttctctaggtcctcgatcactcgtgccg

SEQ ID NO: 104490 - DNA, 1374 bp, Zea mays
  unsure (1)..(1374): unsure at all n locations
  Clone ID: MRT4577_26799C.1
tttcttttcatttctnnttgtttgatttgnatttgnatgtgcgcctgcgctgttgnatgagatgaaaactagcgtcgtgttgtgatagnaacgnccatttttgccggccccagctccactcgagnnaatttgaagggagaatttaccaacnngtggggnnagctgaatnnttttttgcttccttctcatttttccacttctttccacccgcgtctctgaggtggggggtggctnnngcgatcccccttattccggaccgcccgggtcgcccatctttgtgcgtccgcgcggtgccccgtgggcttgaggccggccggggcccctgccctcgcctgctgaaggaagccgcctttttggagtttggactcgggaggacagcctccgcactttccgtccgtcgcgaggaattcctgcccgggcgggcgtagagcagggatggctggaaaaggaagctatgtacctccacaatatattcccttatacagcctagatgccgaagaggatcgtgtccctgccgtggaagagaaccatgctacgcgccctaaactaaaccaggatccaacacaatggtcatctggcatctgtgcctgttttgatgatccccagagctgttgtattggtgcgatttgcccctgtttcctttttggaaagaatgcacaattcttgggatctggaactcttgctggatcatgcactacgcattgcatgttgtggggccttctcacaagtctatgctgtgtatttactggaggtctagtattagcagttccaggatctgccgttgcttgttatgcttgcggatatcgcagtgcactaagaacaaagtacaatcttccggaagcaccctgtggcgatttgacgacacacttattctgtcacttgtgtgctatatgccaggagtacagggagatccgtgagagaacaggcagtggctcctcaccagctcctaatgtgactccacctccagttcagacgatggatgagctttgatctttaactgatatgaatgtatgttatctgacaaactttggtgtgtggcctggtgactagtgctgcctttgcctgttggcattttgacatatttttgttcttgggctctcacaacgctgctatgttgtttgtagagttgtaaacacgttttgaactagtgaaccactgacagttcacggaagttgtaacacagttgtaccatggaactgtagtagaattaagtgtattttttttgctatttatataggtgagaggatgagaagggaaaagaaaagaaatgcgcttatcatgcagaatgtttcattgtgtttagttctatgaacaatccaatattgtggtgagtggttgtttaagtttcagtttattcaaaagatttcgttatac

SEQ ID NO: 104491 - DNA, 326 bp, Zea mays
  Clone ID: MRT4577_2679C.1
gagacgccatgtttgtgttcaaccttcatttaaggaggtgagcgactgctacaatggcgggatgtgaccctcctgcagcggtgctccacgcgaccaccgccgtcccaatatacgccagtatagtaggtactcctataagttcctacttgcgtgaaaacactaccactaccagtcatggcatgactcagagtccggacatgtgtaggcaacatactgaagagatggctcctgtcgtcattattagcatctacgacgatgcgtcactgttggcgatgcaattaaagggcacgataagatactgctccactgtcacactattcgtggag

SEQ ID NO: 104492 - DNA, 310 bp, Zea mays
  Clone ID: MRT4577_267C.1
cccacgcgtacttttattagcgatttatctttaggaccctggactcgctaggagcccatgtggtatgatctacacatttacatgtgccattctgatgtgttctagctttctgatatgactcctaaaaattgtgatgacatatctttttctagggtagtgctgaagaatatgacggtcaacgagaatctcctaatgccattgctatggcaagtataaccctcgaggatgctcttgttaaaggtgctgatgcttgaaagaattatggcaatgaaaaactgttgacctcagaaaaagataggtgtggaaacaa

SEQ ID NO: 104493 - DNA, 751 bp, Zea mays
  Clone ID: MRT4577_26800C.1
ccggccgggaaaaaaaaattctttctccctgcccctgccctcgcctgctgaaggaagccgcctttttggagtttggactcgggaggacagcctccgcactttccgtccgtcgcgaggaattcctgcccgggcgggcgtagagcagggcgaagcattcgttggggacgaacgtttagggccggggatcggggaacacgaggctgcgcgttggcgcaagcaagcaaattttgggtcctagcttgaaggactgccatctttttttttggttgctggctgcgatccccctatctaccacctgattcatctttgtctccgtcggtgccgccctctccgccagcctgaccccagggatggctggaaaaggaagctatgtacctccacaatatattcccttatacggcctagataccgaagaggatcgtgtccctgccgtggaagagaaccatgctacgcgccctaaactaaaccaggatccaacacaatggtcatctggcatctgtgcctgttttgatgacccccagagctgttgtattggtgcgatttgcccctgtttcctttttggaaagaatgcacaattcttgggatctggaactcttgctggatcatgcactacgcattgcatgttgtggggccttctcacaagtctatgctgtgtatttacctggaggtctagtattagcagttccaggatctgccgttgcttgttatgcttgcggatatcgcagtgcactaagaacaaagtacatctttc

SEQ ID NO: 104494 - DNA, 375 bp, Zea mays
  Clone ID: MRT4577_26801C.1
aatagtacgcctgctgtaccgccgcggcatgtatgggcgcgcgttcatgctgcggtactgtgggtcgccgcccccagcgctcagaagaggactggcacgctgtgggactacactgcgcgcagtggctcccacggagaccgaggtggagacgtcgcaagggcagccggccaaccgcacctgcgagcaaaagacgcagcactacgacggcggccacaagaggctgctcaagagccacgacctctaccaggacatcctggacacgaacgagtaccccagggagtcggagagcaccgaaggatctccgcgagattaccgcccagcacccatggaacctgatgacgatctccgccgtcgaggggcagtggctgaacatgc

SEQ ID NO: 104495 - DNA, 354 bp, Zea mays
  Clone ID: MRT4577_26802C.1
aaatagccaaaaaaaaaacacttaataattctactacagttccatggtacaactgtgtttacaacttccgtgaactgtcagtggttcactagttcaaaacccgtgtttacaactctacaaacaacataggggggttgtgagagcccaagaacaaaaatatgtcaaaatgccaacaggcaaaggcagcactagtcaccaggccacacaccaaagtttgtcagataacatacattcatatcagttaaagatcaaagctcatccatcgtctgaactggaggtggagtcacattaggagctggtgaggagccactgcctgttctctcacggatctccctgtactcccccacgcgtccg

SEQ ID NO: 104496 - DNA, 583 bp, Zea mays
  Clone ID: MRT4577_26803C.1
gccggccggttcggatctcagatatatatgctctttagcaaatagcgatgatgtgcgatacgaattggtgtactttctgcgataatgccatcagcccttattccgattcgctttactgctcagaaagttgtttaagacatgacgccttgcttcatcatcctatgctcggatatgactatgctgagcttcaaggttttcctcatgttggaagctctgagattgctaaaagaagaagatcatccactcactcctcactgccaaatcaaaaactaccttctttatcctcttcattttcatctactttttcagatgagccttttacaacaatcatctatcaaccaaaaccacgacatgtttcgtctactgattttatggaacaaacctaatcaacccttcacattcttctcaaattttctctctctttctccattctctttgtatataatctcgtataaaaccttatgacttgaatatgttttcattcaagattatcgtcacaacatatatccattgtaaaaaaataaaaagccaaaaaaaatatagcattttgaacaaaaaaaaaaaaaaaaaagggccctaaggc

SEQ ID NO: 104497 - DNA, 740 bp, Zea mays
  unsure (1)..(740): unsure at all n locations
  Clone ID: MRT4577_26804C.1
tcgaggccggccgggccgggatggtctgccgcgtcacctccccgccggaggtcgacctcctccattgctccacctgcgccacgccctggcactccccgtgcctctccaaggctcccgccctggccgacgccgccagctggagctgccccgactgctccctggactccgccaccgtcgccgctccctcggcccctgctaacaccctcgttgccgccatccgcgccatcgagtccgacaacaccctctccgaccaggagaaggcgcgccgccgccaggccctcctcgccggcgacgcccccgacgtcgcggacgacgacgacgcggtcgacgataccttcgaaatcgtcggcaaaaacttcagctgcgttttctgcatgaagctccctgaacgacccgtcaccacaccatgtgggcataacttctgcttgaaatgcttccagaagtggattcaaaacaagaagagaacctgtgggaaatgtcgggcaccgatccctgccaaaatggccgagcagccaagaatcaactctgcgctagttgaagttatcaggatggctaagatttcaaagaatcataactctgctggctcagctgttccataccactatatgcgaaatgatgataggcctgataaggcatttacaactgacagagctaagaaggctggaaaagcaaacgcatcgagtggccagatctttgtgaccattgcacctgatcatttggncctatacttgcagaaatga

SEQ ID NO: 104498 - DNA, 793 bp, Zea mays
  Clone ID: MRT4577_26805C.1
attctttctccctgccctcccctgctgaaggaagccgcctttttggagtttggacgcgggaggacagcctccgcactttcagtccgtcgcgaggaattcctgcccgggcgggcgtagagcagatctcccatgctatcgtctgactctttggcgaccggaatccggctcggcccacgcatgcactgaatgtgcagggcgtagcattcgttggggacgaacgtttagggccggggatcggggaacacgaggctgtgggttggcgcaagcaagcaaattttgggtcctagcttgaaggactgccatcttttcttggttggtgagctacacatcaaagggatggctggaaaaggaagctatgtacctccacaatatattcccttatacagcctagataccgaagaggatcgtgtccctgccgtggaagagaaccatgctacgcgccctaaactaaaccaggatccaacacaatggtcatctggcatctgtgcctgttttgatgatccccagagctgttgtattggtgcgacttgcccctgtttcctttttggaaagaatgcacaattcttgggatctggaactcttgctggatcatgcactacacattgcatgttgtggggccttctccaagtctatgctgtgtatttactggaggtctagtattagcagttccaggatctgccgttgcttgttatgctgcgggatatcgcagtgcactaagaacaaagtacaatcttccggaagcacccctgtgggcgatttgacgacacacttattctggcacttgtgtgctata

SEQ ID NO: 104499 - DNA, 506 bp, Zea mays
  Clone ID: MRT4577_26806C.1
ccgggcttgttcctctcctcgccctttgtccagcagcagccgccgagggaccgaggaccgtccccggccgagacgaggacgctgctgctcctcctcctggtcgagacgaggatgctgctgctcctggcgctgttcggctctccagtctccatcgcaatcggctctccaagtctccatcgcgatctccacggttgggcgcctgggcggacacgcacgggaggccgcaggtgggcgtctcattttgatttgatctcatttgttagctaatagctactgcctagaccttcattcacagatgttcatagtgtagactgctgccattttatcaaattaatgtcttggaacttagcaacttagcaactccttttgaagtacttttgctgctcagtatgctgtatgttttgctgctcagtacactgaatgttgcaaccagtgattgttgcaaccagtagactataaaacttagcaaatgaatgttgtttttcttgctattatttttggttctg

SEQ ID NO: 104500 - DNA, 209 bp, Zea mays
  Clone ID: MRT4577_26807C.1
ctcacaggtgctggcactgtctgacgccgacttctatctagcagctcgattaggggacctgaggtcttggcgtcctgcactagtaaactgctgccggttccaggatcacttctgtctgtctctgtactatcttcagtggcacagaactaccatgttgcagaaagaagagaaaattcctactttggtagaaaagaagaaaaaataaaaag

SEQ ID NO: 104501 - DNA, 1391 bp, Zea mays
  Clone ID: MRT4577_26808C.1
tttaagagtgtgtcccttggcttgggtccagcagccttcagaggcaaaccgtcggccggcatgcagtagaggcaggctagctgcaagagagttcatcgatctagctagctagctagcgtgtgtttagggtacctagctagctagcttcaacatatatatcttagttgcacacacagctcaaaagaaaggaaccatcgatcgatcggcagggagggatggggctgagggagatcgagtccacattgccgccggggttcaggttctatcccagcgacgaggagctggtgtgccactacctctacaagaaggtggccaacgagcgcgccgcgcaggggacgctggtggaggtcgacctgcacgcgcgagagccatgggagcttccagacgcggccaagctgacggcgagcgagtggtacttcttcagcttccgggaccgcaagtacgccacggggtcgcgcaccaaccgcgccaccaagacggggtactggaaggccaccggcaaggaccgcgaggtgcgcagcccggccacccgcgccgtcgtcgccatgaggaagacgctcgtcttctaccagggacgcgcacccaacggcgtcaagtcctgctgggtcatgcacgagttccgcctcgactcgccgcatacgccaccaaaggaggactgggtgctctgcagggtgttccagaagcggaaagacagcgagcaagacaacggcggcggctcctcctcgccgacgacctttgccggcgcgtcgtcgcagggggtcgttctagatctgccggacgaccagcagcccagcatgacgatggccggcgcgtacgtagcagtggaccaccaccagccaggctcttccgccgtcgggttcgcactgccgccgcatgcgcaggacaacggcctcggcgatggcggcctggacgcgttgctgatgaacggagcgaccatgtggcagtacagctcatcggccctcgccgaccacttcccgccggaggaagtgaccgccgcgcccatgatggggctaggctccaggggaggaggtgacgggtgcagcttcttctacgacagcggcttcgacgacatggcgaacatggggttcccgcagggatggatgggctgaggaggcaaggcaccaactgcaacaacgccatgggatgatggattgtgaaggaaacgattgaattgattccattagtggtagtattgtacagtaggtacgtagtgtgaggttagtttattggaaattattagagtgcacctccccaatccaaaaaaaaaaacacaacggaatgaaaagtagatcgagcgcatgacgacaattgtatgtatctattcactcttactactatgcttgtacattaattaattagtataaacgaatccaagtacgtaccccccccaa

SEQ ID NO: 104502 - DNA, 227 bp, Zea mays
  Clone ID: MRT4577_26809C.1
ctcacgcgtccgattccagtggctggccgtgccgcggctatcaatgccacatttacggtccagggagggatggaaggggtgatcatgttttctataatgtttgatgagagtcacacggagatttgtgaatttttggtggcaacgtagttctaaaaaatcgaagggacgttgttggcctacctcatcctactttaacattaaaccagacacacccttaataaaacctc

SEQ ID NO: 104503 - DNA, 274 bp, Zea mays
  Clone ID: MRT4577_2680C.1
tctcgcctggcttgaacgcgaggtcgccgaattccctctgaagccggttggcattcgcctccttgactcgctaagtgcccacacaaacaaaattttatggagtcccatgccttccttgttgccttgcgtgcgagctaggctcgcctacatcttcggcggcaccgcgcggagtagcgccgccagtgtgtccctgtcgtcgcggaagacgttcgtccccggctcagtcgcctccaaaaggcactaagcttggagattgacttgcatcacgagtgac

SEQ ID NO: 104504 - DNA, 539 bp, Zea mays
  unsure (1)..(539): unsure at all n locations
  Clone ID: MRT4577_26810C.1
cctcgaggcncggcgggactagacttcacacgacggccgcgatcgctagggttttcatgtgaggatcttcgctgagatggctacaaagaggagttctgactgagcgatgccatgcccatgatctcctcttaggtccgcatgctgctgcgccgcaccgtgcagccattcgtctctagctctgcagtaaggaatgtgccctatcgtcgtaagggcttcgctccggacatacagccaagcaatgtgacggcaagcatgtgtgtcgctggccccggcagcaactagcctacctcgatgctacgctgcacccggactatggattgcatccgctgggactctagcactcgcagggtaccggacgcttgatacagaccgtagtgactgttctacgacgaatagatcagcggtctttaccacaggcaagattggtatgttcgacgtcaccatgagactgtcggtggaatagtgatcatggagtcggagaactgactcttgtgtttcaagagggaaggcataccgcaacgtgtcactgacgaataatg

SEQ ID NO: 104505 - DNA, 174 bp, Zea mays
  Clone ID: MRT4577_26811C.1
catattcaagttctactacaacttctcctacgacctttatgaaaccttctcggccgttaacacaatattgcgggagcccacctacaccaatttcctctatctcaaatcttatctcttcttcactctctgacacaccttcacctacgaagacacctacaaataccttcccaatac

SEQ ID NO: 104506 - DNA, 317 bp, Zea mays
  Clone ID: MRT4577_26812C.1
acagaccgaaaatgcgggaacggagagagggactgatcatatagccaaataggacacaacaacctaaggcatacgcaataaaaagactgttcgcactgaatccttatgataaaaagcagctaattagaacagtgaaccttaaatccataaaaacaaaaacaatatagaagtattagaagccggtacagatttgaaaccaaacgaacaggctgaccgatggaacatgtcacttaaagggctgtctttacttccaagttaaaaaatttagccaagttttccccttccgttggagtcaacagtattcgtaagaaccaccc

SEQ ID NO: 104507 - DNA, 571 bp, Zea mays
  Clone ID: MRT4577_26813C.1
cctcgaggccggccggacctctacttctctctctacttacgccgagttctcaataccctacgtgcgtgcctaccggcgttgccccttcatgcgatggccatggaccctccatcgcggaacaaagcctcctgggagaactactaccgaacgatctacaccaaccgcggcgatcgatggcggaaatgcatgatgagacctccatggtcacctacgatggccataaggttgagggcccaaccgccattgacgacaacatcggatcacttgacttcgatgtctgcaactaccacatcgacaccgtcgactgccagccgtcgcccccccatggaggtatgctcctcttcgcctctcggatccatccgcaccaggcccgaggactaccccatcatcttctctcatgaattccacttgctgccgaaagatgatgccttcttcacgataatgacgtgctccacctgaactatgaggtaaatacagacgtatactcttgtcatgaacggaatcgtgaagacctttgtgctgagaccatgaataccgactgtctccactactctgatgtccgaagaatctc

SEQ ID NO: 104508 - DNA, 547 bp, Zea mays
  Clone ID: MRT4577_26814C.1
attcggctcgaggaaatcgtacgtggagtggttttgagctagcatgctgtcgctagcttggatctagcgatcgagctcatttcgttttcagtctagctagatggcattagacgatacagagtccgtttggacaacaatggatggttatcgcgagcatgaggccgatggccggtctgcttctggtgctcaacttcttcatgtacatgatggcgatggcggtgtgcgagttgtccatcaaccacgtcatgaactacggcttcttcatggaggccggcctgcagctcccgggtgacttattcccgatctacttccccgtcgtatacgtggtgtgcgtgttcttcttcatcttcggcgtgatcgccggtgttgtcggcgcggtctaggtgctcgcggggttccaccacgtccgcgcatggaacgcagagagcctgccgggggcatcctacgccgggtttattgcctggacgctgaccctgttcgccatggcaatggcggtgaaggacattgaactgcacggcaggaatgccacgctgttatgcatggagtg

SEQ ID NO: 104509 - DNA, 1036 bp, Zea mays
  Clone ID: MRT4577_26815C.1
atcactgacgcgtggcccacatgggagtctagcgaatctagtctgcaccggcctctccctcccatccggcgttggcgaagccgcgcgtcgacgagaggggcggagtcggcgacgagcagatggccggaggcggccccgccgcgtcggcgctttcaagcccctggagggctctgctccagcgagcgctggacgccaacgcccacctcaggcactccacctacttccaactcgctacggtgggcgccgccggcaggccggcgaaccgcaccgtcgtgttcaggggttttcaggaactctgtgataagattcagattaacacggacgcccgaaccaacaagattggtgagatcaagagctgcccctttggtgagatttgttggtacttcacagatagctgggagcaattccgtatcagtggcagcatagatgtgattgatgcttctactacagaccctgccaagctccagcacaaggagaaagcatggttttcaagttcagtgaagtcgagatcgcagtacttaggaccacagccaggcattccggttctagatgatgagcatgttaaggacgttcatctcgatcctttagctggcccagtagatgccttttgccttctggttcttgatccggaaaaggttgattatttgaatctgaaaagcaatcaaaggttgatctttacaagaagacaaaaggatgatggatccaatgattggatggcagtaaaagttagtccttaagctgctgcaaaaactttatttgtgagcttctcttggtaactagactatcatgattcttctgtgttttcatatcatttgaaatgttaggtgcatatcattatgtatatttgagaggccttttcatagtcatacatttatatattgggaatgctttgtaatctcagggatttgttattttttgttaccctcaaatatagaagataaagactgtaaggtatttaggaaggagtcaaagcaggctgtggctattcatgtttgtcaaagccgttggtcttgagatttgtttgaagatgagcgtg

SEQ ID NO: 104510 - DNA, 435 bp, Zea mays
  Clone ID: MRT4577_26816C.1
tatgctactactgattgtactcaagggtccctgggcacactcgcatgagctagcatctgccgatgctcttttccttctcttccagttggtagtcttttcggtctgaaatctagattgtcagatattctcgttatttggcaatccatcaaactgcaacttcttaactactgaagcagcaccttgatcaactccaagtaaaagacttgggtatcctccttgtacaccctgagcatccatttctgaagaactcaaatacatattaaaggggggcattggggcattaacataaccaccctggatcgttggaattgccacagttgaaggatgaacaaacatatcagaggcttcatggctgttttcagttgtactattttgagcatctcgttgcttattcttcaagtagttgcatagggtttggcatcattagattctaag

SEQ ID NO: 104511 - DNA, 932 bp, Zea mays
  Clone ID: MRT4577_26817C.1
cagtccgggctcgtcgcctccaggcctcctctatccagacgcttctcacttccccttttggcacctcgcgtctcctcccccgtaggaaacaaacctcaccgagtcgcaactcgcaaggacagtgaaaacgcccaaacgagcgcgggcacgccaaccaaagcggcgaagcgcgaaggaaggaaggaaggaagcaagcaaagcagcagccatggggcttgactactacaagatcctgggcgtcgacaagggcgccaccgacgacgacctcaagaaggcctaccgcaagctcgccatgaagtggcaccccgacaagaaccccaataacaagaaggaggccgagaacaagttcaagcagatctcggaggcatacgatgtcctcagcgacccgcagaagcgcgcggtgtacgaccagtacggcgaggaggggctcaaggggcaggtgccgccgccgggcgccggcggggcgggctcaaccttcttctccaccggcggcgacgggccgacggtgttccggtttaacccgcgcaacgcggatgacatcttcgccgagttcttcggcggctccagccccttcggcggcatgggcgggagtgggatgcccggcatgcgggccggcgggtcgaggttctcctcgtccattttcggggacgatatgttcggctctgcgttcggcggcggcggcccggacgggcacggcatgcacaccggcggacgtgccgtgaaggcgccggccatcgagcggaagctgccgtgcagcctggaggagctgtacaagggcaccaccaagaagatgaagatttccagggaaattgctgacgccagtgggaagacgatgccagtggaagagatcctaacgatcgacgtgaagcccgggtggaaaaagggcaccaagatcccgttcccggaaaagggcaatgagacgccccacacga

SEQ ID NO: 104512 - DNA, 506 bp, Zea mays
  unsure (1)..(506): unsure at all n locations
  Clone ID: MRT4577_26818C.1
gctggggtttttttttttttttttttttttntttttnntttttttttttttttnttttttttttttttttttttttttttaaaaaaaccctgggcttccacggctcagggggggggagagaatacattttgggctctctggggtgaaattcttggggggggggggggagacacaaaacccccgggcggttgggctattatcaggaattaccgggcggaggggggaaaaatgggggaaaaagaattatttttagcgggggccccccccccccaagggggcccaggctcaacccgggggggggtcngcccccgcaacaatctcaaggagccccccggggatcttggcccggccctttcggttgtgggggagggggagggtcttgcggagctccagggggttttcgggggggcttctcatggggctcatccgggcggggagctctctggggagcgactcctccagggcacgggggatcttgcttttaagggaaagcgggagcaccccct

SEQ ID NO: 104513 - DNA, 1840 bp, Zea mays
  Clone ID: MRT4577_26819C.1
cattgggtacctcgaggccggccgggaccgtcttttccggtcttgtcggctcgtcgcttcgtgtatcgagacgcttctctcatccccttttctctcccctcctctcctcccgtctcctaccccgaaccaaccaaacctcaccgaatcgcaacgacagcgagaacgtccaaacgagcgcgagtctccggcgataaccaagagcgcgggcacgcaaagcggcgaagcgggaaggaagcagtaacgatggggcttgactattacaagatcctaggcgtcgacaagggcgccaccgatgacgacctcaagaaggcctaccgcaagctcgccatgaaatggcaccccgacaagaaccccaacaacaagaaggaggccgagaacaagttcaagcagatctcggaggcgtacgaggtgctgagcgacccgcagaagcgcgcggtgtacgaccagtacggcgaggagggtctcaaggggcaggtgccgccgccgggcgccggcggggcgggccccggcggcgcaaccttcttctccaccggcggcgacgggccgacggtgttccggttcaacccgcgcaacgcggaggacatcttcgccgagttcttcggtggctccagccccttcggcggtatgggcggcggtggcatgggcggcagcggcatggggggtgggatgcccggcatgcggagcggcgggacgaggttctcctcctccatcttcggggacgacatattcggctctgcgttcggcagcggcccggacgggcacggcatgcacgccggcgggcgggccgtgaaggcgccggccatagagcggaagctgccgtgcagcctcgaggagctgtacaagggcaccaccaagaagatgaagatctccagggaaatctctgacgccagtgggaagacgatcccagtggaagagatcctaacgatcgacgtgaagccggggtggaagaagggcaccaagatcacgttcccggagaagggcaacgagacgcccaacacgatcccggcggacctcgtcttcatcatcgacgagaagccgcacccggtgttcacccgcgacggcaacgacctggtggtgacccagaagatcccgctggcggaggccctgacggggtacaccgcgcacgtgacgacgctggacgggcgcagcctgacggtgcccatcagctccgtgatccacccgggctacgaggaggtggtgcgaggggagggcatgccgatacccaaggacccgtccaggaagggcaacctccggatcaagttcgacatcaagttcccggcgaggctcacggcggaccagaagtccggcgtcaagaggctgctcgggcagtagagcgcgcttgtgttgttttggtgtattgtgtgtcagacattttcgtgttggttgatcttgaactgggggatgctgccatttgcagcgtccgtaacgacgacgatgaggaggccaccgagcgctgagtacagaacagctagtggtggtatatggttgagaccttgagatgcacagcataggattccttgtgcaatcttccagacgggtggtgcttgtctgttcaccggtccatgtcgttccagccttgcaaaggtcggatggaataattattgagcacatacacgtacgttctttgtatttagtgtgagaaatagttattgcaatagcaattgtactccctccataaaaaaaaactctccttcccctaaaatatacttctttcgaggtcactgtttttatttccacattcaaataataatgaatatagtttatttccacatttatttaaaaaaaaaaaaaaaaaagggccaaaaaaaaaaaaaaaaaaaaaaaaaaaaaaaaataaaaa

SEQ ID NO: 104514 - DNA, 375 bp, Zea mays
  Clone ID: MRT4577_2681C.1
gggagtaattattattcttattcactaaaactgtatggacggaacaaatggtaactctctttgctcacttgttaattgagctcccgcccttgtgttaaaaaacaacatatttcgtttcatgatttgaaccgtacatgtcctgccaaatgctttgtaactaacttcgcctacaaactttaagccgtaaacataaattacgtgcttcgctagtttgggcttttggttctgaatatgggcattccgtcgaacaacttctgtgcgcagccgtggtcccttatttgggcaaggaaataattattggttggaggaggccaagtctttgtcttgaaatggatgaattgatttcaactcctaaaaaaactccaatattctttt

SEQ ID NO: 104515 - DNA, 348 bp, Zea mays
  Clone ID: MRT4577_26820C.1
gccgcactccgttccccgattggttcgccgccgccgcccccgtccccgtcaacctcctcgattccggccgccgtctctcggcaccacccgagccgcgcatggacatcgactccgaaccgcccgctgagagcaagcctacccagatggacctcgaggaccaggcggacgccgaggggaaggggaacgacgaggagctcgcggactccatcgggggcctatccattgccccgggccgcacaaacttcaagaagaagccggtgatcgtcctcgtcatcggcatggccgggacggggaagaccaccttcatgcaccgtctggtgtgccatatgcaggcatcgacgaacatga

SEQ ID NO: 104516 - DNA, 213 bp, Zea mays
  Clone ID: MRT4577_26821C.1
cccactcgtccgagctttaccacaaccaatttaacaaactcttccgagtcatcttacatggaaaacttttatgatcatgactctaataccactatccaaatgactatatacctataacataactatgaccattagctcccaagtcaaacaccactacttttaacgaaatatcactcattcccttaatctcaagcattacacctaccctccttt

SEQ ID NO: 104517 - DNA, 778 bp, Zea mays
  Clone ID: MRT4577_26822C.1
aggccggccgggccgggaagtcctaccggaacaccgagcgagtgcttgctgtgctgacatcagttggagagagcgatcggtcgagatgcctcccggtcccggcgtcgcagaccaggcgccgccgccgcggagccctctccggggcaacggcgccatgccgccgcagagcccgctccgcatcaagcaggacggcaagttctacgagcggctcctcaccagggagagctccgcggccaacctgtcgttccggtactactgggcggagccgggcgcggtgccgttcgtctgggagtcgcagccgggcacgcccaaggacgtcgcacggacggccgccggcgcgctcccagccatcacgccgccgccgtcgtaccttctccggcacggcaacgtcgcggtcggtaggcaggtggcggccgcctcggtggcacgccgtgaccagaagagcggcggcagggcggcggcgaggagcggcaagaagcggcgctgcaggctcaagaggatcaggatcggcttcgtcgccggcatcttccggcggctcagcctcgggaagaggtggcggcagcgcccggcgccgccggccaaggtgtggtcgtcatcgtcctccagccggtggctcttctcctcggtggccacggagacgggcgagcacagcctccaccaggtccaggatgagatcgccgttcccgcgcacccgaaacagcacaggaccgtgccggtgccgtgcaggtgcagcttttccgccatgtggctgctgcgcttccgcaacagcttcggccac

SEQ ID NO: 104518 - DNA, 385 bp, Zea mays
  Clone ID: MRT4577_26823C.1
gcgttcgcaagtcatgctgttccagctctacttgtagaggacggcggggaaggggaccttcatggagtgtcccgcgccggagcatgacacactggtacaaggagatgctgttccaaccgcttctagcaagggatgctgaagcaggagatcaaacaggacgactaccatttcgagattgtctgttagaggcgtggacaactgatacaccgcacgcgtacgtctctgctcgtgtttctgtaaacagtgcatggaataatactggaactgcaattgctgccgtgcaacgcactgggatatgaagcccaacgaataaatgacgctgttattattattctacttcaccactgtaccgcgtggaaataaacctattataagcatcgtgaac

SEQ ID NO: 104519 - DNA, 257 bp, Zea mays
  Clone ID: MRT4577_26824C.1
atcagcgaaaaaaactttattattgaactatcctataagcaatctaaaagagggcaccaccaatgatgggtttgaggcaaaacactgctggttttgacaaatcaaggtgggctaatggaagcaattgctgcacttgtaagagggtgccaacgctaggcgcagggtgcaggtaaaacggcaacacatgttgccgtgtctagaaggccccagggctcaccccaactagctggctgaatggtaatagttgttgttggtgt

SEQ ID NO: 104520 - DNA, 270 bp, Zea mays
  Clone ID: MRT4577_26825C.1
cgaaattccgcggccgaccacacccttccggtcttatgcaaacacagccactgaaggcttcctaccagatgatggggtaaagctaactggccttggtttaaagaattaagggggttcaaccaatgttcaatagtcaaattttggataaccggaaattgggccttaaaatttgaagagttgttggggttaagcctcggaaccaaataaaaccggccggacctattccccttgttcgttggtgtaaataaaggttgaatttgaccgggcccc

SEQ ID NO: 104521 - DNA, 310 bp, Zea mays
  Clone ID: MRT4577_26826C.1
ggggaaaaggggtctccccactccttaagggccagtttggaaaatcaaattcctagccctaaaggggggttaaattccaatattttttggtttaaccccccccgggtttaaaaaagaacattgggaacccaacccaatttttttgcccgtttttcagggaacatttgaccgggggcaaatggtacttccagcctaagaggccttaacaaacctggatttccatgggccccttctgcctaaaaagataatttgggggataaactccttttgaagacgaaatgggccatttcttcttaacccgatccttgat

SEQ ID NO: 104522 - DNA, 395 bp, Zea mays
  unsure (1)..(395): unsure at all n locations
  Clone ID: MRT4577_26827C.1
ggcgggttagcgggcgcccgggcaggggctttttttttttttttttttttttttttggtcaattgtcgtcactttttaaaccagttcatttctgattacagaagtttcaacgccttattttttcattctgcagccgngcgcctggtggggggagggggtccatgtctctatcgcctgtgacagtgctcggcttgtggcttgccgctgccatggctcctcaacctttcatggctttcggtctcgggcaaggcgatattttccggatccttgcttcgtcgcattcggcccatgtccgtgtcgggggcttgtgctttctcctcagcctcctcgggccctttgtctttcggctccggtgcttggcagcaggattgcctgccctttgggtttgaaccttt

SEQ ID NO: 104523 - DNA, 422 bp, Zea mays
  Clone ID: MRT4577_26828C.1
ccggtggggaaaaaaaaaaaaaacgggtggaaaaaacagttcccaaacccggggggccaaccaaaaaaaaggaaaaaaaagacgggtataaagccaaaaccaaaaaaaagaaagcacaggcctgctttgctagggaggaaaaaagcactttgacaccccaaaaccccattttaagttccaaaaaaaaaggtacgggttttaaagtaaaccccgataaaaaaaaattttaagaaattggcctaaaaaggaaaaagccaggggcattagggcccaagattccacaaattttttttatttaagggggaaacccaaagtttaaaagggggggccgttccaaccaaaatccgagggctttaaggaaaaaaacttgggggaaaaacgggacttggaaaaaaaaagttttgaccccagaaaaaaaacga

SEQ ID NO: 104524 - DNA, 496 bp, Zea mays
  Clone ID: MRT4577_26829C.1
cccaaaattattattttttattaaataaattccggagcaaggcacagtcatatccctactatgaagagggggaacacttcccattcataagatagtaatataggaaaggaacaacccttttaaaaaattttcgacaacaaaaaccagggggaaatttttatttgggcacacacatggggggggggcaggcagttttttataaaaaacgggggggtttttacccaaacacatttattcacatccggaaaaccccgttttttgggttttccgaaaccggtttggccaaaggggaaaggcaaaggctaaaaacccccctggggtaaaaagggtcaaaaaccccggggccccaaaacctaaaaggggagaaaaacgggcttccttttttggggaaagcccccacaactttggctttaaagggtttttcctgggccttggtccactccactcctgggcccctttggggggccttttctattggagcgaaaaccccacctgc

SEQ ID NO: 104525 - DNA, 466 bp, Zea mays
  unsure (1)..(466): unsure at all n locations
  Clone ID: MRT4577_2682C.1
cgcatttcctcccaatccatcccgcctccaaacccgaactccaagtcgccccgcatcgatggngcccaaggncgagaagaagcccgcggcgaagaagccggnggaggaggagcccgctgccgagaaggngccggtcgggaagaagcccaaggtggagaagcgtgtcccagcaggcaagtccgtcggcatggagggcggcgagggaaagaggggncngnagaagggtaagaagagtgtngagnatctacaagatctacatcttcanggtgctnangcaggtgtacccngacatcggcatctcctctaagntcattgtccatcatgatctcctttcatcaacgacatcttcgagaagntcgccgnccgaggccgtcaatgttcntgtagttcaanaagaagtccaccatcntctcccgttanatccangacctcttttcnttcgtcctccccgggagttcgccagtac

SEQ ID NO: 104526 - DNA, 353 bp, Zea mays
  Clone ID: MRT4577_26830C.1
atggggacgtgggtgatctcattcatacttttactaggccaaacaacgttgcaacttgtagcaccctaaaaagtagaaaccaagcgggcgcatatggttgcattcaatgcagtaatggccacacgacacgaccgacaaggccgtcctacattacgaattagcttagctagatctacaaggcagtgcatacggtatatgcaatgcatgcacacgagcacgggtggtggagctagatgcctgcttctcctcctcctcccctgataatggagtcgcgggccaccgtggggccgtcggccactgtgagcgagcgctggcggcacgcgtggtaagtgacctgcgcgagcaggctctcg

SEQ ID NO: 104527 - DNA, 304 bp, Zea mays
  Clone ID: MRT4577_26831C.1
cccggggcttgaatcgggaagggaacaacgcgttaattttagggaccgtctcaaccgcttggctttttacaagggcgacaattatacagactttcttagggcccggagggcccaagggaaaaatgcccattggagagttttttggcccccaaaaaccaaaaaggggttgagcgccataaccctttatggaaaacgcatttaccatttttacatgtccaatccttgacgcccaacggaccaaaaaaaaaaaaactgggggccggtcaagttttttgcggacgaccaatttgcaggagttttttgg

SEQ ID NO: 104528 - DNA, 813 bp, Zea mays
  unsure (1)..(813): unsure at all n locations
  Clone ID: MRT4577_26832C.1
tcgagccggcggccggccgggacccaccaactgtcttctgtacgttacgcccaagcaaccatggcggccgtcatgccagcgacaccaaccacaccgatgacggcgacgacgacggtgccgctgcccaactaccaggtgtccggcgcgggcgcagctgcagcagcgccgcggcacggcgcctctgggtcaggctcggtcggcgccttcttcggggtgctggccgcggtgctggtgctcaccgtgctctcctgtgtgtttggccgggtgtgcgccgcgcaggccgagggacccgacgagtcctacgactgcaccaggctagcgctctggcggaggagcgcgcaccggcgccgaccagtgctgccagccgcggagacaaagcagccggctgcatcgcagccactgccgctgccggagccgtgaaacgtaaacctgcctgaccgggcgctcagcggctcaagtccaagggagcacgaagatgagcacaccagttgcatcagctgctgctggttcagcatcctcagcttcttcagatgttgcatcccttatagaaaaggctatagcagcacaagaatatggagttctggacactccaataaccatagatagtcttaatgatcgatttctactatatatactattgtatacataccctacatatatgtcctggtatatataagatgattatatagacgactagttgtcctagttatcgactaaccgtcctggtcggtactagggcgactagcgatggctagccgatttaataaccttgatagggcattccnatggtgacattggtatatgtaaaatgac

SEQ ID NO: 104529 - DNA, 691 bp, Zea mays
  unsure (1)..(691): unsure at all n locations
  Clone ID: MRT4577_26833C.1
gcatctcctagccccagctagatcattggacacatatcgaaacagctctagctagcgcgctcgtcgtctaacctggcttccggcatggcttccaagcagatcggagtcttgacctgcttcattgccatcaccgctctcgccttccgtccctgcgcatccgccggccatgggacggtggatggtcgaacgatcgccgaacctagcaccaccagctgaggctgctcataaccgacggcacggcgagcgggtacaagcacgacacggacgagtctgcgtcgggcgccgaagcagcgtgcggaggcgaggcagcgctgggcatcgcctgggccttcggacgacatgatcttcgtactcgactactgcaccgccggcatctcgggaggccacatcaaccccgccgtaaccatcggcctcttcctggtgcgcaaggtctccctggcgcgcacgctgatctacatcgtggcgcagtgcctcggaggcatctgcggcgtcaggctcatcaaggcgttacagagcgcctacttcgacaggaacagaggcggcggcaactcgatcgcctccggttactcacgcggtaccggnctcagcgccgagatcatcggaaccatcgggctcggctacaccggcatcaccgccaccgaccccaagcgcaacgcccgggaatcccacgatcacgggttctggctcccct

SEQ ID NO: 104530 - DNA, 162 bp, Zea mays
  unsure (1)..(162): unsure at all n locations
  Clone ID: MRT4577_26834C.1
tcccgggtgcggatcccacgcgtccgcggnacgcgtgggttcgcggccgggacgctggcatcgcgggcccgagctatggggtcggggttccccctcctctcgggacgacgcggactcggatgattttgacatgactgatgcgcagcaggatccgccctggcg

SEQ ID NO: 104531 - DNA, 243 bp, Zea mays
  Clone ID: MRT4577_26835C.1
gagacggggtaacaattttttccatagactcaaaacttgaaccaggtttttttaattttacaggccctggccgcataaattaaactaagtccctgaacactttatgtagatcaaataacttgaggacacactttacttggggacccaatcaaaactaacagtcttattaggaaatacaaggtggtggtcctacactaggggcctttttccacaaaacagccctacaagggtacaactttttcg

SEQ ID NO: 104532 - DNA, 357 bp, Zea mays
  Clone ID: MRT4577_26836C.1
atctaagttagtccaaccctatccaccggggggtccaatttgccaaaattttattcgctgggggggggtttgggctcgggggggaaaaaaccccccccgcccaagattttggagctgggggggaaaaacaaatgggctcctccttaaatggacaaagaaatcacggggcgtgagcattttaaaaaagggccagggtggaaaaacccgagggggttctccccccccggtattttaaaaagggggggggggaaaaaaaaaaccccctctgggaaaagggcccacttgggggctggggtttggaaacaaaaaaacaccattttggggttttttaacactttttaaaaaaaaaattttttt

SEQ ID NO: 104533 - DNA, 612 bp, Zea mays
  Clone ID: MRT4577_26837C.1
tttttttttttttttttttcttatttaaatcaaaatatagttcctttaaagcttgctctaaatgagcaatataaaaagcaaaatatggtctttaagtaaataagataaaattaaaaaccctttaataaacacagtccccaatatattgataaacccaatagtgtatataaaataataattgattaaaaatgtgtttgatttagttaattaaatataatatatatgtaataaagtgaataaatgtatcaataaatgtatataaagtcatattctctcttcatttgagagaggtccagtgtaataacctgttggtctggttaaatatactttaggtgaattggtctgtgttgaagcagaacgaggaggaagtgacgcaccacgcggagcgtcggggtggcctaatccacccctcccagagacaaaattcatccctgaaaccgtcgcgtcagttcggaagcccgcaagttgttgtgcgtttctggcccgccgaatatcactatccaagtttgtttcaaccaattctttattaaatttattttgtgtgtcttgatataaattctgttgggaaaaagcagcagattgctgttctcttccccagcttatatttctctc

SEQ ID NO: 104534 - DNA, 270 bp, Zea mays
  Clone ID: MRT4577_26838C.1
ccctttcctccgccacagcatattccaggtcggttggttttggcacttcgcaccggcgaccatggcttccaacggcatcagccccacatatgtatgtgttgctcgggttgcacgcacccctatgggcgctttcctaggcgcctagactcccttgcctgctacaaaaccagcctctatactaattcaatctgctcttcaaagaacaaacctcgatccaatccctcaacatgacgtctactttggaaacctatcgagtgctaatattccaca

SEQ ID NO: 104535 - DNA, 320 bp, Zea mays
  Clone ID: MRT4577_26839C.1
ctcgcgcgcgcaagggccgccgtcgcccgccggcccgccaccaggctggccgcgctgctctggtaccagggcgaggccgacaccagcacgcgccaggccgccgacgcctacacgccccgcatggaggccttggtccgcgacgtccgccgggacctgggcatgccggacctgctggtcatccaggtggggctggccacggggcagggcaggtttgtggacatcgtcagggaggcgcagaggagggtcagcctccgcaacgtcaggtacgtggacgccaagggcctgcccgtcgccaacgactacacgcatctgacaacgcc

SEQ ID NO: 104536 - DNA, 280 bp, Zea mays
  Clone ID: MRT4577_2683C.1
ggttcaaaacggttttactgtttcaaggtacaaaaaaggacagaaagttacactctgcgcaaggtgaaattgtgggccatgggcccacggccgaattggggaaaaagggccccaatctgggggaccaaaaacggctttttattttgctagccaactccacgttgtactgtggcgggggttcttaaccccattgggtccaaaaatcaatcaaggcaagagctggcgaagttatactgtgggcagaactgacgacgcatttccgtgcaggcttttgtggaac

SEQ ID NO: 104537 - DNA, 246 bp, Zea mays
  Clone ID: MRT4577_26840C.1
agtgaacaaaagatatgggtgacatcaattgcaaacctgttcacatacagggatcatgcatgctaacaacagcgtgatgtttgggtcatagaaaacaacaaatgggcccaactgctaaggcccgtgaagcctatacagcgggcaacgtagttgttgcgggaaaaccctacaatcaattcccagatccaggaccacctttaacttatgttcactgttgagacgtgggccttcatttgaccatgaccc

SEQ ID NO: 104538 - DNA, 2278 bp, Zea mays
  Clone ID: MRT4577_26841C.1
atgggaaactccctcgcctgcttctgctgcgggggcggcgccgccggccgccgccgccacgtggcgcccgcggcgctcccctcggaccccgcctacgacgagggcctcggccactccttctgctacgtccggccggataaggtgctggtgcccttctccgcggacgacgacgacctggtcgccgacgccaaggcggccgccgcggccgaggagcccaccacgttccgggccatatccggggccgcgctcagcgccaacgtctccacgcagctctccacctccgtcctcctcctgctgccggacgaatcctcctccgccgccgccgcctcctcctcctcctccgggttcgagagctccgaatcgttcgccgccgtgccgctgcagcccgtcccgaggttcccgtcgggccccatctgcgcgcacgggggcgggttcctctccgggcccatagagagggggttcctctcgggccccctcgacgcggcgctcatgtccggccctctcccttgcgccgccacatccgcccgcatgggaggaggcgccgtgcccgcgctccgccggagtctctcgcacggcggccgccgcctgcggaattttacccgcgcgcttctcgcgcgggcggataagtttcaggattcgatggatctcggctcggccgccgccgccgcctgtggcgccggttccgccgggctgcagtgggcgcaggggaaggccggcgaggaccgcgtccacatcgtggtgtccgaggagcggggctgggtgttcgtcggcatctacgacggcttcaacggtcccgacgccacggacttcctcgtctcccatctctacgccgccgtgcaccgcgagctccgcggcctgctctgggatcagtgcgagcaggaggagcagcgcgacacagatcccgaccagccgatgagcaccacggcctcatatcaccaggaccagcccgccaacggccgccgcgcccgccgatcaagaccgccgcgcggcgccgatgatgaccaacggcggtggaagtgcgagtgggagcgcgactgctccagcctcaagccgccaactcagcgccctcctaggagcagcagcgagaacgaccacctcgccgtgcttaaggcacttgcgcgcgcgcttcgcaagaccgaggaggcctacctggacgtcgccgacaagatggtcggcgagttcccggagcttgcgcttatgggctcttgcgttcttgccatgcttatgaaaggagaggacatgtacctcatgaatgtaggtgacagccgggctgtgctgggaacaatggacagtgttgatctcgaggagatcagtgggggttcattcgatggattggtcggggatggcactccgctcttgtcagctctgcagctcacctcagaacatagcacgtcagtgcgagaggaagtttgcagaatacggaacgagcatcccggagacccgtctgcaatctccaaggaccgtgtgaagggctcgcttaaggtgacgagagcgtttggagctggtttcttgaaacagcccaaatggaacgatgcgctgctggaggtgttcagaatagattacgtcgggtcatccccgtacatcacgtgcaatccttcgctctatcaccacaggctcagcacgagggacaggttcctgatactatcttcagacgggctctaccagtatttcaccaacgaggaggcggtcgctcaggttgagatgttcatcgcaacaacccctgagggcgaccctgcccagcatctggtggaggaagttcttttcagagctgcaaacaaagcaggaatggacttccacgaattgatcgagataccacatggcgaccgccggcggtaccacgacgacgtatctgtcattgtgatatctttggagggcaggatctggagatcatgcgtgtaaataggtcagccatactagtagtagattagagaaagaaacgtatagagagaaagagagagaggttcttgaaggcctacttcactcgtcccagctgctactgtacaatatcaatgaagcactgggtggtgggcttgggatctcaagttgaaccacgatgagattcacctggagcgtgccgatgccgacgcagtgccgtatgagatgtccatgcaaaagaggatttgttcaattattaataactcaatcaaatagcgaccaattggtcaactttctttgaccttttgttttgaaaaaaaacaacaaaaaataaataataaaaaaaaaaattggtcaaaaaaatttttgacctttttttgggggcaccctctgtgttcatacc

SEQ ID NO: 104539 - DNA, 2438 bp, Zea mays
  Clone ID: MRT4577_26842C.1
gcgtgcgctccttcgccgactgggcgaccgccgccgccggcctcgcccaggtctccgtccggccctacgacaggttccatcgggcccttagccggcgacaagcaccaccagagactgattaggagttcgaggagcaaatcaattcgtaccaaatataaccaagcttacatggctaagccatgtgattcatcacatcatggagttgtggacaatagctccaatggatcccaggctaggcgtgaggaagctgggaaacttggtccatcgtggtatttcagtagaagggaaatagaggaaaactctccatccaggagggatggcatcgatttgaagaaagagtctagcattcggaagttatattgcaagtttctacaagagttgggcatggcgcttaaaatgccccaagtgacgattgccacagcaatggtattctgtcatcgtttttaccttcgtcaatcccttgcaaaaaatgatagacgaataatcgcaactgtttgtatattcttggctggaaaagttgaagaaacacctaaacctttgaaggatgtcatcgtggtttcttacgggattattaataagaatgatcctaaggctagtcagagaatcaagcaacagaaggaaatctatgataaacaaaaagaacttattttacttggagagcgagttgtacttgtaacacttgggtttgaccttaatattaaccatgcctataagcccttggttgaagcaataaggagattcaatattgataaaagaagtccacttcctcaggttgcctggaattttgtaaatgatgggctgcgtacttcgctttgcctgcagtttgagcctcatcatattgcagctggtgctatctatttggctgctaaatttctcaaagtgaatctcccatctgatggtgataagatttggtggcaggattttgatgtcacgccacgacaacttgaagaggttagcagtcaattgctggagttgtatgagcaaaaccgtacaacgcaggcacaatcatcacagggaagtgaagcggaggggagctctgctggtgtgtgtaatcaacgttcaactgtaaagtctgaagcgaactccaaggaaccatctgctcatggtcatcttcaggcatccagaccgccaaatttgcagcactcgtcctcaacaggtgcttcaggtcaccatgacgatgggcagtcaaattcagacaagcatatttctggccacaaaatgcttcaaaatgacaattttaaccatggtggtagcagagaaaagaacaaaagtggaaccaaaactggtactgttatggacaaattgcacaatgacaaaaagttctcgcctggacatcattattccaaggccagccatgagtctcataatccagtggaagaacatcaaccacatggatcagatgataattccaatgaaacaagagatggtgttggtggcaatgaagctcctgttgtgtcaacatccagaatggatgcgatgaataaaattgacaaggataaggtaaaagcagctttggagaagcgaaggaaatcgaaaggtggttttgccacgaaggtaaatgtgattgatgatgatgatctacttgagagagagctagaacaaggtgttgagttggctgttgagtttgagaagattaatcaagataagaagcagaactcgtccgatggtagcatgcatccaccagaccttgaaaacgctgacgaattaatggagaatggccaccatgtcaagcagagtctaccaacgacagctgaagacatgggctgtccgatggacagtaaagaacgacatcctccagcacttcataagcaaaatgatgtttctgagcacaagtcacagcagcttgatgacacattgaaacaccaaaagagctgtgatcatcctcaacctgtaggaagccctgagcaggatggaaaagactacaagaggcctaagcttgacggataggtttatatatatgattttggatgggttttctggaagctgacaagcaatttggtgccggattcattgtatgatgacgtatacatgttgatgagcacgtgtcttcttcgctggtgcctgaagaagtgaagatgccgcgccacaaaattgctgtgctgcggagagcaccaagatgatgcgccccacaactgattgcagcttacagtttgaggaaagtcgggcagcaattattgttaggttccaacaaacattggaatataatatatatatgaacgaaacatgctgtcgcgcttctggtatcagctgcattcgtttcttgtatgtaatgttctggttaaagcgatggaaaggttttatcaaggtcgcaaatattaatgcagctttccatttctgggtttacatatttttcaaattaaacggtttactttttttaaaaaaaaaaaaaaagaacaggggaaaaaaaaaaaaaaggggggcccccccattaggggcct

SEQ ID NO: 104540 - DNA, 274 bp, Zea mays
  Clone ID: MRT4577_26843C.1
ccgccggggaggttctagtctgttctgcctcgaggcagtcgcccccttctacttcgtcacgttgatccgctcccgggctttgcatcggacctccgtagccgctcagcgctagatgctaccagcctcaccactatggatctccgcatagcgagcgagcttcgggtcttcgtgaagatgcgtaggcaggacccgagcgtcctgcacaccgtggacatgcgtctcctgacggcgtaggcggcgagcatggggggtatagtaccagctgctagtcata

SEQ ID NO: 104541 - DNA, 307 bp, Zea mays
  Clone ID: MRT4577_26844C.1
gcgggagataaactttagcagcttttttttagctccttttagccatttataatctaaacatgagagctaagggggataatggaaactaaactttagcccttcaattaatatagctaaggtttagcccgaagctaaagtttacctcatgagattgaaacggggcctaacagtaaaatcagttaattgggatggaccatacagttgctgacacctcccttgttttggggtcagcgttttccaatgaaacaccacggcggtcttttcgaacaagaaggggcaaaacgccagcagagctccaagcatgggc

SEQ ID NO: 104542 - DNA, 124 bp, Zea mays
  Clone ID: MRT4577_26845C.1
gtagaagttaaccgagcctatgaggtttttaatgacaatgacaaaccttgaatatatgagcaggtttgaccaataccatacgcacgatgagcttcacgttgtgtccgtggtgggcctgatttta

SEQ ID NO: 104543 - DNA, 1184 bp, Zea mays
  unsure (1)..(1184): unsure at all n locations
  Clone ID: MRT4577_26846C.1
cattgggtacctcgaggccggccggctggacctggactccggtccaggttatccatgcggcggagctctcttcgtctcccgttccccctaacgcgtgcgctccttcgccgactgggcgaccgccgccgccggcctcgcccaggtctccgtccggccctacgacaggttccatcgggcccttagccggcgacaagcaccaccaggtgcactttctctattcagagactgattaggagttcgaggagcaaatcaattcgtaccaaatataaccaagcttacatggctaagccaagtgattcatcacatcatggagttgtggacaatagctccaatggatcccaggctaggcgtgaggaagctgggaaacttggtccatcgtggtatttcagtagaagggaaatagaggaaaactctccatccaggagggatggcatcgatttgaagaaagagtctagcattcggaagttatattgcaagtttctacaagagttgggcatggcgcttaaaatgccccaagtgacgattgccacagcaatggtattctgtcatcgtttttaccttcgtcaatcccttgcaaaaaatgatagacgaataatcgctactgtttgtatattcttggctggaaaagttgaagaaacacctaaacctttgaaggatgtcatcgtggtttcttacgggattattaataagaatgatcctaaggctagtcagagaatcaagcaacagaaggaaatctatgataaacaaaaagaacttattttactcggggagcgaattgtacttgtaacacttgggtttgacctgaatattgaccatgcttacaagcccttggttgaagcaataaggagattcaatgttggtagtaaaagttcgcttcctcaggttgcctggaattttgtaaatgatgggtatgctagtgctacccttactgtcgtttgaaattgcagttcacagttgtgtatctactacacttaatattgtgcactgtacagactgcgtacttcgctttgcctgcaattcgagcctcatcatattgcagcaggtgctatctttttggctgctaaatttctcaaagtgaagcttccatctgatggtgataaggtttggtggcaggattttgntgtcacaccacggcagcttgaagaagttagcagtcatatgatggagctgtgtggtcagatccg

SEQ ID NO: 104544 - DNA, 335 bp, Zea mays
  Clone ID: MRT4577_26847C.1
cccagctcgtcgtcaggctcgagcagatgcagcagcgtgtcgacaagctcaagaagcgcgacgactgatagatgggccggccggatcccagtttcatcgcgttctcctatccgcatccgtccatccggtggtctcgttcttccccctgcctttgtgtttcttgtttagtatgttgtagtgcggatgttttagatatcgaatcgtgatttgagacctgctcgtagaatctgcttcctttgtcttgctgtcttcagataaaaagtacaacactcttggaaatgatgatatgtttaggttgtctggacaaatggaatcgtaattggcgtttttgccca

SEQ ID NO: 104545 - DNA, 343 bp, Zea mays
  Clone ID: MRT4577_26848C.1
tttctggtctaggttttcttgcatggtacttggctggaaaacttaaagcttttgatcgcaaaggtcacattgcaaaactgtgcttagtttttctgcctctacttgtcgcgtcacttgtggctgtttctcgagttgatgattactggcatcactggcaagatgtctttgccggcggcatcataggtttgctagtatttgatgctcttttgtatttagcatttcgaacacccttcacaatcaaaagtcaatcatggagtgtcattctcttatttcttttcaggtcttacaggtgcttcattctgttacctgcagttcttcccatatccctttgacaatgatgccc

SEQ ID NO: 104546 - DNA, 473 bp, Zea mays
  Clone ID: MRT4577_26849C.1
cattgggaccctcgaggccggccggggtcaacaactaagacacccacgtgatgctgcgcctcagggttaccttccgtccctacaacggcccgcgttgagaaagacatgaggatcgatgactagcccaagcagcctgtgctgcaggcacatcagaaagagggggccatgaacataagacgcctgaacctgacgaaagcaccagaagacgccaaagatcagctccttgcccccgccgttccctctatccacagcgggcgagcaagtatggatcacgcccactctcatctgctacatgttgaacaagacactataccgttccgggttcccgaagaacatcaatgaccagtacctcacgaacctcgagctccacatctacacggaccagtgctccataccgaaccctaagatgatgacgaactgcctgctgaagaacacaaacctgacccaccaatgcatgatatgatgccgaaacg

SEQ ID NO: 104547 - DNA, 273 bp, Zea mays
  Clone ID: MRT4577_2684C.1
cggacgcgtgggtggcgcggcttctcctcactcggggccaccgcgctgctgctcgcgtcggcacgtcagggggcaagactgcctgtccgcgacgttcagaggcgggcggaccttcgggcggtgcaacaacctgccggcgctgagcgccagcctgcactggacgtaccacccgaagaacggcaccgtggacgtggcgttacgcgcaccatcaaacgccagtcgatgggtcgcctggggcattaaccctcaccgcggctgcagcatgaggctgta

SEQ ID NO: 104548 - DNA, 408 bp, Zea mays
  Clone ID: MRT4577_26850C.1
gatgtcgcgtacgaagcttgatcctatagagcggacgcgccctcccgctcccggctcctctcctttcccgcgccgggaagaacgcagccgtggccgccaccttcttatccctgcgaggccggctatcccacgctcacaccaggaagctctcctccccgttccttggcgcccccgcatccttactccggtcgctggctcccacgcccgtcggcgggcgatactcgcggaggacactcgccgacggggccatggcgcctctcatgccgggaggaacgcccaagaaagcggtgggcgtaacaaagctggcgctcgacgcctgtctggccaggcctaagccgtccgtctgcccggcggtcggcgcccagggagtcaaactgcctggggctctgcaaggtgttctatgccaac

SEQ ID NO: 104549 - DNA, 585 bp, Zea mays
  Clone ID: MRT4577_26851C.1
ccggccgggattcctgtgcgcagcttccccaactgcatgctcccgttgcccgctgctccaacaagcttccccgacgtctccaaaactaacgcccaacccatcgtttgctgtgtcaagcagcgccctcgtcttgccatcacatccccgccatcgacgtccgtgcagcaggagcctgcgctcggagttccgcccacgccgtgctccgacaagcctcaagcctccgacatgccaagcgtccatcgcaccctcgccgtcgtgccgttcggcatgcacttcatgtgtccctggttggcgaggccgctgtccctgcgtgcaacgctcactgcaactgccccgcacggccacacctccatcgctccggcaagccaccagcgctactcttcatcgtccccacacgattgtaccatgcgaacccacgacgtcatccctgtgaacccatgcacacccacgcccacacggaactgcatggcgtgctgcgggatgcggcataactagtcgtctagtcctccattgcctccatgcaataaccactccactcataatggattttgactatttgtgaaaaaaaaaaaaaaaaaagcggcc

SEQ ID NO: 104550 - DNA, 770 bp, Zea mays
  unsure (1)..(770): unsure at all n locations
  Clone ID: MRT4577_26852C.1
ccggccgggaacccatcgttgcccgggtcaagcagcgccctcgccttgccatcacgtccccgccatcgacgtccgtgcagcaggagcctgcgctcggagttccgcccacgccgtgctccgacaagcctcaagcctccgacatgccaagcgtccatcgcactctcgctgtcgtgccgttcggcatgcacctgtgagaatcctctatgttcctctctctccccgtccatattgctatgtcgcgctgctacacaccgtcctggtccctagcatgtgtccctggttggcgaggccgctgtccctgcgtgcaacgctcgccgcaactgccccgcacgaccacgcctccatcgctccggcaagccaccagcgctgctcttcatcgtccccacacgattgtaccatgcgaacccacgacgtcatccctgtgaacccatgcacacccacgcccacacggaactgcatggcgtgctgcgggatgcggcataactggtcgtctagtcctccattgcatgcatgcaataaccactccactcataatggattttgactatttgtggcagcttctcgtgtgtcccttcgtgtggcttaacttcggctagtcatatcacgtcaagtcgtcttaaatctgggaattacaatacgtgttatactttgagttataaatccattttgtaccgctcgcatcgtgttaatttaataatgtcgcctacatgttataatatcattttatcacgacacaagtttaattaattaattaaaatatttgntcgtcc

SEQ ID NO: 104551 - DNA, 309 bp, Zea mays
  Clone ID: MRT4577_26853C.1
gttgccggttagtggcgcattccacccccccctcatgttgccagccgtggcagccctgacgcaagctttaaaggcagtcgacattaagaagcctctggtctctgtctactccagcgtccacgggcatagatacaggcatcccgggcacatccacaagctgctggcccagcagctggtctccccagtgaagtgggagcagacgatgcatgccatatacgaaaggtaaaagggcagggggttcccccaaactttcgaagtaggccctggcaggcagctgggagccatcctgaagagctgtaacatgcaggc

SEQ ID NO: 104552 - DNA, 364 bp, Zea mays
  Clone ID: MRT4577_26854C.1
aggaaaggaactagtattaatttgtatatcacagcaggacgatatggtgatacaaatcagaagttcatcttccacaccagacaccttattccatccttcccacagagattcacttacaactagatcaagcaacctcagtcttaagccaccggcacctgcaagcctgcaccagcaacagccgcaggtgcatgtctggcgtcaggccttgtagagcatgccgatctcgacgcgctgctgcagcgggatcccaagcgccggcagcgcggagcggcaggtggtatgcaggaactcatagaagccgagcagcacgcggtcgaagaggcccgtgttcctgcccacgtggaacctcgcggacgcgtgggga

SEQ ID NO: 104553 - DNA, 335 bp, Zea mays
  Clone ID: MRT4577_26855C.1
agctcggaattcggctcgagcgggagtgtcaccccccgtggctcatggcacagccagcggaaccaaaaaagagggttcatttttgccaatgctgggtttctctgcaggcacactaggtgtaactcataatgaagcccaagaagaccacctgaagtctgcagagacagcttctgtgcaacaggcggaagcaatttgagctgatcggaaatgcacagaagctaaggctgaccatctagataagatcaaaaagcacgtcggcatgcctagtgaacatgcgcagaaagtcaggcagggtaacacaacgacgaagtaactcactggcactgaagcctatg

SEQ ID NO: 104554 - DNA, 374 bp, Zea mays
  unsure (1)..(374): unsure at all n locations
  Clone ID: MRT4577_26856C.1
ttattttttttttttgtggaaaagtttaaacccgggtggggatcatttgaatgagtgggaaggactgaaagataccacctgcacgagaaaaggagaccatgccagtccttggctgttcaaggcctaanagagaaggaaactcgtgtgcttaagaacacgtacctatgcaatgagcgttggtgcacttncacacaggctgccctgaaacctcccattcgttaaacccggactccagtaccatgatgttctctatccctgaaacctccttggcctccgatagatagtctgtgaacatcccagcccaatttggacctccgtcctggcttacacgcgcataggaaaacgagggtgtccttgccgctggcaggccggac

SEQ ID NO: 104555 - DNA, 689 bp, Zea mays
  Clone ID: MRT4577_26857C.1
cattgggaccctcgaggccggccgggacacccctccttcagacctccagctcttgcggccgacctgcctcacacgcgaggacgccatggtctgcggatcttgagtgctgaactgaacgcatgcgatcagcacgacgctttaccgcgtgctgaatgtgtctctcctcgatcatcgctgagcaggtgctcagtgaccagaagatggtcgacgtcctgtgcaaggtaatctgcattgctgactcgctcgacctcactgagatggagcacctcctcttgctcggtgcgtacatgaacgccattgcagcccgccgcgccttccgcttcctcgtctcctccatcatcctgagggacgacatccgaggcattgttccccgcaaaaccctcatcaaggattatcctctcgagattgtcactgcgctcaacgacatctctgctgcgatcctcaagatgcttgagatgcatcttgctgccgctcccactgccctcaagctccaggccgtctatctctacaggctcctcgattacttctcataccgttgctgagtgcaactctggtgatgccatcaaggacctcgctgagaacacgatggagaaatacaaggctgcccacgacattgctctgcctgtagcttgctctcgactcaccctattaagattgcactcgaacattaacttctcagtgctctacta

SEQ ID NO: 104556 - DNA, 434 bp, Zea mays
  Clone ID: MRT4577_26858C.1
gggactgtgcggcgctgctcgcggtgctgtcgagcgaccgcttcgacgtgtcggtcgcgtagctgatcgccgggcaccggcttgcgggcgcacagcctgcgggcaaccccgggcaggcgccggacgccgtgcccgatcctcactcacgggctccgagggccgcgtgaagcggcgcgctgtgcctacagcgggatcttgccggtacagatgtccttgaacatcacccagtcgcccatcaagctgtagatcggatgccgggacgtggcggggcggttcttcttgaagaagaagtgcccgacccacgcgaacccgtagccgcagactacaggcgctggcagccacagtcagttggcccttgcgatcggcatcggtactcagtctatcacgcctagcgagcctaccaaatgcatacgccgcgacgtcaggttctggtg

SEQ ID NO: 104557 - DNA, 106 bp, Zea mays
  Clone ID: MRT4577_26859C.1
gttcaaactatttttggtatttactagagcggggaaccacctttagacgaggtttggaattaaacaaagggcataaatgaagcatacttttattccaaattagggg

SEQ ID NO: 104558 - DNA, 570 bp, Zea mays
  Clone ID: MRT4577_2685C.1
gggggggttttttttttttttttttttttttttttttttttttttttttttttttttttttttttttttttttttttttttttttttttttttttgggggggcaccaaagaaaaagttttttaaaaaaaaaaaaaaaaaaaacgggaaaggggggaggagttttttttaaaaagcaaaaagggggaaaaaaaaaaaaaaaaaaaatttcggcccaccaacccccaaaaaaaaaaaaatcaacaaaaaaaaagggggggtggggccaagccaaattaaacccaaaaaaaaaaccgggatggaatgggttgaaattgcagggggaaatgcaaaaacccttaaaaaaccttttttccggtaaatttttagggggcaaaagccagtccctgataaaaaaaaaacatccaaaaaaaaaaatgtttggggggaaaaacaaaaccaaaggaaggggggccccatggccacagggaacacccccaaccttaaacccaggccttgggaaaattgaggggcttcaccaccccccaaggaaaagcggggtcctcacggccaaaatggcccaaagcgggggt

SEQ ID NO: 104559 - DNA, 348 bp, Zea mays
  Clone ID: MRT4577_26860C.1
tcccaattcccatttcgacccacgcggtaccacgcactaaccctcaaccttcgtcttctgcatcactcacaacaagctctaactccacaatgggcaacttacccccatattctcagaaccctccacactatatatcaacatacaaaaaacctgctctgattatgaaccactcgctcaacaactataaatctcccacttatcattattcccatccacaatgctagacgccctcgtaaaaaataccagacctccaattgacctattatatgttatctagtcaaataaaagcgccattatatttcacaaaaaaacatcaaaataaaaaaacaacggcccctctaaaagatc

SEQ ID NO: 104560 - DNA, 2919 bp, Zea mays
  Clone ID: MRT4577_26861C.1
cgcactctcgctcctgctcccggttttgtcgctccccactctctcctccagacctctaccaccaccccacaccgccgcacgcccacacgcaaccacgaaacggaagttttcctcgcctgaatgtgccagttccggtggttcctcaaagtgaaaggttccttttccaacgtgtatgctcaaggggctatcacttgttccgctgtatagcgagatacgggtataaagacaagaagcaggagcaccaccgcgccggggacggggccgccgccgcggtcgtcggggcggtgagcaggggcgggagctttgagtcggaggatgacgaggatgatgaagaggaggaggacgaggagaagaaggggaggaagaggctgatccggaccgtgccatccgtcgactggttcgacgtcgaggggaacgaggtctccgtcgcgcagcagctcgacgactccgaggagtttgattttggcaggacaatgtttcttgctcttcagactcttgctgtggtgtttggagatattggaattggtccattgtatacatttgatgtcatgtttaacaagtaccctattcttggagaggaggatgtccttggagcactctcactagttctgtatactcttatattgatgccattagtgaagtatgttttggttgtcctttgggccaatgatgacggtgaaggtggtctatttgccttgtattctttgatttgtagaaatgcaaaagtgagtctcattccaaaccaagtacagtctgagaagaggatgtcaagttttcgactcaagcttccaacaccagagcttgagagatccataaaagtaaaagagaaacttgaatcgtcactactgttgaagaaggtgcttctaggcttagtcttgtttgggacttctatgtttatatccaatggagttatcacaccagcaatgtcagtgttatctgctgtcagtggcttgaaagttgggctaccaaatacctcacaagatgctgttgtgatgatttcaattgcacttcttgtagtattgtttagtgtacagaggcttggctgtccctcggtggttgtcttttatgtgcaacaggatctgaggccatcttttcaaatctttgttactttcccgtaagatacgttcagtatatgtttgtgcttcttgttcttccttgccttgtcttggcgtatctaggacaagctgcttttctcattgccaaccaaaagtcatcggagcatgtcttcttttcatctattccaagtggagttttctggcctgttttcttagtggcgaatctggctgcactaattgccagtaggacaatgacggttgctatattccagtgcctaaagcagtctatagcacttggttgttttccccggctcaaaatcgttcatacatctcgaaaatttatggctaagatatacattcccgttgtaaactggtttctattggtttcctgcttgggctttatcattctgttcagaaacatatatgatgttggcaatgcatatgctattgctgagctcggggtgatgataatggccacggtttatgttacaataataatgcttctaatatgggagtccaatattacaaaggttctgtcatttgttatcacattcctgttcttggagctgattttcttctcatctgctctgagtagtgttggagatgggggttgggcgttgttgatttttgcatctgttctactcatgattatgtttatatggaactacgggagcaaactaaagtatgacagtgaagtcaagcagaagcttccaaaggatttgatgaggaagttagggcccaaccttggtaccatcagagctcctggactaggcttagtctgcagtgatattgtgaaaggagttcctgcaatttttggtcattttctgacctcactccctgcgatacactcgataattgtatttgtgtgtatcaggaatgtgccagttccggtggttcctcaaagtgaaaggttccttttccaacgtgtatgctcaaggggctatcacttgttccgctgtatagcgagatacgggtataaagacaagaagcaggagcaccatagcgtatttgcgatgtccctctcctggcagactatgtgccttcaacagagctcattcatgaacccagcctgctccacgcctcaacacgatcctgtactggattatgcacagaaccttgaactggagctggcgttcatcgagcagtccaagcggtctggggtcatctacctcatcgataatcccatcatcaaggccaggaaggactcatggttcttcaagaagctgatgataaactatttcttcgcgttcctgaggaacaactgccgccgcgcgatcatgttgatgagcatcccgcattcaaacatgatgacctcatcgataatcccatcatcaaggccaggaaggactcatggttcttcaagaagctgatgataaactatttcttcgcgttcctgaggaacaactgccgccgggcgatcatgttgatgagcatcccgcattcaaacatgatgcaggtgcgcatgacttcttatgtctgattgctggaactgcactggttctgttcatggatgtctgatacaaaccacactgacagtaaaagaatgaacgtggcaaatgcaaagaggatatcggcacttttgtttttgttcataatttgatgatggcttaggttgttgtcggaatctatctcccctgtagttgtacaatgccaaaatatagttggaagttttagctggtacaccattagggtgctgtattaacctttttttactcttgtgcagtaaagattctttttgtcagcctccttgattttgttagataaggtttttggtgtttgcaaagttactggtgaatgtggcaatttgtatgtatatttttgcctctttttttaggtaacggaagcataagcatctggctttgcg

SEQ ID NO: 104561 - DNA, 1387 bp, Zea mays
  unsure (1)..(1387): unsure at all n locations
  Clone ID: MRT4577_26862C.1
ggggatgacggtgaaggtggtctatttgccttgtattctttgatttgtagaaatgcaaaagtgagtctcattccaaaccaagtacagatctgagaagaggatgtcaagttttcgactcaagcttccaacaccagagcttgagagatccataaaagtaaaagagaaacttgaatcgtcactactgttgaagaaggtgcttctaggcttagtcttgtttgggacttctatgtttatatccaatggagttatcacaccagcaatgtcagtgttatctgctgtcagtggcttgaaagttgggctaccaaatacctcacaagatgctgatgtgatgatttcaattgcacttcttgtagtattgtttagtgtacagaggtatgccactagcaaagtggggtttgcaattggcccttctttacttttatggttttgatgccttggaggaattggaatatacaattntgagtatatatggctcaacagcatttagggcatttaatcctctctacattatttattattttgggaggaatccttttcaggcttggctgtccctcggtggttgtcttttatgtgcaacaggatctgaggccatcttttcaaatctttgttactttcctgtaagatacgttcaggtattatctgcaagccaatgaaagttttgacttcgtttcagttattttaaggcgtcgccttggcctccaggcggcagtcgttcggataattctaggtgtcttgcttgctttgcccgcctaggcgttaaggcggtggtcatgtttacttgctcgccttaccgccttaagaacactgcttcgtttgctccctcctacttgcagctaatatttcaaaaacttactgattggtgtgtacttaataaactcttatcttactttgcagnatatgtttgggcttcttgttcttccttgccttgtcttggcgtatctaggacaagctgcttttctcattgccaaccaaaagtcatcggagcatgtcttcttttcatctatcgcaggcggagttttctggcctgttttcttagtggggaatctggctgcactaattgccagtaggacaatgacggttgctatattccagtgcctaaagcagtctatagcacttggttgttttccccggctcaaaattgttcatacatctcgaaaatttatggctaagatatacattcccgttgtaaactggtttctattggtttcctgcttgggctttatcattctgttcagaaacatatatgatgttggcaatgcatatggtaaataatctattgatatgcttttgatgccaatatgttctctatttattcttctgtttgtttcttctgatctgacaaagttccatcttgaacagctatcgctgagctcggggtgatgataat

SEQ ID NO: 104562 - DNA, 1295 bp, Zea mays
  Clone ID: MRT4577_26863C.1
gggaataatggcttctaatatagggagtccaatattacaaaggttctgtcatttgttatcacattcctgttcttggagctgattttcttctcatctgctctgagtagtgttggagatgggggttgggcgttgttgatttttgcatctgttctactcatgattatgtttatatggaactacgggagcaaactaaagtatgacagtgaagtcaagcagaagcttccaaaggatttgatgaggaagttagggcccaaccttggtaccatcagagctcctggactaggcttagtctgcagtgatattgtgaaaggagttcctgcaatttttggtcattttctgacctcactccctgcgatacactcgataattgtatttgtgtgtatcaggaatgtgccagttccggtggttcctcaaagtgaaaggttccttttccaacgtgtatgctcaaggggctatcacttgttccgctgtatagcgagatacgggtataaagacaagaagcaggagcaccacagcgtatttgagcgtcttctgattgaaggccttgagaaattcatacaaagagaggcagtagagctatccctacaaagcgaagacgacattgactcggacgaagagcctccaacccctgtgaagatcatcacagcaccaaatggcagcctgtactcgctcgacgtccctctcctggcagactatgtgccttcaacagagctcattcatgaagccagctgctccacgcctcaacacgatcctgtactggattatgcacagaaccttgaactggagctggcgttcatcgagcagtccaagcggtctggggtcatctacctcatcgataatcccatcatcaaggccaggaaggactcgtggttcttcaagaagctgatgataaactatttcttcgcgttcctgaggaacaactgccgccgggcaatcatgttgatgagcatcccgcattcaaacatgatgcaggtgcgcatgacttcttatgtctgattgctggaactgcactggttctgttcatggatgtctgatacaaaccacactgacagtaaaagaatgaacgtggcaaatgcaaagaggatatcggcacttttgtttttgttcataatttgatgatggcttaggttgttgtccgaatctatctcccctgtagttgtacaatgccaaaatatagttggaagttttagctggtacaccattagggtgctgtattaaccttttttactcttgtgcagtaaagattctttttgtcagcctccttgattttgttagataaggtttttggtgtttgc

SEQ ID NO: 104563 - DNA, 360 bp, Zea mays
  Clone ID: MRT4577_26864C.1
caagagcctgcattctacagacagcaaggcagagtaattgaataaataatttatatggaaaacacgcctagatcattcctgatagctcgaaaactttctgaaatccactacgtgatgcccttaacctgttatttgaagccaccgaaacgtcggaattagaagaaagggaattcagatgtgtaatgtttcaactattgatctatctgtccattcaaatctaggagtgttaccaaataataccatcaatggtggtgcctctagtaactgaagagagctatttgagacctatcatcaatgtcagtgtaaccgcaagccactagcaaaaggtcagccggaagaaattcgactccatggtgcttc

SEQ ID NO: 104564 - DNA, 557 bp, Zea mays
  Clone ID: MRT4577_26865C.1
caggatagtcgcgtctcttctcatccttcccgtctctcccccgctccgctccaccccgctcaaaaaccctaggcggcgcccgaatcccggatcccgcgtccggctcccccagcgcctccgcccgtgctcggcgtccatcgttgccggcctccccgatggacccagcggggccgcgcgtggccacggatcccgccggatcgggtgccgcaccgccgcgcgaggaattggacaggagaggaggggcgtgcagcggcgccgcagcggcggaggggagcgcgtcgcggctcgcgggcgctggactgggagatccgagggctggaattctggaatcttcaggtcaagcagaagcatatttgcacacatgtaccatggatgtttctcagttgactgctgaaggtgtcacccagtgtggagctagagtgtctttattaccccagattggggcacttcagtcagaaactccttgtctgaccttgggccgtgattccagtgcagaatcaatggagaagttgcatgacagtgagtccttgccatgctgcaaagagaacatcggaaca

SEQ ID NO: 104565 - DNA, 779 bp, Zea mays
  unsure (1)..(779): unsure at all n locations
  Clone ID: MRT4577_26866C.1
ccggccggccggatcactctcatcaaacatcaaccactcttatcttcaaacaactctcaccactaccaccaacaccactcacctcttcaacttacacacaaaaacccacaaccgtcaacatgaagttcactggtatcctctctgctctcgctctcacctccgccgtctcggccaccactgtctcctacgacactggctacgatgacaagtctcgccccatgaccgccgtctcttgctctgatggctccaacggtctcatcaccaagtacggctggaagacccagggcaacatccccaccaagtacgtcggtggtgtcaacatcatcgctggctggaactcccccaactgcggtggttgctaccgcctcgagtacaagggccgcaagatcaacgtccttgccatcgaccacgccgcctctggcttcaacattggcctcgatgccatgaacgccctcactggtggccaggctaccgcgctcggccgtgtcaacgcccaggtctaccacgctgacccttctgcttgtggcctcaagaagtaaacggctgcaactctacgacttttatgagatgcattacggacgggaatttgggttaacggatacttttttataattcttcctctccttagaactttgggtttaatacttggcaatggctggctggcgtttagactatgatttaccacacacataatctaactagatactacacacacttacatatgaatgaacatagagcttagttgcttatacgcaaaaaanaaaaaaaaacccgcggnc

SEQ ID NO: 104566 - DNA, 191 bp, Zea mays
  Clone ID: MRT4577_26867C.1
ctcgaagggtcgaccagtagtttgatcgctattatccatggcgacttctattgctgccgccactgcactgctccgacccaggccggcaggtccagccaaggtggcgcataggaggtgccttcatgcagggcgatgggtggacgacgatgaggaatgaggggagctgaagggggcgagcgagctttcttcag

SEQ ID NO: 104567 - DNA, 347 bp, Zea mays
  unsure (1)..(347): unsure at all n locations
  Clone ID: MRT4577_26868C.1
cccacgcatgcactctatatctcccgacgtctactcgttctctgtttccctccatgccctcaatgtaggctcaatctaaacgctgtccccttccctcatcaaaaccctanctcatcacctcaccaccattctgtccactatcctattccactgctcctctccccatctctcttgccatcacatctgatgttcttctcccacaacgcattcctctacctgtaccccatctactcaccaacctccatgacttcctctaataacgttactacccattacgagtgataacttaagcttcactacatcaagatactcaactatgacatgaaccgcctcgtcattaacttcct

SEQ ID NO: 104568 - DNA, 335 bp, Zea mays
  Clone ID: MRT4577_26869C.1
aggcaaaggaacaaaccccatattccccaaaggaaccatacagggaccggcacataaagcctgaatgcctaaaaaccaaataaccccacccaaattcttacaaaaaaaccgtttttgacaacaaaaaaacctgggtcaaaagttattttacccctttaccgacccaaaactaaaaccatcaatgatggaaaaaaagccccaaaattagctcatgtagccccacaactcacccggtttaaattaaaaacaaacttggggactttgggaataaaaaaatccccccaaggaacgggaaaacccttgcatcaactgcaaaaaaaaacttcccgaccccc

SEQ ID NO: 104569 - DNA, 163 bp, Zea mays
  Clone ID: MRT4577_2686C.1
tcttctctcccgcggcctctaaatatgccccggcgttctgtgatatccacactggtctctctctataccaaacccgagacgcgcagtttctagatcttttctccggggtaaaaacgctgctgtggggagcccgcccttgaaaacgagcgagccgagccccgcg

SEQ ID NO: 104570 - DNA, 299 bp, Zea mays
  Clone ID: MRT4577_26870C.1
ccaaaacaggccctaggttttggaaattcttcatttttaaaaacatatttttttttcgaggggccaaacaactttttgttttaaaacccgtgttttcggggaatcctccatttttttcccaaaattgggcctgttccccccggatgttgggccaaatttaaattttttcggccctatagggagccccccgtcctctttttttttttggccccgggggggggggtttttcttccctgtttacaaacccatttattttgggtgcgggggcccccccgggggggccaccccctccccctttt

SEQ ID NO: 104571 - DNA, 304 bp, Zea mays
  unsure (1)..(304): unsure at all n locations
  Clone ID: MRT4577_26871C.1
gaggtctcggccggaataaaaaaaaaatctaaatatcattttaagcttatctaaaaagttgagtgatttttggagttactaattaattcctaaaattctaggagtataggttttggctattttaaatacttcataattcctggtttgggctaaaaaatcttaaaactattttttattaaatactataggaatttaggagtctaacaaaattggtctgatattnttagcacttttctacaattttgtagggattctctaatcctagntagaaaagaaaaggaanaaaatgaatagtatcggactg

SEQ ID NO: 104572 - DNA, 452 bp, Zea mays
  Clone ID: MRT4577_26872C.1
acacagggggaagggacttccattatcttggtcggactgacaaacacagctgttggtgaccaaatatcaacaaaatacaggggggttttgccctaaaaactccgggagagcaaatcctttgggtactgacataaacaggggggaaaaaaaaagggtcaaattatacatggggacacagcactaaaacaagggttccaaaaaattaaacacgggactgatcactttgtctgatcccggggagggaagcggggaacgaagcaactgaactgcacaaggggggggcggggacaacaaacaaaacagggcaaaaaaactggtaaaagaaaaaaagccccgtgggccgtgggggagggttcaaaaaaaggaacgcttgggggagggccccctccccacagcccttataaaattggggaactccaaacccccgcgaacttggggccccgtttgggctc

SEQ ID NO: 104573 - DNA, 382 bp, Zea mays
  Clone ID: MRT4577_26873C.1
ttctcgcgtccgggcgccaccgcccgggggagggacagcgtaccggccgggcgaaacactaagcgaaaggagaagccatgcacacgatcatgggcaccagtccgatgatccttgcgacgatgctcgttgtcgctattcttggctttactgcctgcttcggcgccaccgacaccgacagcgacggccccattcgttttcccactagctctggagctggtgatcgatcgggctagtgctgcgactatcccaccaaggacccgattatcaggaggccctccaactagcgctggaacaaccttgttggacaagtgctccgactactgccaatagtgcgaggagtaccttgtccggctacgacttacttgtgctataacttgatctt

SEQ ID NO: 104574 - DNA, 433 bp, Zea mays
  Clone ID: MRT4577_26874C.1
ctcaagaaagaggtcttgtccgaggtttaattcctcatattatccaaaatggatgttgttgtcttcagtatgctgatgatactattttcttaattcaagattgtttggaaagtgctagaaaccttaaatttattctttgtctttttgagcacatgtctggtttgaaaattaaatttcacaaaagtgaaattttctgtttggggaaggctaaggatattgaagatttgtgtgctgatatttttacttgtcatattagtaatcttccgataaaatatcttggtgtgccaattgacaacaagaaaattaataaatctctctggtgccccatgttggaaaaaatgaagaaaaggcttgctggttggcaaggtagatttttgagcttggacggtagattgactttattaaatagttgtctttccaatggtcctcttta

SEQ ID NO: 104575 - DNA, 343 bp, Zea mays
  Clone ID: MRT4577_26875C.1
ccatcgggggggggagaatccacatgtattgaatacaattgagccggtttaaacccataacaaggcaaaatccattctaatcccacccaatacactccaatacacatgtaatatctataacctaaccagggcttatggttcttgtaacttcaaaggcccaaaccatgcgggatgcgagttcaaacgcactaaaggttatccaagaaggggtaaatcccactgcggggtttacacatgaacataaccgatgccttagggaagatacactggaggggagaccataaccgacgctagaaatgtataccccccaactgatattgtggaatatttgacaaggactatt

SEQ ID NO: 104576 - DNA, 575 bp, Zea mays
  Clone ID: MRT4577_26876C.1
cagctcatgagctcacattcctaggcgtgaggcgtatcgtctcctacccttcgccttcctcgtccctttctctctcccagattctgactccgtcgggctcccccgtgtctgcgtcttggtgaacatcggcctctacgcatcccacctggcagggggcatctcgcaaagacacactaacttggcttctcgaatcggctgcaaccccaccccagaccccaccgtcgccgccgctagggtttaggggggaggatcgccgatgtcgacggctcccaggcgttccttccaaggccgaggcgccatgccctcgggcaccgggtactgccggcgcggacgcgccccaggctccgtcgacaccgccaagcccctgcgcaagcccgacttcaccaccgacgaccagcttcggccccagacacacggtcacactctgacaggcagcgtcattgccgtccgtaccgaactcgacaagccctacacgcacctcggtacgcaaccgcgtcgaactagtgcgctcgtccgagacagcaccggtaccgaatcttgacaccggccgtaacgaacaggttgacctttggaag

SEQ ID NO: 104577 - DNA, 452 bp, Zea mays
  Clone ID: MRT4577_26877C.1
actcatcggacatctttacggtcggctagagcaccatcgaagctgcacaacacctgcacagactctctcctcgccgccctatcatccttgtgctgcgctcctgtctgaactcatggccaggagccatgtcaaacctgaaggaacggacaaagtaccactcctttcacccggcgtgtcaccatcccacgctacctaaccaaggcaccactggatcgccctgacacaccgctggggaacgctatcacataacccatggcgatgctctataacatcatcagggcctgggctgtactgaccccacataaccacatgatactggagtacctcggtcgtataccacactaacggcaaacaccaacacactgccgggcgttactaagaggaaccaaactttgtacaccagcgttgaagtgatccactacatagctgtctcctgaggaaaattgatgatc

SEQ ID NO: 104578 - DNA, 843 bp, Zea mays
  Clone ID: MRT4577_26878C.1
cccagcgtccgatggttgtagtggggtgtggttcattacttgattggttgtgtggtctattttcatgcttgtaatgtcaatgtcattcaggagtgcagtagtggggaacaatttccatgaagtggcgaagaaaatatttggatatttggtttgatgtttgcagtcacatacctggcaatatggtctcttactagactgtacgtttgttgtagcgtggttgtctttcgtaaggatattcatgtctgttttgagatagctctagttcattgattgcaattgtcttcccatctgtccacctgaactttgtttacagagtcagttcctgagaatgctgaagatgtaactgtctacctgtttgcttgcagttctccctcccaatgccccaaggtggaagagatgcaataactaagaaccccatccttcgtgaggatcaacttcctcagaaggttcttcatcctaaactgaagaagtcaaacaaggatgatgatttcttgggcgtggtcgacatattttcgcatggtggtgataagaaggcaccattgaaacctccagtgaggaaggcgctcgcaatgttcagcgggaaaagaaatccaaacgacaaccacttctctcgcaagaagtactaagctctgatctgtcgtcttctttttatgcacgcctgtggtaccgtagtctgtaatcccagcatgtacgtaatggttgaagcagagtgacttattttttgttagtggcgtatactcatcatattcatatacccagatatatataagcatgtaagctatgcagttttgcagcaaaaaaaaaaaaaaaaaaaaaaaaccaccccaactcagggggttgaaa

SEQ ID NO: 104579 - DNA, 201 bp, Zea mays
  Clone ID: MRT4577_26879C.1
cctatacggtgccttcgtccccaatacctctcagcagccgcgatggtagactgcgaggacacaaggcttcacgcgtacgggggccaccaggcgctgatagggggcgtggtgcaggaataggaggtggaggaaggggacagccccatcaggaccaccgggaccagagcgaacataagcggcagcagatcatgaaggaaggac

SEQ ID NO: 104580 - DNA, 382 bp, Zea mays
  unsure (1)..(382): unsure at all n locations
  Clone ID: MRT4577_2687C.1
atatatatagaaaataggaaaaatttttttttttttattttttttttaaaatttttttttttttttttttccccggagggtataaaaaaaaaaacaaaaaccccaataattaaacaaaccancccaaaattggaaaaaagcccaaccccaggcgttacataaaaaaaaaatcccccaatgtccaaccacaacccccattgaaacaaaattttatccctaccctaacacaaacattaagcccacctaaaaaaaaaaatcgnancnctaacaaatctcaaaaccaaaatttataagggccccacctatccctgggaaacatttttaaatgccaaaaaaaaaggatacatcccccagttgaataaccaaggggcccaaaaacttc

SEQ ID NO: 104581 - DNA, 464 bp, Zea mays
  Clone ID: MRT4577_26880C.1
gcgatcattccgtgattattccttagatgacgcacaactgacccaccgaatagaccacatgaccacatcatgctcgactgcgtctccactgtctgcggcctccctggccactccctgggcattctccagcacgctttccaccagcttcacgcgtgtcagccaggagccccctgatgaccacctgactggaaagaaacggcagaataatgtgaatgtcacctgcatgacactgcctggggactgacttgagaggcatctgattctcattcatttcgtgctcgtcggctgcatgtgtcccgcccatgaaccggaacatcactcacgacagtcttattctcctctatcttctcaagaattggccaagttctggacgacttcgccaggcacctgccaggcacctcctgaggttagtgtgggggtacctgcgtctgatcatcgtgctctccttcggctcaacttcattc

SEQ ID NO: 104582 - DNA, 548 bp, Zea mays
  Clone ID: MRT4577_26881C.1
cggacgtcccctgaacacaccggcgaacgggcgaagagaaggcgaagaagcgatgggcgtcaccaaggaggacgtcgaggcggccatcacctccgctctcagcccttccaatctcgtggtcacggacacatccggagggtgtggtgcgagctacgagatcgaggtggtctcggagaagttcgaggggaagcggctgctggagaggcaccggatggtgaacaccgcgctggcgcctcacatggcggagatccacgccgtctccatcaagaaggcgctcaccccggcgcaggcccagccccagccggagcccgccgccgataagccccaggcctaagtgcttaattaaaaccccccaaaacggtttgatcacatatgctgatgcagcattagtccctgagtcaagctatgcataacgcatctgtgtaatatgtggtatgtgctacattgactgtctgcttgaataatgtggcggatgaaatttctaaattgcaggatgttatccttgactcattagaaacttctgcactatgcatttaacttctcactaa

SEQ ID NO: 104583 - DNA, 1387 bp, Zea mays
  Clone ID: MRT4577_26882C.1
gtttccagttcataaaatttcccaaccatagatatcctccaattattcgattcccaagccactaaggcccttggaggaacaacagaatccagaaaccgaaaagaggcctcactgctgccgcctgggccaagtcgtcgtcttgctttgccaatccgtcgctccacctgaacacaccggcgaagaggaggcgaagaagcgatgggcgtgaccaaggaggacgtcgaggcggccatcacctccgctctcagcccttccaatctcgtggtgacggacacgtccggagggtgtggcgcgagctacgagatcgaggtggtgtcggagaagttcgaggggaagcggctgctggagaggcaccggatggtgaacaccgcgctggcgtctcacatggcggagatccacgccgtctccatcaagaaggcgctcaccccggctcaggcccagccccagccccagccccagccggagccggccgccgataagccccaggcttaagtgcttaacaccccccaaaacggtttgatcccatatgccgatgcacgattacattggctatctgcttgaataatgcggcggatgcacttgctaaattgcaggatgttatccttgactgattagaaacttctgcaccgtgcatttaacttctgtgtcactgtgtgtgtgttctggatgcttctgccctggtcgtttgctcgagactgtgtgttgcagttcatgctgttaatgttctgccagggtggggttttcagtcctggaatttttatatttgactgttgctatgtctttccttgcttgtaggggtaaggggtttattctttaaccttgtggattagattactgtatccatcatggtctgcagtggggagtggggtgtgatgatgatggctgcatcttgtttacacaacattttaatttcctgattgatgatgccacaatcaagatgaatgtgttgtgggtgctggtaaaagaccgtatctaacagttcacccatatgattttccaaaacactgtgttttgtatattgttttacactgagtgtagtttgaatataggtatggggatgggtagattgctggagatagcctaaagctggctgcaagtatttgagtgctggaactgcagtagtttacagtttaagctgtgaaaatattttatgcaagctcctatgttatatcgtatatattgtagcgtttgcattgaattgtagtacctgatgatactcatttttgtgcatatggggctgctggagttgtaatttctttctgtcataaacattccaaggtgtctgtgcacgtttgcatggacccccgtgaacagcagcacacatcggtcgttggcaccatagctgacttctatttgcaaaaaaaaaaaaaaaaaaaaaacctaaaaa

SEQ ID NO: 104584 - DNA, 407 bp, Zea mays
  unsure (1)..(407): unsure at all n locations
  Clone ID: MRT4577_26883C.1
gagacggcacgccagatgtgatggaatatncatgcagaaaatctcgccctctagcgatggtacgcaggcacgaaggtaactcttttctttcttttcttctttcttctcttttcttttatattttatttttttcttttttctttttctttttttcttttttttctttttttttttaacaaaaaacgggggccattcattcattcttttatttatttcattcattcattgcacccaagacaaaaattatcttttcttatttcccacaacattaaccggacattggcatgatggtcaaattaaaaaaaaggcgcacggggggaaatccccttgcggctgggaaaaacaaccctttttggaggggggcctccgaagttcttggcacagcaaccgttttggccatttggaga

SEQ ID NO: 104585 - DNA, 798 bp, Zea mays
  unsure (1)..(798): unsure at all n locations
  Clone ID: MRT4577_26884C.1
agctacccccaagcagatcgggccaacctgcaactacttcaagagatcgctgtccctgccctagcagccttctttctccttcgtgacaacacatgcatgcacccaagctgctgcttcctgtgcatcacacgggtcttggaaagctagcctcgttagcttcttgttggtgccagttgattggaaaggagcgagagaattattgagcggttggcatcagccgcttgctgcatccactatagaggcagcgagcgagagcgagagggatcggcaaagggcgccctaggggagctactactagctgccgcacgatactacagccatgtgcgactacttccttccgaggatggagggcgaccaggccggcggcggagacctcacggacatcgtccggtccggcggagccatccctggaaacgccgcggacacgccgtccacggccgccgcggacgagtggcagctccagggggacgcgacgatgctcttcccgccgcttccctcgtcgacgacagcatcggaagtaggctgcgccgccgtcttcggcaccgaccctttctccggcctcgtggacccgttcagtaccgactactcctcgggcgccgacttcctggacgccatgccggacgcgatggccaaggtcggcttcgacacgacggctatctgtggcggcagcggcagcggcagcggctgcagaggaggaggcggaggccaactcatagacatgagccggaagcagcaccctctcttgccgcgggggttgcagatgcccgcggngggaggagtgctgaccccgagggtggt

SEQ ID NO: 104586 - DNA, 589 bp, Zea mays
  unsure (1)..(589): unsure at all n locations
  Clone ID: MRT4577_26885C.1
ggacctaattttagctagggggtttggatctgataaactacaactaatatggcacatacttactacacttactactgattttgttgtacagattcatctaaaatggcacatacttactacacttactactgattttattgtgaaaggacagcaacagctcaaggcagacaaagaccatggcacaaatctcacacttgtccaaacctacaagtatgatcaggaagatagcttgaaaaaattgtgaatgagacttgtatgtggttgtgaatgaacaattgtgtgattaggatttgtttattgtgagcttttccgattacaattaccgtttcccgatcaattccgagctattttgctcggatttatccgttttcgatatatcggaatttaccggtcgttattcgtttccgacttttccgtttaccgattccggccgaacaaaaaattatgcgggtgaaaacggtgagaggttttttccgaccgttaccgaccattttcacccttagatattgggctgtgntaaaattttctaataaccggtttttatgttgaatggcatttcatcctgactatctttattattcttttcttt

SEQ ID NO: 104587 - DNA, 2321 bp, Zea mays
  Clone ID: MRT4577_26886C.1
gacaccgcagccggagcacagcaggcgcactacctagagtcgacactccccagcaacacagtgccactccactccaaggaagtgcttgcctcccgctctctacctctcctaccaatttcagctcagctctgttctgctcccgcagcaccagtacagaacaccccagaggcagcgagtcctgttcggtgtccggcgggaaggccatgggggctagggctacctcccctccgccgtggaggcgtcactgcctctgccgcgccctccacttcctcgttctcttgctctggggtacttccgaggcaaatgaagaacaggccatgttgcctccaagagggtggaactcgtatgattctttttcatggattgtagacgaaaatgcatacctgcaaaatgcacagatcatgacagagaagttactcccacatggatatcagtatgcagttattgatttcctctggtaccggaaatatgttgacggtgcatacacagattcatatggatttgacaacattgatgaatggggtcgaccttttccggacgttcaaagatttccatcgtctagagttgatagagggttcagtcaaattgccagtaaggttcatggaatgggcttgaaatttggcatccatttgatgaaagggataagtgtgcaggctgttaatgctgacacgcctatcttggacataaagacgggaaaaccatatctagaggatggccgtcagtggacagcacgagacataggtctcagtcacagaacttgtgcgtggatgactcatggatttatgagtgttaatacaaatattggagctggaagggccttcttaagatctctttatcgacaatatgctgattggggtgttgattttgtaaaggtcgattgtatcttcggcacagattatagcccagaagaaatcatcactatttcagagctattgcaagaaattgatcgtccgatcatcctgtcaatctcaccaggaactgcagttactccagcattagctgagaatattactgatcatgttaacatgtataggataactggagatgattgggacaactggaaggatgtgagctcgcattttggtgtatcaagttccttcgctgctgctaagaagattggggccactgggttgcgaggaagatcttggccagacttagacatgcttccatttggatggcttactgatccaagtgtaaatcagggccctcacaggaaatgtaaccttactcttgatgaacagaaagcacagatggcactttggtcaatgactaatcacctctcatgtatggaggagatttgaggaatcttgacgatagtaattaaacataattaccaattctggtttgttgaagataaaccactatagtagaaataacatggagttccattatgtgcacagtgaaaggacatcaaatggagaacattctggtcactttaggtctccttatcctgttcgtgttaccaagaatgatggcatatttgtcagtctcactgcttgcagcgacaatgcagctaaaggatggtatatgtttccacaagatgggaaaccagatcatatatgcaggaactatgaaatactgaatgataaaaatgtctcattttgcctcggaaaaacaaaacgttttcttgcatcggatgtccttaccatggacaccaaggaacaccaatcaaagtttcatatttcagttacaaacactgatgatacttgtttggatgcatctgctggtcgaaggcagactgcctcagagatcaggcttcctatgttctctgcatgcaggtggcatgcaaaacagatgtgggagttaaatgcgaatggaaatcttgtgagcagctattcaagattatgtgccacagtggaatcaagggacgaaggaggtaccagtggaggtcgggcatggattgcaactggaagtgaaggagaaatctatctcgcgttcttcaatctcgactccatgagcaggaagatgaccgttgaaatatcagaccttggaaaggttctcggaagaaaccttttggagaaaaacccatgtagctacactgaagtttggagcgggaagaatttcggccccgtgaaggaagagatttcagcggtggttcattcgcatggctccatggtgttcgaaatcatatgttgagattgcagtactgggcaagttgttcgagaagtttgcagtgataatttagttgtaagctccattcctgttgatcctttttaacgtgtagtccggagatggaagagatacgttgatgaaccattaactagatgcctgctggatttgacttgaatgaataacaaaacaaaacaaacaaacaggaggtg

SEQ ID NO: 104588 - DNA, 846 bp, Zea mays
  Clone ID: MRT4577_26887C.1
ccggccgggtaattctggtttgttgaagataaaccactatagtagaaataacatggaggtacctgcattggaggcttcctattagagtgatgtctgctttgtaagcacaaatgaattgtaaactgacctgtcaatattttcagttccattatgtgcacagtgaaaggacatcaaatggagaacattctggtcactttaggtctccttatcctgttcgtgttaccaagaatgatggcatatttgtcagtctcactgcttgcagcgatgatgcagctaaaggatggtatatgtttccacaagatgggaaaccagatcatatatgcaggaactatgaaatactgaatgataaaaatgtctcattttgcctcggaaaaacaaaacgttttcttgcatcgtaggatccaccctatttataaacagataagtgctcacttaatgatttgtattaacacatttatacattgtagggatgtccttaccatggacaccaaggaacaccaatcaaagtttcatatttcagttacaaacactgatgatacttgtttggatgcatctgctggtcgaaggcagactgcctcagagatcaggcttcatatgttctctgcatgcaggtggcatgcaaaacagatgtgggagttaaatgcgaatggaaatcttgtgagcagctattcaaggttatgtgccacagtggaatcaagggacgaaggaggtatatattacataacttttttattttgaactaagtgacatcactatattttcctatgaaatataggtaccagtggaggtcgggcatggattgcaactggaagtgaaaggagaatctatctcgcatttttaatctcg

SEQ ID NO: 104589 - DNA, 263 bp, Zea mays
  Clone ID: MRT4577_26888C.1
ggggtgttgtggagtctgcagctggctactgaaggcggagccatggggaggggccgctggactgagcggtcaacaatcaacgcagcacttgaagcccgaacgcgtaaaagctacagcttcgcttgcaccaatccctatgctttaacgcgaagcttcatttgacggaccactacagacactgataggacaaaaacatttcagccaatctgtgtcgacaaagacgagtttcaacagcgatgatcctaactaaacaaggtgtatta

SEQ ID NO: 104590 - DNA, 291 bp, Zea mays
  unsure (1)..(291): unsure at all n locations
  Clone ID: MRT4577_26889C.1
anggcaaggggaatgggatcattttggcactcaaaaaaaaatgccacgactttaaaagctcagtcaaacggtagagggagcacggacccacttgccaaatagatcaaggggagcaacaccagcccacttggcctgggggaaacccaaggggcgggggaaccaaaccgaccactccctgccgaccaacatgagaaaacctgggtcgggcaactaaacctagcgcaactatagcccggggcgccttctatagcattgggggtcttatacggccgggcctggaaaccttggacc

SEQ ID NO: 104591 - DNA, 148 bp, Zea mays
  Clone ID: MRT4577_2688C.1
gagagacgtcgaccttagagctaagtacttttgggttacatcgacatggcgatcactcggcctcaggtcgctttctcctggctcggggtgttcctcctccttctggttccagacggactgactacgacgttctcgctgactaacatct

SEQ ID NO: 104592 - DNA, 496 bp, Zea mays
  Clone ID: MRT4577_26890C.1
gggccccccctcgagttttttttttttttttttttttttttttttttttttttttttttttttttttttttttttttttttttttttttttttttttttttggaaaaaaggggtttcgggtttaaaaaacgggttttgaggggtttaacaggggccaaaaaagtttaaagacccgttacccgggtttttggggtccaaaccccaggggccccaaggggaaagggtgggggggggcttttttctcaaaaaaaaaagccaacaacgggttcaaacccggccgggaggccccccctaaaaaatccttccccccgggttccttttggggggcctttaaaccggaaggggggggaagggaaaacccgacctaccccccttagaaaaaaatttttctggcggttaaaattaccaattggcaaatttattgggggtttgaacccaggcttggaagggaaccttttttttacttttgggccccccccccaggggaggggggggg

SEQ ID NO: 104593 - DNA, 506 bp, Zea mays
  Clone ID: MRT4577_26891C.1
taaccagctttaatcaattgtctatactctgaacgcaattcttaccctgaatgcattgctgctcaccgagaattgagctccacttgcactatacaacgaaaagtctgtacgacaaacatgtacgagggcgataaataaaagccccgggcctacccggattgtggtttggaagatgtacacaaaaccaagccgtgaatccgtacagtactaaccttaatggccataacgtgccaggccctttcatcgcataatgaggacagaccgaaaagttctctcccaacctgcttgggtaacggaacaagggtgccgacaagccaatgagctgttgcaagaacaccatggccgtaggcacgatcgccgcgcacggcgcgatgacttcccaggcgacgcagaaccgggcgaaaggcgggctcgcaaagactatgcccgatctggaggtgagagcggaacacttgcctctgataacgccgtacacgaggggaattgatcggaccacggcgtttcct

SEQ ID NO: 104594 - DNA, 463 bp, Zea mays
  unsure (1)..(463): unsure at all n locations
  Clone ID: MRT4577_26892C.1
gcaataagaaccctcgtgtcattcaattgcagtaagaaaaacttccaactaggggcaaaaaagaagctttaaaaacaacgcacccctcaccctaccccgcaaaatagagctcaaacttgcaaataagttctttgccttaagggcggggcaccggaaggcccatataaaacctaacatgcagtatggtaaacaacatgcacaaatccaaccatattttttaaggaacaatactgtacatggtgccaagacaacactgtgggaaacacccacactgagttagaaactgaagaactatgntatggcctttaagttaggacataaagccttatgtcagtgataatgctgcaagcacgactgacccgaaagcatgcgttctcatactgggcacacaaatgcggagaacatacatcgcctaatcaacctctgacttgagagcatcaggggactcactcaagaggaggac

SEQ ID NO: 104595 - DNA, 580 bp, Zea mays
  Clone ID: MRT4577_26893C.1
ggctttcagggacataaaccctcaagctccaacacacatcctcatcatccccaaagtcaaggatggactaactggcctgtcaaaggctgaagagaggcacatagagatacttggctatcttctctatgttgccaaggttgttgcaaagcaggaaggacttgaagatggctatcgcgttgtcatcaatgatggcccaagtggatgtcaatctgtctaccacattcacgttcatctcctcggaggcaggcaaatgaactggcccccaggctaagaatatcttgttgttgatcagtcttcgtggcaaggattgctactccatttctccagaataatccctgtaatttccataaaagctagtgccaccttgtgctgtatttgtggaattaccggaagcatcctgctgtgatctatgaatgaacacaagaaacttgtacctggtatcatggattgacttatccttattgatcagctggaggttgtccactggccttgttagtctgctcaattttctcgccagtctgcttttttcctctaagaacaatagcttcgttacctgcatttgattcgcttatattggctt

SEQ ID NO: 104596 - DNA, 366 bp, Zea mays
  Clone ID: MRT4577_26894C.1
atggacacttggttacctagctctaggagtacctcgccttgacggctaaaactgttgtgcagtcaagctttcggtggaatcgccatgcaaccaaactaccaagtcataaaaagtttccaaaaaaaatatagaggtactttattatttattctatcaatatactagattttaagttctaattcatcatatgttaagagattaaaaaagagaaaatttatcattttttaatcctttatattggatataattttctcttttttatttcccttgatgatgataagttagaatttaaaatttgatatattggtagagcagataataaaatatctatttttttagatttttcatgacttttggtagtttaat

SEQ ID NO: 104597 - DNA, 1218 bp, Zea mays
  unsure (1)..(1218): unsure at all n locations
  Clone ID: MRT4577_26895C.1
gccggcctggccggggtttcttcggaggctttatttatcgtttatccacggaacttccggtgccggcggcgaccacttgtggcgatccatccctcaccatgtcgtcggagaaggaggcggcgctcgccgccgtgctcgacgacagcccaactatatttgacaagatcatcaaaaaggaaataccttctactgtggtttatgaggacgagaaggtactggctttcagggacataaaccctcaagctccaacacacattctcatcatccccaaagtcaaggatggactaactggcctggccaaggctgaagagaggcacatagagatacttggctatctcctctatgttgccaaggttgttgcgagccagggtttcttcggaggctttatttatcgtttatccacggaacttccggtgccggcggcgaccacttgtggcgatccatccctcaccatgtcgtcggagaaggaggcggcgctcgccgccgtgctcgatgacagcccaaccatatttgacaagatcatcaaaaaggaaataccttctactgtggtttatgaggacgagaaggtactggctttcagggacataaaccctcaagctccaacacacattctcatcatccccaaagtcaaggatggactaactggcctggcaaaggctgaagagaggcacatagaaatacttggctatctcctctatgttgccaaggttgttgcgaagcaggaaggacttgaagatggctatcgcgtcgtcatcaatgacggcccaagtggatgtcaatctgtttaccacatccacgttcatctcctcggaggcaggcaaatgaactggcccccaggctaagaatatcttgtgattgatcagtgctaatgccaaggactgctactccatttctctagaataatccctgtaatttccataaaagctagtgcgcagtgcgctgaccttgtgctatatttgtggaattaccggaagcatgctgctgtgatctatgattggacacaagaaacttgtaactggtactcctatcatcgattgacttgtccttattgatcagctgatgggggttgcccactggccttgctgatctgcaaaaaaaaaaaaaaaaaaaaaaaaaaaaaaaaaacgggggggcttaatctctgcatcaaaaaaaaaaaaacacacaaacacacccacggcggccgtttagaggancaagctacgagcgtgcagagac

SEQ ID NO: 104598 - DNA, 298 bp, Zea mays
  Clone ID: MRT4577_26896C.1
gttgaaatttactaggtgatgccaacggagataatattgtttcacaatgttgttctttatagaagggcatgcatagtgcagtggtcattgagtcaccaggtcacgggtttgaaacatcctctttccatttgccggggaaggcttgcctcggtttatcgttccccatgcctcactcatgtggaagcctctgacactgggtctgcaccccttttaatgttgttctttataatattgcatctgaaataattagctctttatctatactagttagcatacatcagactctacataatactta

SEQ ID NO: 104599 - DNA, 565 bp, Zea mays
  Clone ID: MRT4577_26897C.1
gccaagtggccaccgacgcagtcagcagtatcaggaccgtagcttctttctgtgctgagaaaagagtgacgacgatttacgatgacaaatgtgaagcctcgaagaaacaaggggtcagaacagggatggttggaggcctcggtttcggcttctcgttcttgatgctgtaccttacatatggactttgtttctatgttggagcgcagttcgttcgtcacaacaagtctacttttggggacgttttcaaggtgttttttgcactgatgctggcgacaattggggtgtctcagacaagcgcgttggcttctgattctacgaaggccaaggattcagccgtctccatatttgcgttgctggacaggaagtcccagatcgactcgagcatcgacgtaggctcgacgctagacgaggtcaggggcgacatcgattttcggcacgtcggcttcaagtatccgagtggccagatatccaaatattcagcgattttaccttgcacataccttcctgtatgactgttgcactcgtgggagagagtgtcagtggtaagtcaacggcgatctctttg

SEQ ID NO: 104600 - DNA, 109 bp, Zea mays
  Clone ID: MRT4577_26898C.1
ccctcagcactcgcagacgaggcacgggccaactcgactcacatcagcgcgcctgctctcattgcacaagtatgctcgggagagtcaatcagaagttaggagaatatcc

SEQ ID NO: 104601 - DNA, 386 bp, Zea mays
  unsure (1)..(386): unsure at all n locations
  Clone ID: MRT4577_26899C.1
gaccgcgtcaccgctcctcgaccccgcccacactcccacccgtcacgccggcgccgccgngagtcgttcattcgccatggtcatctccaagaagaagcgccgcgagatgtgcgaggacatcttccgtgagggggtgctatatgacaagaaggactacgacctggccaagcacgccgagcttggcgtgcccaacctggaggggattaagctcatgcgcagattccgagcccaagcagcatggcaggcagaccttctcctggccaggactactacagggacctcacgcaccgatgccattcagcacccccgcagcttccgcaacctgcgggcggcaggcggcgcccaacacccccaagaagtcctcccagccccagccccgccccccc

SEQ ID NO: 104602 - DNA, 286 bp, Zea mays
  unsure (1)..(286): unsure at all n locations
  Clone ID: MRT4577_2689C.1
agcacgcgngngagcccngcagcgaggnaancaccacacacacacacacgcagagagacagagaagaggaggggagagncgccgcagncncagcagcagacggcganaggcggggaggagngcngcgagggcgaggacagggagcngacggngcgcaagacgacgcncnncaccccgggggacgggcnggaggcgnacgancaccggggangacgncgacggcgaccngcgggaggaccngcncgaggccgnnacancgncgncggcggaagcacgcgggaccgac

SEQ ID NO: 104603 - DNA, 733 bp, Zea mays
  Clone ID: MRT4577_268C.1
gccggggcgttgggctaacaaaggccaagggacacgcggcagcgaaggtcacattgcgtcgcatcggatcagatctcgactcaattcccgcggttaatccacatatcgactcatttcccgcgggtaatccaccgccaacacctatgttaaaaccacggcggcggaggcatcggccatgctggcgcgtgtggctgcggagatagccgcgctcccggagccgcgcgggcccatgcgccgcctctgcggtgacctcgcgcgccgcatccgcctcctcgcgcccctactgcagcacctccaagacagggacctggacgacgccttgcgtctggcagacgcgctgggggccgcgcgcgacctcctgcgcgcagtttacgacggcagcaagatctaccaggtgcgcgctgtcgccttgcttgctcctcaatccaattccatccaacccatgaatgaacaccatgatgaaccaaccaaccaggccatgcaaggggatgccgtgctccaacgctttgcaactgtcaacagccacattcacttggccttggatgccttgccgtacaagaccttcgacttgcctgaagaagtgctggagcaggtcgatcttgtgcattctcagttcagaagggctgcaaccacagctgctccaccagatgcacagctgtcaaaggacatatgctgtgctcttgctgacaaggcctttgaccctacggtcctcacgaggatctctgataagctg

SEQ ID NO: 104604 - DNA, 699 bp, Zea mays
  Clone ID: MRT4577_26900C.1
cctcgaggccggccgccacttatcttctgatgatctactcaacgaggacctggactgcctcatgtccgattctaccgacgatgacctcgacaagctcgccgacgagtacgatcgcatatgatgcgacctcctccgggggaggatcctcgctcagcctcccggatgcgcctcttcctcttccccgccaagaccgagatctcgtccactctcggctccctgcaccacaactcttcaaagtcagacaactggtgaaacaacgccctcaacagctacatcaccgactccctcgaaggtatcacgagaggaatctccacctattgatccttcgaaaactgacttctcggactagatgacgactcatccgtgtactcccctaaccgaagaaccaacgcaggtcacatggagatcagaactccaggcaacgaaaactaacggatcaacaacaacgctactgacgtcacagctctcaaggatcctatcatagagcatgccgagacgcactcagctatattatgagataactgctcattctagcgaccatgtcatgtcgccggtatactaagcctacgactataccagtatcttctgatgaccgctctgtgtacaggctgatcatgtaagcaaccgtcttcgattatcagtatgcgaatgtgtgaatctccgactatcatatgctctggtgtatacaagctcaacagc

SEQ ID NO: 104605 - DNA, 139 bp, Zea mays
  Clone ID: MRT4577_26901C.1
gggggggacaaaccaagccccttcctacatgaaagaaatggggcgtctaattaactaacttgttacaggggattgggtttcctgccacattaaaaattttgttttcccaagttgatctgattcggccccaaaatacatg

SEQ ID NO: 104606 - DNA, 521 bp, Zea mays
  Clone ID: MRT4577_26902C.1
agaaagtaaaaatttcagttgtgttaaagatcgagacgatcaatcatcaaataacttcatcaataatctgctacatatgacaagcaacctgggtctactctcggtcgcattgttataacatcgagtttattctcggcatgcatgccccagccgcccgcccaccaaacaatccatcagttcagccgcggtgtcgccacggcctgctgcgatgccccatctgcctcagcctcggcggcggcgaggcattgcttggtgcacatgcaggtggcgacgtcgcagaaaccgccggtgtagcgcatcgcgatgcagatggggatgcagatcgcgtttttgccccagcaggggaccttgatcatggtctcgcacgtctgtaacggtgctattgtttcgtcttttttggctccagctgctgcaagatgtgaagccaggataagctgcagggccaaggcgagggcggcggccacagcaactcgcttgctgaacgacatggtaaataagaggagtggacgcgcgcatctact

SEQ ID NO: 104607 - DNA, 428 bp, Zea mays
  unsure (1)..(428): unsure at all n locations
  Clone ID: MRT4577_26903C.1
cggaanncccgggcggaccacacccttccgccacaaacacacttcaacaagttttacccgcctctaatccgaacggnccgaatggcgcaaaaggatcaaattttcctagtgcagcttcaattccttaaagttctttccccggatgcacttccggaacaactttttttaggaacacggggcgcattgcaaccgtgttaggatttttttctagaaatttaacttggttcccttatacttttataatcctttattcctaaattccatatcttattttttatactcttaaatttatctttaatatgtatttaattttattttttataattaaattattagtcttgttttatttattaatatattttttttatttttatatttttataatttatttattaattttttttattaattatattattatttttaat

SEQ ID NO: 104608 - DNA, 339 bp, Zea mays
  Clone ID: MRT4577_26904C.1
tttccggggcgaccgaccctgtcctttctatctgaaattgattatccagctaaaatgccagatcctgatgctcaccagaaggagaacgaaaaactatggactcttaaagaatcatatgtaaaagctcttgtaagggggtattcacgcaacccctcacaacttctcactacagaaggtgaggcacaaacggcagaaaccaaatttctgtttcacccaaagtatcgcacggtattgaatctatccatgactgactgcaaaataatagaaagatccgacttgctgaactaaacaattctcttgactgcccatctgaatagaggatgactcaacaagtccaga

SEQ ID NO: 104609 - DNA, 400 bp, Zea mays
  Clone ID: MRT4577_26905C.1
aggcggcaaggaaggtgagggaatccttgatttcacagacacacacagatctagagacagatagagagcccagcagcagctagctagctagcagtttttttcaactaccagtttaccacaacccaaccttttttttgggtcgcacattatctcatatttttttatcgccgggtcattacacaggccatttcggttggcccgggggtgccaaggcgcctttactcgcccaagggccccgttacttccatcccatcccatatttacggttagagtaaacgggagggactgcatgcatgcaggcagtacatttggccggtgctggcgcgtatcagcagtagcaggcgactcgacaaacctactagtgaacgatatcgactcactctggtattacactttaacc

SEQ ID NO: 104610 - DNA, 705 bp, Zea mays
  Clone ID: MRT4577_26906C.1
cattgggtacctcgaggccggccgggatagtcgcgagtacgacaccaagacctgtcctgctcgtcgtcgccgactccctccgcgagaccgatctaccctccggcgccaccatgtcgctgatcggctgacaggagttccagcatatcctgcgttcgatgaacaccaacgcgtatgcgaagcagaatatcatgttctccatgacctctatcaagggtgccagctagccgcattctccaacatcaacatggaagaaagccgacatcaacatgaacaagaggatcaaagagctgactcctgatgaactgcatagcctgatgacggacggggccaaccctaggcacgtaaaggtgtcggaatgtctcctcagcatgaacaaggatgacaaagacatatggttctcgcaagcctgctccaaaggcctagatatgaagctcaaggacgaccgtgagaggctcaataagatcacgaaccaccgtgtctctgcgtcactactggggcctccgcgtccgtggccagcacaccaagactactgggaggcgagcaaagaccgttggtgtctccaagaagcgatgagctctatatcaccctgataaatcttggtcgcactaccgagttggattgtgtccaaacagtcctgatgaacgctttctgcttacgcagtttcctgaaatggtgaattggtctacgacaatctcgcggtgattg

SEQ ID NO: 104611 - DNA, 630 bp, Zea mays
  Clone ID: MRT4577_26907C.1
agtattcactcattgtagaggaaccatacaaacacaagtacccctatgactggagatctaaagaaccaactatattccgagcaactgagcagtggtttgcatctattcggctcgagcgtgatgctgcaatggatgcaatcagacgagtaacttgggttccttctcaggcacaaaacaggattgttgccatgacctctagccgttctgattggtgtatttcacggcagagaacttggggtgtccctattccagttttttaccatgtggactcacaggaacctcttataactgaagaaacgattgaacacatcaaggctattgtgttgaagaaaggtagcgatgcatggtggtatatgacaactgaggaacttcttccagatagatatcgggacaaagcatctgaatatcgcaagggaactgatacaatggatgtttggtttgactctggctcttcatgggcagctgttttagcaaaaagggacggtcttaattttcctgcggatatttatcttgaaggttcagatcaacatcgtggatggttccagagctcattgttgactagcatcgctacaacagggaaggctccctactccagtggtattacacatggatttgtactggatgaaaagg

SEQ ID NO: 104612 - DNA, 338 bp, Zea mays
  Clone ID: MRT4577_26908C.1
aaaaaaaaaatttttttggtattgtttttttttttttttttttttaacaaaacccaacccaaaaaaagcattaaacatggcccctgttttttgcaaccaccccttaaaaaaaaaagggtaaaaccccccaccaaacctgatggggagatgacaaaaagtttccaaccctgggccaacacccagtggaaaagctcataaacggaaaaaaaatttacctaccatccacgggcgactggaaatactaattttttaaccccccaacaccgcaaaaaaaaaaataaccaaacttgttgaaaaaaaattttctaataaaaaaaaacctcgcacccaacccaatt

SEQ ID NO: 104613 - DNA, 632 bp, Zea mays
  Clone ID: MRT4577_26909C.1
cttttcttgaagaaaagaaatgcatgccttgggtcgttcagtagtcttacacagacattccaagatgtttcttgattctgaaattcgctaacactagcatgttttatgtgtgtattgttgttatatgaaaagtgaagtatgatcatctccagtgtccactacatgagtacaacaaaccatctggtgtttttttttcctgtacacacacaaacacaaacacacacatgatgacgacgacgacgacgctacttgcactgcctgttggggaaggcctctgacctgacgatcctgtcgatgagcctccggaagcgctgggctccgggcccaggcctgagcacccagtcgttatcgacggcgcggcactcggcgtcggcgccgcaccagccgccgggcacgaaggccgcggtggcgttggcggggcgcgggcgcgcgaggaggccgtcgtcgatggcgtcgagcacggggtcgtcccgcgggaacttgcgcgcgaagggcgcgccgctggcgagcatggcgggcatgtcggcgagcgcgagcgggtgcgggtgctggcgcggcggcacgtcccactggatgtggtgcaggtcgtggttggcgacggtgggcacgaagcggggcgcgttgcagagcaa

SEQ ID NO: 104614 - DNA, 638 bp, Zea mays
  Clone ID: MRT4577_2690C.1
cggacgcgtgggtgttcaacaacatggatacagacaggagcggcacgatcacggtcgaggaactcaaggacgggctggcgaagctcgggtccaagattagcgaagcggaggttcagaagcttatggaagcagttgacgtggcccacgcgtccgcccacgcgtccgccgagttcctcactgccatgatgaacaggcataaactggagaaggaggaggatttgttccttgcttttcaacacttcgacaaagacgatagcgggtacataacaagagacgaactggaacaagccatggcggagtatggggtgggtgatgaagcaagcattaaggaagtgctggacgaagttgataaagacaaggatgggagaatcgactacgaagagtttgtagaaatgatgaggaagggaagttatacctgaggaagctctgttctcatggtgggagaggttgtgtatatatgtttcagcaaatgtgtcaagtacaagcaacgaagcaagtttaacttagaacaagttgcttctgcagctatggtccgaggcaagcatgtacagctatttatttattgaccgaatatgcaacgagagagaaaatgtccagtttacttgaaagaaaagaaaaaaaggccggcgctcgtacat

SEQ ID NO: 104615 - DNA, 628 bp, Zea mays
  Clone ID: MRT4577_26910C.1
ctctcacctcgacgcgctttcaaacgctaggagcctcctgcccgttcgacaccttatgacgtctgccccacgcagagcgatacggataccgtggcattggacgctcgcagatctaaccagactccatttgacttatataagatacctgtgctcatctaccactgagatctatcttctctagctgagctccgacccttaccatacgctcatacaggatcatgttatgaagggagactggccacaaggaactacatgaccagatctctgtgctctaccatgtccgatacaggggcaataacaggctctgcattgtggaccgcggtctgtgctagagctactgctgccataggaagcaccaacttaccgatcgcaggcacgatgccagggggttcatgtgatgccttgatgactgctgttgctcccacatgacgggccaagctggttattcagaaccactatgactagcttaaggccggtaggctatcagagaccaccaagggcaattgttgactgcttcacacgtaccaataacgaagagggcggctctttcatggggacgggtgacactgctaatgagattcttgacttgcgtactaagactacactgtttgtattggacgaccacttg

SEQ ID NO: 104616 - DNA, 631 bp, Zea mays
  Clone ID: MRT4577_26911C.1
gggggctatagtgaagaaattatagattccttgaggatatctgatgcaccagaatcagatttagttgatggaatgaaatcaaatggttcaatagctgacaaaggtagagtctctgaatggctttggacactgcatcgaattgtggttgatgtggtgagaacagatagccaccttgatttctatggagaatcaaggaatatggctagaatgtctgatatcccacgcgtccgcggacgggtggatccttccactggatactgtcaaggtatgagtgatctgctgtcaccttttgttgtcatatatgaggatgatgcagatgccttttggtgctttgagatgctactgagaaggatgcgtgaaaatttccagatggagggaccaacaggagttatgaagcaattgcaagcattgtggaagataatggaactgacagatgctgaattatttgaacatttttcggcaattggtgctgaaagccttcattttgcttttcggatgctgctagtcctttttcgtcgagagctgtcctttgaggaatcacttatcatgtgggagatgatgtgggctgctgattttgatgaagaagcagtcaggcatttagaagaaaactgcctagaaccattgctagtag

SEQ ID NO: 104617 - DNA, 4216 bp, Zea mays
  unsure (1)..(4216): unsure at all n locations
  Clone ID: MRT4577_26912C.1
caagcgtagtcggcaaaaactacgattcaaagaggctcgtgataacaaatacgcatacgacgtaataggatcaaaggatgcgatcgaagaaaattttggatccgcatatactaagaaaggtaaaagtaaagggacaaaagttggtttgggagtcaagcaacacaaattccacatgatgtatggctttgatcctcaagagtacaacctcattcgttttgtcgatccactcacaggagccacactggatgaacagatccatgccgatatacgtctagttcaagaacatttcgatgttcttcgggaggaagcggtagcaaacgacacgattgagagacaacatatatatagcagtcccggtttgcaggcatttttcatacagaatggatcagcaaatgcattaagagtcgatctaacgccgcactcacccttacgtgttgtcacaaacaacaatatagcaggttttccagaatatgaaggcactcttcgtcaaaccggaactgccatcactgtacctgtaaaccaagttccagtagctaatgaaacaggagtagcacacgaatctaaatcaatgatgattggactaggtgattacacaccgatttcacaacaattgtgcttagtccaaaatgattccgacggggtgaaaagaaacgtgttttcaattggctatgggtcgtaccttatatcaccagcgcatttgttcaaatataataatggtgaaattacgattaagtcgtcgaggggcttgtataagataagaaattcagtagaactcaaattacaccctattgcacacagagatatggttataattcaactccctaaagatttcccaccatttccaatgcgccttaaattttcaacaccaacacgggaatcacgggtgtgcttggttggagtaaattttcagcaaaattacagtacctgcattgtatcggagagcagcgtgacagcaccaaaaggaaatggtgatttttggaaacactggatctctacagtggatggacaatgtggtcttccattagtagatgttaaaagcaagcatatagtcggaattcatagtcttgcatcaacgagtggaaatacaaatttcttcgtcgccgtaccggagaacttcaatgagtacatcagcaatcttgtgcaaacaaacaagtgggaaaaaggatggcactacaatccaaatctaatatcttggtgtggtttaaatttagttgactcagcacctaaaggcttattcaagacatctaaactagttgaagacttagacatgagtgttgaagaacagtgcaaggtaacagaaacatggctcacagaatgtatccaggataatctacaagttgtggcgaaatgcccaggtcaactcgtaactaaacacgttgtcaaaggtccgtgtccacactttcaattgtacttatcaacacatgacgaagccaaaacatactttgcccccctactaggaaagtatgataagagcagattaaatagagcagcattcatcaaggatatatcaaagtatgcgaagccgatttacgtaggtgaaattaactatgatatctttgaaaaggcaatcgagcgagtgatcaagattcttaaaaatgtcggcatgcagcaatgcgtttatgtcacggatgaagaagaaattttcaactcactcaatcttaatgcagccgtcggcgccttatacacaggcaagaagaaggattatttcaaggattactcaaatgaggataaagctgaaatcatcatgcgatcctgtgagcggatcttcaatggacaacttggtatctggaatgggtcactcaaagctgaaatacgcccaattgagaaaaccatgttgaataaaacacgcactttcactgcagcaccattggaaactctacttggcggaaaagtttgtgtggacgattttaataatcagttttactctcatcaccttgaaggtccgtggacagttggaatcacaaaattttatggaggatggaatcgtttactcgagaagttaccagaaggctggatttattgcgacgccgatggctcacaatttgatagctcattaacgccataccttatcaacgctgttttacatattcgactgcaatttatggaagaatgggcattaggggcacaaatgttgcaaaatctgtacaccgaaatcgtctacacaccaattgcaacgccagacgggtcagtcattaagaaattcaaaggaaacaacagtggccaaccctctacagttgttgataacacactcatggtcatactagcattcaattacgcaatgttatcgagtggtatcgaagaagatgaaatagacaattgctgtcgaatgttcgccaatggagacgatttattgctggcagtgcacccggactttgaacatatactggatggctttcaaaaccactttggaaatttgggcctcaattttgagtttacatcacgaacaaaagacaaatcagaactgtggttcatgtccacacgaggtatcaaatgtgagggcatctatataccaaaacttgagaaagaaagaatagttgccatactcgaatgggatcggtcaaacctacctgagcaccgtcttgaagctatatgcgcagccatggtagaagcatggggatatccagaccttgttcaagaaatacgaaaattctacgcgtggcttctcgaaatgcaaccatttgcaaatctagcgaaagagggcttagcaccatatatagcagaaaccgcactcagaaatttgtacttgggcacggggatcaaggaagaggagattgaaaaatactttaaacagtttgctaaagatctccctggctatatagaagactataatgaagatgttttccatcaatccggttctgtggacgcgggagcccaaggaggaaatagcggctcaggagcatccgcatctgcagcgggtagtgggtcaggaactagaccaccttcaactggttcagcagcacagggaaatacacctccagcatcaggtggatcatcaggaaacaatggaggcggtcaatcaggttcaaacggcactggaggtcaggcaggctcaagcggaacagggggccaaagagacaaagacgttgatgctggttcaacaggaaaaatatcagtgccaaagcttaaggcaatgtcgaagaaaatgcgcctgccaaaggcaaaagggaaagacgttttgcacttagatttcttgttaacatataaaccacaacagcaagacatatcaaacactagagcaactaaggaagagtttgatagatggtacgatgccataaagaaggagtacgaaattgatgatacacaaatgacagttgtcatgagtggtctcatggtatggtgcatcgaaaatggttgctcaccaaacataaacggaaattggacgatgatggacggagacgaacaaagggtttttccattaaagccagtcattgaaaacgcatctccaactttccgacaagtaatgcatcattttagtgatgcagctgaagcgtatatagagtaccgaaactctacagagcgatacatgccaagatacggtcttcagcgaaatctcaccgactatagcttagcgcggtatgcttttgatttttatgaaatgacttcgcgcacaccagccagagctaaggaagcccacatgcagatgaaagccgcagcagttcgtggttcaaacacacgtctgttcggtctggacggaaatgtcggcgagacccaggagaatacagagagacacacagctggtgacgttagtcgcaatatgcactctctgttgggagtgcagcagcaccactagtctcctggaaaccctgtttgcagtacctatagtatattactaaatagtatgcttgtgaggccttgcctcgtatgtatgtgaggttatacctcgtatttactatttcagtgtatgtacttcaagcgtgagccagtctgcaggacacagggttggacccagtgtcttctggtgtagcgtgtactagcgtcgagccaatggacggacggtactgggagtggttttaccattggtgctgcgagtctcttggtgagagacaaaaaaaaaaaaaaaaaaaaaaaaaaaaaaaaaaaaaaaaaaaaaaaaaaaaaaaaaaaaaaaaaaaaaaaaaaaaaaaaaaaaaaaaaaaaaaaaaaangggggggcccgttttaaagaaccaaatttaactacccgtgcattgaaaggaaaaactttttttttggggcc

SEQ ID NO: 104618 - DNA, 392 bp, Zea mays
  Clone ID: MRT4577_26913C.1
aaaaaaaaaaaaaaaaaaaaaaaaaaaaaaaaaaaaaaaaaaaaaaaaaaaaaagaaaaaaaaaaaaaaaaaaaaaaaaaaaaaaaaaaaaaaaaaaaaaaaaaaaaaaaaaaaaaaaaaaaaaaaaaaaaaaaaaaaaaaaagggggggccgttttaagggacccaagttaacttccccgggcttgcaacgtaaaagcttttttaaggggaccccaaaattaaattaaggggccgggttttaaaaacgtcggaacgggaaaaacccgggggttcccaaattaaatcgctttgaaaaaaatccccttttgcaaagtggggttaatagcaaaaaggcccgaacgaatggcctttccaaaaatttgccaaccctaaagggaaaagggaaccccc

SEQ ID NO: 104619 - DNA, 599 bp, Zea mays
  Clone ID: MRT4577_26914C.1
acttgctcgatggcccagcactaagcatacggccgtggaagttcacgcgggcggaaggctctgaagaagcagctggggactaaggcggtcggtagtctgaccctgcgatcgggaggagggaagaagccccaccggttgcgtcccggcaccgccgcgctgcgggagaggcggaagccccaggaagagcaaggcaggtgcatgatccgcatggtggccgtcagggtctgaaggagcagacctcgcaggatttgaagaccgagctacactaccagagatctggtggctccgcgctgctagatgcggatagagactaccttgtgcgggctcttagaggacaccaacctttgagacatccacaccgagcgcgacaccatgaatgcgcaaagacatgcatgttgcccgccgaatacgcgtggagagggcctaagcgtgatataacactgacatgagtgcccgatcagaagatgtaaagacatgctggatactgaagccaggggtactgtcggaaacatgaagtgctggctgatgcactggtgtaacttaattatcatgatgcatatgagaaggcgatgaactctgtcatgaccctgatgaagctt

SEQ ID NO: 104620 - DNA, 769 bp, Zea mays
  Clone ID: MRT4577_26915C.1
aattcggcacgaggcatacactctggagtctggacttcacttcgtccccgtcgaacactccacgccgctctagcactctctgcgctctcccatcctcctcgctagccgtactcttcaccgccgaagcttctggttcctcatcgccgccgctacgcgtgagatcgacccgccgccgtcggtctttttccctgactggtaatctagtgttcattctcttaattcaaatggtttcctcccacggagcaagatgaggaaatattcaaactgctcttagccgtgtagcacgacaagtttgttgcagagctggtctacgacaggtggacagctgggatttcttggcactttgtcaagtccacgagtagaagtgtggtggaagattgtcttcgttcaagatgatgcagaggccactgctccgtccggaggagtactccttgaaggagacctcacctcaccttggtggtgcagctgctggtgacaagctcaccaccacctatgacctggttgagcagatgcagtacctttatgtaagagttgtaaaagcaaaggaacttccaaacatggacatcactgggagctgtgacccgtatgttgaggtgaagctaggaaattataaggggcaaactcagcatttcgagaagaagaacaacccagagtggaatcaggtctttgccttctcaaggagcgtattcagtcatcagttgtggagattgtagtcaaggacaaggatcatgtcaaggatgacttcattggccgtgttatatttgatctg

SEQ ID NO: 104621 - DNA, 211 bp, Zea mays
  unsure (1)..(211): unsure at all n locations
  Clone ID: MRT4577_26916C.1
gtttgaatagccctgaaggctttggaagaccttgaaactagaggtacacatgctattctgaatttctgaggaactgaaggaacttgcagggggtcactgattttgtatagggcacaagagactccatcagccatccattccatcctatctaaacaaagncgcctaactcaccttcctttttgggacttattgttttgtatcattctgatgc

SEQ ID NO: 104622 - DNA, 197 bp, Zea mays
  Clone ID: MRT4577_26917C.1
aaaagttttatgaatggacttttcaactacttttctctacagctttccatgtagatcagtctttcggttttgagacttctctaaaggaaattgttctccttattccctcttggcagctaacgggcttttaccaattttgaatgcaaagtttatcataacaaaaacgctaatgtagcttccattctcagccacatccc

SEQ ID NO: 104623 - DNA, 204 bp, Zea mays
  Clone ID: MRT4577_26918C.1
gggaacaaaagggtgatgttaatcacactaaattccgggattaagagcaaaaatggctttttccaggcacttggtgttttaattttttggggtttcgacaacaacaaactcaggggattactttggccccaccccttttagttggccttatttaaaaaaacggcggggaggtttcctgttcctgggggggaaaaaacgaggatc

SEQ ID NO: 104624 - DNA, 1606 bp, Zea mays
  Clone ID: MRT4577_26919C.1
atggctcttaattcctccgatttctattttcttttcttacaagtgaacagccgttgcccgtcggccgccgcccctccctccgcgccctcccgaccaccgctccttccccgccttccacctgcgctgtccgccagtcctcctccacctcgctccggcacgcagggcccacaagaagcgccccttccagaagttaatccgccccggtttgactagggtttgtcccgtctcctaatcgatcagattggcaggtaactgccgttgccgccgcgatgaagaggtacggactgcagctccgcacgaagccgccatcgtcctcgtcgtcacgcgcgccgccacctcccgcccggcccctggcggccttcgccgacgacgatgacgatgatgtggaggcagaaatcctccgccaggcggccaagaagcgctccctccagaaggttgaggagcagcaaaagaaggccatggaggaggatccctcggtgtacgcctacgacgagctgtacgacgaaatgaaagagaaggaagcccgccctaagatgcaggataaggtcgtccgcgagtcaaagtatattgcacaacttaaggaaaaagcagagctacgcaaacgagaacaagatataatatacgagaggaagcttcagaaagagagaagcaaggaggaccacctttttggggacaaggataaatttgtaacatcagcctacaggaagaaacttgaggagcagcaaaagtggcttgaagaagaaagagtgaggcagcttcgagaagaaaaggaagatgtaactaaaaagaaagacctgagtgatttttactttgggcttgtgaagaatgttgctttcggtgcacagacacatgataacacaaaatctggtcaccctctaaaggctgacaataaacctgaggatacaaatactagtagccttgatgctgaagcctctgaaccttctccaaagcgtagaagagaatccagtatagaatcagagaggactaagagtatggatatggaagagccgtcggcaagtcgaatgagggattcaacagctgctgcatctactgagaaaaatgctgctgatgtttcatcaaatgctaaagagatcccacaaaacattcagccagcaaaggttactgatgatcactacaagagaagtgatggcgcacttgctgctgctagagcgcgagcactggcccgaaagaaagcgaaggaccagcaattgtgaagtacaaggcagaaaagtttaccgatccttgaggtacaatttcatgttttattcaataggatcgtgtaaagatgtcatctgaaatgatctgatagctcccttgcactttaagaagcattttttattgtggttgatgcgtatctatgttgtaaaatgacctcatcagatgccatcttctgccagtaactttggtgttttgacacgtcaactggtttgaacttatatggccgtgcaatagactgttttgcactgtagaatgtaccgagtttgaaatagaaagtgtgatagtgagatatactgctcagaacatttcatgaagtaacctggcaagtatgcagatgtgttatttttatcaagccaatcttaatggatagatgtattttgttgtttgc

SEQ ID NO: 104625 - DNA, 427 bp, Zea mays
  unsure (1)..(427): unsure at all n locations
  Clone ID: MRT4577_2691C.1
ggggggccngcaaacaccgagaaggaagggcggccgncnccccngaccnccgccnccgagcccccnccccncnncgagggcaccaccaggcngnacgnngccaagcanngcccgnacgcgcagcgcgcccggancgccacccaaccacagggggggccgggacaacattttttttttcnccancnancnngcngacaggccagcangggacagggagaaggnnnaccccccacacaaggngccnncncnggagcacaacaaccaggngaaaggngagagnnaagaacagaacaagnacanngacagcaacnnngaaggcccancgangcacccagaggaacccacaaaaaagcagaacgcngaggagcngcnngcaaanaccgangcannaaacaaagcanaanacnnaggaanagacaccaaggaa

SEQ ID NO: 104626 - DNA, 203 bp, Zea mays
  unsure (1)..(203): unsure at all n locations
  Clone ID: MRT4577_26920C.1
gcgcaattcactccgcccttgcaaaccgcatgacccaaccagactgccggtagnaggactagctgcttaatactgctacccttctgcatctacctcctaactgaattctgaacacgggaatgaacggggggcgctcgngaaggagcggccaaggacaaggagtagtaataaccatggattgggtggcaacaacgccagccagg

SEQ ID NO: 104627 - DNA, 432 bp, Zea mays
  Clone ID: MRT4577_26921C.1
gctcagtgttctcgactcgaccgccgccgtcccagttcgcttcgcgtcacccagagctcgtcggcctccgtccccgcgagaagcgagagcatggacacccaggtgaagcttgctgttgtggtgaaagtgatgggcaggaccggctccaggggtcaggtgacccaggtcagagtgaagttcttggatgaccagaaccgtctcatcatgaggaacgtcaagggtcctgttcgtgagggtgacatcctcaccctgctcgagtctgagagggaggccaggaggctgcgctgaagccctggtggccttggatgtaattctgttaattttgttctatgtttgtcgaacttgccgtgtgacccttgcaacatctgctttgagatttactgagcctggattgcacttgtaaaaaaaaaaaaaaaaaaggcccctagggcc

SEQ ID NO: 104628 - DNA, 278 bp, Zea mays
  Clone ID: MRT4577_26922C.1
agaaaaattcccagttctttggtccgcgtcagagaggcggcggcgatgtctgggcgcggggagggcagcaagggtctgggcaagggcggctcgaagcgccacccgaaggagcttcgtcacaacatttatggcatcaccaagccggcgattcggatgctggctatgacgggtggcatgaagcgcatctccgcgctcatctaccaggagacccaccgcttgctcaagatcatcttcgagcacctcatgctccaccccttcatctacacctagcacgtgct

SEQ ID NO: 104629 - DNA, 457 bp, Zea mays
  Clone ID: MRT4577_26923C.1
gccggccgggccgggagtgttctcgactcgaccgccgccgtcccagttcgcttcgcgtcacccagagctcgtcggcctccgtccccgcgagaagcgagagcatggacacccaggtgaagcttgctgttgtggtgaaggtgatgggcaggaccggctccaggggtcaggtgacccaggtcagagtgaagttcttggatgaccagaaccgtctcatcatgaggaacgtcaagggccctgttcgtgagggtgacatcctcaccctgctcgagtctgagagggaggccaggaggctgcgctgaagccctggtggccttggatgtaattctgttaattttgttctatgtttgtcgaacttgccgtgtgaccttcacaacatctgctttgagatttactcagcctggattgcagttttattttaaaaaaaaaaaaaaaaaaaaaaaaaaaggcccctagggcc

SEQ ID NO: 104630 - DNA, 913 bp, Zea mays
  Clone ID: MRT4577_26924C.1
ccctcttcgccaagctcctggagaagcgcaacgtcgaggacctcatcctctccgttggatctggtggcggagctgctccagttgctgctgccgcacctgctggtggtgctgcggctgctgctgccccggctgtcgaggagaagaaggaagaggccaaggaggagtctgatgacgacatgggcttcagcctgttcgactgaggagaccccctcacccagccattagcaaatttcacttgtgctgtcaaagactatcttgtcttatgttatgtctctaggcttttgttacaactacccaagttttgagtttttgagatgtggctaaaaaaaaaaaaaaaaaaaaaactcagtgttctcgactcgaccgccgccgtcccagttcgcttcgcgtcaccgagagctcgtcggcctccgtccccgcgagaagcgagagcatggacacccaagtgaagcttgctgttgtggtaaaggtgatgggcaggaccggctccaggggtcaggtgacccaggtcagagtgaagttcttggatgaccagaaccgtctcatcatgaggaacgtcaagggccctgttcgtgagggtgacatcctgaccctgctcgagtctgagagggaggccaggaggctgcgctgaagcccttgttgtcttggatgtaattctgttaattttgttcaatgtttgtcgaacttgccgtgtgacccatactatatctgctttgggatttagtaagcctggattgcagttttttttatgttcctggtggaaattgcaattgtttgtcggcatgttctcttgaatttaatgcgtacggtttctactactactacaatgatttttagcattctgaacagctttaatcccatgtgtccaatctgaaggtgttgcaaaaaaaaaaaaaaaaaaaaaaaagcggcc

SEQ ID NO: 104631 - DNA, 2269 bp, Zea mays
  Clone ID: MRT4577_26925C.1
ccggccgggatttaagcctgacaagataaggaagataaagctccggcacaccaaacacttgaccactctggcattccatccaactgagagaactgtggctggtggtgatgtaacagggcggatcctgatttggagatgttttggaaactcaaagttctctgaaagtagtgtacagtcgaaagaggatgacggaagggatggtgttaggggggatgatgatgcagacacttgcacaacatggcattggcactcaagcagtgtgaggtttctcaagttttcttctgatggagcatacttgttttcaggtggtttggagggagttattgttgtgtggcaactagatactggaaagagaaggtataaaccacgtctggggtctcctcttttgttctttgtagattctccagattcttccatttcctgcgtgtcatgtacaaataaccaagtctatcttctaaaaatgcctaatatggaggtcatgagatctattgctggaatcaagctgccaattgcttcaccaaacttgggcggatctaatcgggctgtgtatggatttgattatactaatagacttgttgctataccaactgaagattactgcatacagttctacaatttgtttgagaacgctgaggtttcagaggtgcaagtgtgtgagaggaatttccagcctattgatgatatcactatgtacatttccatggtttcattggcaatcgatggcgatttgatgtgcaccgtggatgtcaaacttcctgaagaaggtttaggtggtcttgttacattgaagttttggaatcatgggtcaagagctggacattattttttgtccaccgtcatttatgagcctcacagtgatgatggggtttcttctgttgcattccgcccaggaagaaatatggccgttagctcttcttttggtggtaactttaaggtttgggtccagagtttgtcttcacaatcaaatgatgaaagaaattgttctggttggagatgccaatcagttggctcatacaagaagaaacctatgacatcagcagccttctcagccgatggatctgttcttgcagttgcagctgagagtaccatcacattgtgggatcctgataataatgcgcttgttggtgtcattgcagaaacactatcgccagtgacaaatctttctttcgttgggacatcagtgtttttgatgtctctatgtcagagttcaagaccacagattgctctatggaatgtttcaaatctttccatgcagtggtcttacagcatttatgcagaagctgcatgctgttcgccagatgggagtgaatttgcagttcttgctcttcttagttgtcctgatggagaagcatcaacacaacaagatggagtaattcttctttttgatgcagaaagctcaaaccccattgcctcctggtcggtaaagaaggcatcgggtggcagcatttcttttgtaaaaggtgacgtccctttggatgcaaatgctgatagttcgagagacaaagagccaatgttgcttgtttatgtaaatggttctcatgaatacgccatctttgatccccgggagagtgaggaggtggtcattagcaagaacaagcacaagaagattcaagctgaggaacctgcaccaatcggctacgcttctatttacggagagcttacaaaactggagccaaagaaagaagtttcagatgttccattcgtcccttcggacaggccttgggaaaccatattcagcgggtcgtctcatgttctcccgcctctcacaaaactatgctctgcattcttgtcatcgctgctggagaaacggcctgttgcaaacgagtgagccgccctagaacattgtcctctcatacaacggtaggtatactcgccagttgcagaatggaaatgcggaaggaaatccgtccgtgacgatgcatatgcccacttgaagagttcagagatgctgggtgatgccatctgaggttggttatggttatacagatatcacacggcccacgaggatcattttgcagcgatactcgacggccaacctactgatcgcagcaattttgttttcttctccgcttgacatgtaatcctgacagtaaaactagaaaatcttagtgtgctttatctgatgcgatgacgcggtgctcgttgaggtgctgcgactgtttggctattgagctgtctacggcacaaccgcatttcttttgtactattttgtttttttttcaaagaaagctcacgcttggatatctgaagttgataagctttgttccac

SEQ ID NO: 104632 - DNA, 833 bp, Zea mays
  unsure (1)..(833): unsure at all n locations
  Clone ID: MRT4577_26926C.1
gcaccaaagatcccagcttttttccccttcctccgccgccgcgactagagtttactcgctagggtttcgtctcccggtccggatccagcagcagcagcgggcgatggcggccgcgggagacgccggcgagaagaagatgatcacactcaagagctcggacggcgaggagttcgaggtggaggaggcggtggccatggagtcgcagacgatccgccacatgatcgaggacgactgcgccgacaacggcatcccgctccccaacgtcaactccaagatcctctccaaggtcatcgagtactgcaacaagcacgtccaggccaagcccgccgatggggctgccgccggagccggagccggagcctcggacgccgcccccgccgcccccgccgaggacctcaagaactgggacgccgagttcgtcaaggtcgaccaggccaccctcttcgacctcatcctggctgccagactgttgccgacatgatcaagggcaagaccccagaggagatccgcaagaccttcaacatcaagaacgactttacgcccgaggaggaggaggagatccgcagggagaaccagtgggcctttgagtagaggagcatctaggcaggcgatgccgccgccgccgccgcgttgaatgaacgaacaacgcttagtattcgtcatgtctgcatttcagcgctcttctttatgtctgtcgtaatgggttgtaattatcctggagtctatgangtggtgtcggtgaacatggtcggtntcagtggttatgtttgcgacaacaagaaaaacctatccgtggtcagtggtcatcacttgtcaaactgatcttatccgtc

SEQ ID NO: 104633 - DNA, 456 bp, Zea mays
  Clone ID: MRT4577_26927C.1
agagtcagcatagtcacctgcctatctatctagcgagagagagagaggaaagctagctagctacgcatggagtgctggctagcaagaaggcagcatggcggtgtgttggcgctgctgcttctccagctggtgttagctccgacgacggtgacgggccgcctcctgcaggcggatacctccaccgggggtgggctggacatcatcccgagggagattggccatcctgcgagaggcatcctccgtggtggaacccgagtgttgctaccctggtatatggcagccatggggtggctatgcactggcctcatctgcatggtgggatatttggagtaacgctatttgtgagtttggttgggagaaacacaagggcggagcgacggggatcacctttttgcatgtggatggggaaggatataggacaggaggaaataaaaggatggggcggatgtgtacccc

SEQ ID NO: 104634 - DNA, 252 bp, Zea mays
  Clone ID: MRT4577_26928C.1
tccagaaagcagaccctcgccttttgattcttgcgtctctgccctcgcgttatcgccttcgtcacgctcgctcgcctggctggcttgtgccttgccttgctcggcgtacgcgaacgcagcgagagggaggagcaaggaaatagagagagagagagagagagagagtgccgccgccgccgcaacaagaaatacaacagctgcagcttcctgcagaggttggaatgtatctactaagatgtgggtacctttttg

SEQ ID NO: 104635 - DNA, 362 bp, Zea mays
  Clone ID: MRT4577_26929C.1
cgccccgcgtccgccccgcgtgcgtcgcagcgtgcgtggtagcgtgggcggacgcgtgggctgacgcgtgaaaggtctcgtggggcataatcgtgtattctcgtactgggaccaagcgtcgtgcctgcacgtccctattgatgggcatgtatcctttcatcccacgccgatgcactgtggtgggggggtggcacattccacatgtgtcttctacctgggcctcttttgtatgcgtgatgagccgacaagctgcagcacttaattttttttatgctgtctagttttcggaacttggggtgagttgggaaaacataatagaacttgagtgggccgtggggggaccttggggccttgggccattc

SEQ ID NO: 104636 - DNA, 374 bp, Zea mays
  unsure (1)..(374): unsure at all n locations
  Clone ID: MRT4577_2692C.1
nctcctttttttttttttttttttttttttgggggtttttttttatttttttggggttttccccccctnnggagggcaaaaacaaggcttggagattttttttatttgggagaaacgggacctttttggcgtacagcccacaagcaaaggccagggattcaagcaaggggccgccgggcccctcccttttttttttagggggtttggttttttttccaacaccccaacccaacaaagttgcgggggataatgggattcgttcatgcagggtcacccccccgggctcggtaaagacgctttcatcaaggggggggggggggaatctccccccttggagcccccggggcggggcggcccttttccaacccttgggg

SEQ ID NO: 104637 - DNA, 394 bp, Zea mays
  Clone ID: MRT4577_26930C.1
ggaccaggcacaaaagccccccaacgacatccctccaggtggaagcagttaaaaagcctacaactacatcactaagggggcaaatcaccctagctttgggtaaaaagcccacaactacataactttagctgctccagagctgtttagtcacaaaagccccaaagctcccctaaggcttaaggcagttaaaaagccttaaaactttttttaaaatcgggggggatagtaggcccagggcatgtcaaacctgaaaaatgcagcaacaaagcgcccatggggccccaatcaagccataaaccaggggaattggggtaaattccaagaaaaactgcccaacccttagcagcaaagcgcacatggggcccaccatggggtcacaatcaatcaataaaaa

SEQ ID NO: 104638 - DNA, 681 bp, Zea mays
  Clone ID: MRT4577_26931C.1
gtgcggcgctcgaggcggccgggttcgttatatctccttcgcttgactcaatccaaaagtatccacatcaagttttaccccgcatcacagtcaacatgcctactggaggatgtatgtgcggcaacgtccgctatgaggtgcagggcgacatggaggcccagatcctttgccattgttatgattgccgtaaaatctccggaacgacctattcgaccaacgccctccacagcaaggatggattcaagatcctccagggaactccaaaggaacacaagaagacagcggatagcgggaacaatattacatccttcttctgtggtgactgcggctccaccatgtggcgagaaagcgacagctatactggcaagatgatcatcaaggtgggaactctagacgatcatagcatccttgataacttcagcaccaagatggagttgttcaccaagaacaggcccaagtgggttggcactcaagagggcgccgctcaaaagtaaaccatggcttgagcgttgtggcgtttgtttatagacaaggacagctggaaatcaggtgtacggatcgaacggcgacgagcggcaacgaggaagacggacgattgcagagtcggagtcggctgcgagcgccagtccaagtatcgaatctacaaactctattcagagtctgaactctctggttcctttg

SEQ ID NO: 104639 - DNA, 349 bp, Zea mays
  Clone ID: MRT4577_26932C.1
agggaaactttagaggacacacgacgaggatagcctaccttccactaccctggaacttgcctattcaaaatcaccatccctcaatcaatcatgaaaccatgaactaccctgctaatagcctattcaaaatcctccaccccaccaaaaaaaaaccattatgaaaccacacaccatgtatttactgacaagttgaatatggtgctaaaatgacacccaacagcagtattcaccggcgaattgcaataaacgtgaattacatataatcgattctaatatcttgatcaacttatgctgattaaaatccaatgatcactcatcgacaatgctcaagtggtatttcctacatgat

SEQ ID NO: 104640 - DNA, 270 bp, Zea mays
  unsure (1)..(270): unsure at all n locations
  Clone ID: MRT4577_26933C.1
ctanaganatcncacaacatatgnctgcantccncacnacnnaatngggccaatntaatnagccctatngannanctaatgtnagtntaagtnccatgaaaacattctcctaccgcataagcctgcgtccgattaagacactgaactgancaattaanagcccaatatctncaatcgaaccaacaagncattnttaaccctcactgtacaacccgacacaggntgcncatanggganggttaannncagtaaaagggacncggcaaatct

SEQ ID NO: 104641 - DNA, 481 bp, Zea mays
  Clone ID: MRT4577_26934C.1
agactgagaggatccgatctttagtagcctcggatctttaacattaatacactccattcaacgctgttttatgaggttatggtagatcggtgtgtgaggactatcatatggaataagatgtccaggtagcgcctgtggtatcagcctaccgtaatatcagttctggaacttgccatactatataaattggtatctttgttactaacagccgattaccgactgactatcacttattgagcctaagatcattcaaaatcaagagtaactaaaccgtgagaccatgtactaataccacgttggaggatactatataaaggttgagaactaaaatgacactgatgctacatttacgtatttcagagcctatcctatatccatgctaaatgatcttgataaacctttccatggagaaaactcgtactctatctttaaacaggtctctctaactaacactatcgctgtcttgcataccggcctaatc

SEQ ID NO: 104642 - DNA, 233 bp, Zea mays
  unsure (1)..(233): unsure at all n locations
  Clone ID: MRT4577_26935C.1
ctactcgttcgtatatataagctggtggctgtagagaaagaaaaggcggaggtgcactcngcccccacgggtagctctgttcagtttagctggatgcttgggccaccatatttcctccagtacgtttggacgagctccacgccgctatttggtctgcggtaagcagctactagaggccgttgtgtaggcttacacagaagatcattgaggaggatgctggtgaacaagaacaa

SEQ ID NO: 104643 - DNA, 279 bp, Zea mays
  Clone ID: MRT4577_26936C.1
tggggtgccatgcagaggtgggctgccatctcaagcctgctctcgattgcactcatctgttctgtcaagtgtgagaatacagtccaggaataagtgctgagcatgagttaggctaagctaggatttctgcacacagagccttttatggccgccatgctattgcttgacttggtttaaatacagctagatcatgcgttggatcctgggaagctgtggagcaatactaggccacggcatgctgacgcttctcatggacaccttactttctgtctttaattg

SEQ ID NO: 104644 - DNA, 390 bp, Zea mays
  Clone ID: MRT4577_26937C.1
ggctggtacgctgccttaactgctgctcttgatcgccggcggcggcggcgggggtgtgccgttccattcgtgctgctaatccaagcggtagaggttgtggtagatatcaacaaaaggaagaagaagaagagggggctttcggtttcccggcgtggggttcgtgtgtgtccgatccgatcattttgaggatcggatttgctgctagtcggtggacaagaacagattgttcttggctccttgctgcaaaattgccatatggtgatggcgattggagaataagaactgggcttgtttgtatatgcatctgatgtatcaaagattgatactgctgctagttcaactaatgtaaatacttaaatttggtgtgatgaattgcttcatgccttgtcc

SEQ ID NO: 104645 - DNA, 598 bp, Zea mays
  Clone ID: MRT4577_26938C.1
cccacgcgtccgcccacgcgtccgcccacgcgtccgcccacgcgtccgcccacgcgtccgctcgaacttgtttcaacataggttcaagataaatcgaccactatttcttccgcataatgaaagtttgtggaacaacatgatgattacttcgagcagaagagaaatgcagctcaactcatcaataagggataagttgttttcaaaaggttattgcagttttccgtgtgctaacttatagagtggcagctgatgctacagatgagtacgtacgcattggagaaagtactgcgctggaaagtctaagaatgtttgttaaagctgtaatagaagtttttggagttgagtatttgaggtcaccaaatgaaaaagatatcgaacaattacttgcacttggtaatgaaagatgttttcctggtatgctggtttcactagatggcatgcattggaggcggaagaaccgtatgccattgttgcaaggtcaatttttcgggcatcgccatacacctacaataattttagaagcagttgctttgctagatttatagatttcgcatgcttttttgtttgcctggatctctcaacaatatcaatgttcttc

SEQ ID NO: 104646 - DNA, 637 bp, Zea mays
  unsure (1)..(637): unsure at all n locations
  Clone ID: MRT4577_26939C.1
cttgtgccttgacccttgagttgcagtggntgtgcatctttaaccctccaattactgatatcttgatctaacttttgtgcctatgtttagaatgttttgttttttagagaaatgggtgttgataagaaaacaacaggaaaaattttgtgtcgttcgcctgaaatatttgcttcaaatgtnagtaacactctcaagaagaaaattgactttcttatcaanctttggtgtttctaaacaccatcttcctcgcatcattaggaagtatccagaacttctattgttggacctaaattgtacattgctccctaggtattgactgcaacttggtgtgatataaaattcagctagaaagagagatttggttttcaaaaatcagtgtgcctcataattgtgccattctacttttaagttttctccaagctgcaaacttttggtgcacttattgttaattttgttggttccctacaacctgcattaacggctccgccttttggggacaccttttgcaatattggaaggatctgtagtcattgcagttaatggcatgttccatttgcgttgtctgtttcttacttgtggtacttaaattctaattcaacatttattgacatatttcactagttaagtatggagtata

SEQ ID NO: 104647 - DNA, 611 bp, Zea mays
  Clone ID: MRT4577_2693C.1
agcaccgttccccactctgtttactgatcgatacactaagcaccaacgtactggcctacaccttggctgctcctctcatctcgtggatttccatgtcatctacgactggcaaaaaaaagacctgcgatcctttttctacgaatgttgcgatgacatcgaggctcgctcctcgctctgtgctctcctgcatcgccgaagactctcgtatactcgagactggacaccaagattgcttctgagggtctgaagcacacagactatgacgcttgcctacctgatctgtacaggctctcatacttacaccttacagcaaaatcacgctccgcgctgaacataagtacctgtataatgagctcaccatctttatggggatgatttctaccactgacacactgacatccctatcgttcaacctgtcgacattagtcgaagcccatgacgatgacatcacaatcgacaactacatgatgcgcatggtctgcatcgtgttcgcgaacacccgcccgagccacatcgagagaacctgctatgctcacgcatcccacatgcgtcacataccccgcagacatagttgacatcatacatcatccatctgttatacatgtaacctg

SEQ ID NO: 104648 - DNA, 747 bp, Zea mays
  Clone ID: MRT4577_26940C.1
aagctcggaattcggctcgaggtggcgctgctcccgtacccggtgccggcgtcgttcgtcctgttcggcgacggcgtcaagaaccccagctacaacgatctggtgcagagggtggctgacggcttcttcgacgcggcggtgggcgacatctccatcgtcacgaaccggacgcgggtggtggacttcacgcagccgtacgtggagtccggccttgtcatcgtgtccacggtgaaggccaagaactccaacgagtgggccttcctcaagcccttcacgccggggatgtgggccatcatcggcgccttcttcctcttcgtcggcgccgtggtgtggatcctggagcacaggttcaacccagagttccgggggtcaccgaggaggcagatggtcaccatcttctggttcagcttctctacgatgttcttcgcgcacagagagaacaccgtgagcactcttggccgcttcgtcctcatcatctggctcttcgtggtgctcatcatcaactccagctacacggccagcctgacgtccatcctgacggtgcagcagctgtccacgggcatccagggcctggacagtctcctctccagcaacgaccccatcggctaccaggtcggctccttcgcccggagctacatgatggacgagctgggcgtcccggcgtcgcgcctccgggagctggccatcgacagctacgccgacaacctgcagcgcgggcccagcaacggcggcgtggcggccatcgtc

SEQ ID NO: 104649 - DNA, 345 bp, Zea mays
  Clone ID: MRT4577_26941C.1
aaaaaaaaaaaaaaaaaaaaaaaaataaaatttaaaaaaaaaaaaaaataaaaaaaaaaagaggaaaaaataataaataaaaaaaacaaaaaaataaataaaaataaaaaaaaaaataaggggcgcccgttttataggttcaaagtttacttacccttgcttacaccttcattgctttttaatagagtcccttaatttcaattatctgcccacttttttacaacttcgtctcttggaaaccccttcctttccccaattaattgaccttctaacacttcccttttagtcctttttgctttttaccgaaaaggcccttccctatcttttttccaaacatttgcccat

SEQ ID NO: 104650 - DNA, 377 bp, Zea mays
  Clone ID: MRT4577_26942C.1
gaattgatactagtttttttgtatggaagttacatcctcaaaattcccgaaccgcggaaaccgcgggaggctcgcacaatgcataactaagcaacacaacatgtaggtacacactcacttgatccgaaacacgagagggcacaaaaaaaaaccctacagccgccccaaccgcacggaaaaacacacacggcaacgaacagcacaggactcccccgggcagcggtggacacccccggggtccggagaccagcgagaacagccccatcaccggcgccagagatggtgggctagaccccggagaagactggagccaggtatacctggcgacctttgaaggcctgcccgccgagcggggaccgaatgatagccctagctgc

SEQ ID NO: 104651 - DNA, 754 bp, Zea mays
  Clone ID: MRT4577_26943C.1
accggaaccggccttcccgggtgattgatgatttttatggcaggctgctggggctctgcagggggggagagcatactatatcactatggaaaatttggggattccaaactttgatctgtcagccttggatgccccattctcagaaaaggagtgtgggatacaatctgtcttattcccttagataaggctcctggtccggatggtttcacaggggaggtgtataaggtttgctgggatattgtcaaggttgatgttatggctgcgttttcggctgttggatgcagaagattcattaattttcatgttctaaacactgcatatatcaccctcatcccaaagtttgaaggggctgatcaagtaaaagatttcagacctataagtttagttcacagcttcccgagatggaaagattgtctgtgaaaacacactggatgctagattgcaggtagttttcagaaagaagctgccagagattcgtcagagccttttcgggcaggtagctgcgtagccaattcttgaaaggagaacgtggcccagtactctttggggtaccctgacgatgtccaggagaagctttggcagctctcaattgtgatttatcacacttttggatctcgattattatttgtgtatacttttttcctggttatggatacctttgaatcctgcacagagcaaataaactgtgttcatttgtgggaaaaaaaaaaaaaaaaaaaaaaaaaaaaaaaaaaaaaaaaaaaaaaaaataaaa

SEQ ID NO: 104652 - DNA, 481 bp, Zea mays
  Clone ID: MRT4577_26944C.1
ggcccccaacatgggcaaaccatgcatttttgtttcgtaaggatttccaggaacacctttataggggggggataaccccattgcttatgggattatccttagggggcctaaaaggaggaattaacgcattctcaaaatgcgagaggtgggcccttatgagcaggtaaacaggcctccaccggttaaactactggaaagaaaaaccaagcctggcctaccctggccaccacctgggacactttaattttttgaaatggcttccatcccggactgggtatagccatttgtaaaccaaaaaacaccaaccccttgggtattttttccaaggcagggaggcctgaaagggccatgtttaccacacttgacatattaaggacaactggttggatcctctcccccgcttttccatttgaggggttcacttcttcccaaacccactttgggaacctttttttgaaggaaggggggttaataaaacaaa

SEQ ID NO: 104653 - DNA, 975 bp, Zea mays
  Clone ID: MRT4577_26945C.1
cggatcacctgccttaaagcagtctatttgtctacgcggcgagagctctctcgctcttcttctatacctactgcatgctctgctagtcgatcagctaggcagctaggtagctagctccgatccacatatataaaatcagatcgcacagctactagcggcaaccgacatgtccagcggccggaggtcgtcacgcacgcggcgtgcggggagcagctcgctgtcgtcgtcgtcgacgtcgaggtccatctcggaggaccagatctccgagctcctgtccaagcttcaggcgctgctcccggagtctcaagctcgcaatggcggcgcacatagggggtcggcggcgagggtgctgcaggacacgtgcagctacatcaggagcctgcaccaggaggtggacaacctcagcgagacgctggccgagctgctcgcctccgccgatgtcaccagcgaccaggccgccgtcatcaggagcctgctcatgtgaccaacgcaccccggccggaaaagaagagagagagagagagagagagagagatagagaggcaagcttccggtgagagcgcatgcgtgcgtgcacggctgttaattagatctcaggcgtgctgcatgcctagcttaattatctatactatacccgtactttgatgtgcaactgctcattagctgccctgccgctgtctgtctagtagtactagtactgtgcccaaggattattagtagctggtgagctagctatatatgcatgcttagtagcagccgtagtagtgactagtgagcaaaatcttgtactttgatgtaagcttgcactgtgtggtcatcgtctctgctctgctttgtttgcgatcggtgtttggctgttaatccaagctagctagctggatgtgtgtgagaggtttttgcaaataatggtgggagatggatggatggatggatgggcagacaaagcatcagaggttgaaataaaaaaaaaaaaaa

SEQ ID NO: 104654 - DNA, 408 bp, Zea mays
  Clone ID: MRT4577_26946C.1
cacaagcgatccggtcagtcgcatgtcactctgctcggacaggcagcgttgagtggtgcgccagccacagtatgcgaagaaaccaggaaaggcacctcgaaggtgtgtagagtaccttgcggatgtcgtcgacttctatttgcgagcgagctatatgcaatgctctgcgcaagcaagattgttggcataggtgtgcaccttaaccggctataaggtctagtagcatttcccgtgagtttaacagctgatttatacaacgacactttagctgatgattggccaaacgacgatgatgacctgccttccttcacaattttggttcttgaaagacactcacctagcgctgaatgccagcaaagacgcgcacatgactgcaacattgcctcgataatttgcccgctcaattct

SEQ ID NO: 104655 - DNA, 684 bp, Zea mays
  unsure (1)..(684): unsure at all n locations
  Clone ID: MRT4577_26947C.1
agctgtgtcagtatggttaaccttagttggctgcctcctggtcctgctcttggtagtcctgaaacttagatccattgttatggttgtatctggccatagtttttgtgtatcctactatccttcatccaagtatgatcatttgtgctgtatttgatccttctcatttattgtctgagagcctgagacaagtatagttctgtgcagcagcagcctgaagctcctgcttgaccaattcataatggccaataatcttcttagcgaagacatgtttattagctgtggtacccaattgtttactaaaacatatccctcagctgtgtttcttatactattttggtacgtggaagtgatgcactagtctgtagtcagtgctgtattcttgtcccattaataactgtgatgcacacatgtttcttaccttcggtggatggaggtaatgccggcggccttggtagtcagtcagtattgcattgcaacataatttggcagttttgactataatgctagtatctctctgtcatatagactattgggtttctgtatctatangtntatactatcnaattttatagtcaatcatccttattnctttcataaatagcaaaaaccaagcattcctattttttnttaccaactgatnatcttgcccaactaccagacaantcatgtcccgatggcccatat

SEQ ID NO: 104656 - DNA, 321 bp, Zea mays
  Clone ID: MRT4577_26948C.1
acgaacaaaaaaacatctccttttagtaaaaaaaccccacccaccaaaaaaaagggggaaaattcataggtgcttcattctgcggggggcgccggtgcggggaaacacccattgatttcttgggcttggggggcttgcagacgaagggggcatgcttggcgatctgggtgctgaactggccgggcttctccggggggtcgatcttgtccagccccgggggggggaggagctgggagttctgcccccgcccgcccaaggtgatgcccatgataggcggcgcgaggattatcccaagggagattcggggggcttcccccaggg

SEQ ID NO: 104657 - DNA, 334 bp, Zea mays
  Clone ID: MRT4577_26949C.1
tgtttctagccgaattcagatcaaggcgagacgggcttactagaagaaacagcggatataaggctgatgggtttaatttgtgacactaaaggtgatcacaaaactgccctggatcatctattgatggccatcatgtacatggtagacaatggtcaggagacaaaggaggactcagtggattaaagaaatggtgatatctacctaatccagctgccagtatgataaggctgagtatgcttaccaaaaagctctcactgtattgaacaccagcaaaggggagaaccatgcaactgtggtttatgtttacgtgcgcctaaccgatctggacaataag

SEQ ID NO: 104658 - DNA, 589 bp, Zea mays
  Clone ID: MRT4577_2694C.1
aattcggcacgagggtaagatgatctcatgtcttatcgtaaataatttgaatgaggcctgtttgtttttgtgaacgggtgttttattatgggcattgttgcttgcctgtaagcaggggaaaagatatgtaactttgtattcatgtagcctgtacccactatggtcactacgtactgggatagcttaaggctaagttcttaacacagtttataaccatgcatgtgatcgatctatcagagattgaatagctcgaatatggtattgctgacatgttgcacccccaaagtcatcgaacttctttgttgaatttgggatggacagtggatatcacaaaaaatatacatccagttcatccaaagtgcaggtaactattttattcagacatatatgattaatcatcattcatcaatatgtgaactccattgagcaagtatattgtaaagtcagaactaaaaagaggaacatttggttccaccatttcaccttattatgtactaagggggaagtatttagagatagaattgatggcaattacttcagtctttaaacctgttattagtgttgataatgttgattccattcagctctg

SEQ ID NO: 104659 - DNA, 170 bp, Zea mays
  Clone ID: MRT4577_26950C.1
ggccgggtccgtcactcccagaaaccgccactccgacgaacaccgcccgctgttatcgggtaacgaaccagagcaccgcgtaaaaagaaaaggatgaggcttgggcacataaacggcttgcggctcacccaacttaaattggcatcgttgggctcttcaatgttgtttcg

SEQ ID NO: 104660 - DNA, 1771 bp, Zea mays
  Clone ID: MRT4577_26951C.1
attgggacctcgagccggcgggaagaagaaaaaaagggttgaattttgctgggagcctgggacgctgagtcagacccccaccgatggcgtccgaatcctccccgcccccggcgggggcgccaccgcctggtctgggagacaagctagcggtgttctgggacgagggcatgctggcccacgacgccggccgcggcgtgttcgactcgggccgcgaccccggattcctggatgtgctcgaccaacacccggagaacgccgaccgcgtccgcaacatggtctccatcctccgccgcgggcccatcgcgcacttcctctcctggcactcgggccgccctgcccacgcctccgagctcctctccttccactcctcaggtcaactcccaaagccgaaatcccctcactaacttcgttttctggaatcttgattgaccaaacgctcgcgttttcccgggggttccgttgtaaaatatattcgtaaacggacgccggccaaaatcttcttgtggtttgaagaatacatagaggagctcgtccagacgaacgccaccggagccaagaagaagctctgtgagggcacgttcttgaacccgggctcctggggtgcggcgcttctagcggccgggaccacgctctcctccgcgaagcacatactagacgggcaggggaacctggcctacgcgttggttcgcccccctggccaccacgcgcagcccgaccacgccgatggctactgctttctgaacaatgccggacttgctgtgcaactggctctggattccgggcgcgcaaaggtcgccgttgtggatattgatgtgcactacgggaatggcaccgcggagggcttctatcggacagacaccgtgttgacgatgtctcttcacatgatgcatggttcttgggggccatcgcatccgcagagtggctccgtcgatgagattggtgagggcaaggggcttgggtacaatctcaatatacctttgcctaatggaagtggagatgctgggtatgaatatgcgatgaacgagttggttgttccatcgattgataagtttcagcctcaactgttgtttcttgtggtcggccaagattccagtgcgtttgatcccaatggaagacagtgcttgaccatggaaggctacaggaaaattggacaaataatgaggcgcctggctgatcgccattgcaatgggcaaatactggttgtccaggaagggggttaccacatcacttattcggcatattgtctgcatgctacactggaaggagttttggatctggaagccccgctgcttgatgacccaatcgcttattatccggaggatgataaatacactatgaaagtcgttgacatgataaagagctactggaaggaatcggttcctttcctaaaggaaatttagaggaaataatgttcgcgccctcaatgttcaaattgcaggaaactccacattcctggacatcttcaattgaattgggaagaacattgcacgtctacgttttcaggccgtttaagattatctgattgacagtttcacgcctaacattgtacaggatagattaagaacattgtttgctgctgctcttgaatttctgcaatcaggatctcgtcagcctatttttgataaacagtcgatcttttttttttccctgagatgcttttggcggcagtagaaggtaggcggtgcttgagagtgacagagggccatgtaaccaggggataaatcttgattgactagtccaagcaaagggtgatgctcgctaccagaacttg

SEQ ID NO: 104661 - DNA, 1657 bp, Zea mays
  Clone ID: MRT4577_26952C.1
ccctccgaggctcggccgggaaagaaaaaaaaaaggggttgcaattttgctgggagcctgggacgctgagtcagacccccaccgatggcgtccgaatcctccccgcccccggcgggggcgccaccgcctggtctgggagacaagctagcggtgttctgggacgagggcatgctggcccacgacgccggccgcggcgtgttcgactcgggccgcgaccccggattcctggatgtgctcgaccaacacccggagaacgccgaccgcgtccgcaacatggtctccatcctccgccgcgggcccatcgcgcacttcctctcctggcactcgggccgccctgcccacgcctccgagctcctctccttccactcctcagaatacatagaggagctcgtccagacgaacgccaccggagccaagaagaagctctgtgagggcacgttcttgaacccgggctcctggggtgcggcgcttctagcggccgggaccacgctctcctccgcgaagcacatactagacgggcaggggaacctggcctacgcgttggttcgcccccctggccaccacgcgcagcccgaccacgccgatggctactgctttctgaacaatgccggacttgctgtgcaactggctctggattccgggcgcgcaaaggtcgccgttgtggatattgatgtgcactacgggaatggcaccgcggagggcttctatcggacagacaccgtgttgacgatgtctcttcacatgatgcatggttcttgggggccatcgcatccgcagagtggctccgtcgatgagattggtgagggcaaggggcttgggtacaatctcaatatacctttgcctaatggaagtggagatgctgggtatgaatatgcgatgaacgagttggttgttccatcgattgataagtttcagcctcaactgttgtttcttgtggtcggccaagattccagtgcgtttgatcccaatggaagacagtgcttgaccatggaaggctacaggaaaattggacaaataatgaggcgcctggctgatcgccattgcaatgggcaaatactggttgtccaggaagggggttaccacatcacttattcggcatattgtctgcatgctacactggaaggagttttggatctggaagccccgctgcttgatgacccaatcgcttattatccggaggatgataaatacactatgaaagtcgttgacatgataaagagctactggaaggaatcggttcctttcctaaaggaaatttagaggaaataatgttcgcgccctcaatgttcaaattgcaggaaactccacattcctggacatcttcaattgaattgggaagaacattgcacgtctacgttttcaggccgtttaagattatctgattgacagtttcacgcctaacattgtacaggatagattaagaacattgtttgctgctgctcttgaatttctgcaatcaggatctcgtcagcctatttttgataaacagtcgatcttttttttttccctgagatgcttttggcggcagtagaaggtaggcggtgcttgagagtgacagagggccatgtaaccaggggataaatcttgattgactagtccaagcaaagggtgatgctcgcaaaaaaaaaaaaaaaaaaggcttttattcccatcaggt

SEQ ID NO: 104662 - DNA, 621 bp, Zea mays
  Clone ID: MRT4577_26953C.1
ttttttttttttttttttttttttttttttttttttttttttttttttttttttttttttttttttttttttttttttttttttttttttttttttttttttttttttttatgggggttttttttttttaggggaacaaggggggggggggggggggcctttttttaagagggccccacagccccccgaggggaagggtggcgggaggaaaaaaaaaaaaatttttgatcgtaaaaaagggggaaaaaaaaagggtgttgggggggaagggcgggggccccaagggaattgtgccaaatggaacgggaaaaactttggggggagtgttttgttttcccccaccggggtaaaaaataaaagttcccccaatcgccctttactaaacgcctttttttttgaaacatttttgcaaaagggccttgagaaaaaacttttctaaactggcaccttgtgaaaggcggggccctgtggaggcgggtttgggtggggaagttggggggggcccccctcgggtggaccctcgcgggtcgggcccccggggaaagcccggacattccagagcacgcaacaaggggtccccaccgggaatttcgcgggaggctattgagccgggtctttggc

SEQ ID NO: 104663 - DNA, 348 bp, Zea mays
  Clone ID: MRT4577_26954C.1
atttcctttttttttttttttaatggggggtttttaaaattttttttggtgggggaccaccaatccaaaagcctctggacatttgctttcttgccagagtacaaaaaccgaaaaaacatggattaggggtacaggaatcaaaaccaaaacgggggaggctcaggtttattacatggcttggtggactaagtattaaacattcattgacgccgatgcctgccgggggcaaaaaccagtccatgaactggtccgaattttaaaaattacccaatgccatttggtgggggatccaacgatacaaacagggagcacttttgaactacttggtggacttgcacaaattggttt

SEQ ID NO: 104664 - DNA, 2153 bp, Zea mays
  Clone ID: MRT4577_26955C.1
ttaaaattcgccagagattaatggctctaaagcatgaatttattgaaccatccataggtgaaagtacaggaatcacgcacaggtctggtcttggagctgccaaagctaagctaagtagatggcttcaagaccttcagagacttcgtcaagctagaaaagaaggtgctgccagtattggattgattgtcagtgacatagcgaagtatctagaagggaaggatcttgagctgcatgcatcaagacaagttggtttgcttgactttattgcgtctgcattacctgcgtcacatacttcaaagcctggagcttgtcaagtcactgtctaccttttgcgcctgttgagagtgttgctctcacttccagctaatcgaacttattttctagtacaaaatcttttacccccaattattcccatgctatcagcatcactggagaattatattaaggtggcagcatccaactctggaagttcaaatcttttgtctaataaaacatcagctgagactacagagtcatcgggtgaagtgttagatggatttttatggactgtggccatgatcgttggccatgtacacatcaatggtgaacaacttcaaatgcagggaggtttgatagaactgattgtagcttatcaaataattcatcgtctgcgagatctgtttgcactttatgataggccacaggtggaaggatccccactcccatcatctatactgtttggcctcaaccttttgtctgtattaacatccaaaccgggaaatttctctactatcgattgggagtcctgcaaatgcaggacactaggtggaaatatagtgcaagaatatgaatatcttagttcacaggacagtttggggtgtcaatcaatgacacttgatcagtttggtgatgccaaatcgccaaccatatacagtgaactggctgaagatagcaaatcctgtaaacaacatgacttgagcattcctgtggacagaaaattggttgatgaagctagtaaagacttgttagtgatggctgctggcctgaacaactcagcaatgcaaccatctgatttgggcattactacagagaagcattctggaaatcctagccagggagatgaaaataacacagtggacagttttcttgaaggaagaaagacgaataatgtatgtgcattgtatagtagttcaggaaaaggcaatgagatgaaccttaagcagcctgcaatgctcttactttctgcactggctgagactggccttgttactctaccatcacttttgactgctgtgttgctccaggcaaacaacaacaggtcatcatcagagcagacattggcgattcttccatcaaattttgaagaagtagccactggtgtattgaaagttttgaataatatggcacgtttggatataacccttttgcagcacatgctgtctagatcagatctaaagatggagttcttccatttaatcagcttccttttgagtcattgcatgaacaaatggagagtgccaaacgatcaggttggtttgctgcttctagagtctctgctacttcttggctacttttctttgttccatgctgggaaccaagctgttcttcggtggggaaagagtcccactatacttcacaaggtgtgcgacctgccatttgttttcttcagcgaccccgagttgatgcccatcttggctgctgctctgatcgctgtttgctacggttgcgatcagaacctaagcgttgtacagcaggaaataagcacggatatgctgcgctgcttgctcaagtcctgccaaacttcaggatcaaattctccagattccattgctgtggatggttctggaaacaattccactgaaagcattctggatatcaggaactcaagaagctgcatcgaacttcatgttgcatagaaagatcccagcttcttttttggacagagccgaggagttcttctgcagtgagacatgaaatcggccctgtggttcgcctaacttgtatggcacgagctactgaatttactgttttgcaaggatggtgtttcctgacctgatattttgatcgaatctgtagtccccagattaaaaaaatgagtcatgtacggaaacgaatgcactgtttgtacagaaacacagaagaaaaaactgataagagaatctgatttcgtatgt

SEQ ID NO: 104665 - DNA, 395 bp, Zea mays
  Clone ID: MRT4577_26956C.1
cctacgcgtgcgcggacgcgtgcgcggacgcgtgggccagctcccatcccttatgcttggttgtcaactcttcaaacactactccaatcccacactaaaagatgtgattcaggactatacaactgctacagtactatttcagaagactctggatccgtttccagagctgcaaaatgactcccaaattcaaagaagttatgctctatgcaccatccttggaggccaagctgtgctcgaggcattaccaaactgtgaatttggacatgctagatgtgaccccagtacgtgaagccgcttatgaaactatgaattcgggagggcaaaatgaaatctctctgttcacgggtggcgagatgacatcaaatggaatggaatcgttcacgggcattaatagc

SEQ ID NO: 104666 - DNA, 373 bp, Zea mays
  Clone ID: MRT4577_26957C.1
cacccggaatcacaactaagggatcggttcaggttgggtccaacattccattttacaagaaaatcaacatgggggaaaacaaggcatttttggcatcctgaaaaaaaagaatcgggctggcgttactgaaccttagggttttgaaatggaccttttcctgcaaggacagaaattgctgaaaacaaatttgggggatagctaatccctatggggcgccccaaaaatcaggggaagccctcatttggaaaaaaacgggaataaataccccccacaggaaaaaaaaaactgaatgacggccttgttagttgacgggcatgatctaatgaaagctagctgacttgcaagggaatatctatgtttttgggctcccagg

SEQ ID NO: 104667 - DNA, 276 bp, Zea mays
  Clone ID: MRT4577_26958C.1
gcgacggtgggtgcggatgtggggggtaggctttgctggctcgccatggcgctccccgtggcttggatctctggtgtggtggtcgcacatatggctgcgaggcgagcggtgcttgatcactgctgcttggatctccggcacggtggtcgtcgcctcatcgtcgggtgagcaggtatgtgaggggtggatccgtcgatggacgcttccacatctaatagcgtcgagacaatggctcgagcaccaggcggcacccaccatcgggaaggaggcagcgat

SEQ ID NO: 104668 - DNA, 256 bp, Zea mays
  Clone ID: MRT4577_26959C.1
ggagaactgccagaagagcaagatcttcttcatcgcctggtctcctgacacggcgcgcgtggagagcgggatgatctacgccagctccaaggagaggttcaagcgggagctggacgatattcaagtggagctacagtccacctactatcgtgtggttggacatgacacaattccaggttaaccctgcatatgatgctcagagaatatttgcctatgttcaaacactgatgtgcgtcacagacccaaattgtgctgc

SEQ ID NO: 104669 - DNA, 264 bp, Zea mays
  Clone ID: MRT4577_2695C.1
gaccaaacaagtaattggaaattggaagtttattttttggacgaacgcacaagcacccatacaccaaatggtttgaatggatgcatatagtaacaacatattctttatgatttatatgaagagaattaactggtaggggggtaggagataattaaaggtaatgaatgttgaaataagttggaaaaatattacgattaaccgtatagatgaaggattggaaccagttgacactaaagaaaacgaagtaattgatttttaaaagag

SEQ ID NO: 104670 - DNA, 837 bp, Zea mays
  Clone ID: MRT4577_26960C.1
cctcgaggccggccgggtcaagaatactcaccatccctcatagaaaacccaaccaccaagaaccaccaacaaaccaaccaaaaaaatggtcaacacatcccactcccgctccgtccgcggcaccctctcccaccccaaccgctctccctcatcctcccaacctcccccaagcctcagcgacgccacaagcctaacccccgaaaacgcctccctcccacttccaccccacgactcggcccctccaccatctccctcgcaaacctccacttcttcctcttcttctcccgcagacgcagcacctacaccaagtaccccctaccgcaccctgggcaccgcagcaggcggtggagacaagagggctgtggggaatcgtgctgcgaatcctgctagtaaggattccgccaaggatgtcgctggagacgcagtcaaagacatgctaccacccaaaggcaacgcaacgcagtccaagacccaagacgggaagcgagacgaagaaccacacagccgccgcgtccgaggcacactagcaaacaaaaagcctgaagcgagggtcgaaaagacaatgctgggggatccggcgagtttgataccagagggtgagaagacggagggagggatggataagggggccgagagcgagggtgtggtgaagagggagagtaagttgtaagggatacgtattatttccgtaagaagttttcgggaaaaaaaatcgaaaaaaaagaagggagagaacgacaaacgtcgtgcatagagcctgtatttgtcccatcttttttgctttttcttaggggagagggaaggtcgcagttcatgcacatttgctacaactttatc

SEQ ID NO: 104671 - DNA, 328 bp, Zea mays
  Clone ID: MRT4577_26961C.1
agcagagcatccttccatttcagggagattcgactccgggtacgtgctctactcacaggaaatcatgcgacgagacccgcgcaaagcataccccgttccgcggatagcgtgatcgactgcgctatcagccgtctaggcgcgctgtctacgatcgcacggtcacgtcctcgctcagctatgtctgcatccggggctccgtctacgatctctgctctggccgtggattctattgccccatgagggggaagcccgctattctctgccgctacgccagtcggacccccggagtgatgtgcagagatgacatcgacgtctcgtgagaccttgc

SEQ ID NO: 104672 - DNA, 309 bp, Zea mays
  Clone ID: MRT4577_26962C.1
caagttcgtcgcgcgccccctatatttctctgtggccgacgctcagctcctagctccggcgcgtgtccctctgctcagctccggccgcgagcagctccctggtgcttggacccggctcagcgcgctccctgctcccatcaccgcgtgcgcatctccctgcccaatcgccccctttcttcatctccctcgagctcgccatggagctcgcccctgcctcagcttggactgcgtcgcacggctctggtcaaagaagatcctctgcccagccctctgctcgcatgcgtgtcgtgctcgagccttttcctgcgg

SEQ ID NO: 104673 - DNA, 437 bp, Zea mays
  Clone ID: MRT4577_26963C.1
cgtgctgcgcttcagcaacagggcaaatagtgctaaaggttctaaaacatcctcttgcatgaacacagagagtcctccaaacaatcaacagataacttaaaatcagtgacatcacaagttcggtatatgtcaagcaatttcagcctactgtatctgaatgccgaacgatctgatataccaccaggtctgtcagaaagaagaccaagatggaatggtcgtgaagatccactactgattgcacttgtaccagatgtgaactttccacgactgtttggaaactttgcaaaatcattgtctagcttccccctaccatatccagaaggagcaggtgatttcggcagtgcctgagaagtataatttggcaaatctccacgcccacggcctgcggaataactaggtttccatgaacgagaaatattgtcatccttttcataact

SEQ ID NO: 104674 - DNA, 962 bp, Zea mays
  Clone ID: MRT4577_26964C.1
agacaattcgaccgtgaactggcccgagtgaagtccacgcatccgtctcttcccgctccggcccattgcccattccgttcacaaattcacttctctctctctccgtcgagatgcttcgtggctccgccgccctcctccgccgcctcgcccctcgtatctcgggcggtggctgcggaaacacgactcaccggcgccttcttcctcccatcgcccccttcctccgcgcccgcttcttgtctgccccgactacctcttcaccgccttcttcgtcttcagctgcctgccacgaggaggatgcggaggacagagacctccccgagatctccaatggtgatgcaggtgcccggctcagcatctccgtcgaccgctccgggctctacaaccccacaggtgttgttgtgtcaaaatgcggcagagcactcgcacgagccgtcgtcggaatccgagctcgtcaagcacatcaagagcatcataaagtttcggagtgggccaatcagcatagctgaatacatggaggaggtgctgacgaacccacagtcaggattctacatcaaccgtgacgtgtttggggaatcaggggatttcatcacctcgccagaggtcagccagatgtttggagagatgattggtgtatgggcaatgtgcctctgggagcaaatgggaaagccagcgaaggtgaatctgattgagcttggcccaggacgaggaacactcttggctgatttacttaggggatcggccaagtttgctaacttcaccaaggcactgagcattaacttagttgagtgcagccctacattgcaaaaaatccagtataatactctgaaatgtgaagatgaacatgttggtgatggcaagagaacagttagcaagatttgtggagcccctgtttgttggcatgcctccctcgaacaggttccctcaggatcaccaccataatcattgccatgaaatctatgatg

SEQ ID NO: 104675 - DNA, 602 bp, Zea mays
  Clone ID: MRT4577_26965C.1
agcggccgtttttttttttttttggcccttatcggggactgtttagtgagtggccaatcctcgcgctcacgatcggtcgccgcaaggtcgatgcttcggcctcacgttgcttcctttcccctcagggctcaggatgcttcacctcagcctcatcctcacgttgcttcctttccctctcgggtctcggcgctccgtttcccttttcctcatccgcgactgcaatctcttcttgcctggccccatgccgtttcgttaagagtcacagctaggacagaggcgcggcccaaccggtgccgtacgcggcgcggtcgtgtcggccgaaacagcgatctgctgttgttcagcaaggacagaagcgtcggggaggcgtcagcagcaatctaccgccttccctctaactaccaaataccacactaacgaactaccagcccaggagggctgggtgaccgctctaaccacctctcctccccactgcagaacaagggtggtggacagagacaaacaatgattaggactgggggcgcacgacgccctcgagctctagggggcaaatgatttcttctccccgccctgtgtgctagtgctactagagcctttaaaaa

SEQ ID NO: 104676 - DNA, 168 bp, Zea mays
  Clone ID: MRT4577_26966C.1
cgtccgaaaccttattgcacaatgataccggcgctgatgagatccaaataccagctcctccgtcggcggagctactcctacgcattcgggcagcccgagcggaaggtggccatcctcggggcagcggtgggcatcgggcagccgctgtcgctaatcatgaagctcatc

SEQ ID NO: 104677 - DNA, 524 bp, Zea mays
  Clone ID: MRT4577_26967C.1
ccggccgggaaatgataataaatatagacatacctacaaactatattcatatagaactacattcataggttaattattaaatatatattttgcgacggaggaaatattagctaatttgctaaaagtagctaatagctgaacttgtagctaaattgtttggattattagctagattgtttgatgttttcagctaattttagcagcttacattcaaacacacaagtttatccattcagcaaattctaaatcatacttacccattcagagttagctttcagtcagtcctaataggttgttgattggagttatgtcgttggcagatatgctgattatcgaatccttgttttggagaataaaagatccagtggcgtaaaatccaactgctcgttaggtcaaggacaaaaagatccacgaaatgaaaagccaggtggtacttaggacacgagttccactagagcaaagattaggtgctagctacgcacaaaagtcccacttaactaacctgttaagcgggagtgcggccc

SEQ ID NO: 104678 - DNA, 342 bp, Zea mays
  Clone ID: MRT4577_26968C.1
aaaaaaaaaaaatttgctcctgaagttcaaaatgactgggggccaaccaaaaacagttcttttttttaaaaaagggacccgcttaaagcaaactttggggcaacacgttacaccagggcggggcggggacaaatttacgagggggatccatttcatacaggggggggccccagactcattttcaggaattggagcccgggctactgttatttctgcttataaccctatcatggcagttcatgttttggttcacaatgggccgggaaccccctgcgttccatgtggaacttccccaaaaacctttttttttttttgggaaaatttcccaaaaaaacctaaaaa

SEQ ID NO: 104679 - DNA, 197 bp, Zea mays
  Clone ID: MRT4577_26969C.1
cttccgaaaaaaaaaaaaaaaaaaaaaaaaagggtctcccataataaaaaaaaaaaaaataactggcgcgtctttctaaaaaaataaactcttctatactctcacctacattctattccctgtctcacgttttacaacatcttcactgccaaaaccctgtcgtaacccatcttaatcgcctaaaccacatcctcctt

SEQ ID NO: 104680 - DNA, 382 bp, Zea mays
  unsure (1)..(382): unsure at all n locations
  Clone ID: MRT4577_2696C.1
gaggcacgcgtccgatttgggggcctggtcaagttaaggtactctgatggccaggcggcgccatccggctgtgctattgaaactgtctaagccaacaaaccatgagaggactcatgaggatgtgcaaaacatgaagacactcgtgggatcacttaaatgagtaatgttatgcccaatgtaactctggtggtctcaaacagcaacaaatgctgaaccaatgatgtattgtgatctttttcttatgcacggataccacagactagttctgataaccaataaggactattcgagaatttcatgtttgacgagacattctacgtctcgaagaggtgngggtggtgttttcaaaccataacttttcattaaatgcttgtgtggtgac

SEQ ID NO: 104681 - DNA, 1158 bp, Zea mays
  Clone ID: MRT4577_26970C.1
atgctctccactacctccccggtcccactcctcgacacgccggcgccctcgacggacgccgacgccaaaaatggcacggcgagtcggcggcgcgcgcggctgctgctgctgtgcgccaactacgctgcgctcctcggtggctccgtggcgtccagcctgctgtcccggtactacttcgcgcacggcgggtgcgaccggtgggtggccacgctggtgcagtcggtcgggttcccagtcctgctggtgcccgtctacgccggccggcccgcctcccactcccagtcccagtcccagccccggccgttcgcgtggctcacgcggcggccgctgctggtggccgcgtgcgtcgtcatcggcgtgctcatgggcgtgaacaacctgctcttctcctacagctcctcgtatctgcccgtgtccacctcgtcgctgctgctgtccacgcagctggccttcacgctcgtgctggccgccgccatcgtgcgccacccgctcaccttctccagcctcaacgccgtcgtgctcctcacgctcagctccgtgctgctcgcgctccggtcgtcgtcggccgagcgccccgacggcgggagccgggccagctacctcgcgggcctcgccgtcacgctcggcgccgcggggctcttcgccgcctacctgccggtgatggagctggtgtaccgcagggccgtgtccggcgggttccgcatggcggtggaggtgcaggtggtcatgcaggccgccgcgacggccctggcggtcgccgggctggccgcggctggcggcgggtggcgcggggagctggcgcgctgggacctctcgccggccgcgtactgggcggtggtggccgcgctggtggtcacgtggcaggcctgcttcatgggcaccgccgggatggtgtacctgacgtcgtcgctgcacagcggcgtgtgcatgaccgccgtgctcaccgccaacgtgatcggcggcgtggtggtgttccgcgacccgttcggctgggagaaggccgtggccacggtgctctgcgtctggggcttctcctcctacctgtacggtgagtacagcaccacgcagcaggcgcaggaagaaggcgaccgcaaggtggcggccgcgtccgacggaggtggcgcggggcacaagagtgttgctagtgatgtggtttag

SEQ ID NO: 104682 - DNA, 518 bp, Zea mays
  Clone ID: MRT4577_26971C.1
ccctcgaggctcgccggggacttaatctggtacggtccaatgtatcgaggtgctaatttgctcttgactccgaaccttctaactactctgattggtgacaccttgaggtaaacataatctcccacttcgaaactaactatgttcttctggtgtcgacataactttgttacctggactgcgctgtcttcatgttctcctgaaccattccgatattctctttggcttcaagaaaaatgtctggaccgaacacctgccttttgccgggttggtcccagtgcaatagagttcaacaattcctcccatagagtgcttggaacagtgacatcttcaaattggcctgatgactattgttgtatgagaattctacataaggcaacctcttatcccaacctgacttgtcctgcaaagcacaagccctcaacatgtcttctaggatctggttggttctctcggtataaccatctgtctacgggtcataagctgaactgaaattcaaatgggtacccaaggcttcatgc

SEQ ID NO: 104683 - DNA, 788 bp, Zea mays
  unsure (1)..(788): unsure at all n locations
  Clone ID: MRT4577_26972C.1
accacagacaggcagctactccacttggggttcgcctgagaaccatggttttcaaggtgtcgcctaggcgcctagacactcaaaaatcatgggtgtccctgttccctaaatgaaaatgaaaaaaaaatcagaaagagaccgggaggggggtggaagggaaaccaatgttaccaaccaacaagccccagcagctgccaatccccgatagctctggcttgtagaactcgcgcttgtcaattgaggcacgatagatctcgacctggacagaagctcagttgatctgagagcacacgaatcaatgagggcccgagaagaagcagggaggaggagcagaggagttgctggcagcatcatgcgcaaggagattaaggaaggagttctggaaacgtataggctataggcaagtcgggggatggttatatagggtggctagtgggctggggcagccccttaagtctcctgccctctttctcctttttctttgtttttccttccttcatgctgctggcttcctgtttctcagaatgatatatatcaccttgcgattgtgtaggtgtcaccctaagcgattagaaggtggtccatcaccatgtcttgccttattgccttaagaaccatgttgagaactgtttgnggttccggaatttatttgtatgaatttttgacttgcaatctcctgtattcaaagtattcattagagatgcaggaaaggaaacataatcatcccgtgctttatctcatgttgttatggaaagatatcatctgtcgtatgattttttgacttgaat

SEQ ID NO: 104684 - DNA, 326 bp, Zea mays
  Clone ID: MRT4577_26973C.1
gttgcttgtgggggggaaaacggcggttttttcccccgcaccacaaagggacgatcgctgttacattccccgaaccactacaacaatgcttcaaaaattcactcttggggatacgaattttcacccttaacacaactggagcctaccccccaatttttgaggcttggggggaattttaaaaaaaacatcccttcatattgactgggggtaacaattccaaaaggtaccttttatattcacaagcagcaattagacctgaatctaggcaattcaggggtgaattcttttttcggaggcatgggggggctactaccttggaccggaca

SEQ ID NO: 104685 - DNA, 385 bp, Zea mays
  unsure (1)..(385): unsure at all n locations
  Clone ID: MRT4577_26974C.1
ctcatgctttccgttgtatatcgcgagcgacctgtttaaattattcatgctcacccacccttgggtgctgcgggcatatgttgtctatggctgcacataanaacaatgaacaggccaacggtgaacatcatgacgacatgggcataaccctctcgttactgaacatacccccctacccagacattaccatatttcaatctggcnnnctaacactaaggtccgtaacgatatgtctttacaacagtggtacaaccacccatggtaataggactcgccatgtagctgtgcattaaactcaaaccatgttatgaggacgcacactgtgactaataaaataaacaaaaacgtagggcccgctacatgatccaagtctccttacttcttt

SEQ ID NO: 104686 - DNA, 306 bp, Zea mays
  unsure (1)..(306): unsure at all n locations
  Clone ID: MRT4577_26975C.1
gagcggccgcccccaactaaaaactnttttnttgcgcccananaagaaaannaccgnnanagggggccacgaaaagggagcaaccgcgcgggacaccccgggaccaaccaggacaacaacagggcccccaccccaaagcacgcagggcagcagcaggccaaacggcgcacccacaaacccaacgaaggggccggcccncacagccgacacaaacaaacgagaaacaacagcgagacaccggacgaccgccgcgaccccccaacaacccggacgcgggggacgacccgggaacaccggaccgggacc

SEQ ID NO: 104687 - DNA, 2590 bp, Zea mays
  Clone ID: MRT4577_26976C.1
tgggtacctcgaggccggccggcacggagggagcaccagtacccaatcctcctatccattcatctcgccccgcctcggccatggcgccactgccagcaccaccgaccgcggcctccgcctccgcattcctcttctccccgccgcgaagtccgagccgctacctgcaccccaagcccaagcccaccgccaccatcctctgctcttccacctctgccgccaccgccgccggctcagcatcgccctccctctcccagcagttggagccgctctcccgcacgctcctccacgacaagcccactccgatcgcggaccgccccaccccggagcccacctgggtgaaccccaccaagcctaagcccagcgtgctctcgctccgtcgccaccgccgccgttcccctcccgcgaacacttcctccacgccgctgcagccgctgctgcgcgccctccgcgcactacccgaggatgccgacctcgcgggcaccctcgacgccttcttcctgcagcagcaggggcagggtgcggcgccgtccccctccgacgcgctcctcctcctcaactacctccacccgtcgtggcgcaagtcgctgtccctcctcgcctggctgcgcgcgctccccgccggcgccttcccgctggacaccatctacttcaacgtcgccctcaagtcgctccgcgccgcgcgccagtggccgcacgccgagcgcctcgcgctggacatgctcgacgcgggcgtgcccctcgacaacatcacctactccacgctcatcaccgccgcccgccgctgccgccagttcgccaaggccgtcgagtggttcgagcgcatgtacgccgccgacggcgtcctgccagacgaggtcacctactccgccgtgctcgacgtctacgcgcagctcggcatgaaagaggaggtgctcgcgctcttcgaccgcgccaggggcagcggctggaagcccgaccacgtcgccttcgccgtcctcgccaagatgttcggggaggcaggcgactacgatggcatccagttcgtcttcaaggagatgcgggaggtcggcatcaagcccaacatcttcgtctacaacgcgctgctcgaggcgctgggcaagaccggcaagcccggcctcgcgcgcaacctgttcgaggaaatgatcgaccagggcgtcgagcccaacgcgcgcacgctcaccgcgctcgccaaaatctacggcagggcacgctggggccgcgacgcgctccagctctgggacaagatgagggagctaaagctacccgccgatagcatcctctgcaacacgctgctgagcatgtgcgcggacgtggggctcgtggccgaggccgagcagctcttcaacgagatgaaggatccggagtgccgcgacgtcccaaagccggacaagtggagctacacggccatgatcaatatctacgggagcaacggggacacagacagtgcgctccagctgttcgcggaaatgctgaagggcgggatagagcccaacataatgagctacaccattgtcatccaatgcctcgggaaggcgcataggatacagcaagcggtggaggtgcttgagtccgggctggagaagggtctcaagcccgacgatcggctctgtgggtgcttgctctctgtcatcgctctgagcagcggggaggagatggaaatggtgctctcctcactgcaaacgcgtccgcagaacctggtcaagctgatcagagtgctcggcgacgcccaggtcggtggtgacgatatcacagaggagctgaagagcgtgctgaacagcgctgcccctgaagtacgccgtccttactgcaactgtctgatcgatgtatgccgcaaccacggcttccctccacagagggcaagggaagtcttccaccttgcccagacctatggtttgtactccaagcttcagagcaggaaggacgaggagtggtcgctggacctgcggtcgctctcggttggtgcagccaagacagcgtttgatgactggatgcagactgtctcggagcgctgggcgcagcagaaggacttgccagagtccttcagcgtgtacaccggatccagcacccacaagtttgcgcaggggctggcaagtgctttcgccgctcatctggaccaaatggcggtgccattccatgcgagcgaatctcaagccggcagcttcatcagttcaagagatgatctggtctcttggttgcagatgagcaggtcgtccgcagtcgttgccggatgaggcgcagtggttgtggctgcataatgctccaaattccaaaggaaagaagggctcagtgagcaaactgggtgatcatgcatttgttggcatgcagtttgtatgaagagaattggaagtctgaaacgcgtagattagacggtagcaccaagccgctcttcaaacattggctgattgtcagacttacactgctggttctgtttctgaaattcaaatgccacttcttaaattccattatatcctggtggaagaattgtatagtttttcctccctgcacacaatgtgccgatttggctactactagtataatactaccgccttggaagttggaattaattgaaccaacacccccaggaaaccca

SEQ ID NO: 104688 - DNA, 988 bp, Zea mays
  Clone ID: MRT4577_26977C.1
tcgaggccggccgggaaaaaaataagcccagtgctacactcgcatgagctagcatcggccgctgctcctctctttctcctccagtcgtcggtagtcttttcgggcctgaagcatacgggggctaccagaggagagagctagtagcaaaggaagagatcgatcgagagaggtaggcaagatgagcggcaaggctctcctagttgtcgccgtcgtcctcttggtgggcgtagcctctcggtgctcgggcagcaggggccagctgcatcagcagggcgatcacgttgctgaacagaagtacggtaccggcaatgggtacggaggtggcggcggcggctacacgcccgggtactctggcaccgggacctgcgactactggaagagccacccggacgcgatcgtctcgtgcgtcgggtcgctgggcagcgtcctcggctccctgcgacgcgtgcagcgccttcttcgggggcaagctgcagacgctgcaggacgcgctgtgcaacgcccgcgccgacggctacggcgacctcctccgcgagggcgccgcggcctcctcaactccgtcgccgccgcaggcaagtacgcctacaccacgcagctcaaggactgcatcgccgcccccgcgcaggccagcatgttcaacaaaaaaaactacgcctgccactattactagctagctagtcctcacgtgcatcatcgcgcaaatttaatatgggtgtgcaaggtccagcccgcccacctgtatgttttcatcgttcccttcgttttcggtcgtctatctgcttcgtctttgtttatgccgatgcatgtcccgccgttgtcagctggttcagaacccccccttactttcttgtcgttgccgctgatgtaaaaaataaaccaatgcgttgcctccccaaaaaaaaaaaaaaaaaaaaaaaaaaaaaaaaaaaaaaaaaaaaaaaaaaaaaaaaaaaaaaaaaaaaaaaaaaaaaaaaaaaaaaccaaaacc

SEQ ID NO: 104689 - DNA, 996 bp, Zea mays
  unsure (1)..(996): unsure at all n locations
  Clone ID: MRT4577_26978C.1
cattgggtacctcgaggccggccgggagtgtcccagtgctacactcgcatgagctagcatcggccgctgctcctctctttctcctccagtcgtcggtagtcttttcgggcctgaagcatacgggagctagcagaggagagagctagagcaaaggaagagatcgatcgagagaggtaggcaagatgagcggcaaggctctcctagttgtcgccgtcgtcctcttggtgggcgtagcctctcggtgctcgggcagcaggggcctgcatcagcagggcgatcacgttgctgaacagaagtacggtaccggcaatgggtacggaggtggcggcggcgggtacggcggtgatgggggcggcggcggcggctacacgcccgggtactctggcaccgggacctgcgactactggaagagccacccggacgcgatcgtctcgtgcgtcgggtcgctgggcagcgtcctcggctccctgggcgacgcgtgcagcgccttcttcgggggcaagctgcagacgctgcaggacgcgctgtgcaacgcccgcgccgacggctacggcgacctcctccgcgagggcgccgcggcctacctcaactccgtcnccnccgccgccgcaggcaagtacgcctacaccacgcagcaggtcaaggactgcatcgccgccgcgctctcgtccgaggccgccgccgccgcgcaggccgccatgttcaacaaggccaactacgcctgccactattactagctagctagtcctcacagtttgccttcgatcgtctatctgcgtcgtctttccatgatgatgcatgacgacgcgcgcccgtctccttgtctggagcagtagtagtagtgatgcttgctttctttgtcgttgtttgcttccttgtctggtgcagtagtactcgcgccgcttgtttctctctcgtcagcgctacgtaccggttgttgagatgcaatcataataattgtttggctatagaaaaaaaatgcgataataattatgt

SEQ ID NO: 104690 - DNA, 781 bp, Zea mays
  Clone ID: MRT4577_26979C.1
gggtacctcgaggccggccgggaggcttttgtagcaggggattttggactatgtttccgtgcttaccccccgaccgtgatgacggtctcccattgagagagccactgcgccggacccttccgtctcatcccctgactcccccaatccaaagatgctagccacgacgctgccggcgactctccggcggttccgcgcccagacgctgacggcgaggaggatgcgcctcacggattcaacaaggtacgagtgggccagtgagactgccgaacatggacgaccacgctgataatgaagaggatgtggagaaagaggcggggctgggaaacagatgactgaataaaaccagctgtgcggatgaccaacgaggcgacaaaggcaatgtataagtggctggcatattgtatcgcaagagatcgtccaagactatgtaagagagtactgagccaagcagagagcgcgacacttgcttgacgacagagacaggatctcgacatgtgtctgagctatcaaatgaagcaagaaggagcccggtcattctcgagcatggcgtgctctttcccgtgaaggtccatggagtcttcttgattattatcctccatgagagccaccggaatcgcttgctggatgaaaaccagtcgtcatcggaagtacatgtcgctacaaatgcttcgtatactagccgtagatatgtagaatcaacatgacagatctgtgtgcagctgattgtcatagttgcgtgaatgaatgcaggatgttgcctttctgaaaaggttttcatact

SEQ ID NO: 104691 - DNA, 549 bp, Zea mays
  Clone ID: MRT4577_26980C.1
gatgacagcacatatatatccacattggttaatggatcagaatacatcccaaacgagaagcgttcatcacaaatgtgctgacacgcctcggacgggatggtagctcaagacctctggggcataactaggtggcgaagacccagggggcgttggcgacagcgttgcgcctgtggttaagcacgctttagaggggtccatgtggggaaaaaatggcctagcacgaagaatgcccatatggctaacatggttatggggctggtctagatttccttaaccttgatctacgagatggcgaccgggtcaccaccaaggtttaccgggcgggagactctgggaactggcacagaaggaagtgctctgcccgactgcgtgccggccggtgatgacctaagccctagacgagggccatgaggatgacctgacaggccgatccgggcaggaatctctcggtctcaccagcttggggttggccattgaggccaacgcccctgcgaaaataactaacaccggccttgctcccactggatccataaaggcacgcgcactcac

SEQ ID NO: 104692 - DNA, 404 bp, Zea mays
  Clone ID: MRT4577_26981C.1
ttgctgtaaaaagagaaaaaaaaaaaaaaaaataaccaaaaaaaaaaaaaaaaaaaaaaaaaaaaaacaccgaacaagaggaaaaggaataccaaaaacccccaaggcccccggcggccgggggaagatctaaaaataatcgtctccccccgggcggagggaaatggcaaactcaagcttacccaataccctctaacctgaatgggggggccctggtctccagttttaccttaactagaatcgaattacccacacaccccggtgcgcaaaataaacaacgtaggggattggcaaaaccctgagccttccccaactataacgaagtgggaggccctgccccctttccccggttggcgtaattaggaatgggacggacggaatgccatttcgaaaagaagcgaaat

SEQ ID NO: 104693 - DNA, 458 bp, Zea mays
  Clone ID: MRT4577_26982C.1
gagaagcctgagctgacttctccggaggatcttggtgttcaagctgcatcaatgctactagaagaggtggctcaaggaggtgttgttgattctacacatcaggtctgggcttttatgcaagcattctatgtatttctgaattttgcctggtgttaagctcgatgatagctgtatatcttgttatgggctcagtgaagcttagacaggagtacaggacagtgaagcattttgttcttttggactgtttgtgtctactacagacaagctgcaagttctacatggcatgtggataactagatatgatttttttcaacgatctactttctcttaaaaaatgttgtcctctcttggactgacagtgctgtacatttatgtttgcccatcttaaattgcttgttgtctatcctgatgatattccatgcataagttacagatgcttttgtttagtgattttatct

SEQ ID NO: 104694 - DNA, 283 bp, Zea mays
  Clone ID: MRT4577_26983C.1
ccttctttttttttgttggttttttttaatttttttttgggtttttgccccggggaagggccgattcccacaagaggggaacaacagccaaagacggcatgcacagaaaaaaagaaaccaaccaaaggaccccctgaccaggggccaaggggcacacgcccacccagaacgaatcccgcaggagcacacaaccataccgagcagagatcaaccgaaccaaccagaggggcaacacctgcaccagagtggcaaggacatggcatccccccggggtccccaccgg

SEQ ID NO: 104695 - DNA, 285 bp, Zea mays
  Clone ID: MRT4577_26984C.1
ggaactcgggtgagacaggttccaccacaagaaacctaacaatccaatcactcaagattttttacaacaccatataaactgagaaattggttgttacattgacatggtcaatcggattggacgcagatatttcccctgttgccaaatctacatcagacccctatggtttttgtctaatatatgaatcatccagggacatctgactgatatgcaaatctagcaggaacattcttctccctcgcctcgaaatcttgcaggaacatacttgttcgcctccgtttgggc

SEQ ID NO: 104696 - DNA, 468 bp, Zea mays
  Clone ID: MRT4577_26985C.1
ggggccgggaaacaacacaccttgggggagtgggggcaaataaaacaatgcaaatttcccattttttttttacaatacaagtacccgggcaatttttttaaaaacccccaaacaaagattttttaaaccggtcccgggtgggggcgaaatcaaaaaaattttttaccttaccccagacgggtttcaacaaaacggggggcacagcctttttttttggaaacaaattggttttgacaaccccctttttggaaacaaaaaagggaaaaaaagggtttttattttgcccttgcaaacttggtgcggtttaattttacgggggaaacctttttggtaagggggggtttgacctccgttttttttgggtttttgaggccccaatcgggttttacccaaaggtttttggtttccaacacccccagcttttttttgttgcggtgggggttttttttaaccgacgggatcctgggg

SEQ ID NO: 104697 - DNA, 173 bp, Zea mays
  Clone ID: MRT4577_26986C.1
ttttggtgtttttaaaggatatgttcgctgtcttaccatgtgagcggagtccctgtatcgagatcatcggcggtagcacacggacatccgatgggtgcttattcatccatagcgcagggcaacgggaaggcaaaatgaaaggcaacccaatccgaaccgtgcacattctctta

SEQ ID NO: 104698 - DNA, 770 bp, Zea mays
  Clone ID: MRT4577_26987C.1
ccggccgggatccatcaactccacagtctcaacgctacaacactcaagaaacacttacctctctcatcaacaactttataaacaaccgccatcatgcgtttctccgtcgccgccgcttccgccgctctcctcgccctcgctgaggcccgcatcaccggtatccaggtccccaaggagatcaaggctggtgaggctttcgaggccatcgttgttcgtgagaactacatccagagcgtcttcgactcttccatcgtcttcggctactctgccaacccttaccccggcaccatcggccaggtcctcgactctactcctctcggaaaggccgagtccaacaagattgacaacctcaaggtcaagctgaccatccccgagtccacccagaagggcaagggtgtcgtctctgctgctctcctcagcgtctacggtgcttctggaagccctactctcagcgagtacaacgtcactgtcaccatcggtgacaagaccagcaccgattacggttccagcagctaaatttccggctggtcttagactttgattgcacaactcacgagcctcatgtcattaaaccttgaacgtagtgttggaaatggagcccgaaaatggagattccatggacacggcctccctgcaatcaccaccagatttgcatatttcgagtacatatctagttagcctgttacacatagacttgatcttttatgagcaattgacatagcttttacactaaaaataatctttgcaaaaaaaaaaaaaaaaggggcgcc

SEQ ID NO: 104699 - DNA, 860 bp, Zea mays
  unsure (1)..(860): unsure at all n locations
  Clone ID: MRT4577_26988C.1
gtcctggaggacttaccataccacctattccgggtcggcggctgcgtggagcgtcgatggcggctatggatgcggtgatgcaacgcgtcctcgaccagttgtcccaaacgaagagtcgataacagacgccatgattggacgctgcagcgagctcgagcaacgaatcgaagcgtcggagcacaaggtggagacccgattcatctccctagagatggatcaggcgcggttcgaggagtggcgcccagatgtggagaagcgcctcgacaacatgttcttgaactcgccagggcgaccaggctcctggagcgcggcaccttcactgccgaagcttccaaacccggtctgattgtgtcttcggggtcggcgttcaggcgctcacctgccggattccacaacgccgacgggccggatggccactgcgtcgaacacaatcaccgggagcgtgagtttggtcgcatcccgacccaacctcacggcccggtcaagggtaagatccccgatccacacttccaaaggtttggtgttatccctgattttactacctgattttactagaccgcacgaagggcatagggacccagaagattttaagggggctatggtagtcttcctcgtctgaattttcatgtattcgatggggataatctacaattatggaagtcgagttgtgagaattactttgatacgtatgaggttgacccatcgcactgggattcgggtgacaacaatgcatttctctgggcgccgtcgtgggttggctgcaagctggnggccgcccgcgtgcgttttttgtcatggttcagagttttgtgctcaaattcatagccacttntgngcatgatcagcatcaatcccttgat

SEQ ID NO: 104700 - DNA, 386 bp, Zea mays
  unsure (1)..(386): unsure at all n locations
  Clone ID: MRT4577_26989C.1
caacgcgnntccgagcacgtatagtgtggtaataaaanaaaatccttagctaagaacttggatattagacaaaacaccagtcttcatcacgttggctgagacatagagagcactctgtaagaagccatacctttgtgctgagtggatgaattcacaaatatgcctggcagactttgctatatgagacttgatgactgtctctggcacaacaagtcatatcatttgnctggtggatgatcggaaanagattactcttcgaatgttccacatatgtttaccacgctaatgtcttattttatttnggcgaaatagcatctgcagtggccccctcgcaaattctatactaagctacagttgcctcagcagatgaaatttcaaattattat

SEQ ID NO: 104701 - DNA, 671 bp, Zea mays
  Clone ID: MRT4577_2698C.1
gagcagaacaacgcccgcattcgcccttaaacactaggtaaccaccgcgcacgacctcgagttttttttttttttctttaggtgccttttttttttttttttttgaatcaaataaatcatctcattgataaccagaaaacggggcaggcacatgatcgccgccacaaacaatggagcgtcgacgcacgtaccaccacgcgcacacctcctcctccgccgccgactccatacatacagacacacgcccgccgaaacaactcacacagacacgcgcacgacacggactccactcgcgccagacgaatcacaaatcaagcacaaaccacgcgtccagcgcggatctagcagaagaggtagccgaaggcggcggcggcgagggaggccgcggcgaggggcacggcggccgcggcgtcggaggcgggggccggggcgggggcctcggcggctgcggcggacgccacgagcgcggcggccatggcggcgacggcgacgaacttcatcctgaggccggccatctgcgagtgtgtagtgcagctagcgagtcgggtttttattgggccgcggggatctctctacgagagtatgaagcagtagaagtgtagagagatgcgcgcaggcgacgggctggctcgagccggatgccgaatgtcccggcccggccggcctcgagg

SEQ ID NO: 104702 - DNA, 3568 bp, Zea mays
  Clone ID: MRT4577_26990C.1
ggtttgggtttttttttttttttttttttttttttttttttttttttttagaactaggtcagttattccaattacgcccagtcaaaatctgtcctagttttccagcgtatacagggaaacaagaaaaaaaatccagaatcgctttgcatgaaacaaatctagactgatccatgtcagggtaacgacatgctccatcctgggagcctgataactcccctcggcatttttcttgggatacccagacccattcccgtcatcccgtgcatagaaaatgggcctactggcttccaagccacaagtcgtccgctccggttcaccattttttgatgagtagagggggctccccgtctcggccctcctgccggttgaggccagcagagtgatgagtgaacggagtcatgcttgtgagattaggctttgtcgttgtagcctccgtcgcagctttaactcttcagagagctaacagtggggccaggcacagcaaagactatgtccaagcaaggaaaaggaaggataaggctaacaattctgaacatggggagaaagaagaagagaaggaagaggttaaaacaatcagcggcataatcaactcagcccgctcgctagacgatgacgacgatgatatgctttccgagatcgaaagcctcctatcaggagacattgacatccctataccaagcgatcgcttcgacgttaatggacggtcacggtacaacaacgcttacatggctaacgaggcctctgagatagagaagctgcgcagcctggtgagggagatggaagagagagaggcgaagcttgagggcgagctgctggagtactatggaatgaaggaaatggagactgacatcgccgaactgcaaaagcagctcaagatcaagacagcagagatcaacatgctcaacgacaccataaactcactgcaggcggagcggaagaagctgcaagatgacgttgcatgtggagaggttgccaataaagagcttgaagcggctagaggcaagatcaaggagctgcagcggcagatacagctagaagcaggccagacaaagggtcagctgatgttgctgaaacaacaggtcatcggattgaaggccaaggaggaagaggcggggaaaaaggaagccgaggttcaacggaagctgaagaagctcaaggagttggaagtggaagtacttgagctaaggaggaagaacaaggagttgttgtacgagaagagagatctcattgtgaagttggatgcagctgaagggaaaataactgagagtgatgtagttgccaatgcaagagaagagataaacaagctgaggcatacaaatgaggacctcacaaagcaagtggaaggcctacagatgaacaggttcagtgaagtagaggagttggtatacctgcgctgggtcaatgcctgtctgagattcgagctccgcaattatcagactccatcagggaaggtctctgcacgtgatcttaacaggacactgagccccaaatcacaggagagggccaaacaactgatgttggagtacgcaggatctgaacggggtcagggtgacacagaccttgatagtgttgtttcttcaatgccttcttcacctggaagcgaagactttgacaacatgtcaattgacagttcttccagcagatacagcttcctaagcaaaaggtctaatctgatgcaaaaattcaaaaggtggggaaggagcaaggatgacagcagtagtttagcctcctccatcagtggctctccaaggaggaaaccaaagggcccactggaagctctaatgctaaaaaacgctggagatggtacagccataacaacatacggaaagagggatcccaatgatgtcttggatgacgaaaatgtcgcgtcctcattccaattgatgtccaagacagttgaaggttttgctgatgagaagtatcctgcttacaaagataggcacaaacttgcaactgaacgggagaaggctataaaagagaaggctgggcaagcaagagcacaaaggtttggtggtggccacagttcagctctaatttcctctccaaaaggtgcactccctccaaaacttgctcaaattaaggagagatcccctgcagctaatgctgaatccagtgagcaatccagtgacaaccaaaacaacaccctggtggtgagccagatgaagcttgccaacgttgagaagagagcaacaagagttcccagaccacctccccctcgatcaaccactgcttcaggggctaccagtattgcaagtggagtacaaacgccacgagcaccaggtgcaccacctcctccaccaccacctccagggaaagttggtggcccaccgccaccaccgccacctccaggtgctctaccaaggaaccttggtgggggtgacaaggtacaccgtgcgccggagattgtagagttctatcaaagtctcatgaagcgtgaagcaaaaagggagacatctttagggtcaatatcatccaatgtttctgatgccagaagtaatatgattggagagattgagaacagatcaacattcctcttagctgtaaaagctgatgtggagacacaaggagaatttgttgaatctctagcaaatgaggtccgagcagcaagcttcataaatattgacgacgttgctgcatttgtaaattggttggatgaggagttgtctttcttggttgatgagagagcagtgctaaaacattttgattggccagagagcaaaacagatgcaataagagaagcagcttttgagtaccaggatctgataaagttacagaacagggtttcatcctttactgatgatccacaacttgcatgtgaagaggctctcaagaagatgtattctttgcttgaaaaagtggagcagagtgtctatgcactactccgtacaagagacatgaccgtctcacgctacaaggagtacgggatcccatttgactggctgtcagattctggagtagttggcaagatcaaagtggcatctgttcagcttgcaaacaagtatatgaagagggttgcctcagaacttgatgcattagaaggcactgagaaagagcccaatagagagtttttgcttctccagggtgtgaggttcgctttccgggttcatcagtttgctgggggctttgatgcagaaagcatgaaagcttttgaagagctaagaagcaagatgaccacacaggcatctgctccaccaatatctcaaggctgaagcataaattgagcacaggattcagcacacatctggtcttacttgctggagagtgatttttagttgtgtatattaagtgtacagactacagaagagagattcaaattccggtgttgtgtcaagcaagttgtatatgccaagataatacaagtcaggtttgttcatttgtataacagttttagctcaagcataacacttttcattttgaaggttgtaactgtaaacaggcagttccagaatcacagtagagatcagatgcatagttttgcaactattttttttccagctgggcatgattttgctactacgactaataaaatgtcaaaagcatccattctgctaaaaaaaaacacccccac

SEQ ID NO: 104703 - DNA, 869 bp, Zea mays
  Clone ID: MRT4577_26991C.1
cctcgaggccggccgggccgggtttctcacattttttgatgagtagagggggctccccgtctcggccctcctgccggttgaggccagcagagtgatgagtgaacggagtcatgcttgtgagattaggctttgtcgttgtagcctccgtcgcagctttaactcttcagagagctaacagtggggccaggcacagcaaagactatgtccaagcaaggaaaaggaaggataaggctaacaattctgaacatggggagaaagaagaagagaaggaagaggttaaaacaatcagcggcataatcaactcagcccgctcgctagacgatgacgacgatgatatgctttccgagatcgaaagcctcctatcaggagacattgacatccctataccaagcgatcgcttcgacgttaatggacggtcacggtacaacaacgcttacatggctaacgaggcctctgagatagagaagctgcgcagcctggtgagggagatggaagagagagaggcgaagcttgagggcgagctgctggagtactatggaatgaaggaaatggagactgacatcgccgaactgcgcggacaacacgggcgccaagaacctctacatcatctccgtcaagggcatcaagggccgcctcaaccgcctcccgtccgcctgcgttggcgacatggtcatggccaccgtcaagaaggggaagcccgacctcaggaagaaggtgatgcccgccgtcatcgtccgccagcgcaagccgtggcgccgcaaggacggtgtctacatgtacttcgaagataatgctggagtgattgtgaatcccaaggggtgagatgaaggttccgctatcactggaccctatcgcaaggagtgtgctga

SEQ ID NO: 104704 - DNA, 799 bp, Zea mays
  unsure (1)..(799): unsure at all n locations
  Clone ID: MRT4577_26992C.1
gttgttttttttttttttttttttttttttttttttttagcagttaactaggtcagttattccaattacgcccagtcaaaatctgtcctagttttccagcgtatacaggggaaacagaaaaaaaaccagtattgctttgggtgaaacaaatgtggggggggtcctgtcagggtaacgacatgctccatcctgtgggcctgataactcccctcgtcatttttcttgggaaacccagcgggcccgccccacccattcccgtcatcccgtgcctagcaaatgggcctactggcttccaagccacaagtctttcgctctgtacttcacggccgggccaaagcagcagccacgaagaggcgttctttcctccctgctgctctaactccgggtcaccattttttgatgagtagagggggctccccgtctcggccctcctgccggttgaggccagcagagtgatgagtgaacggagtcatgcttgtgagattaggctttgtcgttgtagcctccgtcgcagctttaactcttcagagagctaacagtggggccaggcacagcaaaggtaccaatcttgttctgctctcctttccttaggtttcttctcttcatttgaattcttcattccagggtccctgttttcagactgaacgtggaagtggaaccgaacacttcgagtggttggctgtggctgcctactagtcgccggggggccgggccccgcctctcggctggcttcagcgcctccgagcgcggtggcagtgtcgccgtcgcgtgggtgaaagaactctncgcggacgctggg

SEQ ID NO: 104705 - DNA, 948 bp, Zea mays
  Clone ID: MRT4577_26993C.1
gcacgctctttctgtccctcgtgccgacgaccgaccgaccgccgccgccgccgccgccgccaaggtcttcttcaggccactcgccggcaacgagcatccaccaggaaaatgttgtgaggactgatgcaataactaagcttgctggatggacggatgcgattgcatcgagccactatggcctaccgatgatcttctcgtcaagtatcagtacatctcagacttcttcatagcccttgcgtacttctcgattccattggagctcatatattttgtgaagaagtcgtccttcttcccatacagatgggtcctgatccagtttggtgcgtttatagttctttgtggggcaacccatctgataaacctgtggacgttcaccacacatacaaagaccgttgcgatggtcatgaccatagcgaagatttctacagcagtcgtgtcttgtgcaactgctttgatgctcgttcatatcattcccgacttgttgagcgtgaaaactagggagttgttcttgaagaataaagctgaggagcttgatagagagatgggacttataaggacgcaggaggagactggtagacatgttaggatgcttacacatgaaatcagaagtactcttgatagacatacaattttgaagactactctcgttgagctaggaaggaccttgggtctggaagaatgtgcattgtggatgccatctcgaagtggctcaagccttcagctttctcatactttgcgccaccagattactgttggatcatcggtgccaatgaatcttcctgtcgtcaatcaagtgttcagtagcaacactgacttgctgcattgagtagtatgtcctaccagcggattgaattgcttgttctggggtgtgcggcgcgcgccccgttgattgttctgttgtaacttgtaatcccatattaatcgtgtaatatgaaattcaatgcaaat

SEQ ID NO: 104706 - DNA, 513 bp, Zea mays
  Clone ID: MRT4577_26994C.1
attttcgtcggctcgctcgatcctcacccggccgcttctctcatgggcatcaacttggacgtgcctaccctggacactctcttcaccaccctgaccgcctccgacgacgccgacacgaacttcacccacaacccccccgacatgcctgatcatagctgctcgcctttctttgatgcttctctgtatcccattgctgcactgattgtatagcttaaaattgaagacatacaaccgcgcttgacttcctttacaacactttcgacatctgcaccgcttcttgcagagacaagatgcacgaatgtatttcctccctttcttagaggaaacttagacaatgaagtactcatgcgtttcgttgcacatagtgttaggaattgctggtgatcgttccttatgttgtaggaagctaacatgctcatgtcttgtctctcgccctttgcaaacattgtagaacatctctatagatttgggttcctgactggggactagcatcctctgatgtcatatctgggc

SEQ ID NO: 104707 - DNA, 406 bp, Zea mays
  Clone ID: MRT4577_26997C.1
cggggcccggtcaggagactacgcacgagtgccactgttttcatggcagacttccttcgggggggggcggtgcggcccgtccccaacggtcgaggcttgcatggcagaagcaacatgctacaaggagcgggcgatcgctggaaactttgacagctgcattctctccggcaaagccacctcgccgaggagggccgagcacgcctcggagtacgacggggggggggaggaccacgtgctcccgtcatccgtaccgtacgatcagatccgtagcagcctgctacaccccgactggcactgaagccaccaccccaagaccaggctctgcggccccgcccaagtgcaccccaagctggcagctggtggcccgcacgacccaggaacagaggctacaggatgcactgttcga

SEQ ID NO: 104708 - DNA, 313 bp, Zea mays
  Clone ID: MRT4577_26998C.1
aaaaggacccccttttttgggaaaaaaggcccccgtttttcaatgaaaggggtgccaatctccaccaatgagggcgggtataacccacccggggccacaaccacccccccgggggggtaccaaccacccccgctcccttagaaccccccgccttctgtttttgatttccaaaaaaaaaggccccccccctggggcgtttcccggtagaacccggttggaaaagcccggccatccggggtataaagggttgcccaaatcggcatttggcctttcccgaataaggcgtggaacgaaaagaaaccccaccgggggg

SEQ ID NO: 104709 - DNA, 606 bp, Zea mays
  Clone ID: MRT4577_26999C.1
tttttaaattctttttttttttttttttttttttttttttttttttttttttttttttttttttttttttttttttttttttttttggcactcactggattggtttatctttttgggggtccctgtaataacaactctagcggtaacggtaccccctaaaccctatcacggtacgggaccgccaacacctttaaaactgtgggcccagttaacgccgggccgtaggagatccgagacctggcctgcaagggaaaggggttaacggggaaaacctttccctaccttttccaggggacccaatgccccccccgcgcagactgggcccgggggaaaaaaccattaaaaaacatgccttattaaacaacctctgggcccgaaaaaaaatcagtttcttttgctctgacagcttttccaaattgcaacaaaaaaaccctcctaccttttgagaaactggggaaaccctagggcctaaaaaaagcccttcggggaaattggataaacccaaccacctggcggcgattccctctgatttggcctcttttgacatacaaaggaaaacttttttcagcgcctcaggtacgagagaataacaaaatttttttttat

SEQ ID NO: 104710 - DNA, 267 bp, Zea mays
  unsure (1)..(267): unsure at all n locations
  Clone ID: MRT4577_2699C.1
cccacgcgtncgntgaattataactgccgtgctatcaggtcctctgtcttgtatataggcgcaaaggactgaggaaacgatatagcagctggtgatgtggagtacagatgcttcgtcggcggacttgcctgggccaccagcaacgagatcgctggagaatgccttcgtctactacagcgagaacctcgattacaagggcatcatcgaccgggagactggcaggtcctgcggattcagctttgttaccttatcctccttgaacttcat

SEQ ID NO: 104711 - DNA, 180 bp, Zea mays
  Clone ID: MRT4577_269C.1
ggggcccctagggtttagtccttataattttcgatggggtcctcggggggataatatattttattataaggggtgccaaccaacctattagaacggtgaactgggaggctcttcgggggaacaaaagggtcctgccagataacacactcacctaccggccggttaccaatacaggtttat

SEQ ID NO: 104712 - DNA, 584 bp, Zea mays
  Clone ID: MRT4577_26C.1
ttccaaaacaaaacagccgacaactcctctactatcatcctccggccttgcagctctccaatgcgaagaagctcaagaagcggcaggtcggcaagggcttgatgcaagggcggcgtccaagcgccaccgcaaggcggtgaacgacaacatccagagcatcaccaagccgctgatccacacggtgaacaacaggggaggggtctatggcatttcttgtgtcatctacaaggaaacccgcggagtgctcaacatcttcctcgagaacgttatccacatacgacgtgacctacagcgagcacgctcgccgtgagaccggcaccgacatggatgtcaatctacttacctcaagcagccagggaacgcacgctctacagatgctgcgggtaagacgcctccccttctgatgcttagatatgacggccgcgctacgaactgtgggactacccggccggtctactgtagatagctctgtaacttcgacccgagacgttccaggttctaccccatttgaagtaatatctatcacagagtatgtatctactgcgaaagtcactcggcctctagcgatacaaaaaaaaagactg

SEQ ID NO: 104713 - DNA, 293 bp, Zea mays
  Clone ID: MRT4577_27000C.1
atgaggtaaatatataagtgtgttgtatttgaaaaattattttaaataaagtgctttagaagaaatatatagtatttgttcataaagataaggtaattaattgtttttaggattgtctttatcgtaagattgaaaggtatgtaggaacaggtcaaactgattttttatggacacagttgggactttagaaatgaggaggtgaaaagagcggagggagcggttggtagttgtattttggggtgtggatggtgactatgtgtgggagaggagtgattggggaaactttgtttttg

SEQ ID NO: 104714 - DNA, 717 bp, Zea mays
  Clone ID: MRT4577_27001C.1
tgtcatactgccaggactcgttggtagcacattttgagtaccacaagaaagcaattacatccatcgagtggagcccacacgaagcatcatcattagctgtaacatctgaagaccaccagctcacaatctgggacctttcattggaacgggacaccgaggaggaggctgagttcagagcgaagatgaaagagcaggcaaacgcccctgacgatttgccgcctcagcttgtctttgctcatcagggtcagagagacttgaaagaagtgcactggcacccacagataccgtcgatgatcatatcgacggcaatcgacggcttcaacgtgttgatgcctagcaacatcgatacaaccattcctggcagcacagatacagcaatgccgcctgctgagccataggttaggtgtttctggtagctcatgattccaggttcatgcggtggtgagtgtagttgccatttgtcatgtgtcgacagtgctatgctgtcgtgttggagcatgatgggaaaattttgattggctggcgttctatgataatatgattaggatttaatatgtgcatgcttttttagttttaccagcaactttaaaggggtgtgggccccatcatatgtcaaattatcaaccgatggtttcgttgcatttaaaaaaaaaaaaaaaaaaaaaaaaaaaaaaaaaaaaaaaaaaaaaaaaaaaaaaaaaaaaaaaaaaaaaaaaa

SEQ ID NO: 104715 - DNA, 389 bp, Zea mays
  Clone ID: MRT4577_27002C.1
tttatttagccgtaaccgacatgattggccgagaccaatatgtgcatttttcaaccgtcagacctcagggcaacccagcagatttctaacaccgaacgagacatactcctcacctgccaggatacccagcatgtacctgcgtgtacatacatccacacacatggcctaccaactgctggttattacggggtatacaaaccatgcatgcatcatatttcacaacctgcaaggcagctgtcaatgtcacatggatattgcacagatgggaaatgatgtctacggccttcaacctctacgttttcagtacttgcacacgccatccatctgtatggtggtgggtggtcgcaagccctgggccggccacggacatcatcgacgagatctcagcg

SEQ ID NO: 104716 - DNA, 398 bp, Zea mays
  Clone ID: MRT4577_27003C.1
attttgagtaccacaagaaagcaattacatccatcgagtggagcccacacgaagcatgatcattagctgtaacatctgaagaccaccagctcacaatctgggacctttcattggaacgggacaccgaggaggaggctgagttcagagcgaagatgaaagagcaggcaaacgcccctgacgatttgccgcctcagcttctctttgctcatcaggtagtactccatatgttggcattggaatggctttcatcttttttggctgtatcatttttcttgcacaattgtgttgcttgtaaactgtgaagagtggaccacatgatgctgactgtttggtgtgagcagggtcagagagacttgaaagaagtgcactggcacccacagataccgtcgatgatcata

SEQ ID NO: 104717 - DNA, 229 bp, Zea mays
  Clone ID: MRT4577_27004C.1
ggtgcctccaaactgcatgatttcttggtttgggcaagggccagggcagaacagacccgaactgcatgatttttggtttaggcaagggtcagggatgaacagatcctgatggcctgacccttttcttttttggtcgaggtttcacccctgtaacagactgagttctagtagctcagatcctgtttgcaggggtgctggtctggtggtcttgttttgtttttgtttgttg

SEQ ID NO: 104718 - DNA, 118 bp, Zea mays
  Clone ID: MRT4577_27005C.1
cacatagctagataactgggaagccaaagacccgtctcagcgtgaccaccctaaatagagcccacacataatagccaacatgcacatcattttaaaaccgaccagatgcacatgcagg

SEQ ID NO: 104719 - DNA, 626 bp, Zea mays
  Clone ID: MRT4577_27006C.1
cccgcactcctccgccggtgtccatggccgtccaggcgcagcacctactcaaccccgccttcctgccccacgacatggggcacgccttcagggcactggagggcgccacggtcggcggcggcggctccgcgttcctcgacgagctcggcttcggcgggtgcgcgccggcgccggcgccggcgcccttcgaggtcgccgcgtttggcgacacccagccgcgcagcgagctcacctgcaacggcggcggcggcgacaacagcaagaacgcctcgctccaggtcctgctgtgacgaggcgggaggggccctgccggcgtgttggtcccgcgcggtggcggcactcgttgtccaatgagatccgctggctcccggggtcaggcggcgagctttgttgagtagtaaatgtagagatgctccaagttgcagcatagtaggctaattttagacgcagttagctgtactactggtaattggcactaacttctgttctcccctggaatatctttctggtaccttgtttctcagatgtgctagtagtatttttttttggggtagtgttggcttgttgtattaatgaggagatcggccaaagcttagatacgaaaagctatggtattctactatttt

SEQ ID NO: 104720 - DNA, 490 bp, Zea mays
  Clone ID: MRT4577_27007C.1
agctaagccaacgacctacaaatcgagaacaggcaaacggacggggactgatacctataatagcatggaggagagcgcggccaggatggccgactccacggacgcgtccattaaccccgcactgggtcatccggaccttgctcaacgggcacaaccccgctctggggctgttcttcccgaccgccgctttcatcgacttcgtcgtgactgacaacgtcttaggcgctgccaacaacgcccccccgaggaacccggaccgtgccagcgactggtatctggatgctggtcgataaccacactgaacgcaccggttccatgtgcgcctgtccgcgcgatactggcccgtgttaacgctgagtctgggcgcgcgcaagctgcggggcgtttctaacaccgagcctactcacgggagagctacacacacagagaaagagaggattgctctgtcagcaccactaaaccgtgctacgagaatgaagcaactgatgag

SEQ ID NO: 104721 - DNA, 1436 bp, Zea mays
  Clone ID: MRT4577_27008C.1
gccacatctcctccccctctcctgcaaagacaaggccgctgtccatggccgtccaggcgcagcacctactcaaccccgccttcctgccccacgacatggggcacgccttcagggcactggagggcgccacggtcggcggcggcggatccgcgttcctggaagagctcggcttcggcgggtgcgcgccggcgccggcgcccatcgaggtcgccgcgtttggcgacacccagccgcgcagcgagctcacctgcaacggcggcggcggcggcgacaacagcaacgtgtttctcccgaggaagcgtgcacgcgtcgcgcccgggttcctggatgatgcccaccagcaggggttggttctgcccctgccggtgccggtcccgcgcccacgcgtccgggtgttcgccggcgacgtgcagagcagggaggcagggtgcggcgcggcgtccaccagtggtcgggcggcggccaccaccaacggcgtcctgtcgctgctctaccgccagggcatggagatcgacgcgctggtgcggctcgagaccgagaggatgcgtgcggggctgcaggaggctcggcggaggcacgcgcgcgcggtggcggcggccgtgcagcgcgccgcggcggggcggctgcggctggcggaggccgagctggggcgcgcccgccgccgcaacgccgagctggaggagaggctccggcagctggccgccgaggggcaggcgtggctgggcgtcgcccggagccacgaggccgtcgccgcggggctccgcgccacgctggaccagctgctgcagcagcagcagcccggcgccggcgttggcggcggcgaggcggaggacgcgcggtcctgctgcttcgagacctccccgccgggccccgtcgccgacgactgcgacgccgcgtcccggggctcctcgccgccgtcgtgcaagtcctgcggaggcggcgacgcgtccgtgctgctgctcccgtgccgccacctctgcctgtgccgcgcgtgcgaggccgccgccgaggcgtgccccgtctgcggcgctagcaagaacgcctcgctccaggtcctgctgtgacgaggcgggaggggccctgccggcgtgttggtcccgcgcggtggcggcactcgtcgtccaatgagatccctgcggggccaggcggcgagctttgttgagtagtaaatgtagagatgctccaagttgcagcatagtaggctaattttagacgcagttagctgtactactggtaattggcactaacttctgttctcccctggaatatctttctggtaccttgtttctcagatgtgctagtagtatttttttttggggtagtgttggcttgttgtattaatgaggagatcggccaaagcttagatacgaaaagctatggtattctactatacttggagcttccctcgacatgtattattgtttcagcgtgacgcc

SEQ ID NO: 104722 - DNA, 330 bp, Zea mays
  unsure (1)..(330): unsure at all n locations
  Clone ID: MRT4577_27009C.1
ttttaaaatggtgcttttggggaaaaaccggctattcccacaaatggttntgaataaagaccaccgaataattcaccacattagcactggccactggagtatttagaactacagttcccatgataaaattggaccattacactacaggggaagttattggatccaactattcgggtacacctgttcaatcaccaacatagcatcgggtctgcgattgtatacagcgtcaccgggaacttggtgaccatcagtcctacacatctgacgttaagtaaaactgccaatggttagacagatttcccaaacgattctggcagacgatgaacgagc

SEQ ID NO: 104723 - DNA, 369 bp, Zea mays
  Clone ID: MRT4577_2700C.1
gcattcacattttggtttgttcgtaaacatcctaatcatacatcaggccgttcggatccattcgaaatacacacagtacagttcacacttcaggggacagtacacacgtacacagttgtagcttagtacacgaagaactgctcaagagcaaccggacgctttgctcgaccaggcacgcgggcgttcgtgctttcctctatggctgaacgcctaaaccaggcactcttaggcttagagctgtacacacactacacatcgggaagcgagaagcacacctgcgagggatgagctagcacaatatttaaaaccatgggcaccggctcactcactacactccatgtcctggaagtccgtgagcggggtccctat

SEQ ID NO: 104724 - DNA, 461 bp, Zea mays
  Clone ID: MRT4577_27010C.1
atcacgcccggcacgctgctcgaggggctgtgacttattcaacagccgcagcggttgccccccccacgagctcgggctgctgcagaaggccacgggcatcaacaccggcgctaaccggcacacaggcaccaccccggcgcggaccgcgtgcctgcgcaaggtggagcaggtcaaccaggcgggcaacctctagtacggcgaggtgcccgacacgctatggcggccagggtacagcaccctgaagaaccctacgctcgtccgcaactacaccactggagaggggtccggctgctgggacctgagcaaggaagggaggcacaacgtagaccgaaactgaaaagagtgggctgccaaccagcaggggcacgaggactgcgccaaggtcctccgccaggccaagacacgcccgggcaacaactacgaagcgtgccgaagaaaaaaccaaagctccaaggagccgg

SEQ ID NO: 104725 - DNA, 359 bp, Zea mays
  Clone ID: MRT4577_27011C.1
gtttattggttgatggtgcaatcccatacccctatcgtcggagaacccagaatccaccgcatcgcatagacgagtagagttagatttatgctgacgtaagatggtgtgcatccggcacgcgaccatcgaagacctggtggcgatgcaggcgtgctgcctgatgcggctgccgggcacctaccagacgacgttctactttgcgggcgggccatctggcccgccctgcccattcatgcacgtctgctgcggagcgggaagcgctgcctcctgcggtggatcaactacctgcgcccgaacctctagcgcggcaacttcaccgccgcggaggaggaggccttgatcaagctccacgcctcgct

SEQ ID NO: 104726 - DNA, 107 bp, Zea mays
  Clone ID: MRT4577_27012C.1
agtgaagcttgccttttcatttatctgtgaatcctctattctagcaatttggttgttgcggtccttaacgttcttacatcacattagagatataaaggatccagagc

SEQ ID NO: 104727 - DNA, 732 bp, Zea mays
  Clone ID: MRT4577_27013C.1
gcgcgaccatctgtgcgtgtgcgtgcgcgtgcgtcatgtcgttgtgttccgccgtgcgctgttcgtagcagccggatggaggatcggccggtctagacgccctcttgccccggcggcggcgcgtagaataatcggcgcggcggcgagatacgacacgacgtcaagggccggcgtggccgtgagtcggaagaaagccttgtcgcctgagcgatgcagaaacggggcaggacaggacgggacggaaaggaccgagcctgttgcccggccctgttctgttctgttctgttcatcgacaggcacgtaccggccgcggggcgggcggagaaagcgatgagcagtcaggagtgtgaagaggccctgaacgacgacgacgacgacgacgaccacgaagcatcgggagggtgatcggcgacggtgacgcggccccgccttttaatccagagggcactcgcactcgcacttgcacttgcacttgcgcccgtttaactcccggaaagtaacgcgtatccgccgtcctcggacatgtcgtgagcggcaagttgaatcggtcgatgctttttttttttgccctgatggagcgctggacgaagaaggctggctctggctagactggctgggctgcgtgaaagagaccggcagcgacggcgatgggccaggccggtaatgtgctgcggcgcaggcccaactgtcgcaggccgcgaaacgcttaatcgagaaagaagcttttgctgc

SEQ ID NO: 104728 - DNA, 374 bp, Zea mays
  Clone ID: MRT4577_27014C.1
tttgggtttttcacgcgtccggccttcttactgcaacaacagattctgccattccatctgcaatctgttttaacattggtgctttcttgagacagcagcgtgtgtttccattttacccacaaggtgtgggatacattaatgccttcttgcgacatgaacaattgctgccattctacccacagaatgtggcaaacattgttgtcttattacaacatcaacaattggtggcatgtagccaacatgctttgacgaatcctaccaccgtattgcgaccgtccaccattggtggcgccatattttagattctcgatgaattatactgttataataaagttgtcatgctgatgatacgtatagaaaatcatatgtcgatg

SEQ ID NO: 104729 - DNA, 639 bp, Zea mays
  Clone ID: MRT4577_27015C.1
gccaccatttcaaaacgaggacgagcccgctgctggtgctgtcccttcccgcgcgccggcggcgcctggccacctgctccgcgtcggatctagagcgagcgagcgtcacccgcggctctcgtcgccgtcagcgtcacccacccgtcgtcttcttgcctccgaagtcaaatcttccaccccatatcaccacagagaattccaacccatccacttccgcggcctgctgccgtccgctttatttaaaccgtccgccacggcgaccccgacgactccccccgcggcctctcccgccagctccccctcacccccgaccatccacgcctccaagcgccgccgccgcgagaccgaagccacggggaacacgccgctgaggggtggcaggggccccgcccctcgccgccgctcgtcgactccgcctcctctttctctgccggcggcggagtttgacccgctcgacccggacgctgacccgccccccaagctgctcacggccgacgaggtgaggctctgcaagcaggcgctgaaggcgctcgacaagaaggtcgggaagcccgccacgcttacccaaggagtttcgtagcctcccggatataagaacagagcttcagtcagtgcaaaaatttagtgttgctcggaaac

SEQ ID NO: 104730 - DNA, 330 bp, Zea mays
  unsure (1)..(330): unsure at all n locations
  Clone ID: MRT4577_27016C.1
atcctcctcttggattgnattggtggttgtttttgcggaggaggaacgagtggggaggatgtggtgtgggaggtacgtggatgaggaggtcgtgtgggagatcgagggccaccacctgcgctctgccgccatagccggccacgacggcgccgccttgggcccagagcaccgcattcccaccgtccaggccagaggagatgacccacatcattaaggacttccacgagcctgcgtttctggccccgatcgggctcttccttggccccaccaagtacctggccccccaaggcgagcccggcgctggcgtccgcgggaagaagcggatctgga

SEQ ID NO: 104731 - DNA, 977 bp, Zea mays
  Clone ID: MRT4577_27017C.1
gtaccctccgggttcggccgggttatcctgaatgagtcggttgaatatttctgaatatcctaggggtattcataataaccaggtttgcatgccaactaccatccaaaccatcctggtgcccatcatatcattcaacctggttacaatggttatagctacagacctccaactcgacctaacatgcctagcaacatgcaaaatattggacactggggagccaacccgggatgtccacagccatcttcagatcctcaagatcttgtaagatatatcttaggtgctttggaagttctgaagactgagaagattcccccaacagaacaatatataacagactgtatatgttatggtgatgctaatctaccaaaatttgatgttaagaaggcacttcaggttgccatgcagcatcaagctgttgtcaagaaaaagttagggaaaatgtcattatttctgagaaaagacgaagatctctggaaatgtgttaatataatggatgataatgcaaaatacccaaaagaaactctagacactgttcatgctttcatgtcttctgctccagcctatcctgagataaagagttctcaatctaggtatcaagctgctactatgttcaagaaaacatgcctgaagcatcttgcccttgctgaagtccttcaggttctgaatgtcataatcaacacaaaaaagtggttggtgccccattcttcaggttggcagccgttgtcgtttaacataatagtggctgatgctactactgccgctagtgtaaaagcttagcattggtacattatcttcttgtatcaattgaacattttgtggtcctggtgtatcctacctagcacaatgctctgcattttgccaagttgggggatattaagtagttttacacacaagatatcttagcaggagtgaaacagtaggtagccttaacctgttacattttagtgggactcactctgccaactattgggcatgtt

SEQ ID NO: 104732 - DNA, 360 bp, Zea mays
  Clone ID: MRT4577_27018C.1
agttcaacatcatcatggcacattcacatagtctaaggtatatacaaattcacatagtcccatatcattcaaatgtcgacatacaactactaaagttctatagtccaaaacaaggaaagtaaataacttaccaatcgtcacttggttggttagagttatgcccactacctcctactggactctagttggtgaagaggttgtttgcccatgaagccactacgtcgtcttgggcagatccatctccaggtgctgtaaccgccggaggacgtgtttgtaaaccctttgctgaagcgtttggttcaaggcctcaccttttctttggtttgatctgtcaggagcctcggcagaggtacttctttt

SEQ ID NO: 104733 - DNA, 1080 bp, Zea mays
  Clone ID: MRT4577_27019C.1
gaagcatctttcccttgctgaagtccttcaggttctgaatatcataattaacacaaaaaagtggtttgtgcctcattcttcaggttggcagccgttgtcgtttaacataatagtggctgatgctactactgccactggtggaaaggcttagcatcggtacattatctgcttgtaccaattgaacatgttgaggttctggtcgttggtgcaagctgcgtccgcaaaagctaagttctgttgaggtttcctagcacaatgctctgcattttgccaagtttggggttaagttgttttacacacagtatatgttagctggagtgaaacagtaagtagccttagactgctaaattttagtgggagtcaatctgtcaactattgggcatgttgaaagaactctgggcagccctggctgtggctactcctatgggtgataattgtggtggtaagatgcttatgcaatcaagcataaagcggttcagagggactatcgtcttttgttcaggcagtataccgatgcctgatgctggtggttatgatctgccctcattgtaccaagatggcttcaaaggcgtccatgaaatatgagttgacatggaggaaattttctgtagtattagactattggtatagctgcatagctgttgctattaagctactcgttgaagccttgagctacccacattatattcccagttcctacatgtactcattgcagcaagcatggatggacggaccctgtgagtgtgaagttcagtgtatccacttttgaagcatggcaacagagtctgacatgcaagcaaactgcattaaagacagtcatgctgctagctgcaaggttacctatcgtttggtggcctctattggctctgccgggaaaggtttggagttcatctaagcgccttccagcatctttgctcccacctttagatggcgggatgtttattgtaatgctggcaaactattatggtgcttcttgtaaatcttactggttgctgattctaccaagtgctcaggttgacatgttgcctgagagtaaattgtttgatgactctattaaatgcttcgatatgctgttgtctg

SEQ ID NO: 104734 - DNA, 298 bp, Zea mays
  Clone ID: MRT4577_2701C.1
attcatcctagcaggcatggattcatggacctgccaatggccagccagttggagacaggtggccactattctaccttgccagttctctgacttagatgtctccatttccttgagcctgatactaggagcctcacaggctgcagtttccctgtgtccaatgttgataagcaatgtagaaaaaccctggggccattttacttccagaaccgtccagagtgtggtatagtatctggccaacaggagcctgtggaagggactgggcttcctgtgtaacttgaggcctagctgtctacctcca

SEQ ID NO: 104735 - DNA, 2989 bp, Zea mays
  Clone ID: MRT4577_27020C.1
aactaaaccaccccaacccaaccctaccgtttcgccggcgaaaccggggctggcggcgtcggggaccatgggggagtacgcggcggtgaagacctcggtgtggtgggacatcgagaactgccatgtcccccgctcgtgcgaggcccacctcatcgcccagaacatgagctcggccctcgccgccgccggctacaccggccccatcaccatctccgcctacggagacaccaactgcgttcccaaccacgtccagcacgcgctctcgagcaccggcatcgcgctcaaccacgtccccgcaggtatcaaagatgcaagtgataagaagatcttagttgacatgttaatctgggctattgacaaccctccacctgcaaattatttgctaatatctggtgatcgggacttctcgaatgcccttcataagctagtgatgagacggtacaatattctactagcacaacctccaaatgtgtctcaagtgcttactgctgcagcaaaacatgtttggctatggaaagaccttgtggctggggaaccaccccgggcagagtccccatacataagtagtatagcaaatggcagtgtggatcattcgaatacatcgaacaacatgggttcagattcttcagacgcaccccataacagtactcaagggcagaatagcattccgggtgatcagcaaaaaggtggtaacagcaaggcagataaacaatataaagttaagcaacctcggaaaaaccagtcagacaatgtatctaagccaacaaggaccgatgaagcttcagttgatggagtatctgatagttctaaaggaagcactgctaccgagccaaatcaatcccagtcttcatcatcctcattaccaagttctgatttgcatgatgggggtggagcacaggtggatgagctgaatacacaaaaaaaccagccatcttcccagtccaaaaagccgaaaaaatctactctttcccatcaaaagagtgctcctcacgacttttaccatggtaagaagcctggtgtgtcagttgagtcttcatctaaaaatggtgctcccgatgtgactagcaatggtcgtccaaagtatcagaaaccccaatcctctcatcaaccaagacagcagaacccagtgaaccatcgtcctcatggtggatctggcaattttcaatcatcaaactcacatagaagcaactcatgtccagcaccagctgggcataatggtattcctactgcaccgttgcaattctggccaagcgggccaccttatcatggaccaccaatcaattatcctgatatgagtcggttgaatatttctgaatatcctaggggtattcataataaccaaggtttgcatgccaactaccatccaaaccatcctggttacaatgattatagctacagacctccaactcaacctaacatgcctagcaacatgcaaaatattggacactggggagccaacccgggatgttcacagccatcttcggaccctcaaggtcttgtaagatatatcttaggtgctttggaagttttgaagactgagaagattcctccaacagagcaatatatagcagattgtatatggtatggacatggtgatgctaatatgccaaattttgatgttaagaaggcacttcaagttgccatgcagcatcaagctgttgtcaagaaaaagttagggaaaatgtcattctttctgggaaaagatgaaaatctctggaaatgtgttaatataatggatgataacgcaaaatacccaaaagaaactctagatgctgttcatgctttcatgtcttctgctccaggctattctgagataaagagttctcaatctaggtatcaagctgctactatgttgaagaaaacatgcctgaagcatctttcccttgctgaagtccttcaggttctgaatatcataattaacacaaaaaagtggtttgtgcctcattcttcaggttggcagccgttgtcgtttaacataatagtggctgatgctactactgccactggtggaaaggcttagcatcggtacattatctgcttgtaccaattgaacatgttgaggttctggtcgttggtgcaagctgcgtccgcaaaagctaagttctgttgaggtttcctagcacaatgctctgcattttgccaagtttggggttaagttgttttacacacagtatatgttagctggagtgaaacagtaagtagccttagactgctaaattttagtgggagtcaatctgtcaactattgggcatgttgaaagaactctgggcagccctggctgtggctactcctatgggtgataattgtggtggtaagatgcttatgcaatcaagcataaagcggttcagagggactatcgtcttttgttcaggcagtataccgatgcctgatgctggtggttatgatctgccctcattgtaccaagatggcttcaaaggcgtccatgaaatatgagttgacatggaggaaattttctgtagtattagactattggtatagctgcatagctgttgctattaagctactcgttgaagccttgatctacccacattatattcccagttcctacatgtactcattgcagtaagcatggatggacaggaccctgtgagtgtgaagttcagtgtatccacttttgaagcatggcaacagagtctgaaatgcaagcaaactgcattaaagacagtcatgctgctagctgcaaggttacctatagttcggtggcctctattggctctgccgggaaaggtttggagttcatctaagcgccttccagcatctttgctcccacctttagggcttgttcggttattcccaatcccgctcaatccacatggattgagagctaaccgaacaagcccttagatggcgggatgtttcttgtaatgctggcaaactattatgctgcttcttgtaaatcttactggttgctgattctaccaagtgctccggttgacatgttgcctgagagtaaatggttgatgactct

SEQ ID NO: 104736 - DNA, 468 bp, Zea mays
  Clone ID: MRT4577_27021C.1
tggcttggaacctttgggctgatttatgtgcttggagataagtggtggtagtgagtagtaagttttgttggaagatgagaataaggagaaagagtggtagtcggttaaggagaaggtgcatgtggtggagaaggctgcttagtaggagacgtctaagcatgttaaggagaagggctcggcgcttttgattaatggtatggggcggcataggggtactgtttgggagcctgcggatgtttataatgagtcttgtgtgtgtcatggtgcgttcgttacgaagcgcgataattagtcggtgtggtaggtgtggtgtcggcttaatgttacgtgtaaggatcgttagacttcttatagtggttatgagcatggtcagagtgcgcctaggagtcatgatgatcggaatgttattgttagggaggttgctcctcggcggggtaaggaggaggttactcatgataaggataagga

SEQ ID NO: 104737 - DNA, 224 bp, Zea mays
  unsure (1)..(224): unsure at all n locations
  Clone ID: MRT4577_27022C.1
aattctgctcgagcttttgcctattcggcacaaacaaaaacaccgcgcggcgcaaacttatatagtgtggttatctcnaaaaaacaccatactgcatagatgacagtgctgctctccccaagctcctccctgtacctagccaaaccttatttcgtctccaagggcaaggcaacagctgcacctgtaacatgcttcaacagaccctccctgtcaatggggcctga

SEQ ID NO: 104738 - DNA, 525 bp, Zea mays
  Clone ID: MRT4577_27023C.1
agcaaactgaaatgcgcacacacgctgctagctgcggctgaaagctactaatctctgtcactctgatggatgcattccaacatggccaacctggacatctaaacaatccggccatgcggcggcaagggcttgggcaagtactcaccgaccctccggcagccgcccttaatacgacgcggatgagatgatcgagagacgctctcctatatcgccctgacgactccatcgcagtgtgatcgcacagcacctactcttcctctcacatgacgccgggcactgttataggactacaagcaccaacacagcacgcggctgtgatgctcccccacacggcctaccgccgactccgtatcctactcttgaagcgatacttggatatgctgaccatcatccttgggtactgcatcggcggcacttgaggaaggagcatcatcaacctggacgggacctctttgctcctacctacgaggaatgagaggatggtactggcactcttatacataaagaaggataaacggctcgcca

SEQ ID NO: 104739 - DNA, 766 bp, Zea mays
  Clone ID: MRT4577_27024C.1
tagtgtcttctcatccctcgcaagaatcacacacgcgctttctctgtgccgccaccaccaccagcagcaccccgtctcgctccccgcccccgacgcccggcgggacatgaagaaagacgaggaggacgccaatgccaccgtccccggcgacgacgacgcacgacgttccgcgctccccgtccgcctgctgccgctccggtgacggtgacccctacttagctctctccttcgtcctcgccttctgagtcgtcgtccttcttgcctctatggagcgagctcgccgccgccgtcgccgtcgccgtcgtcgtggtgcagaccagcggctcagcggattgttgagagccctggcggcggagaaggcgtcgtacgtgtcctggtgatgggtgcggatttggcatgcgggaaagcaggcatcgtttttttttaatttcccccctcggtggtgattgttgctagctgttgctgcttttgttgtcagttttagcccccttttttcaccttctctcttctttttgaccccccctcccaactactttgtagttttgccaatcacggttctactaagaacatatcggttatcggagagcgaaatgttcgtgcggattctgcactttttctctctatatatatatgtataaagctggctaccattcttgggcaacacgcgcgacttaactgcagctgtgcaatgctacagcctacagcagctcaattaactaactagtccaatacgaaataggagtacctttctctcatcattcttctt

SEQ ID NO: 104740 - DNA, 262 bp, Zea mays
  Clone ID: MRT4577_27025C.1
ttccggaattgaccgcatcgatccacccatgcgttacagaaaagtccgaatggcacaatgcttcttgcctatcttatgcttagagagggctttactcttgcgaaaggctgcaacttactgaacaaagtgcaccctgcagcgcagacaaacgacggctttggaaaggctctcctggcccttgacaagaagctgcatggctaggtatttatggactggcaacacaagcggccagaaatgaaggtgtgtaccatcttcaacaaga

SEQ ID NO: 104741 - DNA, 695 bp, Zea mays
  Clone ID: MRT4577_27026C.1
ctcgaggccggccgggccgggatttcatcctgagctagttatatgctacgctatatcactctcccttctataagtattctgagggaggagccatgtcctgaggagaagctccgccacctgctggttcccaccgcatgcagaggaggagggggcctccggcgagggcgactaccagaagagggagaactcccacctgcacatgcacactctcgtcgagctctgtgccatcgtggccggtgcgaacgcgctgcacgagaagcacaaggacgagaaggacccacagaacgagcctggcaccgggtcaaggaggatgcgctcggcgtcgccggcgatgggctcctgcggcgttcgcctttgccacgagcaccgctggtaacaatgactcctcgtaatacgtccactactgagccgtcgagattgctgtatccatctgctcttccagcctcgtcttcatctactgtgagccgcgcatgccttgatttgagctaccgatatttgcgtggacgcggaaactgtgtaggtcggccctcggagtgcttgtatctcgatcagatcaggacttgactaagagagcgtgcagatatctcccttctttgaatgttatcatctttcttttggtgtcgagatgtgtcctgaacaatgtgaatcttactgtcgtaatcatgacgaccttcggctttcccttttgcttatgt

SEQ ID NO: 104742 - DNA, 216 bp, Zea mays
  Clone ID: MRT4577_27027C.1
ggttttaccaaatgggtttcaaagctattgataagaaaagatggggcttcttgtcgaagggcgcggagaaggcttatgggggtaactgtctagtctcttgggaaaaggttcaacaccctattcagatgatgaggaacgtctttgggcaggtttaccggagcaagtcccatgtattacccaaacattccatgtgcatgctcccaacctgatcaaggt

SEQ ID NO: 104743 - DNA, 927 bp, Zea mays
  Clone ID: MRT4577_27028C.1
accactcacttttcatgttgaactcttgtaaataatgataaatattggtcaagcacccagcagaccggtaccacctactgatccttgaagtgcatctcctgttgcagaatatgcatgtgcatgtcgtgcacatcacgtcggtcgaggaaacagagcaagcaagaaacgagctttaaaaacagttttttcagttcagttcagtctatattatctgcaacattgcaatatctaggcataatttcacattggatcaaaggttttctttttagagcgatgaaacagaataagaagcatggcagcttgaaggaggccacagaacactagagtagaacaaaataaagaattagtgaagaacatcatcaagcagcagatttcaggaatatatgaggccttggagttgagggatggaggatctgattatcttggcaagggtattcttaagcttttggcttaaaatttgagaggaggagatggcggtcacgatcacgtgggtgaaggcgaggcagatcttcatcagccgcggcaaccccaccgtcgaggtttccacattgcagacacacaagagtccagcctgcgccaacgctcctgcagctatctgcactgaagatcaggacacgaagatcgcgagctttatcaaggctcgccatgtgcggaaggtgtattttagtgagatctccaagatgaagcattaggggggggtcaatcgacccagattttacgtgtatctaacttagtagggcacccatgatctataatttattctctgtagttgtagcaacgacctagagctgtcattctctagcacattgtgtaacatgtaggagagagatgaacacatatccccattctttctactgaaacaccagaaatagttgctcttgctccataattcgttaatctgaacttctgaagccatgccaaggcctt

SEQ ID NO: 104744 - DNA, 444 bp, Zea mays
  Clone ID: MRT4577_27029C.1
gttagttaataatctatatcaacatttggacaaagggaggtacaaaaaagttttctttatagaccataggaatcatgacatggaatgtattattaatgtgtgtacctataatgaggattatcgaagactactttcgtttcatattcatgcaaaaaacttcttcgcgaatgtggaaattaatgcttggactgtgtttacctggagtcattgaaatattccgttgcacagaaattagatttctactgaatatttgtcaagatactctgttactaagatttaactattttctacgaataaagagctcatggtaacagaacgaacacggagaaaggagcgctgaatagaactgatataaaagtcgaacatgcagttttcacatatctaactaatgttaaccaataaacactacttgattctagatggcattggaccagacacacaaca

SEQ ID NO: 104745 - DNA, 178 bp, Zea mays
  unsure (1)..(178): unsure at all n locations
  Clone ID: MRT4577_2702C.1
ggaaatggagctgcctttttttggttggccgcttgcttcgtggggcgaactttggtggtgtctcttgccctgggggccctttcnncgtgcttttggggggggggggggggctttttgtgggccgttttcccttgttcgtggccggccctttggcccccttgcgggctggctttggccc

SEQ ID NO: 104746 - DNA, 2542 bp, Zea mays
  Clone ID: MRT4577_27030C.1
tctcttaccactcacttttcatgttgaactcttgtaaataatgataaatattggtcaagcacccagcagtccggcaccacctactgatccttgaagtgcatctcctgttgcagaatctgcatgtgcatgtcgtgcacatcacgtcggtcgaggaaacagagcaagcaagaaacgagctttaaaaacagttttttcagttcagttcagtctatattatctgcaacattgcaatatctaggcataatttcacattggatcaaaggttttctttttagagcgatgaaacagaataagaagcatggcagcttgaaggaggccacagaacactagagtagaacaaaataaagaattagtgaagaacatcatcaagcagcagatttcaggtcctcgtctctttcttcagggagttttttttgtctcgctcctaggccactaaatttcttgcttgtttcgcatttatgctgaagattggtgaatctacctcgtaataacgcatggcttagtgatggaagcacccagttaagtgccattttacgaacggaatttggtcaaatatatagcccttgaactgttttgtctagcatttagtttgcaatgttttttatattattttgaagtctgttttgagcaatctattactactctataaagccctattgtaggcgtccacaagtgcaccatggttctgccatcctccccctcgcgcaatccctcattcttataaggccctattgtagcctatctaaatatttttaggattagaaaattgttttgtattggtccatcttatacttttatttaacattacaccctcattcttcttggtcttggacgactcttttcagtatcaaatccaaattcatgtttaattgcgtgttgagataatgccaacttattccatgttggcatgtgattgtggaggcatctattttactacttacaggtatgcatcttgactagctcgctgaggggaatggcctggtggatctgttgttggtttgcttgtaggtgattagctagattgtgttgtttttttggctagatgcctagatctgattgatgcgcgtatattgttgagtctgttctccacctcggcgcctgttcgaaaccttctgtttttttactgcatgaaacatattaatgcagtaaagccaatagactttactcttttatccaacgaatcatgaaacatactattaataagtgacaccatgacatgtttaatcatttcgacatgttagcaacacagggaagacaaatatgtttcatactccatatgtattagatatggtattatgggatgtcagtatctgctatttcgtttggaatgtctttttgtgatatttcagtctgtggtccagacacctttactttttgaaaaatgtcgccttctgtagttgcttcaaattccatacgttcgacatctatgaatagaaaattttgacactatatctttgaacaattgatctctgaggaatatatgaggccttggagttgagggatggaggatctgattatcttggcaagggtattcttaagcttttggcttaaaatttgagaggaggagatggcggtcacgatcacgtgggtgaaggcgaggcagatcttcatcagccgcggcaaccccaccgtcgaggtggacgtgggcctcagcgatggcagctacacgagggggcgtacccatcggcgcatccactttatgactgccagcgtcagaatctgatatacctattggcgttagaatctgatattcctattaggacacattttctgggttgtctaggcgtgctgttttttataggatactaaaggagaaaacgtaaacaaatactggtcttagatcctcacagattagtgtacagttagcacgatgcaatgcactttatggcaggagcataatatcaattggcagtcatagatgcattgcacttcatgacagttagcacgagctctgaaagtaaatagaaatgagtatcaaaatgaatcacacttgtgtagaactgcagattgaacataaaacctacttgatcatgagcacatggaagcattttttagtgaagaatttactgccatttttaagtgaagcatttacctaaccatttgcaatgcaggtttccacattgcagacacacaagagtccagcctgcgccaacgctcctgcagctatctgcactgaagatcaggacacgaagatcgcgagctttatcaaggctcgccatgtgcggaaggtgtattttagtgagatctccaagatgaagcattaggggggggggggtcaatcgacccagattttacgtgtatctaacttagtagggcacccatgatctataatttattctctgtagttgtagcaacgacctagagctgtcattctgtagcacattgtgtaacatgtaggagagagatgaacacatatccccattctttctactgaaacaccagaaatagttgctcttgctccataattcgttaatctgaacttctgaagccaaaaaaaaaaaaaaaaaaaaaaaaaaaaaaggggggggcctcgtgccgaatt

SEQ ID NO: 104747 - DNA, 1034 bp, Zea mays
  Clone ID: MRT4577_27031C.1
accgatccaagagcgagccgacgacgacgagcagcgagagagatgaggccgtccatcgtgctgttcggggactccatcacggaggaggcgttcggggagggcggttggggcgcgtcgctcgccaaccactactcccgctccgccgacgtcgtgctgcgcggctacagcggctacaacacgcgctgggcggcgcgggtcgccggccgcgccgtggccagcatcgccggcccggtctcggccgtcaccgtcttcttcggcgccaacgacgccgcgctgcccgaccgcgcctgtgcgctccagcacgtgcccctcgccgagtacaaggacaacctccgcgccatcttcgcgctcctcaagaagcggtggccgtcggtggtcgtcatcctcatcacgccgccgccggtcgacgaggacgggcgtctgcggtacccgtacgcgcacgacttctccggcctgccggaacgcacgaacgcggcggcggcagggtacgcgcgggcgtgcgtggaggtggcgcggcagtgcgggctcagggccatcgacatctggtccaggatgcagaggttccccggctgggagaagtcgttcctgagggacgggcttcacctgacgccgcgcgggaaccgggtgctgttcgaggaggtggtgttcgcgctcaaggacgccaacctcagcctggaggcgctgcccgccgacctgccgctcttcagcgacatcgacccggataatccggtcaagtcgttcgaggaccaggagtgaagaaggcccatgatggcaagacaacggcggcagcttcaagtctgggaactctattgttaattagaaaaaaaaatctgggaactgtgtcctacagtgcatggaatgttctggatggaatttttttagtcgaagcataattcttgaaatagtgtcttacgcttagcagtttgctactttgctgtataagtttgtttgaggtccattcttttgcccacattttttataatacaagcgggtttctcgacgttctaataaaaaaaaaaaaaaacacccccacc

SEQ ID NO: 104748 - DNA, 274 bp, Zea mays
  unsure (1)..(274): unsure at all n locations
  Clone ID: MRT4577_27032C.1
ttctctagctaattatctccttttgcattgnccataaatgggagcataatcaatatataaggattattttcacacacnatatantgctagttaataaaaatagaaaactagagttgtaacgagaaactctaaagtctaaaaattagagtccaaaaatttatacactcggttgaataaaaatccaatattttacatgtattttggcactactacacattcattaacatgaaatattaatttatattaattcaaaatttcaaataatgttctaaaa

SEQ ID NO: 104749 - DNA, 187 bp, Zea mays
  Clone ID: MRT4577_27033C.1
ttccaaagtcgaattaaagccttacagttaagctgcaaaccctgttcaagaaccaaaagcaacaaaacatgatgataaatttttgggaagggggctttatttccctgcggataaaaattaaactagacatagcaaaaagctcccagcagcacattcaaagaacttattcccttggaacaacctgggg

SEQ ID NO: 104750 - DNA, 273 bp, Zea mays
  Clone ID: MRT4577_27034C.1
atggctgacgccggcatcgatccgcaggtggtgcttaagcgcgaggacggtgggcgagggggcttggtggtgtgtggaggcatcagggccggggctagggctggtaggcttcgtgtgagtcgagcgagagtaggagagatggggcagttggggatgcggtgcggcatccggctggaggttgctcgcgggctgccatgcacgacaaaagcggcggatgcgactggcctgcatgagatggggattgtggcaggagcttgctcgcggatggtgtag

SEQ ID NO: 104751 - DNA, 766 bp, Zea mays
  Clone ID: MRT4577_27035C.1
ttcctctgatcatggtgcaaagccatcctgtaaggaagtgattagttcaaaatcaaagcctacaaaactacttgttgaaaaatcatcaccatgtatcaacgtggattacgaatatgtgaatttattggctgataccccaggtatcaaaagaggactcgaatctccatctgcatggaagtctccttggtatatcgatatgcacatgcactttcagggttttgtcagcccagcagacagaacttatgacgcgttaggattagtgaatcgtttaagcaagcacagtgctgctgctgcagtggaggcctgtgagatgctagcaagtggcaacacgacttctgataaggaaaacaaggataatacggatggcaaggaactagtgacaagaaaatcacagattaagatcatggccgaggcgcgagtcctggatttcgacgaatctcccacacctgcaagaacagcagataagaaacttggcagctgtcaccggagatctgttagctcacccattcttccttcccccaaccttagaagtttccgataggtacaccatatatggcatcatcgtacattacccacctgcatgtattggtgaactctattgttattactatactattatgtctccttagagcgcattgttgaaactattggagcgtttcctttctttcgttactctattgttattactattatgtctctcagcccggaaacaggcatcagtaccagtgaactgttgaaattaaattgatagaatgctgcccgatgc

SEQ ID NO: 104752 - DNA, 2510 bp, Zea mays
  Clone ID: MRT4577_27036C.1
gccggccgggtcgggaaaaactggccccagtcttttccctgtttcctcgtccggagcgaggcgaggggtgacgcaaccgagcgccgccaaccgcgaccgccttcctcacctgtgtcacctccgccgccatcctcacttcgatcgcctccgccgtcatcctcagcttgtcctgtcgcactgcttgtgccgcaccagcttgttgccttccgcgcccggctgcgccagccaggctcgtccggccctcgcgccgcttacttctattttgcccggccccatagaattcgaaccgcaaatgagacaggcgctactgcagccgtgggaaaggaaacgcaaaacaacgccaacgccgtcttctcttcctggaggcgggcctgggaaggaggtggagcgcagctggctccgctagggtttcccctgttctcggtggaggcgccgcgcctccgggacacgggctgcgtcaggtgactgctgcaggctcgttgatgcaagggaggtcaagccgtctgtgattctcttcctgaagttctatcccgatgccgtccatcacgcactacgtgctggatcgcctcctagagacacggtcgcctgttcatgtccagaaggtggttcccaagcctccgcccccgcctcctgacaaggccacaccggtgccagtgtctactgccaggacacggtcgtcgctggcatcactctatgccacgcctgagaacaccaccctgccggacttgccttcctcgttcccgggaacctggtcgccatacctcatcaaccataagaggcggggagcctcccttgccaggaccttctctcagggtgatgctgggagggaggtcagccagccaaacctccctgtgatgctgcctgctttgccgagagggtgtgaacccactcaagtccaggagcccgagtttgtgtttcagcaagcaggcaatggtcaagctgaaggtgacagtggtgtggaagaggcccccatcaatggaaaaaatgaaatgctgctgaagggcaagggatctgtgacagccaaaaatgagcacgagcagcctgagtttgagtttcaccgtggaaatcttgaagcactagtgaggcctgttaatgttggaaggcctttgattggcggagcacccaaaaatgatgagagtgacaccttccttgaacttcaggattccatgagtgtggctagcaatactgaaacttggcggaagcctagttcccctcttggaacctctgttggcacacccggtgcagaattctatgatgcatttgaagaaatatccagtgatggtggaactcggtcttcacgggccatggatgatgacctccgtgaaatgaggttaagcctgttgaccgaaattgagaggaggaagcaagcagaagaagcacttgagatatggcagaaggaatggaagaagctgagtcaccacctatcacatgttgccttatcacttccatctccaagtatagctgaggatactgatgattcaagcgtcgatcctggagctgagttgtgccagcaaataactgtttcacaacttgtagctgctgctatttcccaggattttgctcgtgctgaagttgaatcagagatggaaaccgtgattgccacaaagaacttcgagattgcaaggctgtcggatagggtccagtactatgaagctgcaaacagggaaatgtcccaaagaaaccaagaagctatcgagatgtcaaggcaacaacgcaaggggcgtaagaagcgacagaagtggttctgggcttcagttgggcttgcagtcacccttggcgccacagccattgcctggtcttacgtaactccgtcgcagccccaggccagtgcagatccaagtagtgctgccagccagtaagctactaagtaagctaggatgaagacatactcctcgttccagaagcctaacaaagatctagctatactcctatagagggaaaaaaatgctgtataagttttctctttggtgatcggccgtgatcgccgccgcaatcttgatctgtcgcttcgtttgtagaagcgttgtatggcccatctcgtagatggttgagcaaataacacaatggatgtgggcgtgtggctatggttagtgaaccatgcccgtagcccactcaagcggagtttctacaatcttcatttgttgctttgtatgtaaaaatgttgggtgggccatctccgttcaggattggctccattccaatcaccgtaaatctctgcatagatgattcatggttgagcaaataatacaaagggatgtggatatggttagtaatccatgccccccgaccccactttgatttcagagtactatggtcactcatcgtcattactcggctgacctgcctgctacaagaagtaaaaggtatgatttgaattcgtgaagtgaccaggagacattacttgtattgtatattagccatatatttctcacgttatcgaactgattttttgtttcacggtatggctggggtactaataagtgaatgtgaggtactacttattaacatac

SEQ ID NO: 104753 - DNA, 964 bp, Zea mays
  unsure (1)..(964): unsure at all n locations
  Clone ID: MRT4577_27037C.1
gnaaggaaggnaagaagctgagtcaccacctatcacatgttgccttgtcacttccatctccaagtatagctgaggatactgatgattcaagcatcgatcctggagctgagttgtgccagcaaataactgtttcacaacttgtagccgctgctatttcccaggattttgctcgtgctgaagttgaatcagagatggaaaccgtgattgccgcaaagaacttcgagattgcaaggctgtcggatagggtccagtactatgaagctgcaaacagggaaatgtcccaaagaaaccaagaagctatcgaaacgtcaaggcaacaacgcaaggagcgtaagaagcgacagaagtggttctggggttcagttggacttgcagtcacccttggtgccacggccattgcctggtcttatctaccttcatcgcagccccgagctagtgcagattcaaatagtaccgtcagtgactagagctaggatgaagatatctcatttcagaagcctaacaaacctctaactatactcctagaggagaaaaaaaaacgttgtataagttctcttttggtgatcgtccatgatcgctacaatcttcatttgctgctttgtatgtaaaaatgttgggtgggccatctccgttcaggattggctccattccaatcaccgtaaatctctgcatagatgattcatggttgagcaaataatacaaagggatgtggatatggttagtaatccatgcccaccgaccccactcgaggagttgattttgcaaaaaaaaaaaaaaaaaagcggcctttggtctgctctcatcctttacctgatttcaattgaagagataagagatgagcatattttctcacgtgctggttggctcacatatttggaatggaatcaggcacaaacaacggtaaatcatgtttggttaagttcaatcggaatcggatactacactagaaattgataccagccgc

SEQ ID NO: 104754 - DNA, 1257 bp, Zea mays
  Clone ID: MRT4577_27038C.1
cattgggacctcgaggcggccgggaggggttcgcaaccgagcgccgccaaccgcgacctccttcctcacctgtgtcacctccgccgccatcctcacttcgatcgcctccgccgtcatcctcagcttgtcctgtcgcactgcttgtgccgcaccagcttgttgccttccgcgcccggctgcgccagccaggctcgtccggccctcgcgccgcttacttctattttgcccggccccatagaattcgaaccgcaaatgagacaggcgctactgcagccgtgggaaaggaaacgcaaaacaacgccaacgccgtcttctcttcctggaggcgggcctgggaaggaggtggagcgcagctggctccgctagggtttcccctgttctcggtggaggcgccgcgcctccgggacacgggctgcgtcaggtgactgctgcagctatcagcgtgatgactttttctaaggtggaaaaggatagcgtcataggtgttccgctgggagtgtttccgaatattttggatcggaatacctctagcgtggcatatttttccctctctccgagcagggtttgctccattctaaccttgaatttataatgccaacttcgattcagagctcgttgatgcaagggaggtcaagccgtctgtgattctcttcctgaagttctatcccgatgccgtccatcacgcactacgtgctggatcgcctcctagagacacggtcgcctgttcatgtccagaaggtggttcccaagcctccgcccccgcctcctgacaaggccacaccggtgccagtgtctactgccaggacacggtcgtcgctggcatcactctatgccacgcctgagaacaccaccctgccggacttgccttcctcgttcccgggaacctggtcgccatacctcatcaaccataagaggcggggagcctcccttgccaggaccttctctcagggtgatgctgggagggaggtcagccagccaaacctccctgtgatgctgcctgctttgccgagagggtgtgaacccactcaagtccaggagcccgagtttgtgtttcagcaagcaggcaatggtcaagctgaaggtgaaagtgctgtagaagaggctttgaatggcaaaagtgtaatgctacagaaaggcaaggggtctgttatagctgaaatagagcaggagcagcctgagtttgagttttgtcaaagtcttgaagcattagtgaagcctgttaatgttagaaggcctttgaatggtgaggcacccaaa

SEQ ID NO: 104755 - DNA, 345 bp, Zea mays
  Clone ID: MRT4577_27039C.1
ggggggaaaacaaattaacaaggtccacagtttttttggcccctggagacaggaattccaaatgtaaaggggggtgcttttgcttgaaccatagcaacattttcaacataaacaggaccaggttttggttaaaaatcgtaagggatgggccccaaaacccccataaagatggggacctttatgggggactaggatatatgggccagggatggaatgggttattattcaccggccattgattgcttacccagggggaggattaaccccatgaagctacccccccatttgcatgcatgctggcggtgccctttacttacccgggtgggggcgcggccattaagcttt

SEQ ID NO: 104756 - DNA, 394 bp, Zea mays
  Clone ID: MRT4577_2703C.1
gcggggcaacatcgagctacctccagatcaaccaagtagctgtggcctaccttactccctactctcaatcaacaacaattgcttccattcaaccctctggctacactgcaccctgccttgcaactaccactatcactcgaggtgccatcgttaacactacatacgacatgacttttcttggtgccctcataccaccatgacgctgctacaaacaccgaatacatcgatacgacagctacctctgctgccattcaaccaacttgctttgacaaacctagcagtgttctaccaacaacccatcattgttggtgccctcttttagatttcttatgagttatagttcaataataaagctctttggctgatgtttgcggattcccagaaataagagagc

SEQ ID NO: 104757 - DNA, 635 bp, Zea mays
  unsure (1)..(635): unsure at all n locations
  Clone ID: MRT4577_27040C.1
ggaataatcccttcctcggcatccttcggtaattcggcacgagaccggcgactccctcctcgcgttcctctcgtcggtgagctcctgccgcctggctcgcacagccgatttgcctcagtccagatcgtgcctccttcttcctagatcgggtccgaattcggctaccctcgccaccgccctacgccaggtgccgaggcctccgccgatctcttcgccggcgaagagcggccaccagcttgtggatggaggaggaggcgctgggtcgtggtggtggtgaaaagctttgatttcgtagccgtggtggacgccgctgctaatgcccttgccgtgcctcgttggtggcgtgcaagatgtatgccgtggggaaggtgggcagcctcatctcccgcagcgtgtacaccgtctccggcccgttccacccgttcggcggcgcggtcgacatagntcgttgtgcagcagcaggacggcagcttcaagagctcgccgtggtacgtgcggttcggcaagtccaggggggttctcaagtcgagggagaaaggttgtcgacatctccgtcaatggcgtcgacgcagggttccacatgtacctggacagcaacggcgaggcttacttcctcaggaacgcggacccgaatg

SEQ ID NO: 104758 - DNA, 330 bp, Zea mays
  Clone ID: MRT4577_27041C.1
ctcggtggttaacttgaagaaacttgactacgattttttccccaacgccgggggcccaatcagttctttataagcttcctggactggatttacaacttggggaccctttttaacaggggctcgtcctaaccggaatgtaaaaaaactacatttccgggcctcgacgcctacgcctccattgagcgcgacgacattgtgttgcgatcctacatcgaccgtcgattctaccagcatgtgatcagcgagaacgactagtacaacgctacctacctgcacgccgggaagctgctctcgctttacattactggagacaaggaacgtgctatctcc

SEQ ID NO: 104759 - DNA, 1012 bp, Zea mays
  Clone ID: MRT4577_27042C.1
cctcgaggccggccgggccgaataaaccgctgcccgcccgagcggctccatcgccccgctcgcgcttttcggagtgccaaaggccgtgattccagcgctgctttttttggaattcccgaccttcttcctctcctcgtcgtctcattgccattggagctagcgtctcttgcacggagacaggcccagggaggccgcgatggcgaacctgacgaacggctttgcgagcctccaatgcgcaggggcgatgcatgtggacaaagggcacatgcaagcatcgggactgccttttctctctttcagaagatgcgcccagcttgatatctccagactaggtagcgtgcctcgtttcatgggcgcaacatctgctactgtctcccaacatcatgtgaggcagaggatcagcgccatcagagcctctactctttcctgcctgcaagacgatgccacaaaattctttgattttgtggttattggcagcggtgttgctggcctaaggtatgctctggaagtttcaaaacacggctctgttgctattatcaccaaggcagagcctcatgagagcaacacaaactatgcacaaggcggtgttagtgccgttctatgcccctcggattctgtagaaagtcacatgaaagacacaattgttgcaggggcttatctgtgcgatgaagagattgtcagggtagtttgcacagaaggtccagagcgtgtcaaggaactaattgccatgggtgcctcattcgaccatggtgaagatggtaggctgcaccttgcaagggaaggtggtcattctcacaacagaattgtccattctgccgatatgactggaagagagattgaaagagcactgcttcaagcagttcacaatgatgataacatatctttgtttggtcatcactttgctattgatctattgacatgtcagaaaaatggtgaaatctattgctatggagtggattcaatagacattgaaacccagaaggtagtccgcttcatctcgaaagtgacattg

SEQ ID NO: 104760 - DNA, 345 bp, Zea mays
  Clone ID: MRT4577_27043C.1
gaccatatcttggagccgcaggcgtcatttaataggaagggagggagagacaaacgggcgggttacccgagagagagaaagaggagctcatgccctatccgctgattaccgcccaggggagttccctcctagagagagaaccaaggtgttggccgccttcgtcgtgcaccttcggcgtttcccggactcgtacagtccgtgtgccgagcccaacatggagcgctgaacatgctcgttgcgtcatcgtgcgactggaactctactcgttgtcgaagacaatccctgaatttgtcatggggatccagcttaaaaacctttccactcccccaggacattacctgcgtt

SEQ ID NO: 104761 - DNA, 3017 bp, Zea mays
  Clone ID: MRT4577_27044C.1
cgggctcatatgccaacagtcaaaaaaccagacgcttcaccgagggagcggagcgaatcgcgtccaataattgtactggcacatgggagcgaaaaaaacctgctctaccggctccctcacccgctcgggcatccagccacaagcccagcctggcttttgtccaggccgtggccattagcgttggaggcggcgcggcggcgccaagctaccagccgctactgcctaggacgctggagatccaggccgccgccccttccgtccattactacgccatctcttcgtctcccgtcttctagtgtgcaaggtgaagttgcattcctctctccctctaatctgtagccggttgaggtgaggactgaggacgcaagtgttttttccttctgttcaagctcctgcagtctctattggtttcttgatttgaaaatcatttttaagaaaatccttgcacacgagtatagtagctgtgaaaattcaaagctcacacgtccagcccaatagcaccgtttctagaaatgttctgcacgaaaaaataaataaaatcacaagtcgagaagctcatcatcaatctatgcttgctgctttatacctgttgttttccatgttagaagagctagcactttgatttatcttttctttattattcatggttgtggcaataacagaaccatggaggaggataatgcagactggtgcgatgaaaatgttaagatagcttgtgaaatatttgctgaggaagtaagagcaaagaacagatcaggttctcacttaaacaagcttgggtacaacaatgtaatggtcaagttcaaagagaggacagggaaaacttacagcgagctacagttcaaaaataaatgggacaagctgaaaaaagattatagtaattggaaacaattgggaaaagagacaggatgtggttgggaccctaacaagaagttgtatgttgctccagattggtggtgggagaaggcaaacatacaattcaaaggcattagcaagtttaaagacaagtcacttcaaaatgcagaagaattgagtgtcatgtttgaagatcttcggaacaccggtgatgatcactgggtcccaaccagtggtgagctaccccaagacactgaagcacaaatacacgatgccatcaacattgaagatgaaaatgctagtgattgtggggaagacacaccatctagttccacatccaagagacgtcgtgtggttgtgacagataaaggtaaaaaaccgaagactacgggaggacaatggatgcaagaccagatgtctaaactttttgaattgaataagcagacaacaacatcttgtgagtctatggtcctggcaagaacacaagagacacctggatcttctataaaagatgttatgcaattagataaaggtaaaaaaccgaagactacgggaggacaatggatgcaagaccaaatgtctaaacttgttgaattgaataagcagacaacatcttgtgagtctatgttcctggcaagaacacaagagacacctggatcttccataaaagatgttatgcaattggtgaaggcatgtggtgctatagctggcagcaaagagcacttcattgcaactcaagtctttaccaaaaaaaatgaaagagaaatgttcttgactttggatacacccgaggagcgctttcagtggttatcaatgaagtatgaatggatgacaatgaacaagaagggctagttagagctactttgttatgcatttatcgtgtcattttttgtttttaccttaccaaacttatctattagaataaattcaaacattctggggaaacaattagtagaaaatttatggaaattttctgttgtgtggtgggcatgtccaaccaatatacaaggcctaaagatccaaactttcgtaatgtgcacgataggataagaaatgatccaaggatatggccacactttaaagattgcattggagccattgatgggactcatatttgtgcaaatccacctccacaagattttcttaggtacctaggaagatctggtaaagcaacacaaaatgtgatggcagttgttgattttgacatgcgtttcacctttgcctctattggtcaacctggttccatgcatgatacaagtgttctctataatgctctacaaatagatgaagatatcttcccacatccacctctggggaaatattatgttgttgatgctggatattcgaatagacctggatacttatcaccatataaaggtcaaaggtaccacgttccagagtggagaagaggcccggctcctagtggcgagcaagagatgttcaaccatttgcactcaagtcttcgcaatgttgttgagcgtgtatttggtgtatggaagatgaaatggagaattcttctcaacatgccaaaatatccaatggtaaagcaaaagatgattgttgcagctaccatgtgtctccacaactttattcgtcaacatcatgcacttgacaaggattttgagagatgtgaccgagaccaagattatgtgcccactataccagcaaggtataggaaccaagccctttctcaaagtttattggataccacatcacatgctaatgacaggacaatggacagattccgtgatgatcttgctcttgctattagttcatctagggcataagcttaaggatatttggattttattttagcctccttttgggcatgtggttgtattttgttggaccttaatgaacaataatggatgcatcctgccccgttgttccctttcgatcttcaatagaatctagaaattttcttctgcttgcttttgtctggcgcaatgggaaaatatagaaaatataaaaaaaaccctattgttttcctgttgtgcacattacagaaaatcatttttgtaaacaacaagaaaatacatcaagcaaagtgacgagatgcacaagtgaaaacaactccttttcctgtacacgaccggtgacaagatgtgccaacattgctttatgaatcactttacaactagcagccaaacgcaattcatcaa

SEQ ID NO: 104762 - DNA, 330 bp, Zea mays
  unsure (1)..(330): unsure at all n locations
  Clone ID: MRT4577_27045C.1
ttttgggggtttntatnnggggcccccaaaaagccccctttttttccttaaaattaacttaaaataaagcctgggggggggaacagttttcattgatccccaacccatggtgggtgatgcatgggtttgttggggccgggggtgaacacaattcttacaactgacccaggggggccttgtaataaaaaacacaggtgggcaacacccaacccgccagggacgaaaattaaccctttgggcttggggaaacaacacggttgtaaacaggatattttggccgcgcgggccccaccgtttaatttctccagttcccaaaggggttgccgtaac

SEQ ID NO: 104763 - DNA, 381 bp, Zea mays
  Clone ID: MRT4577_27046C.1
gggaaccgggcgcggggggcgacccgggaaacccggaccggcacccgcaggggcaccagggggcccgaaagggaaccgaaaaaaagcggggggaaaacaagggaaaagccgctccccgggggaaaaggaaaccgggcacaataacaaaaaaaaaaaaagccggaaaaaaaaaaggaaaaaccgggggggccaaaggggggaacaaacccaaaaaaaaggggtggggcaaacggcccgctttccaagaggaaaacccggcgcgccagggggaaaaaggaaaccgccaacccccggggaaagggggtatggctaatgggccccaagggggttttccctttaaccagggaaacaggcaaaaaccgatggccccccaacaacggg

SEQ ID NO: 104764 - DNA, 815 bp, Zea mays
  Clone ID: MRT4577_27047C.1
cattgggtacctcgagggccggccgggcctagcctccccccgtccggcagcagccaaaccctacataggcgccgccgcaggcggcccccccgcatcgtcgccaaagatgcagatctttgtgaagactctgacggggaagaccatcactttggaggtggagtcctcggacaccatcgacaatgtgaaggccaagatccaggacaaggagggcatccccccggaccagcagcggctcatcttcgccggcaagcagctcgaggacggtcgcacccttgccgactacaacatccagaaggagtccaccctccacctggtgctccgcctccgcggcggcgccaagaagcgtaagaagaagacgtacaccaagcccaagaagatcaagcacaagcacaagaaggtgaagctctccgtgctgcagttctataaggtggacgacaccactagcaaggtgacccgcctccgcaaggagtgccccaactcagagtgcggcgcgggcgtcttcatggccaaccacttcgaccgccactactgcggcaagtgcggcctcacatatgtctacaaccagaaggcgtaattgcttgccccgatttgctttatccgcctaccctatcgaacatccagctgttggttactcgaattgtatctcatgtagatctgtctgaggttgaaacttaaatggagcagtagtatctgtcatattgatacccctgttactgaattgatgtgatgctgagtttaattttgttttcatatctatcctttcaaaaaaaaaaaaaaaaaaaaaaaaaaaagtactctgcgttgttaccactgct

SEQ ID NO: 104765 - DNA, 705 bp, Zea mays
  Clone ID: MRT4577_27048C.1
ctagatcacacatccgccccccaacccaaaccctaccccgccgccgccgtcgccggcgcagcgcgcggaggcgacctcccaccgccgccaagatgcagatcttcgtgaagaccctgacgggcaagaccatcacgctggaggtggagtcctctgacaccatcgacaacgtcaaggccaagatccaggacaaggagggcatcccgccggaccagcagcgcctcatcttcgccggtaagcagctcgaggacggccgcacccttgccgactacaacatccagaaggagtccaccctccacctggtgctccgcctccgcggcggcgccaagaagcgcaagaagaagacctacaccaagcccaagaagcaaaagcacaagcacaagaaggtgaagctcgccgtcctccagttctacaaggtcgacgacgccaccggcaaggtcaccaggctcaggaaggagtgcccgaacgccgactgcggcgccggcaccttcatggccaaccacttcgaccgccactactgcggcaagtgcggcctcacctacgtctacaaccagaaggcttagaggtggcttgcgtttgctctgctcttttacctacctacctatcgagagtcgaactcatttagatgtgtcccgtttgtcgtttaaactgaaaccttgagtcttatgtttcctgaatatttcatcgcctactgctgtaacgcgatgc

SEQ ID NO: 104766 - DNA, 164 bp, Zea mays
  Clone ID: MRT4577_27049C.1
gcgttcggtaaaatgtattttaaaatttagctcagcagtgtttaatttatgacggtaacgtagcacgcaatgtttcttagtgttacacaacgttccctggtcaacttgagtgctacaaagaaaccctatgttcaaaacagtacgatgatatcattaaagtagcc

SEQ ID NO: 104767 - DNA, 365 bp, Zea mays
  Clone ID: MRT4577_2704C.1
caacatcatattccccactgtttaacccacatctttcaaacaacgcatcggtcgcatatcttacaatatacgatcacataactcatactccctccactccttccacatcttccccaatcataactcctacactctactctcctgcatcacactcatacatattaccatacactccaacaatcaccaaattcatcactactaccccataacccacttcgaacatctacatacatcatcaacaatataacaaacacctcttataacactaccacaattatacaatatctttgatacccattcatataactaaaacattagatcagtactaccactcctacaatacaaaagtttatcacacactccat

SEQ ID NO: 104768 - DNA, 809 bp, Zea mays
  Clone ID: MRT4577_27050C.1
gtaccctccgagggctcggcccgggccgggctagacctccccccatccggcagcagccaaaccctacataggcgccgccgcaggcggccccccccgcatcgtcgccaaagatgcagatctttgtgaagactctgacggggaagaccatcactttggaggtggagtcctcggacaccatcgacaatgtgaaggccaagatccaggacaaggagggcatccccccggaccagcagcggctcatcttcgccggcaagcagctcgaggacggtcgcaccctcgccgactacaacatccagaaggagtccacactccacctggtgctccgcctccgcggcggcgccaagaagcgtaagaagaagacgtacaccaagcccaagaagatcaaacacaagcacaagaaggttaagctctccgtgctgcagttctataaggtggacgacaccactagcaaggtgacccgcctccgcaaggagtgccccaacacagagtgcggcgcgggcgtcttcatggccaaccacttcgaccgccactactgcggcaagtgcggcctcacctatgtctacaaccagaaggcgtaattgcttgccccgatttgctttatccgcctaccctatcgaacatccagctgttggttactcgaattgtatctcatgtagatctgtctgaggttgaaacttaaatggagcagtagtatctgtcatattggtacccctgttactgaattgatgtgatgctgagtttaattttgttttcaaaaaaattaaacgcagcggctcatcttcgccggcaagcaactcgaggaccgtcgc

SEQ ID NO: 104769 - DNA, 250 bp, Zea mays
  Clone ID: MRT4577_27051C.1
cgcacaccgtcatgatcccgctctcaggtccatacactatcagtgtgacgcacttcgacaagttcatgcgatggatatccctgaccaacgagcacgccgccgggccccctcttaaccattaccatttgcagaacctgatcggcaaggcgaccggtgaactacatgctcaagatcgtgcacattcctaaaccccatgacaccctgcacgttgtgtcacttcatctactgaacccattgtgcattacaatgc

SEQ ID NO: 104770 - DNA, 777 bp, Zea mays
  Clone ID: MRT4577_27052C.1
cattgggtacctcgaggccgggccgggaccagcctccaccccatcaaccctacctaggcgccgccgccgccgcaggcggcccccgcatcgtcggcaagatgcagatctttgtgaagactctgacggggaagaccatcactttggaggtggagtcctcggacaccatcgacaatgtgaaggccaagatccaggacaaggagggcatccccccggaccagcagcggctcatcttcgccggcaagcagctcgaggacggtcgcaccctcgccgactacaacatccagaaggagtccaccctccacctggtgctccgcctccgcggcggcgccaagaagcgtaagaagaagacgtacaccaagcccaagaagatcaagcacaagcacaagaaggtgaagctctccgtgctgcagttctataaggtggacgacaccactagcaaggtgacccgcctccgcaaggagtgccccaactcagagtgcggcgcgggcgtcttcatggccaaccacttcgaccgccactactgcggcaagtgcggcctcacctatgtctacaaccagaaggcgtaattgcttgccccgatttgctttatccgcctaccctatcgagcatccagctgttggttactcgaactgtatctcatgtagatctgtctgaggttgaaacttaaatggagcagtagtatctgacatattggtacccctgttactgaattgacgtgatgctgagtttaattttgttttcgtaacaaaaaaaaaaaaaaaaaaggcccctagggcc

SEQ ID NO: 104771 - DNA, 310 bp, Zea mays
  Clone ID: MRT4577_27053C.1
gagtttgctcccaaggttatccgtatagattgagcaactcatagcaagaggaacgatcttccccactccgaatttatttctaaccctaaccccaagtgtagtgcgtgttcaaagtttataattttcagattttgtctattcacccccctaggcgactttcaaaactccatgttttatattatatgtgtataaatatataaaccgtaggggagggttggggaccaaggcccctgcctgcccccttggttccgccctgatcatgtgttactacagcacatcatttattatggaccaccagatagatttaaaa

SEQ ID NO: 104772 - DNA, 693 bp, Zea mays
  Clone ID: MRT4577_27054C.1
gccgcctcatgcggacccccgcatcgtcgccaaagatgcagatctttgtgaagactctgacggggaagaccatcactttggaggtggagtcctcggacaccatcgacaatgtgaaggccaagatccaggacaaggagggcatccccccggaccagcagcggctcatcttcgccggcaagcagctcgaggacggtcgcacccttgccgactacaacatccagaaggagtccaccctccacctggtgctccgcctccgcggcggcgccaagaagcgtaagaagaagacgtacaccaagcccaagaagatcaagcacaagcacaagaaggtgaagctctccgtgctgcagttctataaggtggacgacgccacaggcaaggtgacccggcctccgcaaggagtgccccaacacagagtggcggcgcgggcgtcttcatggccaaccacttcgaccgccactactgcggcaagtgcggcctcacctatgtctacaaccagaaggcgtaattgcttggccccgatttgctttatccgccaacctatcaagcattcagatgttggttactcaaattgtatctcatttagatctgtctgaggttgaaacttaaatggagcagtagtatctatcatattggtacccctgttactgagtaaaattttgttttcaaatccatccttacagacgattgcccttt

SEQ ID NO: 104773 - DNA, 196 bp, Zea mays
  Clone ID: MRT4577_27055C.1
tgggctggaagcgaccccagcagatggccgcgccgcccaacaaatggacaggggccgtccccaggagagagacggatggccttgattcactgcgaactgacgcgttaaatgacaaaggagaggtgggtttgatcgcgttcctttgtggattcgtattatctaagaaagctcagtgattcgaggtcatggcggtttg

SEQ ID NO: 104774 - DNA, 852 bp, Zea mays
  Clone ID: MRT4577_27056C.1
ccggccggttcgggaaaccctagactgcacccccatcccgcagcagccaaaacctacctagccgccgccgcaggcggcccccccatcgccgccaagatgcagatctttgtgaagactctgacggggaagaccatcactttggaggtggagtcctccgacaccattgacaatgtgaaggccaagatccaggacaaggagggcatccccccggaccagcagcggctcatcttcgccggcaagcagctcgaggacggtcgcaccctcgccgactacaacattcagaaggagtccaccctccacctggtgctccgcctccgcggtggcgccaagaagcgtaagaagaagacgtacaccaagcccaagaagatcaagcacaagcacaagaaggtgaagctctccgtgctgcagttctataaggtggacgacgccactggcaaggtgacccgcctccgcaaggagtgccccaacacagagtgcggcgcgggcgtcttcatggccaaccacttcgaccgccactactgcggcaagtgcggcctcacctatgtctacaaccagaaggcgtaattgcttgccccgatttgctttatccgccaacctatcaagcattcagatgttggttactcaaattgtatctcatttagatctgtctgaggttgaaacttaaatggagcagtagtatctatcatattggtacccctgttactgagtataattttgttttcatatccatccttacagacgattgcactttttgcccgtttcaccatgattttttgattcgtaggttcgatgatagtagtattgcataattggattgatttatgtttgcttgattattttaattgctactaa

SEQ ID NO: 104775 - DNA, 516 bp, Zea mays
  unsure (1)..(516): unsure at all n locations
  Clone ID: MRT4577_27057C.1
gcaagcaccggccggggggcgaggaggagaaccgcagcacaggagggcagcccacgacggcgacggcgagcgcccgcccaaggcgcccgcaccacccccccgccaccgcgcccgcaaccaaagaaccggancccagaaaagacacccgaaggcgccnggggngcccggcggggagagagatttttttacaggagggggaggcaaggaaccnaaaancggaaagcagacgagcgaagccanacagaccgacacncgcacanngagaagagcacnnncgacaaagcngagggaccacaacaaaaaanacaaggagcccnccccaggagagcgggaagagcgggaaagaagaaaccggaaaccgggcagcacaaaagacngaagagaccaagagggcgaaccacaggcacggaccgnngagaacagggacagacaacaccaggcggcggngcggcaaaaggcaccgacaagaggcngcaacnagcaggcgcggggnaccgagcggcggaggagggcaac

SEQ ID NO: 104776 - DNA, 877 bp, Zea mays
  Clone ID: MRT4577_27058C.1
actcctatgggcgattgggaccctcgaggccggccgggccgggctagcctccacccctcacccgccgcagccaatccctccccagcagccgtcgtcgccaccgctgcagcgcggaggcgaccccccatcgccgccaagatgcagatcttcgtgaagaccctgacggggaaaaccatcacgttggaggtggagtcctcggacaccatcgacaacgtgaaggccaagatacaggacaaggagggcatcccgccggaccagcagcggctcatcttcgccggcaagcagctcgaggacggccgcaccctcgccgactacaacatccagaaggagtccaccctccacctggtgctccgcctccgaggtggcgccaagaagcgcaagaagaagacgtacaccaagcccaagaagatcaagcacaagcacaagaaggtgaagctcgcagtgctgcagttctacaaggtggacgacgccaccggcaaggtgacccgcctccgcaaggagtgccccaacaccgagtgcggtgcgggtgtcttcatggccaaccacttcgaccgccactactgcggcaagtgcggcctcacctacgtctacaatcagaaggcgtaatcccatgcgccgctttgcttcacccgcctacctatcaagcattcacctgttggttactcgatttgaatatcatttagatctgtttgaggttggaacataaatgcagcagtagtttctgtcttattatattggtacctctgttactgagttgatgtggtcctggctcctgagcttaattttgttttcgtgttctatccttagagacgattgtaccttttggccgtttcactttcattcatacataggtagattatggtagtattgcatgctt

SEQ ID NO: 104777 - DNA, 1408 bp, Zea mays
  Clone ID: MRT4577_27059C.1
gcgattgggaccctcgaggccggccgggaggaaaccaggtcgcctcctcgtcgtggtactgcccggcactgggaacgcggtggggaagaaggttgacgccgtcgtccacactctcagctaaccagtgcctgggccgcggttggccacggtgggcgaccctggtggttcaccggtgcactgcgaatctaggcgggtcttcctggggctcgatctgggtctcatggttggctaatttctcaccggagcatttgggggatgggccgtgcgcctccaatttctcgccgtcgacgtgttctccgccgcgggactacagcgcgccgtgggcgggactcctgggagcttaatccgcgcgtgaggtcacgagtcacctgaagatcatcctggtacctggaatctcaagtcccaggtcaagaacaggtaccgcaggatgaggcgcttggaggatgttgtggcgagttcgtgagaggtctaggtcgtcgtctcccagtcaactttgggttgctggatcgtttcctcatatgatgtaattatttaattatttttgtacagaactcctgttatatagtaaagatgtgacattcgatccaaaaaaaaaaaaaaaaaagcggccgccgccggagaagtgcgcggttgccaagatgcagatcttcgtgaagaccctgacggggaagaccatcacgctggaggtggagtcctcggacaccatcgacaacgtgaaggccaagatccaggacaaggagggcatcccgccggaccagcagcgcctcatcttcgccggcaagcagctcgaggatggccgcaccctcgccgactacaacatccagaaggagtcgacgctgcacctggtgctccgcctcaggggaggcgccaagaagcgcaagaagaagacgtacaccaagcccaagaagatcaagcacaagcacaagaaggtgaagctcgccgtgctccagttctacaaggttgacgacgccaccggcaaggtcacccgcctccgcaaggagtgccccaacgccgagtgcggcgcgggggtcttcatggccaaccacttcgaccgccactactgcggtaagtgtggcctcacctacgtctacaaccagcaggcgtaggatgccccttctttctttcggtaaggaaactgggaagtcttgctaggtgataatcctttttgctttgttttgttttgttgcaatggtagtagtttcttggaacagaacacctgtatctcttttggcgacgcttaatttgggtttaattatatcatgtcgttatgggtcctgtcaagcactgttgaattcgaatggtttttgaattaatcttgtactatgtttttatgatgccaaaaaaaaaaaaaaaaaaaaaaaaaaaaaaaaaaaaaaaaaaaaaaaagggcggcccgatctagaactag

SEQ ID NO: 104778 - DNA, 410 bp, Zea mays
  unsure (1)..(410): unsure at all n locations
  Clone ID: MRT4577_2705C.1
tagaatttagattaaaaatttaattataaaagcattgattatgtagcattccgttgacatgtttcgcagcaacaggggtaggacattntgtatacatgtgttaaagagaagtactagataaaaatcagcacattgtcagtagttttgacaatttgagcctcgacagcgtctgcatttgctgctccaagagcctcaacctctggtgcatgttgnctatcctccgacgcacggactcatctgtcaaaacacttgacaaactacaaataaaatcaatcgatgttgtgcaccccatgttgacatagaggtcactcatcttatcatcgaggcaatgtcatccatagagacctgaagaggagcaacataagggggaaacactggtgtcatcatgttcaaacacaaaaacaacattg

SEQ ID NO: 104779 - DNA, 409 bp, Zea mays
  Clone ID: MRT4577_27060C.1
aacataaaaagtggaatacagtagacactaacagaggaccaacggtctacaagatccaagctctcggtatcctgcttgctatgtctgcatgtgttgataacgcgacctttattcattaaagctgacaagcttctataacttccctacttgcaaaataccttccataaccgactgattcagcatgcgaaaaatcagcttttcagcactatacgctacaacaagcagtcgcagaacgaaagatatctttatcacccttgcagcctgaacaatcaacaggactatctttggagcagtcatatgttacaaaccatcatggcacagtacctgcagcaactcctgctacactgtgatcaaccaataagctctgtcatacctatctccctactctcattatcaacaatttcttcca

SEQ ID NO: 104780 - DNA, 255 bp, Zea mays
  Clone ID: MRT4577_27061C.1
atgagccaccacccgatactcagatgcgcacactaagctcacaaatatgttctaactccgacctctctatcatccgatagaaccgcacatgatgatcatgaggcggactacaggccagactttcacctaccgtgccgacctgatatgcatccgacgagctgtattctcagtagtgtgctacatcaatagattctctggaacgaaagtcttcacccccaggggggaatcaagggcagggggaatttcactttcacc

SEQ ID NO: 104781 - DNA, 256 bp, Zea mays
  Clone ID: MRT4577_27062C.1
ggcagctggaaaatcctccagccaaaacaggctctgggccttcaagaaaggtatgcatgtacaatcagattcagagactagtgtaaaaaaacactgaagctctaaacttcatcatttgttgcattctagctttgctaatgtgctgtgtacctgtttccctgagtttacttcccatcagattatgattgcctcacacccactcacacccctcaattcatgttgattcaagctgccatgagaaaattaggcggattat

SEQ ID NO: 104782 - DNA, 264 bp, Zea mays
  unsure (1)..(264): unsure at all n locations
  Clone ID: MRT4577_27063C.1
caacggccaaaagccagaccgctggnaggagcaacccggagacacagaacaggggcggcaaggcgagcgccggcgccacccccaacccccacaacaaggcgcccgcagcaggcccgcccaagaagaccaccgccgccagganccggcgccacacggcaacaggcagggccagcaacggcgaagacggcggccagggcggcaaaaaggagggccacccgaggcaagacccagccaaaacgnagaacaaaaacggccaagaccagg

SEQ ID NO: 104783 - DNA, 284 bp, Zea mays
  Clone ID: MRT4577_27064C.1
aaaacaaaggcggggaaataatcactttggatgaaccttgtccgcaagtttattttttttcaagacaagcgcgaagagagggtgagcttaaccatttgcttcaaagaaaatttggataacttcgtgaaaacatgtccgatcccccaaataaattaatatgatcagcaaagccccaaagttttcattatataggaacaggcccagaaccttgcaccgagtgcagctttgataaaataaaagcccgtaattcagacagaatagaggggcaattagatcttatttga

SEQ ID NO: 104784 - DNA, 565 bp, Zea mays
  unsure (1)..(565): unsure at all n locations
  Clone ID: MRT4577_27065C.1
ccctccacaagctaactggggggggggggggtggtctaactagtttcattatccatgggggggggagaagcccaccaccaccacctgttccaccacangaagggcgaggagcaggaggagcagctcgccggcggcgggttctgtttgtccgccnagtacaccgatgcggggggggggggggtctttttctctgncnanaaccantcctctagtccttgaaggaggagaagcagctcaagcacaagcagcacctctgcgaggccggcgccntcgccgccggcgccttcgcactctncgagaagcnctaggctnagaaggacccggagcacgcgcaccgcctccagatccangaggaggtctcggcggcggcggccgtcggctccggcggcttcgccttcctctggccccccggggaggggaagggcctcaaggactcccagggggccggcggcgttgaagaagcgccactttttggggtggttggtcctcccgtgtcggcgtcccttccctggtgcttcccgtgcgtgggtgggggtggtttccggctcccgccctgttgtgcgac

SEQ ID NO: 104785 - DNA, 291 bp, Zea mays
  Clone ID: MRT4577_27066C.1
ctgtatgccaagaaggactacaacctggcgaagcacccgcagatagatgtgcccaacctacaggtgatcaagctcatgcagagctgtaagttcaaggagtatgttaggtagaccttctcctggcagtactactactggtatgttaccaacgatggtattgagcacctacgcaactacctggacctcccgtttgagatcgttcctgccacgctcatgaagtgtgccaagccacctggccggccatttggctctgaccctccgggtgaccgcccaaggggcccatgccctttt

SEQ ID NO: 104786 - DNA, 260 bp, Zea mays
  Clone ID: MRT4577_27067C.1
gcagtatgttaactctcctaatgcccgataaaccgttgcttcttgtgggattcccttcgtaacttgttaattaattaagccttcttagaattaaagtgtgggatatatatatatatatagataaacaggttaatttatacacactgtgatcctataaagcatcgtgacacgagcattcaataggatctcaccactgtatcgcaacgttgtaacatgatgcggtaatagagtaaattcttgttgaatattgggataacgat

SEQ ID NO: 104787 - DNA, 501 bp, Zea mays
  Clone ID: MRT4577_27068C.1
tatacttgggttggtgtctggcatttttttttttttggaaaaattgcgatatctccctctaaactgtgcactctcagtttttatggcagtgctttaggttgtgtatttgtgatcttgcagtgcacaagctttcctgctttattttgtttatgctgttttgttatgaattttaatacattttttgtgtgtggtatgtccatttgattcttcaaagttactgggatgtagcgaagaagttggtataattttgttactgaactgaatgttgctattgatcatatcttaccatcataaacttattcaagaaaaaaacaggagatggtgccttctccaaaatgtcctaacttgtatctatccggataagttcatatgtaccttagcactcgatagccctttctggtataatttacagcgaataagcctgatacatgggggaattttattatttgccacttttcatgttctaaactcaagaacacccattctgtggctcttttttta

SEQ ID NO: 104788 - DNA, 787 bp, Zea mays
  Clone ID: MRT4577_27069C.1
gagtacgcatcagcgtcccccggaaaccatttttgcagcttagctccagtcccctgcgacagcctacagctactcccctgtttaaagggcggtgtgggggaggaggagaagcaagtccgccagctgcagctactcctgctgcttgcttcccccctgtcgccggtcgaaggagatggggaggctactcccgctggcgctgctcgtcctcctctctgccgccgccgctgccccccagctagcgggagcagccaaggcagagcattccctaggaatcatccagaaggacatcattcagacggtcaacaagcatcccaatgccgggtggacggctggacacaatccctacctcgcaaactatactattgagcaatttaagcatatcctgggagtgaagccaacgcctccaggtttactggctggtgttccaaccaaaacttattctacatcagaaaaggaggatctcccaaaggagttcgacgccagatctaaatggtctggctgcagcacgatcgggaaaatacttgatcaaggtcactgtggtgcgtgttgggcctttggtgctgtggagtgcctgcaagatcgtttctgcattcatcacggcgtgaacgtttcactttctgtcaatgacatagtggcttgctgtgggtttctgtgtggcgatggttgtgagggaggatatcctatcttcgcatggcaatacttcgtcgaagaacggtgttgttactgacgagtgcgatccattctttgatcacgttggctgccagcatcctgcatgcgacctgcttat

SEQ ID NO: 104789 - DNA, 398 bp, Zea mays
  Clone ID: MRT4577_2706C.1
tgcattgctggtgagtgggccagctatcatctagtcaagctgtcaattttgaaactgcctgggttaaatgatgatgggggcacccaccttctcgctggtcttggagctggcttctgtggtgtgtgtgctggctgcccagttgatggggctaactctagaatgtggggagagtgatgctacacaagcagtctagattgttatgggaagacgctcaagaatgatggccctttggcattgtacaaatgctaactgccccactttgcaagactgggatctcggaatgtgcccatgtccctgacattgccacaggtggatgagctgttagtgtggaaagctacatgcatgctgagttgagttttttgaccacaggtggcgtgcaatggtctcgcagggtgttc

SEQ ID NO: 104790 - DNA, 382 bp, Zea mays
  Clone ID: MRT4577_27070C.1
gcggacgcgtgcggaaaaaaaaatgaagaaaatatatcttatgagtcgatggcacctgctaatctaaccgaacaccgaggggtggccgcatccgtagaggcacactaccgttgctcgcggtgggaggtagtggttttgggcttgcgacactgaatgtgactacactggacagagccgtgcaccgtccgactgggaaaaccttcttatgcccacagtcaatgcgctggatagaaaatccggctaatccctgcccgctgattgcgcaatacgccgcggcgtagcgccgtacaaacggatgacaagactgaactgagattgttacacgccaagtctcggagcatataaagcgcccgactttgagcaatctcgcagctaatccctt

SEQ ID NO: 104791 - DNA, 373 bp, Zea mays
  Clone ID: MRT4577_27071C.1
ttttctttttttttttttttttttttttttaccttaaaaaaaaaaggggggggttatttgaatcggggttgggataacaaatttccagtgaccattctatggaaaaggacctgccaggatggggtttaaatccccggtgcgtaagcttctatattggaaaataagcgtgggcctaacactaaggggctttaacaagggcctggaaataacatgaatgccgttttcttgatcacagggggagaaacggaactttcccacaaaacgtggtaactccaggtacgcttaacacaatgacattcctaggcccccctttgtgccgactttctccggcgcaaggggacaaaatccccccgggggaaattttcctctgaaa

SEQ ID NO: 104792 - DNA, 633 bp, Zea mays
  Clone ID: MRT4577_27072C.1
attgggtccctcgaggccggccgggggaagccgtcgtcattgctgctctcaccacatctatctccggtagtggaccacttccccgtcgtcgtccctgcgggatccgcagcctccgctgccgaaggaaccgctacagcggcagagccaatcaaggcggcgaaagaatctaaggaataaaagatgaggaaaagcgacggatgggcgtgaagccatccaattccgggcccagaagactttgccaaacaaaaagttatcgctcttcatccttgataggctacataagaaggatacatatggtgtattttcatagcctgttgatcctgaagaggcacccccgaatcctctgcatccagcacctcatcaaccatcccgctgtgaaggccggtgtctgaggtcatttcatgcaactaacaattctggtgaagagaatccaatcttaggacacaacatgcagcaattagacgtatctatcaagatccttctatagtttaacgagtattatgtttttctgtaaagcatagaaatacttattttgttaatgcataggaaatcaatgacaaaaatgtacagtttttatgaaagtcaaaatggagatcgatgatttactccaaaaaaaaaaaaaaaaaagcggcc

SEQ ID NO: 104793 - DNA, 1192 bp, Zea mays
  Clone ID: MRT4577_27073C.1
gaacggaatcatccacaagcaacacacgatcagcccaaacgaaacacgacaacccaagattgaggcgtgcgcgggacgtgacggcgaggcggcgactagtattaacctaccacaacaccaagtccccccacctccgcattttctccgccgcgatttgtcaacgtgacgtcacgccgcgcctccaagagggagccagtgtggaggacacgaggctgccggagccgcaggtgttgctccggtcagcatcggcatggcggggcggatggtgcggagctgcgtgcagacggcgctcaaggcggccaactccgtcgtggggatcgccggcatggccgtcatcctctacgcgctctggatgctccgcgcgtggtacagggaggtcgccgacctccaacaacacctcccggtcccctggtgcatctacacatttcttggactggggatctttctgtgcctactgacttgctctgggcatattgctgccgaaactgcaaacggtcactgcctctcttgttacatgaccatcgtatttgtgcttattatgctggaaggcgcaatcactatggatgtatttctgaatagcaactgggaagaggatttccccgctgacccatcaggcaagtttgaggatttcaagcacttcgtgagatcaaatttcgagatatgtgaatgggtaggcctctcagtggtggctgctcaggtgttatcgatcattcttgggatggtactcaggacccttgggcctgaccgtgagaccgactatgacagtgatgatgacgtgaccgtgcctgcaaggctgcctcttttgataaatcagtcccagcatggttcatactatgctgaacctaacacgtctggaaggagtgattcatggaaactgcggattttagacaaggtcaataactaagatcttaaggatctcatacaacagaccctccagtaaagactctctctccaaggggttcgggagaatgataagagtatacctttttcttcctctcatggagagatgattagcagcagcagtagaatagtttacacacatttgaatgcaatccaacatgcacaagtatttgagtagcatgtgacttgaccccccctacaaaacccccacaatgtaggggaaggatgtttattgtaccaaaatgtttcagaaaagagataaagggcatgaccggtggtgccttcactgacc

SEQ ID NO: 104794 - DNA, 719 bp, Zea mays
  Clone ID: MRT4577_27074C.1
tttttttttttttttttgaacgccagcgaggaacactcgcatttaatgtgcatacctaccctacacagtgacacatgagcacaacaacaacaacaagacagcagtcgcgttcaggcgcaacatcatgattacgcatgcgccactatgcgtacacgccgcctgccatacctggatggaacatcaaacacgacggaatattataccgggcctcaggcgcaaaactccgcctcgcccaacgctgggcttgcccttgggcaccatctccgcctcgcccgacgctgagcttgccctcgggcaccgcctccaccttgctcgagctaggcctcggctacctgcaccaccgcgaaccccgcagacgaccactctgttaactgtggcacacgtcaggaaggactcaaccatcctcgggaagactttcgcctcgtccgagcttggctctgacctcgataccttgtgaggggttaatgaaaatttgtggaatgagatgggatgccaagactccatccagtggatgatgattttgtgaagcctgcgatgacgatgttaagtttgcaaatcccagtacgagtggattttttttccaattttcttctattttcagaaactctatttttaagtgatttatattttctcaagagaaaataaactaaatttcattgagaaaatagaaatcgggttccaaactagcccatgtgaggaatcccaggtgttagctgtcg

SEQ ID NO: 104795 - DNA, 2066 bp, Zea mays
  unsure (1)..(2066): unsure at all n locations
  Clone ID: MRT4577_27075C.1
gcgccgtctacttttttcctcccgcgacgccaggtccccccccgccgccgctgtgtctccgccgcgctttgtcaacgtgacgtcacgccgcgcctccgagagggagccagtgtggtggaggacacgaggctgccggagccgcaggtgttgctccggtcagcatcggcatggcggggcggatggtgcggagctgcgtgcagacggcgctcaaggcggccaactccgtcgtggggctcgccggcatggccgtcatcctctacgcgaggcacccccccccgcattttctccgccgcgatttgtcaacgtgacgtcacgcccgcctccaagagggagccagtgtggaggacacgaggctgccggagccgcaggtgttgctccggtcagcatcggcatggcggggcggatggtgcggagctgcgtgcagacggcgctcaaggcggccaactccgtcgtggggatcgccggcatggccgtcatcctctacgcgctctggatgctccgcgcttggtacagggaggtcgccgacctccaacaacacctcccggtcccctggtgcatctacacatttcttggcctggggatctttctgtgcctactgacttgctctgggcatattgctgccgaaactgcaaacggtcactgcctctcttgttatacctatggttaattgctaaatacatggagctacatattgtctgatataccagctgccacttggggtttgcttgttgaatgaggcttctgctggaggttttcagttaggtgcagaactacacttcttttttctgggctatataattatttatacatgagatgcaagaaagaactgagttgatattgagagtcctgatctcaaattgcagttacgttctttgagttctgtgatcttttgtgcagtgagacctgacgttgatattgcgtctctttttccttaacctgacaacgtagtacatgaccatcgtatttgtgcttattatgctggaaggcgcaatcactatggatgtatttctgaatagcaactgggaagaggatttccccgctgacccatcaggcaagtttgaggatttcaagcacttcgtgagatcaaatttcgagatatgtgaatgggtaggcctctcagtggtggctgctcaggtgttatcgatcattcttgggatggtactcaggacccttgggcctgaccgtgagaccgactatgacagtgatgatgaagtgaccgtgcctgcaaggctgcctcttttgataaatcagtcccagcatggttcatactatgctgaacctaacacgtctggaaggagtgattcatggaaactgcggattttagacaaggtcaacaactaagatcttaaggatctcatacaacagaccctccagtaaagactctctctccaaggggttcgggagaatgataagagtatacctttttcttcctctcatggagagatgattagcagcagcagcagtagaatagtttacacacatttgaatgcaatccaacatgcacaagtatttgagtagcatgtgacttgaccccccccccctacaaaacccccacaatgtaggggaaggatgtttattgtaccaaaatgtttcagaaaagagataaagggcatgaacggtggtggtgccttcactgaccaaagacagaaatatttgttctccccccaacgggagattattacacagcggtggcgcacaaaacgaagctacccagccaccgccgaaagcgcttttgaattttcctgtggcagttaaaggttgctcctttgggatgggggtgatgggcacggcagatttggctacagttagtgacgcatgacagggaagaagccaccatcctatgaatccctctagtggacgctagtgctanttcggtgggcacggcgcggtgatcggcttccgtgttgctgctttggacttgtacaccagaggagatcttggtggcggctgcaatgtggcgtcagatcgggacgcatgatatgatgcaatggtcggcctaactcgaaagtaatcccgcgggtagttgattggggggggcaagagcactgatgaaggatatacaaaac

SEQ ID NO: 104796 - DNA, 548 bp, Zea mays
  Clone ID: MRT4577_27076C.1
ttttttaggggtggggccgagccagccgccaccaggtggcagagtctttcgtcatctcttctccggcgaagaacccccagtcgcccaccagatcaccttgttaaactttgttgaggggtgatggcggccttctttcgcaaacctgggggtgtttttttttttcttaaaaagggttgatgagctaccttctcagctcgcagcgtacactcactggcgtaccaaggcttccaagggatgtactctggctggtctacatcttcggttttcgggctggcctccctcagtccaaggtatcatccaaccgtaggcaagggtgggttctaaccaccattggatgccgcctcagtgcaggcgctgagcgagaacttacctggcagaggagccacagggtgctgaagggttggaatccctcaggcagtgtcccttcgagccccaacatccaagatgcttgcgtggaagcgacaggcgcccaggttggctgagagagggaccgacgtacgactgatggttgaacctttcttgagtgatggagacccggaagatgacga

SEQ ID NO: 104797 - DNA, 1081 bp, Zea mays
  unsure (1)..(1081): unsure at all n locations
  Clone ID: MRT4577_27077C.1
cattgggtacctcgaggccggccgggatttttatatgatcacgttgttggagatgctctcacacagacacagtccgcagtccacacgcacctcttccttctcccgccggagggcgcgccgcggaagacgccaatgagtttggcccggtccggtccgttggctccactccatgtaggcgcacgggagacgcctgcctgatcctgcaatgcaatccgtcgccggctgctgatcaggcaagctcctgattcggagccatttcgcgggtgtcttgggggggccatgcccatcgccgtgtttcgtttcctgctctgcccgctttggccgtgcattaatatccgcttccttgtgatagtcctccccttccgtcctctctctctctctctcttccacctcctctcctctcgctcagtcgctcgtcggctctgttcttgggagtgcctgccagtcgggttgcgttgcggcagcacaaaaaaacccttcttggacagcatctgcctgcgccggtctgatgggcttgggttgcttcgggtgcttcgcgccggaggtggatgaggacctcaagccctccaagcccgacgactcgtcagggaccgatgcgaggaggaaggtcgcgccggatgtggccaacggctacgcgcacagcttcaccttcaaggacctgcttgtcgctaccggctacttcaaccacgccaatttcatcggagaaggtgggttcgggaaggtgtacaagggcaagatcaacggacagatggtggctgttaagcagctcactcaagatggcgtgcaggggaggaacgagttcctggtcgaggtgctcatgctgacaatgctcaaccatcgcaatctcgtcagcttggtcgggttctgcgcgcagggggacgagagactgctagtgtacgactacatgccgttcggaagcctggagagccatctgtttgacgtgcctctcggcaagaaaccgctggactggaacacgcgtgtgaggatagccgtgggagtcgcggaagggctctcttacctgcancacgtagccgatccgcccgtcatctaccgcgatatgaaggctgctaacatcctgctg

SEQ ID NO: 104798 - DNA, 331 bp, Zea mays
  unsure (1)..(331): unsure at all n locations
  Clone ID: MRT4577_27078C.1
ggtgccggattcccgggaattgcctgaaattatgatatattgaatttccctatgttgtttaaaactacatttaaactttgtttaaaccgtttaaaagttaaaacttacccatgagcgtttcaacgtttcgtcgttttaataaccttgattaaaagtgtaggcattggtgagtacaaacctaaggttaaaagaagatattttgaataaaagtgtttgtatttgccaaatggcttatgcttttagttgagataggtagtatatcaaagttcagggcatcacatagataagaacgaatttgctccgtgtgcaacanaaagctcgtttttacact

SEQ ID NO: 104799 - DNA, 249 bp, Zea mays
  Clone ID: MRT4577_27079C.1
gttgattgcaatcttgcttttggtccctgagtttgtgtaaacttgaaaaattgtctctgttgtctgcttggtcatcttgaacccttattcttggacagtagaccagaatgatcacaccattttaatttcataattgtaatttattagattacctgcattctgttacactcgtctgctattttgttcactcctcaaatgataaatgagattgccacttttcaccaacatcctataggttgaactcgcaca

SEQ ID NO: 104800 - DNA, 1572 bp, Zea mays
  Clone ID: MRT4577_2707C.1
tcagacttacaagccacccgagatgtatgggccttactatgtgaatgcacatccttacgcattccacgataaaacatctcgcgctgtgttgattggcattgtgactggatctgttctcctggtcgtggggctcactctggttgtattttacgctgtaaatcaaaagaaacgggctcagaggcttgtgtccatcaacaatccttttgcgtcttggggatcattgggagaagatattggtgcagcaccacaactgaagagtgctaaattcttctcattggaagaactcaagttatgcaccaatgatttccgagaaattaatgcgattggagctggaggctatggaacggtttaccgaggaaaacttccagatgggcagttagtggcaatcaagagatccaaggaagggtccatgcagggtggccttgagttcaagacagaaatagaactcctttccagggttcatcacaataacttggttggactggttggtttctgctttgagaagggcgaaaagatgttagtttacgagttcatacctaatggaacactaagcgaggctttatatggtatgaaaggaatacaattagactggagcaggaggctcaagatagctttggattcagctaaagggctagcatacctccatgaccatgccaatcctcctatcattcacagagatgtgaagtccactaacattctccttaatgagaagatgaccgcaaaggtttcagactttggcctgtcgttgctggtaacagacagtgaggaagggcaactatgcacaaacgtcaaggggacactgggctacctggacccagagtactacatgacccaacaactcacagcaaagagcgatgtctacagcttcggcgtagtgctcctagaactcatagtgggtaagccaccaatacacaacaacaagtacattgtccgtgaggtgaaaatggcactagacgaagacgatggcacgcactatgggctcaaggatgtgatggaccctgttcttcagaaaattgggggcctctttggcttcccacggtttctaaaactagcactgcaatgcgttgaagaggtggcaaccgcccggccctcgatgaacagcattgtgagggagattgaggcgatcatgctggacaatgggctcacaccgggctcaatgtctacgagctcttcattcagcattgaatcaagaacgatgaaggttggacctaagcacccatactccagttcatccatgtcaacctcgacgtttgatatggatagcagggcctttgagtacagtggggtgttcccttcttctcatggtagcttgaagccctgaagatcagaacttttggactccaacaatctgtacgagctgttatatatgtttcagtaggactgtacagaattgatgaactttgattcgttttgcctagagagacaaaagtatcttttggtttttttctttttaaagaagagatgtatataatattggccaaaacttttctccagtgatattgaagcttaggtgaggatgaaccaattataatgaactctcgagaacatgataagtactccctgtgtaattat

SEQ ID NO: 104801 - DNA, 270 bp, Zea mays
  Clone ID: MRT4577_27080C.1
cctcgatttcgaatttggcatagagaaacatataacagcttaagtacgctagaacgggaccgacaggaaatttctctcgagtggaattatttaaatgagctgcacgtgatgctacaacaaagtgattgggtaatggctggttacaacgaacagaatagtgtgggcatacaatgcgttgactgcagactaattaataaagaaaaaggttaaacagaccgtaaaaacatacaattgtggagcctcaatgtagactgagacaatcggggaaaa

SEQ ID NO: 104802 - DNA, 700 bp, Zea mays
  Clone ID: MRT4577_27081C.1
attgggtacctcgaggccggccgggccgcccgcagtcatccccgacaagagccgccgccgccgccgcaaagccgcttcaacgccgtcactcctcggggcgcaaccatggtggccgcaaagaagacgaagaagtccacggacaacatcaacaacaagcttcagcttgtgatgaagagcggcaagtacacgctcggctacaagactgtcctcaggaccctcaggaattctaagtcaaagctagtgatcattgctaacaactgtcctccgcttcggaagtctgaaattgagtactatgctatgctggctaaggtgacagtccaccacttccatggaaacaatgttgaccttggaacagcctgtggaaaatacttccgtgtctgctgcctcagcattatcgatcctggtgattctgatatcatcaagactacaccgggcgagcagtaaggatgccacaacagctgtactcggcatctgaattcttagtagctgatgattttgatgtacttgtcttttatcgtgttccgtcagaatttatagagttcttggcaacattgtgtggattgaacatttcgttccagacatttgctaattgttgaatggatctcttgccggatgtgctcggattacaacaaaaaaaaaaaaaaagcagcctttatgtggtgtttggtttaagtaatgactacatccaaattgagatggc

SEQ ID NO: 104803 - DNA, 826 bp, Zea mays
  Clone ID: MRT4577_27082C.1
catgctccacccgaccaagtacgccgccatgctcgccgagaagatgcagaagtacggcgccaccgggtggctcgtcaacaccggctggtcgggtggcaggtacggcgtgggcaagaggatcaggcttccctacaccagaaagatcatcgacgccatccactccggcgagctcctcaccgccaactaccagaagaccgaggtgtttggcctggagatccccactgagatcaacggcgtgccgtcggaaatcctcgacccgatcaacacctggacggacaaggccgcgtacaaggagaatctcctgaggctcggcgggctcttcaagaagaacttcgaggtgttcgccagctacaagatcggggacgacagcagcctgactgacgagatcctcgcagcaggccccaacttctgaactaaagcaatggatccggatgaataaaacgatggtgtgtgtgcgtgggtgcgtgtgaagatgattacgacgacgacgaaaaaaaaggtgttggatcgatgagccaacatagtaatagattagctgggtatattgtcatgggtgcgtctggtctctggtcttgttatctataaagctgtctcaagcagctatcatattctatttcaaattctattctgtaagcgtgtagttcaaaacaatgctttacacaaccatatgcacagtctatctaaggttggtctgttctatcagcttgttgggaaaagtttgcgtgtgcttgtatcttgccccctgtactctctctggtttctgaatttgaatacggaacagcttgatcgcgatcaaaaaaaaaaaaaaagcggcccctcgagctca

SEQ ID NO: 104804 - DNA, 368 bp, Zea mays
  Clone ID: MRT4577_27083C.1
ctgcaccgcgtacgtacgcgaattcggctcgagctgcataggccccccactctttttcctgccctccgggcatactgacacaggggtcttctacatatacgtgagcggcaagaacactgctgccaatgtgcaggacacgacctacgccgaacaggtccaaaaacaccatgaggagaagctcttcctatatgcatgcccgtccactgcttgctcgtgcttatgatgcttaacgacctgtctgagcggtctccagggaatacgctgctactgctaggactctcaggagggcacatccttccattaaaatggagaggcgaccattcgggacccccaccacgctagaagaatctatactcatatgctcgcac

SEQ ID NO: 104805 - DNA, 677 bp, Zea mays
  Clone ID: MRT4577_27084C.1
ccggccgggatctcatcttcgtctgtgttcttgggcgtacgcggacacagccccgatccgaatcgtcctcctcgcgagcctcgtcgatcccccactcccctcccctcgcttcaaggtaactgcgatcatccatcctcccgcttccactcccccttcacctcctctgtttgctacgtatacgaacatacgatttattacgggttatatgggggcttcgattcccagatctggccatctattatcgtagctccgagtcctcgatctagcaattgtgggatatgcttgtaagaggctctgagatgggttgggttgggttgcgctgtgatgattccaacaggctcgtttcttagggttggatcttctcgtggtttcctttttaattaaataagtacctgatgcagaatggtgcgtcctattagatggaaccttgatcttgatgcatcttcgatgttcctagctaggctaggtctgcttgtctggttcgtcagaccggcttcgttgcttttgtcctcgttgcttttggcctcgttgtaaggtccatccagatcggagtagaatcgaatgatttattatacgggagctgctggtctcattagatttggatctgcatgggttgaacatatgtattcataattaatatgggggatacgtactagtttgctgggcttattttttta

SEQ ID NO: 104806 - DNA, 273 bp, Zea mays
  Clone ID: MRT4577_27085C.1
catttgtaagctaggtgggcttcaacgacattaaaaataaataaataaatgtatgtaactactatccaaatttctcatataattttatttttcattatatatttacagtataataaacatactcgatacattcacacaaccatcctagtatataaatctgaactgatataaaactaaattaaaatatacaaacctatctctttaaaaaatcaaaacaaacatacacatgcattctacaatatatcattaactaatttaaatccaaatacaata

SEQ ID NO: 104807 - DNA, 751 bp, Zea mays
  unsure (1)..(751): unsure at all n locations
  Clone ID: MRT4577_27086C.1
ccggccgggaacctggtcacgggctcagggccgcgcccgaacttcacacgaccggaccaattcgcatcggcatcgaacacctctgccctctgtaaggagacccaaccccaccgcgcgcatccatgcccccaacgacggcggtgcgtcgggctccctcgccgcacgccgcgggcggagcgaggctcaccgcggagcaagcctctggtccgtgagaagcatgtctccgcaggaggcacggcaacgcgatcggtagattgcaacggcgaagaggaggttattgtgctgttccatatggctgattatggaagttaatggtggttgagtgcaagaaaagaagtataactaacactgtaacgatcaaggtatacagaaacagagctattagcactagtgatgaaaacagtctcatgagtcgtgaaaggtagcttctacctccctcatctattatatgatttcctggaagactgctaacaggcggcaagcttcaaagatcatgttcacattgccgtatcctttcttaatcggcgctgtccttgtagatttacgtgaggaacgtggacattgagctatattatagttggaatcttcatgtttaatccttttacttaatccaacatgatactatcttgtagaaggaagttctcattagtggatgacaaatgatcgcaagagtttcttgtggctggcgccactgtgtgtcccaggttcagggtgcttttatgttttgtgncaacagtttgggttgtagttg

SEQ ID NO: 104808 - DNA, 286 bp, Zea mays
  Clone ID: MRT4577_27087C.1
cgcagatctgatgattgcactgtagcatgtgcatacatggatgccaagacgttggtcaagctcgtatgcaccatcactgacctcaaatcagagcttcatgctgcatttcgctgtgctccagatgctgcagcagtcgctctccacgtagttgagttattcctacacaacaagacatttgttaggaccaacaaggtctgggcaaactgtgttgagctagttccaatggtacctgtctttgttaccaagccttctgcagacacgactgagcaggccaagcggatggcta

SEQ ID NO: 104809 - DNA, 396 bp, Zea mays
  Clone ID: MRT4577_27088C.1
aaagaatgacgggtactagaatgtgaccttgcttacgcaccactaccctaccgacagaaggactgtgctgaccttggggctggacgagtctaacctgatcagctggaccctctggaacggtggaaacaagttcttgaaccaggtcttcagggcttgcaacaccaggtctaccgacttctctgagtacacgacctaccccaggaactccttcttgcgctgactcattactaccttgtgcaagaatgactccatatttcacaacggggagattacttctctaggctctcaccattttctaggcctgcggcgccatactgaccaccaatacaggacgactctcggcgctgcccactgtcttcaccttctcatacctaatctctcatggcatatatatgg

SEQ ID NO: 104810 - DNA, 484 bp, Zea mays
  Clone ID: MRT4577_27089C.1
atgaacagtgaataaaggggacagacagggaggacagcgctagacagaccgagagaaagaaaataaacgcgtcttcttcctctcacttccaagggtgatgccttccacgaagaggagatcgcgcgaccgtgatggcagcaatgctcgacttcgcccatcttcccacgctcgaacaagagcctcccccaactcctcccgtcaacggcgccacggcgcaaggagcaccaccacccttcttctccttccttagacgctgtcagacttctcacgtggtgcaccccctctccctgaaattcttatatacataggagggagcaaatatgggattctaggatgcccacgtcactatttttcaacggatcaacttgattgtgctatgaattgcctattagctagggagtcatctttttttgttctagcctctgaaataatgtttacagcttggaaccgaagtatgcttgacaaatgtaagcagaatattgtt

SEQ ID NO: 104811 - DNA, 551 bp, Zea mays
  Clone ID: MRT4577_2708C.1
ccgggtcgcccacgcgtcgatgttgtgagtttgatcttgagaggaactataaagtgtccaaatgcacacctaaccatgggtaactgcttggttcacatatgctattgcattgactgctcttgcgcatgcctaccatggttctgactcactgctcacttcatgggagtgggatattgcatctatcgcattgctctgcttgtctgggtgggacttgtgtcacgttggccagtcaaggaaggacgactgaaccttctggatccatgccatcgttgatgggtattgctactcagcctggagtgttcccaaacattacttcttgaagaaaacaaccagtccctgctgtcttttacctgtatcgtctgctctgtctgtcgtgctgctgcaatatgggatacattatgttcgggaatctacgagcccaattcaactgaactaccccaaatcttgggcttcagatgcggctggactacggtgacgaatccaataaccaatatgcctgaccatgaccctctagccctgagtggagaactgtacctccaatagcgactacc

SEQ ID NO: 104812 - DNA, 1302 bp, Zea mays
  Clone ID: MRT4577_27090C.1
cccacgcgtccggcttacaagcagtggaaaaaagttcatgtccattgtcgttgatgttttggatctcatcctcccaatgaccatagttcactttggtggagcaattctgaataaatttatccagctttttgatagatatgtagaaacactgatcaaagtcttgcctgggccttctgaagatgataatctactggagtcaaaagagcctattgaacttaaagctgaaagtgatgcgcaacaacttacactaattggaacagcatacactgtagcagatgagttattgccagctgctgtatccaagttctttgacatacaagctgagaagaaaggagctggtggatcaagcgaaggccttggccctgggtccatatatgccatggaatacaaagagtggaaacgtaatttgcagcattcattggacaaactgagggatcacttctgccgacagtatgtcttaggttggatttacttggaagggaagtcacgtttggatgctaaaatgtacttgggacggaaagacgatgatcttttatttgatcctgatcccttgccttcattgcccttccaggcactgtttggaagattgcaacagctagctagtgtcgctggtgacgttctactgggaaaagataagatacaaaaggttttactctcaaggctaactgaaacagttatcatgtggctctccaatgagcaagagttctgggatatctttgacgaccgatctgtccaactccagccttcggggctgcagcagcttattcttgatatgcacttcattgtcgagattgctgtgtgtggaaggtttccatatagaccagttcagcagcttgtgtccacaatcataaccagagcagttgcagctttctcagcaaggggtgttgatccacaaagtgttcttcctgaggacgggtggtttgtcgacaccgccaaggccgcaatccacaagctcatgctgggggtttctgggtccgagtccgagcccgagcctgatgcggaagaacatattgctctgcatggtgaggtctcagattctgaggagagctcaggtgcatcgacagtaggatcagaagactcattcgcttctgcgaagaacgatgatctagaaagccccgtttacttcactgaccctgagagttgagaacttctcaggtcgtcgttgtagattcagttatcgtttatttgaagttttgtcatcctgcatagttggcagatttcagaaccgtggaacatcgttgcactcaagatgaaaacaaagaacccagaaatgccgtttgtaattatggtcgttgctattgt

SEQ ID NO: 104813 - DNA, 360 bp, Zea mays
  Clone ID: MRT4577_27091C.1
acctgttttttatttttgttgtttttttttgtttatcttcttggggacaggaagtattaaaaaggagatttcacatgaacactcataaaggttgcagtttattatagaaaccatcccgcgagatacaatgtagcaaactaaatggtgatagcaattggcttaccctgggacttgtttggcacagttcgacatacatactaccaagataggccttactacaggaaggggcaccgcaagtaagggggcggcaaacaagagcctggaacagcagcggaggctaaccttaagtttctacaagtctggtcataataacagagccggggtgctgatgagatatttatggcggagaaatgggaactt

SEQ ID NO: 104814 - DNA, 1672 bp, Zea mays
  Clone ID: MRT4577_27092C.1
cgccgcagccgaagcgaccacacccgatggccggggcgccggcgccgaagctgccgtctttccctgggcctgtcgcccaggcgggcggcgggttcgtgtcggccttgaagcccaaggcggaggcgggtaacgacgaggcggccgctgcggtggaccagcttgccgaggcggccagacttgccgaggccggcgacgccttcggcgcccgcgagatattggcgcggctcaattatcggctccccgccgtgcccacggccgggacgccgctgctccgctcggccttctacttcaaggaggccctgcgcgttgcgctctccccgaccggcgaggcccttgcgcccccggcggtgtcgacgccgtacgacgtggtcctgaagctcggcgcgtacaaggccttctccgaggtgtcccccgtgctccagttcgcgcacctgacctgcgtgcaggcggtgctggacgagctcggggccgccgggcgcatccacgtgctggacctggacatcggcatgggcgagcagtgggcgtcgctgatgcaggagctggcgcagcgcagccccgcggcgacgctcaaggtgaccgcattggtgtcgccggcgtcgcaccacccgctggagctgaacctcatccacgagaacctgtcgggcttcgcccgcgagctcggcgtgttcctccagttcgcggcgtacaacgtggacgccctggaccccgcggagctggtggccatcaccagcggcgacgccgtggccgtccacctccccgtggggtcggcccacgtggccgcaatgccggccgtgctccgcctcgtgaagcggctcggcgccaaggtggtggtgtccgtggaccgcggctgcgaccgcacggagctgtcgttcagcacgcacctgttacaggcgttccagtcctgcgtgtccctgctggactccatcgacgccgtggggggcgcggacgccgaggcggtcggcaggatcgagcgcttcatggtccagcccgacgtggagcggcgcgtagtgtcgcgccaccgcgcggcagtggccgtggacaagccgccgccgctgccgtggcggaccgtgctcgcgtcggcggggttcgtgccggtgcaggccagcacgttcgccgagtcgcaggccgaggccctactcaagcggatggcgctgatggggttccgcgtcgagaagcgcggcggcgcgctctgcctctactggcagcgcggcgagctggtctccgtgtcggcgtggcggtgctgaccgccgggagtacgccgccgccgccgcaaccaagagccagccgtgaatctaccacaagcccgggttagctaggactaatgatcctactactgcaagcaaaaaaatattttccaccgtcgtcgtttgtaacgatctcatctggtctggtctcgtctgtctgcttattagtgtgtcctacccgattaatcgtggagtacgtcgtccgttgcctggctttgcagcctcggtgggctctgctcatgttgatttgcggagcgcgccgtggtttgcaggttgtaaaacgtaggcgtggtgcagtgcagtgaccagcgcatcctaccgcccgtcgtgttgctactcttttttttccattgctgtgaaatcaattaatggttatggcgtttgaaaaaaaaaaaaaaaaagcggccaaaaaaaaaaaaaaagccagt

SEQ ID NO: 104815 - DNA, 433 bp, Zea mays
  Clone ID: MRT4577_27093C.1
tccaaacatcctttttccctatatatcacgccttcccataggagtggctcattcaggtaattgctcacactgccacccatggagatgggggacactccgacactcatcggcgataaacaagtaaactttttatagggagcggggcggcggctccatcacattattactacagtacatagtctcctcagcagtaaacaccgccggcagctgagccgctaggtcaggaacctggctgctgcagttgcataccgcacatcccgcaaaagctgttgcgctacctgggccgacatcaccgccttgagctcatcctgacgctgctgctgcaggaaggactgtaggaccacaccgtatgtcgcctgacaccggtgcagcggctccacctgcctgatccggtggcagcactgctgctgcagcacctggcactgcggaaagc

SEQ ID NO: 104816 - DNA, 476 bp, Zea mays
  Clone ID: MRT4577_27094C.1
atctatgtacacttaaataaattttgcttcagatatgttacctactggagcttttttttttccaaaaaaaaaaaaaaaaaaaaaaaaaatccgagaaaaaaatatatataccaagtatagaacacaataatgtagcatcacatgtatatctagattgcgcatcccagtctgattatgtggccatcaattggtcaatgttactgtatagctgctagcataattgtttggggcgatggcgacgcatgatgaacaggtagcaaacgctttaagaagcgacgatccttgaagcatgaaaatagagccactcttttggagaacaaatcgagattttggagcatcgccgggtctgccggccggttgaagccgctgatgaggacttgagaggatgttagtttttgtagggcatatagccgtcgctatcggatgtcatgcatgcccttggccatatcaccaccaaaattaaaaggttttggggg

SEQ ID NO: 104817 - DNA, 373 bp, Zea mays
  Clone ID: MRT4577_27095C.1
agttcataaaaatataccttaaatttaaaggaggtttgaaaaaaaaattagctctaagtggggttatgatgtgcattcatgcaaaatttcaggcttaaactcaaatcatgcttataaataaagatccgaatttcagacaattttgccctatattgtccctaaactttgttttttaaatatacttagttttaactagatttttgtcctatgtttttttgaatttgtaccccattcccaacctttatcacctggtctttttggaaagtctgtttctacatttggtaatatcgtagtagttcttctgttgttactagtaaaaacatgtcgggcttttactgaccattttctcagttatttcatggaagtaggtacc

SEQ ID NO: 104818 - DNA, 503 bp, Zea mays
  Clone ID: MRT4577_27096C.1
ggtgtttttttttttttttttttttttttttttttttttttttttttttttttttttttttttttttttttttttttttttttttttttttttttttttttttttttttttttttttttgggccaacgggggtaaaaaaaaagaccccgggggagagggggaaacaaatccccggggaaagggccaaaaaaaaaaagccaaaaggggcggaaacccagcaaaaaaaaaaaaccccccctttatggaacccgggccgggataaaaaaaaatttaagggtggggggggggaaaaaaaaaaattggggccccccccggaacgaggggccaaccaaagccggattttaattcctaaaaaactggtttggccgggggagaaaccaaaaaatttccggtaccctaagggccgggggacccaagggccggagaatccttaaccccaaaaggaggggcgggaggatttaacccaaattttgaacggggcctttgggagggggtagaggggg

SEQ ID NO: 104819 - DNA, 209 bp, Zea mays
  Clone ID: MRT4577_27097C.1
ataacacgacttgttttcccgattctggaagagatcgagcttcttttgcaccacaaggtccaggatgtcttgcaactgcgcatcaagctgcgggtgcggctcaagctgcaagcgcggcaagaaggaccctgacctggaagacacgagcaccgccgcacaagccaccgtacgtcctcgcagtgtcccccggacaagaaggccccgcccga

SEQ ID NO: 104820 - DNA, 427 bp, Zea mays
  Clone ID: MRT4577_27098C.1
cccagagcgcgcggcagcagaggaaggcgagacgcgagaggagttgcaagatggtggcgatgggcgtggacgaggacgaagagcggcggctggacgagcgacccatgcaccagggctgcatggcggggttcctccacctgttcgaccgaccacagatcctctccggccgccgcctccacagctcgcagcgccgactcacgtcggtttccagtggctccgcgactccgtccgagcggtcgatgccgctggaccgggcgccgtcgtcgccgggcacgacgccgccggccgcgccgcggccgtcgctgcagctttcgccgttggacctcaaggagggagcgggtggcggtggattcggaccaccgcaggcgtggaggctgccacggctgtcgctggacagccgcgcggtggtcgacgccaggggcaagct

SEQ ID NO: 104821 - DNA, 357 bp, Zea mays
  Clone ID: MRT4577_27099C.1
atcgccgctcagcctaagaaccggagctcttgctgactggcttgctcccatgggcgacaagaaactcggcgagatcaagccgaaggaggaggagcccgcaggtctagaatgtcacccgacgtgaagaagccgcttgttgataagcgggtccacctctggcaagctcgctgccaggtatgcgggagtgcaagatgggcgagaatatggtcgacatgagcgtggagacataccacatctacatgttgcacgtgctgaagcacgtgcaccatgacattgttatatgcttccacgccatgttcatcatgaacttcttcattaacgatatcttcgacaagcttggtggtgaagtcgccaagc

SEQ ID NO: 104822 - DNA, 315 bp, Zea mays
  Clone ID: MRT4577_2709C.1
gcgtgcgcctgctggtgccagccggtgcggtaatatactgtgtcgacgagctgtttagtcggcggccgccctccttttttttttgtttttttttaatgcatgagccaatttgaaattcctaatcatatcaggatgcagaatatacactttttcacgtagagtagtttttttttacgggatcgaccaattacatacgaaaacttgcgactcagggaatgggaaccggaaccattgggtatctctccaagacgccaagcgcttgactacactcgcctgtatggacaaaaatcacactgtgaggattggattctttac

SEQ ID NO: 104823 - DNA, 562 bp, Zea mays
  Clone ID: MRT4577_270C.1
gcgcttggggggggggggtttttttttttttttttttttttttttttttttttacatacaaagtttgggctgactttcattattatacatccaatttatttgtttacagaaaattcttaacgcatttgcctacagatatatctcaaataccaacggtgggggggggcatttagtgtctaagagtacaatttaacaaaaccacaacctcgcaaatctactacgggcagcttcatgctttttcagcttgccgcatgagttccaaaatgctagaagcttttctttttgcacgttctgggccaaaatctgacagttccttgagtgcatcctccgctccagcagcttttgcagccctcgtttggtcaatatcagtgcaacaaagtgaccatagaatgggtgcagcattctctctgttgcgaggagacccagttttaatgaccccgacaaggggggggatgggatccgattgcgaaattacagccttggcttcagggttacccgcaaggatagccaaaagagtgggtgcctcatcgatcattccgcgcgggggatccaccaagaagtt

SEQ ID NO: 104824 - DNA, 549 bp, Zea mays
  Clone ID: MRT4577_27100C.1
cccctcgagttttttttttttttttttttttttttttttttttttttttttttttttttttttttttttttttttttttttttttttttttgggtaaaaacccgacgacggccccttaaacaaaaaaaattcagagggccaaatggttaaaacaatacccttttgggttttttaaaaaaaagggtttaatcccctaggcagcccccaaaggcaaaagcatatttttaaccccaggcccaaataaagagtttcattgaaacagggcacaaatttggggggattggacaaaccccggcattatggaagggccctaaaatttttcaccggagcccttgacaaaaaaaaaggagcagcctaaaaccttttttgctttgccctaaaagaaaattttgaaaagcccggcccactcccaaaaagttttcggggggggaacagggcccaggggaactttgggctaagggcaaagggccttcaccagttggaggaaattggggggggaaaagtcctaaaaaagcacccaaagttgaggggggggcttttggagggcct

SEQ ID NO: 104825 - DNA, 876 bp, Zea mays
  unsure (1)..(876): unsure at all n locations
  Clone ID: MRT4577_27101C.1
gggtacctcgaggccggccgggattcaacggtcatctccgctccgctccgctcctccgctccacgccgccaccgctcctccgctcctcgcggctcaaacggtcaaatcgcagatccacaggaaaccccaagcggcggccgtccctgctgcggctctgcctccctctgctctccgattcgagcggattccatggccagagatgacgacggcgcgcccgcgcccggcgttccgggccaggtgtacctgcccgcgtggcgccgcgcgtacgaccgactcgtgaagatgctgcgccaggcgtacgcgcaggccgaggagctctccgtcgagcgcgagcatctcatctccgagctccagttcctgcagagcgccagccgcgagcgccaggagatctcccaggtccgcctccagcagatctgcaaggacaaggagctcagcaagagagtccttgaggctgagacggcggcgcgtcttggcggcaaggagcttcagattcactgccatcagaaactcgcagaacttgccgagagtgatttggagaacttcaaaagttgtatttcgaatttggctgctgaaaatactgagctaaaggaaaaactgaagatggttgaaagtcaggtgcagattagcaccgacaattcagatcacgagaaaagtgggaaatatactaaggaagagttacagaaattaaagaaagcttacagacaatgagatcagaaaaggacaaggaaatttcagcattacaagcagaaaaagaattttgtttggaaccagctcaaaaatatggaaaaagattacactggaactatttagagcaagcacatangaggtaaagcaggctaccgaagcggcacaaaagcttctacagaatgtagatga

SEQ ID NO: 104826 - DNA, 336 bp, Zea mays
  Clone ID: MRT4577_27102C.1
gtgggggggggggggggtttttttttttttttttttttttttttttttaattagacccttgtcacccaaactttgttttggctctcacaaaaagggggcggttttcctaaacaagaaaataataagatcagtttttaaaggggtataacacaagcgggggggggaaaaccccaccaaaaaaatgggcggcttttttttgattaaaaaactcgggcaccccctgggttttaaggtttttgtcccaaggggatgaaaactctttagtggaaattggcaaaatacccccacaattttataataattatgtcacattaaaaaaccctcggacccctgggg

SEQ ID NO: 104827 - DNA, 287 bp, Zea mays
  Clone ID: MRT4577_27103C.1
aattacctactcgacccactctttctcaccagatctgcttgactaacttttaagaattttatacattcaatacatccttcgaaattttgcgagtttgttaccaaaactacttcaaactctaatatgaatctacgctatattcaataatatttcactctctcaattaatgtactaccaaatatcattataagatcctcctaatgttagaagataccagtctaacctcttgcgttgctcatctcacaattacccactaaagggagctgtacattcaaagtgaagctcta

SEQ ID NO: 104828 - DNA, 316 bp, Zea mays
  Clone ID: MRT4577_27104C.1
cccacgcgtgcgcgtcgccgttgttgctgtgactgcagcgttggcgggccttgtaccgactaaatgggacacaagcggccttattgttaccgggaagagcttccgcggaagcagatccctatgatcaggtgccaagaggtcgttacaataccggagaacgcacatggtaaggcccaagggaacgcacaaggccaccacagcctgactacattaaccacgagcactattacaactatagcctcctgtattgcatgctctaaacattgctagacaaatgcctgtatgcatcaatgaacgctcgagaccggtgccacaa

SEQ ID NO: 104829 - DNA, 343 bp, Zea mays
  Clone ID: MRT4577_27105C.1
aataattttgtatgaaacaaaaattatactggggatcttttacaacaaacagggatcaaaaacgctggcaagctggtttttaagtcacaagatcccgaagagcggggccgtgagcttcgagctgctgaaccagcgtgtctctccaactgtgcaaaagcaagcagctgtctgagctaagggcaggacaccccccctgcttggcagccgagccgggcaccaggtagtacacaaagctacaccagggtggcccctgcccaccatggcccccacacaaaacaccgaatggcccccgcggggggacgagcccaccacaaattaaccgaaatttttctccaaaaccata

SEQ ID NO: 104830 - DNA, 649 bp, Zea mays
  Clone ID: MRT4577_27106C.1
tcgagcggccgcccgggcaggtacgacgccgcgcgagcagctgccgttgctgcagcagaagcgcattcggctgccatcgttgcgaagaaggaggcaatcgctgctgtaaagtatgctgcaattgctcgcgaaaagtttgaaggagctgttgattcagtgaagaactcaacctttgtctatgctaatgccactgataaggctttggacaatgttgagttgaagtatcatgttagcatcaagaattctctgtgatacgtgattcaagagatgaggagacaatcaacactgctgcatacaattaattctatctgttctagtatcctagaagttgagggggcaagatagggaaggttgttggccacctggaccatgtctgcaagatgctagagaagacttctattgtttgcgaacaagatttggaaaataagtgtcctagttgggacctatttgaccccccttcggatgttgaagatcaccctgatgttgatgaagaaggatacagctcagaagatccagagctgtgggaaatggcgtttgaggaccggaagtgggacgagaacaaagtggcagtctccttggctgagcattgtcgtattatgggttacaattacgaagagatttatgatcgtacctcggccgcgaccacgct

SEQ ID NO: 104831 - DNA, 263 bp, Zea mays
  Clone ID: MRT4577_27107C.1
gtctgctcgctcatgtttgctatgcatcccgcctccaaacccagggggccaagtcgccccgcatggatggcgcccaacgccaagaagaagcccgcggccaagaagccggctgaggaggagcccgcggccgagaaggcgccggccgggaagaagcccaaggcggagaatcgtgtcccagcggtcacgaccgcctgccaagagggcggcgagggcaaaagggtccggactaagggcaagaaaagcgcggagacctacatgatctg

SEQ ID NO: 104832 - DNA, 396 bp, Zea mays
  Clone ID: MRT4577_27108C.1
cccacgcgtccgttcacacctcaaatatcttcaatctcgatgtaacatgtaagtttaacacctgtgtttgagcatttgaaaagatttggtttgctcagtttactttcatctgagctactgctgatatccatattcattttgtactaaatatatttttcacaattgaaacctctgtatacaagaatgcatgttcaatctcttgagtaatgtgcagttctgcatggaagatgatgggcaataaactgggttactttgatgcaatgggttgtgcgatgctttgcaagggagcatcttttattgtctaggtggttaggatgcttgctattcaattcttacctaagagacctgtctatgagttctggcaaggcgatggcattatgttttttccttgtgcat

SEQ ID NO: 104833 - DNA, 359 bp, Zea mays
  Clone ID: MRT4577_27109C.1
tcgagccggccggggactcactccaaatctcaagccaagaacaagaatggccaccggcaccactgaagacgaaggacgtgagtccctcggtaccaagtcggccgcctcaaggaacaggcgaaagacatgccctccaggcaccccgccgctggagccgcgcgcgccatcgctgacagcgccgagggcgcctacgttcttgtgggccgcggcagccccggccgtgcccatgatgaacgcgcctggatccggcggcgtgctcgtctcccgcgcggcgaatgctcgcaaacaaggagctggacttctggctcttgcgcagcggcggcgctgcgaggggggccgccgctccggctgaccctgcg

SEQ ID NO: 104834 - DNA, 473 bp, Zea mays
  unsure (1)..(473): unsure at all n locations
  Clone ID: MRT4577_2710C.1
gccaaagataaatgattctgtttgtgaggcgagggattgtgtgtaatgttcacgaagtgtggtagtgcggcatgtggctcaactgttttaaggatggtgacgactgatttcaaataaatttgctgtcatcgtagaattagaagaaagtactatgtggatttacaggagctgtttctgnggggaaaaaaaaaaaaaaaaaaaaaaaaaaaaaaaaaaaaaaaaaaaaaaaaaaaaaaaaaaaaaaaaaaaaaaaaaaaaaaaaaaaaaaaaaaaaaaaaaaaaaaaaaaaaaaaaaaaaaaaaaaaaagggggggccccttttaagggaccaaattttccttcccggtgcttgcaaggaaaaagtttttttttggggaccccaaaataaaatcaatggcccggtttttaaaaccgtgggaattggaaaaacctggggtttcccaaattaaatccctttgaaaaaaatccccttt

SEQ ID NO: 104835 - DNA, 547 bp, Zea mays
  Clone ID: MRT4577_27110C.1
cttatttttttttttgagatagataacatagcgtttcttttaattaaatacggggatcgatacaataaatatagcatgactccagttaaccacataccattaggagctagaataaatataatgttagggcattctgaactacaatgtcgggctaatatatagacttaacaagctcgtaactaaggaaaacattaccatttgtctatctttcaactgtgctcgacaccgcaaaaatgatttttattcacagccatctattaccatatcactgttgtttttcccgccccccccacacacttcttatgggcgggaaacacaacactatattatttccctatcttctacaaatcccaatcgtagaaaccctttcaccatggttttgcgccttcctcaaaccttatggggtccaggcttgatattcacttcacttcgcccaaaaaaaaaaggaaaactcttcttctcctataaatataatttatgtgactcccccacaacccaataacctcttttatatttttttcgttagccctcaaccattatatccttt

SEQ ID NO: 104836 - DNA, 858 bp, Zea mays
  unsure (1)..(858): unsure at all n locations
  Clone ID: MRT4577_27111C.1
tgggtacctcgaggccggccgggggccattcngggagatgtacaagggcaaaaagatccttgtcgggagagacaaactcgacgtcgttcgcggtgtagtccaaaagctgcaggcgttccacaagttcctcgccgagtatcccgagtggcgcaataaggttgtccttatccaagtcactgcaccggccctcaacgactcgcccaaactcgagaggcaggtttccgagctggtctcgcacatcaatggcgaattcggctctctcagcttcacccccgtccaccattatcaccagatcatcgacagggacgagtactttgcactgctctctgttgccgatctggcgctcatcacttcggtccgagatggcatgaacaccacttcgatggaatacatcatctgccagaacaagtttaacaagagcccgctgattctctccgagtttactggtaccgctggtcgcatgcgatcagcgatccaggtcaacccatggaacatctttggtgtagccaaagcgatcgattacgcacttcggctgacagacgaagagaagcgagcgagacacgatcagctgtaccatcaagtcgtcatgcacacctcgcacacatgggccgccggcctcgtcaagcagcttctcactcgcttgcatggcgagcattccgcccacctcactccacctctggatcgcaaggagatggtggaaaagtaccgcaacgccaagaagcgtctcttgctgctcgactatgatggaacgctcaccccaatcgtcaaagtgcccgagatggctttgccctcgacacggctgctgaaggcgctcgagattctctctcaggacgagaaagacgtgatctacatcatctc

SEQ ID NO: 104837 - DNA, 1148 bp, Zea mays
  Clone ID: MRT4577_27112C.1
cctcgaggccggccgggccgggaataacttcggggacgcgcctgcttgcttctttccccaaaccccaaaccgcaggtaggaagcaaaccgcacgccccgctccagaacggatcctcatctctcacgttgtcaccacagtctgaatccagaatccaactagtagctccataaaagcggcaatgatccagctgctgttcgtcgtgctggtggcggaggcgtccctgacggcggcgctgctcttcaagacgccgctgcggaagctcgccgtgctagtgatcgaccggctcaagcgcggccgccacgcgcccgtcgtcgtcaagacggtcgcgggcgtcatccttgccctgctcgcttcaacgctctacagcatgacacagatcgccggcagcacgagcgactccgactccggcggcgggcccacgcccaccgaccaggtgctcttctcgcgtcacctcctggaggcgtgcctcatggggtactccttatttcttgctctagtgattgaccggctccaccaatacatcagagatttgcgccggtttaagaaggacttagaggctgtacgtaagcataataaaatgttggaggagacaaaacatggaaactcggaggaggcaaagaagtaccaggaagagattgccactctgaacaaggagatgaagaaactgaagctacaagtccaagaaaagacagaagaggtccatgtttcagaggacaaggcacttgctatccaaaaacaatccgaaggcttgctgactgaatatgaccgcctgctggaggataatcagcatcttcggacacagctgctgtcaattgaccgcaggctttccaactcttcttgaacgaagagtctatttaggggatgctgaagaatttctgtggaagatcatgttaccacccaaagtgtatggcagctacctgcttcctcacttgttagtcttagcatcttcaattaactagctattgcattatattgttggcaaaactagtgcaagcattatatggtctagaactttggagtttctcttgtgtgtttcttgtaatgcctactttttatgtgtgcttatagtgattactgttttgaacagaattttatgattattgcagacgggcattcacatgttgaaaaaaaaaaaaaaagggcggcc

SEQ ID NO: 104838 - DNA, 513 bp, Zea mays
  Clone ID: MRT4577_27113C.1
gtcgtccactccgcgtgaacgcatccacgctccaatctcatctgttcgcggccgcctacgcttcctccgcctccagcgccatgatgaaggacaagatgaagggtttcatgaagaagatcacctcctccggctctgggaccccgtcctcattcaagggcacctcccacgtcctcggctccggcccctccccctcctcctcctcctcccaccccgcttcccgcccctcagaccctagcgcaaaccccaagcctgcccctaagcggccctcgccacctcccccgcccacttcaaccaccgatttcaccccgtacacgcccctcgtctcctcctcctcctcctcctcccgccgctccgtcgcgaatggcaccgcggccgccgccactatcgcgtgccccagctgcgaagacgcgttcccttccgagcttgccgtcaccgagcacctcgacggctgcctcgcgtccgcggtgggcgcccgcgcgcgcgccgacgtgtacctcgctgacgacccacccc

SEQ ID NO: 104839 - DNA, 460 bp, Zea mays
  Clone ID: MRT4577_27114C.1
cgcatcgctgccctctatggcatctccttcggagcggtcctcttctctctcacggcagatgtagaggagcgctgttcacccctcgcggctttctctctccctttcgcgcgcgcatcggatggagcggagccggcttcgttgctgacgacggcggcggcacatcaacgggtcttgtgtagccgagccccctcgaatgcgtgtcgagcttcaccgagcttggtgaagatggatctctccacgcgattccgtcgaactgagcaatgcgtcatgttcatagcagaaatgtgtgtgttcggtatgtgagacttgagtatttgagtatttctatgtttccagaaatcatgcattaggggcatggtacacttgaagcaagttggacaacacattctctgctcattttattgaatttgagtcagaaaactaatttatggctgcgctcattctaccatatcattatctg

SEQ ID NO: 104840 - DNA, 505 bp, Zea mays
  Clone ID: MRT4577_27115C.1
acccaccccggggggaaccttttttgggggtaaactttaaagcaacccccgggggggaataaaaaaaggaattctttttaaaactggggggggccccattaggcaaaaaaacccccggcacggctcacccctgggggggggggggcattaaaaaacaaaaactgggcatcgcccccgggccaaataaacacaacttggggggaaaaccccacgaccccggggagggaatccccgaccgggtttttgccggcggggggccggaggtcggggcccccaaaaacagccggggggggcccccctgtttgagggccccgttggaaagggggctgcccccccggccctcctgttctttaaaaagccccaggggcgggggggcccccttttgggggttaggccgctccaaaagccttccccccgggaacagaaccgactccacgttccggtggggaagcatcccccccgttgccggggacccgggggccgggggaagcggcccccccccctt

SEQ ID NO: 104841 - DNA, 474 bp, Zea mays
  Clone ID: MRT4577_27116C.1
ataaattggagaaagcgggtgccgccagaccggcagaaaacgctggggaggcggggggacaaacggacccagaggcgacagaaacggggcgggagggtggcgacaaggggggggcgggggggggggggggggggggcgggggcgggccagcagggggcggggggcgccggggggaacccgggaagggcggagcgggcccggcaggcgccccaaccgcccccagagcgagcccgggcagacctgggcgccatcagggccaaaggggggaactgggggaaaggggaaaacgcccacaattcccggcaacacacgggaccaaggggcaaaaagtggaaagcctgaggagccaaaagagcgaactaactaacattaagggcggtgcgcccaaagcccgctggaaacccgggaaacccgccgtgccaactaaatcaacaaaccccccaacaaaccgggagaggcagttagcccaatggg

SEQ ID NO: 104842 - DNA, 408 bp, Zea mays
  Clone ID: MRT4577_27117C.1
atggcgtcatggtgccaaggaaagatcctaccgatagcctactcatctactggtgcagactatgaagcaagttccacgtttcgccctcgtattagctctcccggcaaggccgcccaggactacaggcaggatcagagtaccgtttataaatacgagatacaggtagcattaagactctcttcaccggttgccgctagcgctcccctcccctcccctgtctgtgacggctacaggccacccctaccggctaccgctacaccggttgcctctaccggtgctacaggactagcagctcgtggacgagcacgctacatcaaggggtacccaagagctccccttacctcgtcttctatgtgcaccagatatgtcctctttatgattatagtggggtataggggaaggatttag

SEQ ID NO: 104843 - DNA, 527 bp, Zea mays
  unsure (1)..(527): unsure at all n locations
  Clone ID: MRT4577_27118C.1
agactttagggaggcacgtgaatcaccgtgaagcgaaggaggggcgtcgagggagcaggggcagaaaggggatgctcgggagcgtcgtaatgggccttggaggataaaacgtcatccgcggagaagagtgtggcgacgcgacgacgaggagcttcctggcgatggtagtgatggggaaggacggggtggcggccggaggaggagaagcgagaaacatatctccgataccaagttggagagtgaaactctaacactaaattaggttggatgatgtattaagtaatagagttgggtgggcctaggcccatttcaatacaaacacacacaataactttaacacttagtatatattctctatatttaaattattaaagcaaaatttaaattgaaataaaatcaaatactgnaaatatgtttccttttagattgaaaattaattaacagatgnggacataagatagnccngctctgnaaatatattataaatagcgtacacctttataggtgncattgccattaatattttt

SEQ ID NO: 104844 - DNA, 448 bp, Zea mays
  Clone ID: MRT4577_27119C.1
tttcgtttttttttttttccccgggaaaaggagcaagatcccataaactggttcgaaacataaaccctggaggctttggagggggcaaaatcccatgagcggggtcgaaacataatactttgacatgtttattagggtctacatgtatggaaaaaaaaacactggaacataaattttggggggctccatgaacttgaaaggctttctttttttttttgtgaggggggggaccaaccgaccttatttttttggggacgcccgccaactcctttttttttttttttgccctcttgggaggtccaagcttttttttaaaaaggttaagggcacgcttgtcctttccaacctttaaaagcttagggttacgcttttcataaggggcaaccccagaaccttttttttagggccctgaccataaaacccttttttttgttttcccctggggggg

SEQ ID NO: 104845 - DNA, 452 bp, Zea mays
  Clone ID: MRT4577_2711C.1
aaaaacaagaattggcccaaaaaaaacaaaaaatttctctaaaaggggcccccacggggccgcaggggcaacaaaaacccggggaatcctttttacaggcctcaaacccaaaaacaaagggggaaaggtttaaggcccccaaaagatttttcgggtaaaccccctagggggactggggacttaacagggcccaaaaaagaggccccccacaacgaagttttttaccaaaaagccatcccgggctccagggaccaaaaaagctgggaaattttggggaagccaccaccaaaaagctggggaaatctccaaaatcccaaccttggccctcccaccaaaaaagtttttggggggggggccacaagggaaatcgggtttctggggtggggtttaaagcgggaagaaaaaggactttcactataacactttgggggaccccaaaaattggtttttcc

SEQ ID NO: 104846 - DNA, 171 bp, Zea mays
  Clone ID: MRT4577_27120C.1
ggcataatgttgtcccagtggaagatgctcctaagtatatgactggtggttttgtattagagatgcctcctgctagcagtgcttctaacaagatttttattaccttcaactgtatacacatattcactcatacatctgtccagaaatacttcagccagtatggtactgtta

SEQ ID NO: 104847 - DNA, 529 bp, Zea mays
  unsure (1)..(529): unsure at all n locations
  Clone ID: MRT4577_27121C.1
ggcagcactataccatctgccgagtgaatatttaatgggcttggatttgcgggtcgaatctcccactcttnctcaccatttatatttcttatcttattttcttgatggtctaccatatcatatttcttggcctttggtatttgggttttgtttatcgtatggcagagtaaaaaccagagatgctttactataatacaaaactgtgcagttataagcatagcttgctgtgtgttttacagccactgtggtaacaggactgtttcaagagacaaatctattgatcgtagaactgctagctggattgtattctcactttggacaaagcatgatgacaacacactgatttcaaggctattgcgtatgcataaatttaaagaacaaatttgctcctcctggtttgctccagatggttctactagtgattaccctcttctctctaaatgggccatttatggaaaattgtcttcaaatggatcaagttcctccaaagaaatttcaccagtctactctttgtggcctacattcatgg

SEQ ID NO: 104848 - DNA, 624 bp, Zea mays
  Clone ID: MRT4577_27122C.1
cgcagcttcgctgatcatatacaatgaatggttcagttacgtgctagctgcgtccctggtctggccgccggcgtgatggtctgggcgaggcagaggaagataggggagctatgctcggaggtgatcatcgatgcctcttcgtcgtcgtcgtcggacaagacaacgatggatagcatagtggaggcgcagcgaagcctgcagaaagtgcacaggtacatcgtgaccgcgaacgttgccatcctcaggctgtggtcgattgcgctagcaaggtcgccaaagcacacagagacggtgatctggatgctggccgtgtccgcggcggtggtagccgtggtcccgttcaggtacattctgatcgggctggtggcggggagcttcgcgtcgaacacgagggtcgcgagggccgtgatgaacccgcagggcggccggcggtggagggagtggtgggagtccatacccgccgtccccgttcggacggtgcacagttgacaaaattatattttcctccactacgtaaaatgatcggtgcggtacacagagcagacgctcgcagaaggaacccgttatagaagcctgtttgttcaggaagaataatgaaaatcatcgaggaactgtttgttcgct

SEQ ID NO: 104849 - DNA, 346 bp, Zea mays
  Clone ID: MRT4577_27123C.1
aacaggcaatgcaatctggttaccggtccatgcctacatagggatacacaagcctgaaataaactgggtgggtcagagaaaccagagttcccaaatcaccccaaaatcaaaccgggagttctggatccagggacaccggttattcatgcattataatccactacacgcacacccacactggggggggaagggggggaaaccacaatcgacttgactgtttaaaaaagccactgccactaccggatcgagcagcccacccacgggcgccggggccggcgccggaagctaaaacaaataaattgggggggggggggggggggtcctcggcctcctccttggggtcccc

SEQ ID NO: 104850 - DNA, 249 bp, Zea mays
  unsure (1)..(249): unsure at all n locations
  Clone ID: MRT4577_27124C.1
cggacgcgtgggctttgagcacagatttttgttggtggtcttgaccctaatgtcactgaaggtatgttgaaacaagttttcaccccttatggggacgtagtccatgttaagattcctgttggcaaaagatgtggttttgttcaatatgctaacaggttggtctgatgatcccttattgcctgggtggattttaaatatccattcaacacgtttactcatgtatcacttctngtatatgcatttagatct

SEQ ID NO: 104851 - DNA, 718 bp, Zea mays
  Clone ID: MRT4577_27125C.1
tcgtgcttccaccactcggtcgccttctccgccgcgtgctcctgcctccaccacgtctacgcaggcaagggcgacctcgtgataggctccgtgtctttcgcggccaataaggcgcgtcgcggagccggtcacgtctcatggttggagggggcattgacacatgatgtgcgtttttctttgcattgtataacgtggcagtcacaagtacacttacaaacaacaagcagaacaaagtagtaactaaaacctactcagctgatgttacaaagcacgcaatatacaagcatctccccgactgtacccggacgtcctcctctccatggcaagaacagctccagcttcttccaccattcctggcatctatctggtcagtggcctttttgcaacgccggccggctactctggctgacgaggtggtgaagccagacgaccagctccagaatgcgatcctcggtccttgccttgtccgcatggtacagcgtctcgacccgatccgcttggcccagtcgtctgccaacgctctcggtccctgatttcgcccactcgctaaacctcaggaagaagcctcgggcgcaggtggtgttgatggccatgggcgcgagccatttcagggtcttctccatcctagcccttatctggtcgacggtgagctgaggcgccgaggtcgtcctcagctcatttggtagcgccgacttgatcctcggtggcagtccctggt

SEQ ID NO: 104852 - DNA, 575 bp, Zea mays
  Clone ID: MRT4577_27126C.1
tcgggatggctgaggacaacagcgccgcgtggccccaggctgaccaggccttgtcgcaagagattctcgaccttgttcagcaggctacccactacaggcagctgaagaagggtgccaacgaagctaccaagaccctcaaccgtggtatcagtgagctgatcatcctcgccgccgacacctcccctcttgccatccttctgcacttgcctctgctatgcgaggacaagaacgtgccatacgtttacgtcccttccaagatggctctcggccgtgcctgtggcgttgccaggcccgttatcgccgccagcatcacgacaaacgaagcctctgacttgatgggccagatccgcacccttaaggacaaggtcgagcgccttcaaatctaagtgcggcgagtactatcaaaccagcttcccaaatacttttttgggatgtgcgatgagagtgggagtctacaaaactggaaggtctatgtaatgggaaagacaccggagtgcctggatgaaatattgctgggtatatctgtacatagaccgagaatgaaatgctgagcgaaggtcagcatggactctgcc

SEQ ID NO: 104853 - DNA, 269 bp, Zea mays
  unsure (1)..(269): unsure at all n locations
  Clone ID: MRT4577_27127C.1
gggggggggnngggggggggggggnggggggggggggggggggggttgttggggcttctcggggaggggcccccttaagtaggagctggggaggccgcgaggagagagattgcagaaaacaacctccctgggggcgcgggcgagcgcgaacctagaccgtgaagcgtggcctatcgatcctttagaccttgggagtttgaagctagaggggtgagagaagttaccagagggataactggtctggagggagccaagcgttcataggggcg

SEQ ID NO: 104854 - DNA, 893 bp, Zea mays
  unsure (1)..(893): unsure at all n locations
  Clone ID: MRT4577_27128C.1
gccggccggtccgggattttgctgcgcgctcatctcactcagttcgctcgacgccttgcttcttctaccagcacgtgacctcgcctcctcaccgtggcgtctcccttcccagccaggtcgaatctccaggcccgttgttcctctccctatcttggagctcgcccctgatctcttccatatggagcttgcccctgatctctatttccttgacatgggctcgacctccacttcgccgtgaaggctcgtcgcttcacccaccggagttcgtcggccatggcttttgagcttgctagtagtcgcccttccgccgtccctggctcggccctgctcgccgcgtccagcggagctcggtccttggcgcgcgttgctccagctcccgcgcgcgcccacctccctgctcgtccggcgagtcgtgcccgggccgcgtcgagctccctgactccagctcgtccctgtgcgcgtctctctgatgcccagcgacggccaccgctttttccgtcgaacaccctccagctcctccctctgctagcacggccgactgccccaagttccatggcgcgcatctcgcgcccaagctcctctttgccgagcagttcgcccggcctctggccttcttccttgcgcacgngcctgccccagctcgcggagttccctcgcggcgttcatctccctgcgcgtcctctctggcgctgcggtgccccagcttggcctttgcccattcctcagccgcgccctgctccagtcgctcacccatcggacgctacacgctcgcatctgcttggtccggggggtgcgcactgccttctctgtccatggtgcgccctcacctctacttctctgctggncggcgtttttccagccgtggatctccttgtgtgccgcgtccggctcct

SEQ ID NO: 104855 - DNA, 396 bp, Zea mays
  unsure (1)..(396): unsure at all n locations
  Clone ID: MRT4577_27129C.1
ccccttcataatactgaaaccccaaacatccctgtgcgcagttttaaaaattattgctcccaaacccaanataaatccacatgatctcacccccctgaaaccacctaacgtttatggcagcattgaatccaccagtgttcaattatgctaccctacacaccctgatatgatcgtcctaagtaattatatcctcataatgattggatgacaaactgctgctgtaatatgtctatcaagatccacgaagagcacaataattcctttgatctagaggttctaccatccaacttcttgctcaatttattttaatcgtacctaatttacaatccttcaactttacatctctgcagacccacattaggttaattactcataatcctattatattttcaacaa

SEQ ID NO: 104856 - DNA, 968 bp, Zea mays
  Clone ID: MRT4577_2712C.1
gtttgtccattgcacatgcacgcgctcaatggcaaccgcgtccgggcgattaatcgcccaggcacccgctgtgccggcgatcctcctgctcgtcggcacctcgggaaaggccgtcgcgagcatcaagtgcgcccgcgagctgttcgccgggaagcagtggggcttcgatgactccgacgaccccgagtctccgccctccaacaccgaccgaggcggaaactgcagcgtcggcgaacctatggagacgtccaccggaggagacggcgatcacaacggcagcggcgtaccctggaagaccacccgcggcagccagtcccagacgaggcttccatcttgggccgtggtgcaccacggcggctactgggccaacatcctcgccttagcgctggcccccgtagagggccacctccccgccgcctaccgtgagatcacgcgcctcgtctcgctccacgccgaggccggccacgtcttcgtcaactgcgccgagggcctcggcctcaagccccaccccgccgcgccgtgggagcggtggatggacctccgggaggcggccgtctgccacgcccacgacgcgctgctggcgctgagctccgccgcggcggcagccacggcggccgaggacttcctccggtggcagttccccgagtccccgcgcgggaaagggtggtggtcggcggcgcggcagctcgtggaagacgcctggcgcagcctcggcgaggccaagaacgcggcgaggctcatggacaacgccgtgctctgcgagttcttcaccacctggatgattctgacgcgcgcttaactgaaggcgcattgctgatggcgacgcccctgcctgcttttgcaacttgttattactccagtacttgtgctccaatttcattcgatttctgtgtgcacatttcaataagtggttctttgctggtataaatggaaatggcctgatccgcctgggtcaataagattgtaat

SEQ ID NO: 104857 - DNA, 216 bp, Zea mays
  Clone ID: MRT4577_27130C.1
gaaaacacattgggtcacctcggggccactggaattttgctcctagaggttcttgggggccggaacctactctctggttcggcgccacaccaacaaacagggcggatctggttggcgctcttccccccccaaaaaatcgagcaaaatcttggcacctccccacctttcctagggccaaaaaagcccccacgggggttgtgacccggaggagaggaa

SEQ ID NO: 104858 - DNA, 288 bp, Zea mays
  Clone ID: MRT4577_27131C.1
atcacattgatgcgctcgtgagtctgatcgtgattactgcatagggccaaggtgtggaggttgaatcgccagcagttgcttcatccccaactccagatgatgctgaatcacacgccttatgtgctgaagaggactacatctattctgttgacctattactttaggagaccgcttatgtctataacgctgcttcagagcgtcctacaactgccaatgctattgactctaatatcgtatctgtgtactcatctactgtactcgtactggatcaatgagacgattatactg

SEQ ID NO: 104859 - DNA, 272 bp, Zea mays
  Clone ID: MRT4577_27132C.1
gctcctcctcgcgcttaacatagttctcctaacttagtgctcctcacggttacgtacacgggccacgcccgccgcatgacgcggacaccgatggatttggtatacgccttgcaaggcccaccacccacgctctactggttaatgcgttcggctactaccgtgagaatctccactgactggtcatgacacatctgtatacgtgatggtctctctgcttctattgctgcactagctgcttcatcaactccattctcgatgctatcgataacatg

SEQ ID NO: 104860 - DNA, 162 bp, Zea mays
  Clone ID: MRT4577_27133C.1
gcttgggggaaacaaagagctaggatattttttttggcgcaaaaaagcgtggggcgctcctttgggggggggatgggactgactgtattacacaaaacagatgggtgctggttgtcccagttgatgcaaacaagtctatatgagggattacttttttggggg

SEQ ID NO: 104861 - DNA, 648 bp, Zea mays
  unsure (1)..(648): unsure at all n locations
  Clone ID: MRT4577_27134C.1
gccnggcccgggatgccacaccacatcgccactcagtcatcgactactggcgagctctgcagtctgcactctgcttagctccgagcttcagtgccttcattgatagatgtaacgctccacagcgccacagtcaccacacacacgtccagatgcactgcaccaatggacgccgacgaggaccaggtcccgactgccgctcccgccgaggaggctgttgctgctgctgcagcggcagtggaggctgcccatgtggccgttcgctcgagaccccgaacgatgagaccgctgctccggcggagcacaacgacgtcgtccacgctaaggagccggtgacgatcgaggccgacactgagtccaaggaggtcgaggtcgaggacgatgacgcagatgaggctgagccgaccgagggagagcccaaggaactacaacccgaggacgccgcgccgctagcacagacggaggctgctgctgatcccgctcgaggctgctgagccggagatagccgccgagaccaatcgagtgccggttgtggaggctaacgaggaggatggggaggcatcgcctgcggttgctgacactcctgaggacgcagcgaccgaggaagaagcaccggctgcctgctccccgagccgccgattgctgaagtcc

SEQ ID NO: 104862 - DNA, 505 bp, Zea mays
  Clone ID: MRT4577_27135C.1
aaggggggaaacggggcaattaatgggtccagaaaaaagctttgctgaactccctcaccacaaaaggaacaaatgaaatccgacctacaaatagtctaatacattcctggaagctacagccttacgggcccaccagcaaaccagatgggagcccgcggggaaaaactatagctgccctggaggagcagcaccgtcattgtccacacacaacaaaaaaaacgcgggggcactacaaaactacgggggcatccggaaaatgccatccgtctgaactgaacggtgggaaaccaagctttttttttaacagtcacagatggggcataaccataagccacgccaagaaaaaaaactgaaatcgtactcgaacatgcatcgctccaggccaaaacataggaggagccctttaggggaacaactgtaccacggaggaagtggtaacaaggccggaaaggaggccaaccagggggccactgttgaaggggctggactccgtctgcacggggtt

SEQ ID NO: 104863 - DNA, 680 bp, Zea mays
  Clone ID: MRT4577_27136C.1
ggggactcccctccccacctcctcttgctcccgtcctgacacgggtggaggtgctcacagggagcaggagcggaggcgagggattcggccgcgcgcatggagacccctgtctgaccgaagctgctccacccagttgaacaagcgcgccgacctacatctatccgctccgcttatactgtcggtacaaaatggcgaagacgggggatcctacgaatggaattgaaaaccacagaaagcattacatacgtgctatgtggcagaccgttatgcgattaagacaccaaatatactcacgttcaagcccatgggccgaggagtgtatggaacagtatgagcataccataaagtgcggaaacaaatgagaacagagcattaggaggaataccacagcgatatcaacagcccgagaggacgcactacggaccttgaccgagctgaggctgcttcgccatcttcggtatgtaaacgccatcgctctgaaggacataacgaagccagaacacaaggacagacttagggatgtgtgcctagactacgaacatacagatactgatccgtaccagataatcaaatgcgctctactgctttgacaatgaccactgaccggatacctgttctcagttgttcctaggacaagcatatctctatttaatagaataactccacagagacctaaaacc

SEQ ID NO: 104864 - DNA, 478 bp, Zea mays
  Clone ID: MRT4577_27137C.1
ccccaaacctaataccccaataacaaagggggggaataagggtttaaagcgttagtgggaaaccacacaacgccacaaggacaggaaccgccgaacccacaacacgataggacccacggagggcggaagacaagaaaacaggggaacaaaagcccaaaaaccccccaccacaagaccggcaaagcctcgaaacccccgaacccccccccccccccgaaaaactcaaaaccgaaccacaaacctcccttttcaacccccgaaagaccccaaaaaccctaggaaaactgggcaacctccctcccctcaccgccttaccaatgaacaaaggcccccagggcccccaggaggccaaacgggggaacaagggggaaaaaggcctcaacaacaccggaacagtgggagaactgacacacggaaacatgaacctcggccaaaaacccgatgaaacaacggtaagaagctgggaggtttttcccca

SEQ ID NO: 104865 - DNA, 528 bp, Zea mays
  Clone ID: MRT4577_27138C.1
ttgttgaacattaaattactgcctgaaagatacattttgaagcgatggactcgatgtagatatgcatgggacggatatagtggaaaatcctaatttagaatttagatgccacacttgggtaaaaaaaaaaatccttgccaaagacttcttccactagcttcaaaagctgttgaatatgaagactgctacttgcttgtggaagaggcacttcttagagtgagtaagcaaggggaataagaagaaacccgaggaactcctaatgtgaatgctagcaagtctagcgttgaagaatcatttagtttaactgaaccattcaaacatgtagctggacatcactgcttatggtgcagtggaaatagcatcggtgtcctgcttatggtgtggagttcggcggggagaagagataatgcaacggcggatccccttccgtgttccggcagttacacggtggctgtgctgtgctgggcaacgaaagggctccgcctcccttccagaacggggcttggtttcgctgggagggcaaaggaa

SEQ ID NO: 104866 - DNA, 179 bp, Zea mays
  unsure (1)..(179): unsure at all n locations
  Clone ID: MRT4577_27139C.1
cccgggtcgaccctgcgtccgacctcttcagaccttctccgtcggggcctnagacnacaccaactccatcatgttctcgtctgccccctgcaagaagcccaaggtggaccccgccgccggcgccgacgacatggtcaccaacttcagcaccattgacccgcagttcggcctgtccaact

SEQ ID NO: 104867 - DNA, 552 bp, Zea mays
  Clone ID: MRT4577_2713C.1
gcatttagagtgatttagttcaaaccgtcgtcatacatgggttacattcttagaatcccatccagttacttatctttctggtcaatctgaatatgatctaaatttggtcttcacaaacaactcgagcaggccttgtagactggagctgcctgaaaacctgaattaccaaaaccgtcataagccagcatgtgtactgaggtagcacactatagccaaaaaaactttgataatactgtctgatcatacaacacccctacaccaaagaatgcggcaaaggcgattgcaaagatgaccttcaggaccttgtcttcagtctgttttgtggagacaagtgcttctgcggaaccacaatggcgggcaagcataggaccacacagctttgggttgccctcgaagctagagcttggaaatgtgctgagctggccagtggttgggataggcccttcgaggtcgttgtcggagacattaaacttaaaaaggaaatgcagattgtttagtgccgttgggatcgcgcctgttagatggttgctagacaagtccaggacttggggt

SEQ ID NO: 104868 - DNA, 400 bp, Zea mays
  Clone ID: MRT4577_27140C.1
acggtctctcctcctatgttgtccttcttcaggccgttgttcatcaactggcttcctcttcggctccttatatggagagtacgcgcgtccttcactggatgcaccatctctcttcctctagtccaatcgtctaactattgctttcgacaatagatatttacctacatcattctcatccatttatgctcaatcaccttatatgtatacttcctcaatagctcacactcacaatctttattcacattatgacaccattattaactgcaaacaagataccgcttcgcatgactacctccctatagatgctccgcacgacttcacatcttttgaagcttcatttatatacacaccaaattttgaaccactacaaattcttctttcacaaataatatctatatcc

SEQ ID NO: 104869 - DNA, 247 bp, Zea mays
  Clone ID: MRT4577_27141C.1
cactaaggaggccggggatcaggaattagaatctatttaatagagtagactatctggtttggaattcgacattccaccactttctaaagtctacctcaaatttatatttatagggtggagaatagaaattgattccatgtatcttcgaactgtgtttctattctgcaatctgtaacatgttgttccgcttgctctcctacaataaaaatgtatggagtagcatatataattatctcctcttcatgac

SEQ ID NO: 104870 - DNA, 124 bp, Zea mays
  Clone ID: MRT4577_27142C.1
gctccgactacgagagccacttccggttcaggcgcttccaggcgcagatgcgcgccctccaggcggatcccgtctcgttcatctgcaatgccgaaggcgcccaggacttctacccctggagcaa

SEQ ID NO: 104871 - DNA, 594 bp, Zea mays
  Clone ID: MRT4577_27143C.1
gtggtgaagatcatcaacaagctcatgtggctggcgtcggtgtgcacgacggtcgcgttcatctcgtcgtcctacatcgtggtggggcgccacttcaggtgggcggcgctcctggtgaccctgatcggcggggtgatcatggccggcgtgctcggcaccatgacgtactacgtggtgaagtccaagcgcacgcgcaagatcaggaagaaggtgaagtcgacgaggaggagcggctccagctcgtggcagcacaactcggagttctcggactcggagatcgaccgtatctacgccatatgaagaagccggacgccggcgcagtgcagctggttcctccagacagacagacccttttggcagcgatgcgacgtggatgtgtatattagtagacatcgatcacgacccttgagatgctagtgggggctggttgactttgtacattccaataagctgggtgtaaaaactgccattccccttgttcgtgaatcggcgggaggcgacggtgttgggctgtatactgctacagatagatttctcatcagattatatagtatggagtatattattaaaaaaaaaaaaaagggcgccgctcgc

SEQ ID NO: 104872 - DNA, 1804 bp, Zea mays
  Clone ID: MRT4577_27144C.1
gcgcggggaccctcgagccgtgcgccagatcatcgccgagattgacgcccaaatgaccggcaccggcgaggagttcgacagcgacgtcgccgagatccgcgccgcgatagtgaacgaggccaacgagatggaggcgaccgcgctgctcatcgccgccgagaaggggtttcttgacatcgtcgtcgagctgctcaagcactccgacaaggacagcctcaccaggaagaacaagtccggattcgatgctctgcacgtcgctgcaaaggagggccacagagatatcgtgaaggtacttctggaccatgatccatcccttgggaaaacgtttggccaatcgaatgtgactcctctcataactgcggcgatcagaggccacatcgaggtggtgaacctactgctggagcgagtttctgggttggtcgagttatcaaaagcgaacggaaagaatgccttgcacttcgctgcccggcaggggcatgtggaaatcgtggaggctttgctacatgctgatacccagcttgctcggaggactgataagaaaggccagactgctctacacatggcagtaaaaggaactaaccctgaagtcgttcaagcgcttgtgaacgccgatccggccatagtcatgctacctgacagaaacggcaacctagctctgcatgttgcaaccagaaagaaaagatcagagattgtaaatgtgcttctgctccttccggatatgaacgtgaatgcgttgaccagggatcggaagaccgcgttcgacatagccgagggccttcccctatcagaggagtctcaagaaatcaaggagtgcttgtcccgcgctggcgcggtcagagcaaacgagctgaatcagcctcgggatgagctcagaaaaacagttacagagatcaagaaggacgtgcatacccagcttgagcaggcgagaaaaaccaacaagaatgtctacggcatcgcgaaggagctaaggaaactccacagggaaggcatcaacaacgcgacgaactcggtgaccgtcgtggcggtgctgttcgcgacggtggcgttcgcggcgatcttcacggtgcccggcggcaacgccaacgacggcgtggcggtggccgtgcacgcgacggccttcaaggtgttcttcatcttcaacgccgtcgcgctgttcacgtcgctggcggtggtggtggtccagataacgctggtccggggcgagaccaaggcggagcggcgggtggtggagatcatcaacaagctcatgtggctggcgtcggtgtgcacgacggtcgcgttcatctcgtcgtcctacatcgtggtggggcgccacttcaggtgggcggcgctcctggtgaccctgatcggcggggtgatcatggccggcgtgctcggcaccatgacgtactacgtggtgaagtccaagcgcacgcgcaagatcaggaagaaggtgaagtcgacgaggaggagcggctccagctcgtggcagcacaactcggagttctcggactcggagatcgaccgtatctacgccatatgaagccggcgcagtgcagctggttcctccagacagacagacccttttggcagcggcacgaaaaggtagacatggatcacgacccttgagatgctagtgggggctggttgactttgtacattccaataagctgggtgtaaaaactgccattccctttgttcgtgaatcggcgggaggcgacggttgtatactgctacagatagatttctcatcagattatatagtatggagtatactattattgtcgttgttatatatatgcagcatgtgctgtgctccttgtgc

SEQ ID NO: 104873 - DNA, 654 bp, Zea mays
  Clone ID: MRT4577_27145C.1
gtacaccttccttaggttaactagctacctaattaccagctgccagccatcttctgtcagcacactgcagtgttcgctcgtttctgtcgggaagagagagaagaggcagcgacgatggatgagcctccgccacagagcgacgacgaccggaagctgtcggccatggagcacgtcaagaagcgccacgaggagaagggcttcctctatgcctgcgccttcatgttctgctgctgcttctgctgctacgaggcctgcgagcactgcctggagtgcttctgctgctgcggcaagaaggacgagtgatttgaggccggtccaaccagttccgcccgcccaccaatgatgaatgatcggtttgtaattcgttgtggatttgatttgtttcggttgtgaagaactgcgatcaatctggaactgttcgtcgtgataaaacatgttgatgctgtaaataaactctacgttaacagtacgtagtgagctagcttagctaccccagtacgtatctgtgactcgtgagcgagttcagtgagacgctgtgcttgtaactgtaaatctgtgatggcatgccaacgcactggtactacatgtattactgcccttaattgtgtatatataagtttcttgtgaattgaaaaaaaaaaaaccccccccccc

SEQ ID NO: 104874 - DNA, 773 bp, Zea mays
  Clone ID: MRT4577_27146C.1
gtacgcctgcaggatccggtccggaattcccgggtcgacccacgcgtccgccacgtgtttggctcagcatggcggagatgaagagccccacgaaagctgagcctgcgactcccgcagaagcggcgcaaagcgaccgccacagcctgctggagcacagccgcgagttcttggacttcttctgggacattgcgaaaccggatcaggaaacgcggctccgggccacggagaagttgttggagtacttgcgcacaaggcccaatgattcggagatgaaatatgccctgaagcgcctaatcactgggcttggggtgggccgagaagccgctaggccctgctacagcctggcgctggcacagctgttgcagtcttttgaagacatcccattgtgtgacatcctggatcagatacaagaaaaatacagcctacaagccatgaacaaggcaatgatgagacctagtctctttgcaaacctttttggagtgctagccctctttcagtcaggccgcctagtgaaggacaaagaggccctgatgaagtccgtgcaattgctgaagatcctgtcccaacaccccaaccacttacagggacagccaataaaggctctggtggacatcctctctgaggtcccagagtccatgttccaggagatcctgccaaaggtcctcaagggtaacatgaaagtgatcctccgctctcccaagtacttggagctcttcctcctggctaagcagagggtgccgacaaagctcgagtcactcatgggctcggttgac

SEQ ID NO: 104875 - DNA, 287 bp, Zea mays
  Clone ID: MRT4577_27147C.1
cgagaccgtggcgtccgcacaaatcccgtgctcccccgtctgaaaaccctccccaacttcggcggcggcggcggcgctggcgaacgggtactctctccggcgagtctcccccctagtaaccaggaaatatggatgtacccggtgatgaacccgtggaggacctcacttgaagtcctaataaccctggcaatgagggagaagccactacttatggtaatgtgcaagattagttccagggaggaccaggaaagccttacgagggaccccaagaccccatgcaagacgag

SEQ ID NO: 104876 - DNA, 781 bp, Zea mays
  Clone ID: MRT4577_27148C.1
gtgcggcgctcgaggcggccggttgtggtgcgctcgtcagggggggtggcgaatagggtagaacactccggctcgaggaacaagatacaccttccttaggttaactagctacctaattaccagctgccagccatcttgtgtcagcacactgcagtgttcgtttctgtcgggaagagagagaagaggcagcgacgatggatgagcctccgccacagagcgacgacgaccggaagctgtcggccatggagcacgtcaagaagcgccacgaggagaagggcttcctctatgcctgcgccttcatgttctgctgctgcttctgctgctacgaggcctgcgagcactgcctggagtgcttctgctgctgcggcaagaaggacgagtgattaaggccggtccaaccagttccgcccgcccaccaatgatgaatgatcggtttgtaattcgtcgtggatttgatttgtttcggttgtgatttgtgaagaactgcgatcaatctggaactgttcgtcgtgatagaacatgcatgttgatgctgtaaataaatgcgattggtttggagcgttaactctacgttaaccgtacgtactcgtagtgagctagcttaggtaccccagtacgtatctgtgactcgtgagcgagttcagtgagacgctgtgcttgtaactgtaaatctgtgaattgtgattgcatgccaacgcactggtactacatgtattacagcccttaattgtgtatatataagtttcttgtgaaaaaaaaaaaaaaaaaccctcgcactctt

SEQ ID NO: 104877 - DNA, 174 bp, Zea mays
  Clone ID: MRT4577_27149C.1
cttgttacatttggtgtacattattcattttttggggagaaaacaccctaaagccagccattcgaaggaaacccggacctggggaacatttggaatagttgtaaaaacacatgttggctgatctgacggccactccgtgaaaaagctttcgaagggatgtatttttgaaagaag

SEQ ID NO: 104878 - DNA, 138 bp, Zea mays
  Clone ID: MRT4577_2714C.1
gatccttctggaatgccccaacttcttaactaaagcaatggatccgtatgaataaaacgtgggctggcatgcccgggaccgtgggaaaattattaccacggcaacgacaaaaaaaaaggggttgcatcaagaagccaa

SEQ ID NO: 104879 - DNA, 344 bp, Zea mays
  Clone ID: MRT4577_27150C.1
agagggagttgccactgacaaggacagaatggcacccataccgcaagagaggcgagatctcctgtgtcctcctaattggtggagggggtggcgagggcggaaccgacggcgggaccgtccgcttttacccggacaggtgagtccgtcgtcggcgcagactgatacggaacggtgtacccggagctctgtctggcgacactcggggagatctcggacatacacaagaagccgctgccggatgtcatatgcgcgagcgggaaccgtacctaggacgtgttggtcgccacgtccagcggctgctcgcactacctgcaggagagggctctggaggcgaggaaccgcct

SEQ ID NO: 104880 - DNA, 362 bp, Zea mays
  Clone ID: MRT4577_27151C.1
ttatattttttttgaactttttagaatttatagtatgaacaactgaacgctgaattgaacaaagatcgcgacacaaaacaaaacaaaaaacatataggtaatcacaccgatacactggttaaccttctctaaatcacctcacacttgttctctttctttttttccaacctctgtatcacttcatttattacgattcagcactgcactgttctgtacccccgtcacccatgttttctctttgcagtatgcgacatgaccaagggtgtggtctaccttggtggcgcggccgggagcagagcacgcggaggtcgggcggtcttagtggtgaatcgaccttgctcgctagagtctagacctcgacg

SEQ ID NO: 104881 - DNA, 384 bp, Zea mays
  Clone ID: MRT4577_27152C.1
atggcgaaccacggcgccgcggccctcctcctgatcgcgtccgtcctcgcggcggccgccctctccggggcggacgcgcggctgacggtgcggcccaacatggcggcggccctccgcgcggccaacgggaggttcgccgtgcgccccggcacgaaggtcaccctgcggcgcgacgcgcatggagggtacgtggtggacgtcgcggcggtgccggacctgacgtgcaacacggtgcgcggggtgcaggcggacgagacgtgcttctccgtggcgcagggcgcggggctgacccaggaccagttcctcgccttcaaccccaacatcaactgcgccaagatcttcgtcggccagtgggtctgcctcgacgctactacatccgcctga

SEQ ID NO: 104882 - DNA, 618 bp, Zea mays
  Clone ID: MRT4577_27153C.1
gccgcaaggcgcaggcggtcagggagcgagtaccgagcgccccagttcacacgtgagatgtcagaatacaagaacgtcgttggggggaggctaaagctgaagggtaaggcactggatgtgaaggaaggtggagtcaagaagaaaaaaaagaagcatcagcttgaagagtcgtctcagattgagcacgatgagctccacaaagcggctgtgtactgtttgcagaatgaacaagaacactgcctggtcctgtaaccttcttggccgctcggttgttgatgcacctttatgtaatggcagtgtatttgttcggcgacttgggttagttagtgttatgacaggatatgatgtgacagctttctcatgttatggttgatcagtccttactaatacagtctgtagagttgtgtgccatagtgatttttgctgacgccttaagctgttgagaagaattcctgacttcgttggtaaataataggtagctgtccgtgtggagctcggttcatctttcgaacaacatgtttcgttttacttataaattggaccacttttgtgtgtgtatgtaacaggacttcatgaatctgaaatcattttcagcgggtcacaactcgcttcatatag

SEQ ID NO: 104883 - DNA, 587 bp, Zea mays
  Clone ID: MRT4577_27154C.1
gccggccggtccagactcggtcgctcccataagcacccattttgaaaatgaagcttgagatttgctccttctctggtcacaagatttaccctgccaagggtaagacctacgtccgtgtcgactctagaactttccgtttcatcaacggtaaggctgcctcttacttcctccaacgtttgaacccccgtaagatcagatggaccgtcatctaccgtcgtttgaacaagaagggtatgactgaggaagtccaaaagaagcgttctcgtcgtaccgtcaagcacgaacgtgctgttgttggtgcctcttgggatgccatccgtgccaagcgtaaccaaaagcctgatgcccgtgctgccgctcgtcaagccgccatctccaagtccaaggacgccaagaaggctgctgctgctgccaagaaggctgctaaccctgctggttctcaagccagggttagcaagcaacaagccaagggtttcgcccccaaggccgctgccacctctcgctaaattgctttacaaccaacaattttaatatgaaaaataaagatgtaaattcattgtgaaaaaaaaaaaaaaaaaaggccccta

SEQ ID NO: 104884 - DNA, 807 bp, Zea mays
  unsure (1)..(807): unsure at all n locations
  Clone ID: MRT4577_27155C.1
gctgaaaccaccggcaataaacaactcccgctcccagtctccgatccgaggaagccggaagaggggatttcgagccgcggcgatcggggctagagtggccctcgacgcgtccgcgggtggaattgccgagaagccgagagagagggcttggagcggagttgcgggaggtgggagagaaggcggcgatggggcgcctgttcctgatgcacctggacggcaacgtctacagctgcaaacactgcaagacccacctcggcgttgccagcgacatcatctccaaggccttccagtgcaagcacggcaaggcgtacctcttccataaggtgtaagtgggcctgttgcctttctctttactttgtcccgttcgtcgatttcaactaaagcttaggatgagggcgcggtgcgctcatagatgggtgtaattaggctggggaaatgcagcggacctcctcctcatttctcatcagaatgtgtctggcttcggccagtgtgaacctgtcagccggttatttgttatgctcatagtggcgctaatctgatgtttcataagccaagatagataccgcacgtctgcaccaattagcggtggcgtgtggcagctatcaatcagtgagaaacttggagtgtttattgacttttgaggaccgagaccccaaagccactatttggataagtaaaataggtgaagcaacatacacatggagtctactaaactatcagtagatggtatgcgttgcatgggtatatgctatagcactcacccaagggacagatatcaatgtgaantcccctgtatgaaataaatgg

SEQ ID NO: 104885 - DNA, 269 bp, Zea mays
  Clone ID: MRT4577_27156C.1
tcggtctgttctccttgacgactcacgagcacagcaaggctcgctcgctcgcacacaaccaaggcaggcaggtcgcaggcgtctaaaaggttttccgccgtccccaaacgcgcttttccccggcggccatgggcaggctgggccctgggcctcttctggttgttggccggggggggttccccgtggcccgggcccgggccaggcaacttgatcctggcttggggtttcttttcttccgggaacccccgggggaaggccccgggaccggg

SEQ ID NO: 104886 - DNA, 1653 bp, Zea mays
  Clone ID: MRT4577_27157C.1
attgggtacctcgccggccgggagcacagccacgcacaggggtcaggtcagtcgcctacgaaattcaatagcacagcgagagccaaggaagaagaagaagcaagcggagcgccatggcggcgtccaacggcgagggccacggccggttcgacgtgatcgtggtgggcgcgggcatcatgggcagctgcgccgcctacgcggcgtcctctcgtggcgcgcgcgtgctgctcctggagcggttcgacctgctccaccaccggggctcctcgcacggcgagtcgcgcaccatccgcgccacctacccgcaggcgcactacccgcccatggtgcgcctgtcccggcgcctctgggacgaggcccaggccgacgccgggtacaccgtgctcacgcccaccccgcacctcgacctgggcccgcgggacgactcggcgctcgtcgcctccatgaggaacggcggtgccaccgaagtcgtcgccggggatgagtcgtcgtcctggccgtgggcaggcgtgttcagggtccccgacgggtggacggcggcgcggagcgagctgggcggggtcatgaaggccaccaaggccgtggccatgttccaggcgctcgccgtcaagagaggcgccgtcctcagggacaggactgaggtggtggacatcacctcctccaagcgaggtgaaggagaggggtcaatcatctcggtgaggacgtccagcggcgaggagttccacggcacgaaatgcatagtgacagtgggcgcatggacgagcaagctgatcaagtcggtgaccggcctggagctgccggtgcagccggtgcacacgctcatctgctactggaaggtgaggcccgggcgcgagcaggagctcaccccggaggccgggttcccgacgttcgccagctacggcgacccctacatctacagcacgccgtcgatggagttcccggggctgatcaagatcgccatgcacggcggcccgccgtgcgacccggacggcagggactggtccacgggcgcgggcgacctggtggagccggtggcccggtggatcgacgccgtcatgccgggccacgtcgacaccgccggcgggcccgtcgtccgccagtgctgcatgtactccgtgacccccgacgacgactacgtcgtcgacttcctcggcggggagttcgggaaggacgtcgtcatcggcgcggggttctctggccacggcttcaagatgggcccggccgtcgggaggatcctggccgagatggccttggacggggaggcgagcacggcggccgaggccggagtagacctccgccccctaacgatcggccggttcgcgggaaatcccaaaggaaacctgtctgccagccaaggctgatcggcgacggggctctgtttcatggtttgatgtcaaagtgtgtgctctgcttgccaacttgtctgttaagtgtcttttgggttgttggatttaaaaaacaaaagtgcgcgcatctcctcagtgttttctgcaggctgcagtaataaactggtttggtcagttctattgataatgacagcaataataagttcgttattgtgcaaaaaaaaaaaaaaaaaaaaaaaggggcggcccaagtgaactggtagcccggggaattatttccggccggtaacctgaaggggtacaagtt

SEQ ID NO: 104887 - DNA, 237 bp, Zea mays
  Clone ID: MRT4577_27158C.1
gcccctccaacctctcctcttcctcgtgtctcttgacaaccaagccagagaggagcaggcaggggcgaacctgctctcctctcctcccctcttattccgcgcccagcaacgaggcatggtggagaatgcgaggaccatggcgcgcacgctggagattccccattggaaggccgaccgcctgccgtcacctactagcccgctggaccgcgcgtctgcattcccccgtgggtggcgcca

SEQ ID NO: 104888 - DNA, 478 bp, Zea mays
  Clone ID: MRT4577_27159C.1
ggaaacccctttggttattttcttaacaaagcacaaaagaactaaaacttagcgaattcgttacggggcggggggggataagttaaacacaaaaagacaaccgggtccaaaaccagctggggtccagcgtccaggggccccgttcacatttattctcagcataaacaagcaacaaaaatgggctgcgaccaaaggccatgggggaccacccttgatggggaggcaaaaatatctctctttactgggtcttgaacatgggggggatcaggtcgacaacccggttgctggaaccccactcgttggcgcaccaaaaaaccagcttgatgaaagggtcgttcagggcaatcccggccttggcgtcaaaaatgctcgacctgctgtcaccggggaagtcgggggaaaccaaatcctcctccacgtagcccataatacccttgagggggccctcaaaagcagccttaatagctttcttgatttc

SEQ ID NO: 104889 - DNA, 313 bp, Zea mays
  Clone ID: MRT4577_2715C.1
gacaagttctcgaaacatctgcgaagatgagagccaaatggagaaagaagcgcgttcgccgtctcaagcgtaagacaagaaaggtcagggccagatccaaataaacgctcggcccctccatctcagttctttcatgatgaagccttccgttgaataaccaaacacgacatgatgagttttattcgaaacatcatttctttctcaatcgggattgtccaagagctcgcctagcgatttgatcttctttatcgccagtcgaaaaatcgtttatctggagctgtcacatctttcagcaattcattccagtcgccga

SEQ ID NO: 104890 - DNA, 589 bp, Zea mays
  unsure (1)..(589): unsure at all n locations
  Clone ID: MRT4577_27160C.1
gngcgattggagcgacaacaacaaccaccactacctccaccaccaccactagctgcaccccgggacaagcaccaggaattcatgagtcacaagtgacctacattctccagctctccagaccgcctacatgctgatgactggctgaaattagtggaaaatatgcttaatatcgctcaatgcaatgaccaggagaaggtgctctacgctttgggtcgtcttactggccctgctgctgattggtgggactcctacattgctgcccatgctaatgccaacactgtcacctgggcagaattttctacacaattcagaaactaccatattcctgttggcttgatgaaaataaagaagaaggaatttctatcactaaagcaaggcaacatgttagtcagcgaatatcgtgataaatttattcaactgtcaagttatgctctaggtgaggttgctgatgatgaacggaagcaggagcatttcatggacgggctcattgggccgcttcagtaccaactggtatctcatacctccccatctttccagaggcttctggacaaggctatagctgttgaacacaaacgtgcttagctaggcg

SEQ ID NO: 104891 - DNA, 251 bp, Zea mays
  unsure (1)..(251): unsure at all n locations
  Clone ID: MRT4577_27162C.1
cattggactgcttgtccctgttgaccattgggtattctgnaccatcgagccatngctgccangctgactcgcntccacagtcttcgcgaacgccttggngccaccttctcctcccatcccantgaactgatagcactctttnccaggtatgttcaccagggcaagggaatgcttcagcgccatcagctgcttgcggagtttgatgccctgtttgatatgacaggagaagtatgcaccctttgaagacatct

SEQ ID NO: 104892 - DNA, 206 bp, Zea mays
  Clone ID: MRT4577_27163C.1
cggtcgactccagtgactgtgcccgctcccgctcccgctccctcgcctgcgcccttggacccgggggctacagccggcacggccaagaagtcggcgtccaacaggggcagtgattacggccacgaaaagccccgcggcggcgtcaccgatgattgtgatcgaaattccgtcgtcacctgatgcctccacaggtggggggcgctcga

SEQ ID NO: 104893 - DNA, 355 bp, Zea mays
  Clone ID: MRT4577_27164C.1
cagcaaacaagagttcgcactacctctttttccatctgggctactactgatcgggcggcgctgctgttgtaatcgaacgtccaacattatgttagcctaactcgcgtttatggcactaccttttataagaaaaaagatcactggaggccgcacatggcattttaacatgacagcacacaaatttctataatttgtgttgcaatgcatgagggcctacctcaaaccatcaataatagcctcgatgatctctcgataaaaggctaccatcagctacttgataatgactacatgcagccaaatgaacattaatctatattgctagatgtgcatcaacagcatcattacatggaaagaa

SEQ ID NO: 104894 - DNA, 134 bp, Zea mays
  Clone ID: MRT4577_27165C.1
tcgccgtccgactagtgtctagatacgcgagcagcgacggtctagaggatgagaggcttaccgtacgcggtgctatgcgaacgtcatatgctctttctatagctgtcaccataaattacatattcactaggcca

SEQ ID NO: 104895 - DNA, 433 bp, Zea mays
  unsure (1)..(433): unsure at all n locations
  Clone ID: MRT4577_27166C.1
ggccgggtccgtggtccagaggtggacggaacncaccctctctccactcatcaccacgtccatcacacgtctcacaatgctgaagagtgggatccagcaggcgctccgcgcctccatgcgcaggcccgccatccgccgcagcgcattccagcccatgaagaagagcttcgcacccgccctatcaacccgcttcgcctctactgatgcagtaaaggagggcaagatccacagcgttgttggggcagtcgtggacgtcaagttcgatacggagcagcttcctgctattctcaatgccattacgactcagaacggtgaccagaaactcgtcctcgaagtcgctcaacatttgggcgagaacattgttcgatgcattgccatggacgtcaccgagggccttgttcgaggtgcccagggcgacgaccctgcaaacccc

SEQ ID NO: 104896 - DNA, 280 bp, Zea mays
  Clone ID: MRT4577_27167C.1
ttaaatgacgccggtagcctgcgtggaacaccgctggggtatggtccagtgggggtgaagtggcatccctagctgaacaagatgctcctcatctttgcacaagacaacattactgtcaagaagagccgcttgaattcagacatggctgaattggtgctgccagaaccgttggtgaggtgatcgaagaacccactgatgcggtgtcataggaaaggcatgatatatactcgtaacctgacaaagagatccatgaggcaaaacgaggtacgactatgttgta

SEQ ID NO: 104897 - DNA, 285 bp, Zea mays
  Clone ID: MRT4577_27168C.1
aaaaaaaaaatcacatttaagacaagttattcagatggggcaattcagcttcacttttagcgaatggaagaccatccatccccctatattattttttaaatggggggtgccaaaccactgacttggttcatcattatcagtaattacctctactacaacttggtggccagagaaaagcacataaagggtgtgagtttttacttatgagattttcgggtcaattatataagcacgcgatacctactttttacttataaaattcctagtcgtgcctaaaggttggtt

SEQ ID NO: 104898 - DNA, 813 bp, Zea mays
  Clone ID: MRT4577_27169C.1
attcggctcgaggccgtcgcagccctccccacccgcgccttcgccgcccgcccccgcggctccgccgcctccgacgccgagtcccagtgcgtcatttgtctcgaagaatacgaagagagggacgtgctacgcgtcctccctcactgcggccatgacttccacatggcatgtatacatgtatggctggagcagaactcgacctgccccgtctgtagaatctcgttgctcgataatcccaacagcgagcacaatgcccctccgccgccgccgccgccgctacccggtgtagcagtgacgatgagctctccaggctctcctgagccgccaggctccgacccgtgccgctgcctgttcgccggtgccgggcactcgtcgagggcgtcatcagaggctcctcctaggcacgagcccgaccaggagaatcaggtggcgtctgggccatcggtggacgggggtgctaacagtaacggcatgccgctgtccgaagttaaccccactccacccgagagcaacagccagacagtgaggaagcagcagccagggccctgcaaatagcagctgcctggagtcggcgaggcgagatcgctgttctgcagcggtctgctgcaggacgagcaaacacctgtacagtggcagatggctgtctggctgctgtaggttggggtttgatgagggtatggtgtaaatatgagaaatcattcagatttgttgttggaaaccaaacacacttcatctgttcagttcagtattgatgctgaaaacagcaaccccccgtggtatgcggatacgggataccaaaaaaaaaaagcggcc

SEQ ID NO: 104899 - DNA, 505 bp, Zea mays
  Clone ID: MRT4577_2716C.1
aattcggcacgaggcgccactccacacctcccccatgactcccctgctcctcctccgcctgctctgcctcgtccccctcgtcaccgccgcctgcgccgaagccaaactaccggcagatttcaccacgctcctcgccgcgaagttctccctcgctgaccccggttccgcgctcgacgcatgggactcaaggctctctccgtcgccctgccgctggccgcacatcctctgctccaaccgctccgtctctgatgccccggccgtcgcctctctcctcctctccaacctctctcttgcgggcgccttcccgtcctctctatgctctcttaggtcgctcgttcatctggacctctgcttcaactgcctaactggacccctgctgccttgcctcgctgcgctggcggcgctcacgcacctgggtctcggcgggggcgagttgtgaggccaggggccaggagcctatggggcaagggggcgttaccttggcacgctgaccctggggtggggg

SEQ ID NO: 104900 - DNA, 1194 bp, Zea mays
  Clone ID: MRT4577_27170C.1
atgcagcccgactgcagatccccgccagtggtcacccagaatgatgaccgccagccttgtggtggggaagagcgagccgggtcgtggcctccccctgccctcagcttcaaggatgttcatcatccgtgctggggaggagggcaagccgagttggggccctgcctttcgcatgggctggcgacccgcttcttcctccagcattcgggggagaagggcgtccaccagccttacggaggaggcaaactgccacctgctgcctggtcggggtgtggttgtccgtccaccgcacgggcgacggtcgcgccgcgcgcaggccggtcacatccacggcccttcctgcgccgtcggtcgcaccggggggtcgtacaacacgtcgtacgccgcaggggcggtgtccgcgttcctggattgtcttgccctcactcccatagcgaggacgggagtgaggacctccttgtgcgggctggggcggctgccattcgctggtgcggtgttggtgcgcaggtggccgctgtcgttggtgctgaggtggtgtccgccatagccgcccgaggcggaggtcgttgtcgctgctggtgcagtggttgccggcgagccgctcggagtttgttacctcgcagcccttctggtgtggaggattccgttatcgacacagtcaaaaggcacgcccaagctatggccttacagcagcgtgcccgggccgaagggttcgagacggctcttaacaagtccgtcaagaactgcaaggcgctcgcccaggcggctgagcagaaggaggccgaccgcatggccatgtccgaggccatctcggccttctgccggacctttggcctcgacgacatcccctcgggcagctccccccagagtcacctgcgggccttaggcggccacgtgcgcaacagactccgcggggcgctgtaccatggcgttaggcgggccttcgtcgtcctcgcttcccactacgacgtggatttggagcgggtcagcgagggctactgcttacccgacgaagaggaggtcaccttagctggggtccaaaggcttgatgcggttgccgaaggcccaagcgcggcgcttgcttcttcttttgaggtggagatccttccgcccgtgtcgccgtctgatgccgggccagattccgccgagggtggaaacgacgccaagggtgttgctcctccccctgccgacacctga

SEQ ID NO: 104901 - DNA, 826 bp, Zea mays
  unsure (1)..(826): unsure at all n locations
  Clone ID: MRT4577_27171C.1
gtccaaactaacccgatgaccacgctaatccatgcttagacactggtccagcactccagcctcctatatattggcagagcagaggggagcagaaagcagaggcagagaaaggcagctgcgtcgactggcaatgggggagcaaggcaggccaagcagcaacaggatcagagacatcgtgaggctgcgacagcttctcaagaagtggaagcagattgcgctctcgccgaaagccggcaagagcggcggcggcggcggcagccacggtgtcccgaaggggttcttcacggtgtgcgtcggcaaggagatggagagattcgagatccccacggagctcctgggccactgggcgttcgaggagctcctgaaggaggcggaggaggagttcgggttccagcacgagggggctctcaggatcccctgcgacgtgaaggcgttcgggggcatcctgaggctggtgggcaggaaggacgcggcggctgcggatcgctactgttcttcgcagcatgggatgatgatcttgtgcagatgatgagttttctttctttcccaacatctccttttttttatcccccacattctttgttcttggtgttccgtggagaagagaggaggaagagtccacagattggcaggatttgcgaaattcgtaccagaggatgaaaagcggcattcacattctttccgtgtgagattctaaaatgaaggatttgctccaaggagattttagtaacaaatgtcttcttttttttttcctcccccctttgagaatcatttccccatctgnntcttgtacttcacctttactttctttctctgnatcgnataa

SEQ ID NO: 104902 - DNA, 665 bp, Zea mays
  unsure (1)..(665): unsure at all n locations
  Clone ID: MRT4577_27172C.1
aaggaaaataagcattataagtcatattaaagaccttcgaacatgctaagagtccaatacacaaagaagtagaagtccagatgcaaagagacaaacaaaagtgaagtcaccaaagtcgagacaaaaggatgcttgaattggaagtatctcatgattttggatctactcaaattgacatgacttcaactctaggttgtatatctttccattagttttccaaaaaagtctaagatcatcaaaatctaagttcgaagctaaaagttatgcccataatacgaaattgggtggtgctaaaaaacgacacctgataggtccggtgcaaggcctggtccgcaaagctgatcaaattgacatggcttaaactatgggtcatagagattttccttatcttttcaaaagtccaagatcatcaaatttggagtttagagctaaaagttatgcccaaaatacaagcaggaacatgttgtgcataggacaggtctagtgtgccataggataggtccacaactagtgcacaagataggntctggtgcatacgcagactgcaccaactttttggcaatggctcttttgggcttgtggagctacaaatatcaccccaaacagccatttgcatgtgtggagaaccaagaacataatgtatgagttgagacattattcatagc

SEQ ID NO: 104903 - DNA, 410 bp, Zea mays
  Clone ID: MRT4577_27173C.1
gtatggcattttttaagtacatgtttttttgtatgcgtcacttttgtgttttaaacaatcattgcatatttatatctgttttatttatcaggggcgcggggggcaaaaaacctcaggtagcccccacaaaaaaaagaaaaaaaagcccggcttcattcgcaaagaaaaaacgccgagcaagcacaaaaactgaaggccccgcccaccaaaaaagccggggaacctaccatgcgccgccgggcccggaaaaaacaccgagcggggggaaaaaaaaaaagaataggcaggcgggcccaaaaaaaagaacgggggtgaaaacgacaaaaaaaacgccgccgtgaagggcaaaaaaaaaaacccaaccccctgggggcccaaccagggagggtggagaaccccccccccaacgg

SEQ ID NO: 104904 - DNA, 348 bp, Zea mays
  Clone ID: MRT4577_27174C.1
ggccaaacaggttttttttttttttggggggatcccaaatctttcggaagaaattcggagggaacacatgggggcaggaaaaacgtctttaaacaacattaaaaacggtaagggcccttcctttcccttcggcccccccgctcaaaaaaaaaaaatgggcgccaaaatggcccaaataacaggccgccggacggccgacaaccccttctcagggggcaaccaagggcacacttctcaggcacaggcaaaaacaaacttttgggcaggcttaaggccgccgggggggttccttttttcctgaccacacaaaaaaaacacgggcaacggcactcaaaacttgcagcatcc

SEQ ID NO: 104905 - DNA, 370 bp, Zea mays
  Clone ID: MRT4577_27175C.1
gttaggaaaagataggatcgaatcaagctgaactgaacctaaaacaattgtcctatattatatgttaccctgtccatttctggtggtggtagcggtggcgcttagcttaggtttgagcagacccgtgtatagtagatgtagctctcaaataattagcaaagagggccttttgtatcgtgcaagcataggtgttcagtcattttgataggccgcctagccgctgcccgacgcagaatgcatgattatcacctttttttgtgtggtagatagggtgtggttatcatgcacaaacacaacaagaggaaggaagaattgcagatagcggcggcacgctctccatccgtcccggtgtcccacaaagccaagcagc

SEQ ID NO: 104906 - DNA, 905 bp, Zea mays
  unsure (1)..(905): unsure at all n locations
  Clone ID: MRT4577_27176C.1
gcgcccacgcgtccgaaagaggctgggagtcatcatccacaaaagtcaagttttctacgttaagagaagaaaagattgctgatttgttaagtatgaaaccagatccaaactgattgttaatttgcttcatgccatcaccacgatcgaatcttcaagactacaaatttgtcagcgtgatggagcctgcccatcagtacatagtctttttttttgtttttttttttggtcttggggatgcatcctgttggtgagatcctcttcccctgcaccatggtccgaggttctgtagagccagggcgctttgggctagggaggaaattgtaacattaaattttcatactactcatctagattagtttgcttaattaagcgttctgtggagccagggcgctttgggctagggaggaaattgtaacagtaaattttcatacagttcatcgtgattagttttgtgtacagagcagagcatacacgtggtgacatggtccctgtagagggacacattcgcagtaaaggtgggatgcctcaattcatactcaacaatgtaaagtaaaggtgggatgcctcaattcatgatcattgtaaaatacgtacatagtataacacaggagcactggctgagtggcatgtatccttgcagttcatcgtgattaatctctgtacagagctgttatgctgccggttttgatatcagttgcaattacacatctgctacagttttgtagtatcagatatcagaacacgtcgggcccgccgcctggaagctcgtagctgtcggcgccgagcatcctgtcgccatttggttgcgctgtactgtactactactacgcgtttgcccctaggtgggagggaggggaacagggcaacgtctctacatttctgtttatgggncgccgccgtgccgg

SEQ ID NO: 104907 - DNA, 642 bp, Zea mays
  Clone ID: MRT4577_27177C.1
actgacaacgaaacgcatcaacactacgcgtctcctgtgggtctggagccgagacaccgagcacgtactaccaggagaatggggccgtctcctagattgctgcccatagacgagtgctgttagtaggggcgagcgcagcataactggagcaacggcgactctggactgggacgacgtgttttactctcacagtgatgtcgcggttgcccctgactcacctatctaggtggcgtgcacgaggcacgtgacgaagagctcacgctgccagtgctcgagtgctgcatgtttcgagtcccaccttgctacgagacactagccactaacactctcatgcatcagtcgcactgagactctgcagtgaccaattcgcgaccgttgctaaaaggctcgcaacacatcgcaaggtgcggcactaaggacttcatggaatgctacttgcgtgcaggcgctcatgtggacgatgatagggccagcacggcgcttcggtagtactttggctacctcggccacgatagaggtgatgggaccaccattcacaaggatcaccatcagtacgcgcaagagtcccaagacgccggctgcgtgcactgatactcgtgacacgtacggggagcatgttgagaggagcactaatatcacact

SEQ ID NO: 104908 - DNA, 408 bp, Zea mays
  Clone ID: MRT4577_27178C.1
atgttagtgttgctatttgcataataaatatgcaaaagacgcagcaccaccatcatcgtatatttatcctgccagaccagaccagaccagaccagagtgcccttgcgtcctgcaagatctggaatcgggcagtgcttacgtatcccactccgacaaatcttctttctccaaaatatccactcactctgtgcggtctttgtactggaggccactcgaaacaccaccctttttttcgctttcaggaaaccgcacatttgcactggcacctgcattcacgggcatcctcgtcatcgtcatcctgttgctgctgcgaagcgcagacatacaacggcccctgcctgtgattctgtgagaacagtgtcatttgactgaacccaccctaaccactccatgaagctgcgtcccttc

SEQ ID NO: 104909 - DNA, 569 bp, Zea mays
  Clone ID: MRT4577_27179C.1
gttttctccgttaatagaagaaaagattgctgatttgttaagtatgaacccagatccaaactgattgttaatttgcttcatgccatccccacgatcgaatcttcaagactacaaatttgtcagcgtgatggagcctgcccatcagtacatagctttttttttgtcttggggatgcatcctgttggtgagatcctcttcccctgcaccatggtcagaggttctgtggagccaaggtgctttgggctagggaggaaattgtaacagtaaattttcatacagttcatcgtgattagttttgtgtacagagcagagcatacacgtggtgacatggtccctgtagagggacacattcgcagtaaaggtgggatgcctcgattcatactcaacaatgtaaagtaaaggtgggatacctcaattcatgatcattgtaaaatacgtgcacagtataacccaggagccctggctgagtggcatgtatccttgcagttcatcgcgattaatctctgtacagagctgttacactgtcggttttgatatcagttgcaattaaaaaccccccccccagggcg

SEQ ID NO: 104910 - DNA, 774 bp, Zea mays
  unsure (1)..(774): unsure at all n locations
  Clone ID: MRT4577_2717C.1
ctcgaggccggccgggaccccaacctccttcctagtacccctaattgagaatcccatcaagatgatcgctaataatcttattctcctctccgcattggccgccagcgctgtggctgcaccaagcggagtcgtcaagcgacagagcaacgaggacaacctctggcaagttcctgtcagacgtgacccaaaggaccccagccaggataggtggacgcaaatcaactctgtcattaccccaatcgacaaggcggcagatgacaaccgtaaattctcgtactacccattcctttacaacatgggcggcacccttttcttgctcttctctggcgctccaaaggatgtcgatggcatgggccaagatgtgcgaatctcttactccacaaatgggaaatggagcaaaccagaggttgccttccccccagctcttctcccaaaccagacaacgatcgagacctcggagtactactgcaagcgtggcattcctcaacgagccttgcaggcgcttagcattgtctacattggcggaggcgagtctgatgcgacatactatgcggttgcacagtccagcgacaacgtctgtcctggacactttgaaccagccggtcgcctcgcccgtaagctgaaccgcgatcctttgtctggtagtacttttgcaggcgaaccatgctggctcgacttcactgagtataccggcgatcacgcatggactgagacggtctacggcgaaaagtancaaatgaaggtgtgcgaggacaaggacaagatcattgctgc

SEQ ID NO: 104911 - DNA, 357 bp, Zea mays
  Clone ID: MRT4577_27180C.1
agctgcaagtgggaatgcacatttggatttttgctgacattacacatagtcaacatatagatcaacgtactttaatgacacattgaatgaaagaatatactcccaacttcctatgcaaggtaatcaagtggcgatccactcatattcctggataggggggattttatgcaatttccacctgttaagctcggaagaaatatagccacacaaatttagaactattaaaaacgaaagtcttctaaccgctgatagagctatgcaaggcaatcccggatgtgtagcttgggaccccatagaaattctttttgtctacgatcacagatatatggttcaaatcggaaagtgatggatcagggg

SEQ ID NO: 104912 - DNA, 267 bp, Zea mays
  Clone ID: MRT4577_27181C.1
tttttgttttattcattgttattaacggtcaaggtttgtaaatggttaagacaaacgacaaaatatataaggtttcaaagtctatacggaaacttttccattgtgtgcaaaagcagttgcgtgtttgaatctcgattgtccgactatctcaaaaaaaacgttttttatgactgataagagtatctacaaagccggtgactattgtgttgagacctacacattaacccaaaacagaaggttggaagaattttccctttagatgaatta

SEQ ID NO: 104913 - DNA, 344 bp, Zea mays
  unsure (1)..(344): unsure at all n locations
  Clone ID: MRT4577_27182C.1
gccccgtantgcantgcatcagtgtgctacctcctcattcctctcactccatcacaaacgcggagcggtctctaaagctcggagcgaggctcaaaagcnatggcggcatccaagaggctgctgctggcggcgctgtgcgtggtggccgtggcgctgctcgccgagcagtctgagtcccacggcctgaaggaatacgtaggcagcgactcgacgcccgagatgcagaccttcttcaagcccagaggccgtggcgctcccgagaggccctggacgcgtcctacatgcccgccgccaccatggccgcaaagccggaggccactgtaatcccgaccaccacgggcacc

SEQ ID NO: 104914 - DNA, 796 bp, Zea mays
  unsure (1)..(796): unsure at all n locations
  Clone ID: MRT4577_27183C.1
tcaactgccaacagtaaagccaagataaaaagtcagaatcaatggagttcccctcttcttcttccctgctactcatcctgcttcctcccgtgctgtacatctcctaccacatcgcgaggagcctcgccaagaagaagcccaccacccacggcctcaggaggcacccgctgctcggccacctcccggcgttcctcaagaaccgcgaccgcttcctcgagtggtccaccgagctcatcgtcgccagccccgacctcaggatgggcttctggatccccgggatgaccaccggcatcgtcaccggcaacccggccgacgtcgagcacatcctgcgcaccaacttcgccaactaccccaagggcgagcgcgccatctccatgctggtggacttcctcggccacggcctcttcaactccgacggggagcagtggctgtggcagcgcaagaacgccagcctcgagttcaccacgcgctcgctccgcggcttcctcgtcgactccgtgcaggccgaggtcgggaacaggctgctcccgctactgcgacgcgccgcggatggcgccggcgccggcggcgtggtgctcgacatgcaggacgtgctcgagcggttcgcgttcgacaccatctgcatggtctcgttcgggcacgacccgtgctgcctcgccgacggcggggccctgacggagggggcgtcggacttcatgcgcgcgttcggcgaggcgcaggacctcattgtcagccggttcctggaccccgtcgcggcctcctggaaggtncagaggtggctcaacgtcggcaaaga

SEQ ID NO: 104915 - DNA, 2481 bp, Zea mays
  Clone ID: MRT4577_27184C.1
cattgggtacctcgaggccggcccttccgcgcaatccgccgcttctattctatcgtcgccgacgagcgacgacttcctccttccacagttccacttcctcttcctcctgcccggcgcgctcccacctcctctcacaatcacaagccacacccatggcgacgacggcccatccggcgctcctcttgctcatcgtcctagcatgtgccggcgccgccagcgggttctacctccccggcgtcgcccccgccgacttccgcaagaacgacttgctcgccgtgaaggtgaaccagctgagctccatcaagacgcagctgccatactcctactactccctccccttctgcaggccggacaccatcgtcaacagcgccgagaacctcggccaggtcctccgcggcgaccgaatcgagaactcaccctacgtgttcgagatgatggagcctaagctgtgtcagatcgcgtgcaaggttgttctgaccgagcagggggcaaaggacatcatggagaaaatccacgacgagtaccgtgtaaacatgattcttgacaacctccctatggtcgtcccgattgagagattggatagagacgcgcctccattctatcagcaaggtgtgcacgtgggtgtcaagggccactacgctgggagtaatgaattcaagtatttcatccacaaccactactcatttctcgtgaagtataacaaggatgcacaaacagatctcgctaggattgtggcctttgaggttaaaccgttcagtcttaaacatgaattcgatggtgattggaaggggaatgcaactcgacttaaaacctgtaatacacaatctgagcatctaatagtgaactctgatgggcctgaagaagtaaaggcaaacaaagagatcattttcacctatgatgttaactttgaggaaagcagtatccagtggtcatcccgctgggacacctacctccgcacgcctgacgatcattggttttccatcgtgaattctctgaccacggtcctcttcctgtctgtgatggttgccatgatcatgctccgaactctgtaccgcgatatttccaagtacaaccagctagaggaccaggaggaggcccaagaggagtctggatggaagcttctccatggcgatgtgttcaggcctcctgccaatgccgacctgctgtgcgtgtacgtgggcacaggtgtacagttctttgggatgctgctggtcaccttgctgattgccatcctggggctcctgtcaccttcaaatcgtggagggttcatgacagccatgatcctgctctgggtcttcatgggcctgcttgcagggtactccactgcacgtcttcacaagatgttcggggggctggaatgggagaaggtcgccatcaagacggtcttggtattccctggagtcgtcttcgtgatattctttgccctgaacatgctcctctggggcgtgaaatcatctggggctgtgccattcaccaccatgttggcactggttttcctgtggctcggaatctcaatgccactcatcttcgtcggcagctaccttgggtttaggaagcctgccatacagggcccagtgaggacaaacaagatcccacgcctgataccgcagcagccatggtatatgaacccagccgtctcggtgttggtcggaggtatcctaccctttggtgcagtgttcatggagctcttcttcatcctgacaacgatctggatgcaccagttctactacatcttcgggttcctgttcctcgtcttcgtgatcctgatagtgacctgcgccgagatcaccatcgtgctttgctatttccagctgtgcagtgaggactaccagtggtggtggaggtcctacctgacacccggctcgtcggctctgtacctcttcctgtatgcagcattctatttcttcacgaaactgcagatcacgaaggcggtctccggcgtgctctacttcggctacatgctcatcgcggcttatgccttctttgtactcaccggcaccattggcttttatgcctgcttctggttcaccaggcttatatactcttcggtgaagattgactaggaagctagaatgccatcgtttcatggtcggcaagagaaatcagaggtcaaagttgtgaaagaatacatgaaaatgtagcatggtttatgcacagaagtaaggtgtccatagggtatctattcgtctgataattcagttacacttttgcgttcagtaaaacttgaggtatgtgcgcgcattattatcacgcagtttacagaattgagatggtacttctagcctgaaattctgagcatctcatgtagacatgttgtactcctctttcatacaaaaaatgagtcgtcatttggggcaggggcatgaccacagtctacaaaagataatactttcactatattttctatgaggaagtaataattcaattaaaagactgtacgctattgtaatatttttcaccataagtctagtaaaaatgatt

SEQ ID NO: 104916 - DNA, 269 bp, Zea mays
  Clone ID: MRT4577_27185C.1
aaatttatttgataactctaaagaagaatacggagggtggggttgctttaaatatctggcccgtcaaccaccagaaggaaaaactacttgcctttataggtgccctttatcagaaggatgaactcactcactgactgaacgaattccgtattttagaaaccatgaaccgcgcgaaggttaaaaaccgctaaacttaggaagccgaaaaatgaccaaacttaactagtgagctaaacataccccaagatctattggcagaccttgcaaaa

SEQ ID NO: 104917 - DNA, 426 bp, Zea mays
  unsure (1)..(426): unsure at all n locations
  Clone ID: MRT4577_27186C.1
ccacgcgtgtctttggacgcgtgcggtcatctacttccaggggggggggggggcggcttgtcaagaccactgttccagctgctgcctgctgctgcatgagtattgctgagaatatgcaactgttggatggctgaaagctgcagctgcaactagcagccgaacaagcactagatggcctcagttcaccgtgagtgggggcggggctcgaacataacaacttatgactattgagaatatctactaggaacccctctgtataatattactagatcctgtttttttgtattttgtttcctaggactagcttgcagtgttgctgagctcctgatttgcttgtgttgtcattatgactatgatggtgtggagagagatgggtccttgtgngtgagagggggtgatttttaaaaaanaaaaaaaaaggggggg

SEQ ID NO: 104918 - DNA, 547 bp, Zea mays
  unsure (1)..(547): unsure at all n locations
  Clone ID: MRT4577_27187C.1
tgttcngcacgagggcactaccctgcagggcggcactgcactgcacttcagtctacagaactctccaccctcagatcggggcatgcgggctgcacctgcatcacctaaccaaatcctccattagactgcggtggcgatttccgaagcggggcaccggccgacctattgcctttgcatgcggggctatctcatatatcatccttatgtcttctctgctttgctctgcgcttgagtgcactgcgcgacaatatccccttccccaacaagacacaaattgtgacttactgagagatcatctttagtttcttcattctctttgcacgaatctgcgtactttttgcgtcaaccactaaacccgtaccaagtcttcttccctcagggcaaatgcgccctcacccaatcactccatgagagggcaaatcatggctgactttggcggctggctatgcatgttgcagacatactatgcctgccaagccggcggacgacaacgaccactggctcctcattgatatcctacgcgcaggcctgatagacatccattctg

SEQ ID NO: 104919 - DNA, 612 bp, Zea mays
  Clone ID: MRT4577_27188C.1
ggaggatcccttcggcgctgcggtgggtgtgaggtctgcgcggggttacccgggccctgctccgtctccaggcgctgcgcggggtattcgtcgccggcctcgttctccaggcgagacgcgacggcaatcgcgccggcgtcggtggtggtggcggtggccgccgcaacagcaaagctggcggcaccattgacgagctcctgtcgctacaggaaactgatcctggctactacaccgacactgtcatcaaaggcattgtctcggtgagtagtctctcctgtgaatcgaccacccttgtgttgcaatctcaacgatgatgcgtctgctgctgcagatactgctcagtgcgggcacagacacgacggcgctgacaatggagtgggcaatggcgcagctgctgacgcaccgggacgcaatgcagaaggcgagagccgagatagacgccaacgtcggcacatcccggctggtagacgagtcggacacgactcacctcccgtacctgcaatgcgtggtgaaagagaccctgcggctctgccccgtcggcccagtcatcccggcgcacgaggccatggaggactgcgccgtgggcgggttcctggtccggcgcggcaccat

SEQ ID NO: 104920 - DNA, 341 bp, Zea mays
  Clone ID: MRT4577_27189C.1
ggacttcgggctggcgcggcaggcagatcacggttagtcccccgacgcgacggcgggggggggcaccatggggtacctggcgcccgattacctactgacgggccgcgccacctagatcacctacgtgttcagcttcctcgtgctggcgctggaggtggcgtgcgggcggtgacctatcggcgccgccggcacggccgagggcggcaacctggtggagtgggtgtggagcctgcacggtgaggcccggctgctggacgcggtggacacccggctgggctgcgggttcgaggaaggctaggcgaggcgcgtgctgctgctggggctggcgtgctccagcccgg

SEQ ID NO: 104921 - DNA, 242 bp, Zea mays
  unsure (1)..(242): unsure at all n locations
  Clone ID: MRT4577_2718C.1
aacagcaacaccacagaccatatagaagtatggggatgaancgcatcaaatttaaaaaacacatcaatacgaacggtcagtgaaaccagaccaacggcttacaggtatctggttaacagccaatggtctaaagcattatcttgcattgctggttttaggatacgatttgggtcggacattacatttggcagtttaccttgtttaccatggatactttggtcagacgtgcgggatatactggc

SEQ ID NO: 104922 - DNA, 551 bp, Zea mays
  Clone ID: MRT4577_27190C.1
gcctcattttttttttttttttttgatatcaagggtatggatttaaaataacagagatctaatgggattcacatgatcatggatcgacgactcacatttattcgcgaaggggtatctggcaatatgatctcagtcgttcactccgcatcccacggttccgattcaacagaacgacgaggtattcccagcatgatctccaccatccggtaaagcatcaatagaccaggcacgttcatcttcctcacacccctgcctaatcccacgccggcggctaggtgcgagcacagagagcgacgcggagagcgacgatgcggaggccgaggacgacgaagacgacctagcggctttggctgtttcttccccgacgcggcgagcacaccaacgcccagcccgccggcgaccctggcccccaatccgactgctgcagcacgagataggggtggagataaaatcgaataggatatggggatggttaccgcaagcatagggggaagcgagaccaccgatggcgtagtcatgttccggattccaacaatggtggtacaggcggc

SEQ ID NO: 104923 - DNA, 323 bp, Zea mays
  Clone ID: MRT4577_27191C.1
ggaccaactagcagcatataatgcacaataatgtaccaacaaaggcagccaaaagaggttgccttcttatgctccttggactatctgcaagtgctgctacggcgaccattttatctcaatgctcacaagctcctatagcttccattattccaacgatcctatcatcaaagaaatattcaatatggtaaaatcccaatttttaactctacatgatatttcaagcattagcatcaagcatcttacctttatcactcctggttcgcttcaacaatcatcagccctattacagcagttacctttggtgcatttattggcacaaaaca

SEQ ID NO: 104924 - DNA, 419 bp, Zea mays
  Clone ID: MRT4577_27192C.1
gaacacccacccgtgcgagtactcagaatcataaactcaacctgccactctctggtttttaaacagatgccaaacaaacaatctgggtggggattaaaaaccaaaaacccccccccaacaccactacccaatccaaagagaaccaaccacataacaatctacccagaccacacaataaagaacctcacacattacaccctacacctgatatccacacattatcccaaaatgacaccacctaacacacgcagaaccccacaaacctgcacacatacccatacaattacagcatcaaaatccagcaggccctacactccaaccataccaaaaaataataacaaaaaaccaaataactgaaatcccatcttgacataacaaacttgacaaaaaaacgttacacacaccaataaccccaaaaa

SEQ ID NO: 104925 - DNA, 294 bp, Zea mays
  Clone ID: MRT4577_27193C.1
gaagcctataggcacatgaaatttgaaggaggtgttcacagagtacaaagagtgccaaagacagaaaagcaaggccgggtccatactagcaccatgactgtagcaatattaccccagcctactgagattaatctggtgattaatccgaaagatttgagaattgacactaagcgagccagtggagctggggggcagcatgtaaataccacggacagtgctgtccggatagttcatcttccaacaggtgttgtttctgaatgtcaacaagagagatctcagctgagaaataaagag

SEQ ID NO: 104926 - DNA, 229 bp, Zea mays
  Clone ID: MRT4577_27194C.1
aagctctcgatctccccgactccgaggaagaagagatctctggcgtccgagcagggagccgtgatcgcgtgccacagcaaggctgagtttgtcgcccacttgaccaaagcccaggtaagccggctagctggaggtcttcaacttcactgccgcctggagcggtccatgccgagccatcgccccactgttcgtcgttctcgccctagttgttcaactcatgccgacgtcc

SEQ ID NO: 104927 - DNA, 387 bp, Zea mays
  Clone ID: MRT4577_27195C.1
agtatcagaaaacacatattggagtgcagaatagcaggggggtactaacatacataacatggcacatatgaaaacagccatccaggttcaggcgatggatccacacattacgaataccttagtgacataacgcgccgggtggatcgacttggcactttccaagcggaagaaccactggctgaatcacaatacaatacagaccgcctattcctggtcggtaaaggtcaagaggggaagatcgacgccttcttcatctgaatgtgggtcctcacccacctgagcagcctaagattctgcttccgcctatggagcttcatacggacgaagatctgaagagaaaatggtcggccagctaccagactattgcacggcccgaacttggtccgg

SEQ ID NO: 104928 - DNA, 604 bp, Zea mays
  Clone ID: MRT4577_27196C.1
agttaattgtacatcatggtatttagtgattgaactaattcgcgtagtgtctagctgcctatccacaccagcacaaatatagtattaacactccttggtatcgattgacttagaggactaccataagatataccagcaatataaaaaataaaccaaggacgtaatcgtgtttcttcgctgatcagggtggaacccagttgatgcgtggaatctactgccatacacatgggttttgaattagtaaatgcgattagctaaaagttgattttagattgtaatcaatatttggtatatttatcatgaccattgagcttcgctattgtctatttgactcttgtaccaacacaattggcgttgagcttggcctggtttaatgttgctttgatattcatatgtacttgacaggactggagtctaaaatagttgtatgtagaataggtgtgggggtattgccaaatatgcaaaaaaaaatatcacacttagcaatccactttagcaggatgactatgaatttgttaggaaagttgggagaggaaaatacattttcctatcgcgacaccaactttcttaacaaccccacctgggtcaatatctccatgaaatg

SEQ ID NO: 104929 - DNA, 271 bp, Zea mays
  Clone ID: MRT4577_27197C.1
tatttattcatgctaaacagccatttaaacgggctaaacagacgtggtaagtcactgtgtggtgtgtacacgaacaacatttttttttgcttatccttgcatgatcaatacactactgcaatattactgctttattattgcttttgtttcatgaaaatttgcaaggatgacatcacccgttatatgtactttttaaactgttaacaccaactaatacatttgacagcatctgtcttgtgcccaaagaacataccccaacaccccctggcac

SEQ ID NO: 104930 - DNA, 610 bp, Zea mays
  Clone ID: MRT4577_27198C.1
agaggaggtagcgaaggcgactccgcagtggagctcggaaattcggctcgagcggtgctggagatctataacgaggagatctacgatttgctcgtgggaagcggggccactgctaaaggaaacacccccaaggcaaaactggaagtaatgggaaaaaaagcgaagaacgcaagttatatatctggaaatgaagctgggaggatatcaagagaagtgtttaaggtggaaaaacgaagaactgtgaagagcacactttgcaatgagagaagttcacggagccattgcatgattatcctggatgtcccatctgtgggaggaagattaatgcttgtggacatggctggatctgaaaacatagaagctgcaggacaaacaggatttgaagccaaaatgcagacagcaaaaatcaatcaagggaacactgctttgaagcgagtggttgagtctattgctaatggtgattcccatgttccattcagggacagcaaactcacaatgctactacaggattcattcgaggatgacaaatcaaaaatcctgatgattctgtgtgctagtcctgacccaaggaactgcacagacagtttctactttggaattggtgctaagc

SEQ ID NO: 104931 - DNA, 289 bp, Zea mays
  Clone ID: MRT4577_27199C.1
agacaaacgagccttccttcttccttgaaactgattccatgtttctgaccattgcaacacgggttgtttgggggggggggggggggggcttcccctccctccctagtttataatccgtagcacctccatttcggaaacatcctataaattataattctctcagctccgcataacagagatccaggttgctgggtaccctagaagtggacattaccaggcaatctatttggattgtcgaaggagctgttaaaacctttttggttttgggccactttttactgcatttaca

SEQ ID NO: 104932 - DNA, 636 bp, Zea mays
  Clone ID: MRT4577_2719C.1
ccggccgggaggatatcactttggctgtatggtagtaattcagttcatagatgctgccacatcagttcctcctccattgtcaaggtagctcggcaagaatttggtggacaattttgaccttatggtaactaagagatgtttactgatagtagctggctaacgccactgacacagagaaaatcgaaagcccaatctgattcagcatcgattcaagtaccccttaggcaatgctgattcacagcaggagggagcaaaccaatcccgcaagtgtgcctggcccatcggaaggccgatgcgctggagtctcggagaacacccagcgggcagtgcctatgcaaggccggcggcggcgacggcgggtcagctcacaggaagattgctcgggacggacggagagggaggctttgcgtcaaggaagaagtcgttggtggtactcattacccagtggtcatgttcaaactcttatccaccttttttttttgaaaggggtcttatccacctcatttaggctttgttcggttagctctcaatccatgtggattgagcgagattggatggatttgaatctcaaataagtcaaacttcttctcaattttttccaatctcatccaaaaaaaaaaaaaaaaacccgcggcc

SEQ ID NO: 104933 - DNA, 122 bp, Zea mays
  Clone ID: MRT4577_271C.1
cggacgcgttggggctaccgttttcgttttacgccaggtgccgaggcctctaggtctggtttcctgctacgatccattagccagcatctgcaggtggacactattatgcttgacgtgaatgc

SEQ ID NO: 104934 - DNA, 303 bp, Zea mays
  unsure (1)..(303): unsure at all n locations
  Clone ID: MRT4577_27200C.1
gaattagcgaccgattttcaggtatgagagcaaaaacaatcccagagattttcaacttgtacaatgagctgtggctgtgctgtgggggagcggcaccagcagaaatctgacgatacagagagacatcagtatcacgccgtgcttgctggtcgagttttttataggtgagcatgtgagcgctttcttgtcactgtggttcctgatttgncagtccttatcgacagtttcagcaaacagaaagtacccatcaacaggaccattgcccacagcccagtacccgttgggtacgcatgggggggcatg

SEQ ID NO: 104935 - DNA, 629 bp, Zea mays
  Clone ID: MRT4577_27201C.1
ttaggggctttttttttttttttttttcttacaaaatattctttttatttctaaaacggaaggttattacataggaacagttacatttattacaagtcctgatatactcaaagtgcataacttattacaatatcaggaaggtaggaaccctccaaagcttaaacataagcctaactaatcttcctccagaactggaaacaccctccagccttaggaacacctagagtactcctcatcaccttattgcaatgaagaggttccaaatccctctattaaatacccagttagatggctcccatcacttgatgagcaagcactaaagcagactcctcttccgaaaccacttcttgaatttcatcttcttcttctaggaattctttgtcgagcatggaacaagtagtacacggtcaagaatacttgtgggaagccttgtccacggggaggtgaagaacggttgggtttggtcaccacaaacaagaggttggcattcagctctggagtaaagcaaaattggtggctgaaagagaggatgcacaccagcaagaataccaggactccagcacctttgtagtggactgggactagagctcgagaacaagggagaaaagcttttttttttttttctggag

SEQ ID NO: 104936 - DNA, 3461 bp, Zea mays
  unsure (1)..(3461): unsure at all n locations
  Clone ID: MRT4577_27202C.1
tcacctattcaccccccctctaggtgctctcaggaacgtacccatcatcaccggttcgccttccggtgttgtggccacttgagtgtaatagatccgtctcgttttccttgtatttttggccgcggtattggttgccgcatttcccttagaactcccagaactctgttgattatttgattgattctgcctcgggtatggacagtccttaataaaatgcccggactttccacagttgaagcagcctgttgatgagctgggaagagcagggaaacgagtgccaggggcacccgactgatttgtagaggtgggggcagcggtaggacggatgaaaactggttgcttgaaagggaaggagggtgggtgcaatgaagaacaattcggattgaaaggctggatgaccaacttttgtctcttttcaggcccctggttgggcctgtcgcctccaattccctttgatttgccggagcctgcatatttagcttctactgccagcgccgtgctgacagcccttccataggtaagatcgatgcaggtggccatctttctttgcatccgatcattcaagcctctcatgaagcaattcctcttctttatatccgtgttgacttgatcgattgcatattggtataagtggttgaatttattgagatactgggtgacagtatccccgccttgcttcagcttcataaactcctcctgcttcatatggaggactccttcaggtatataatgctctctgaaggccaacttgaactcatcccatgtgatttgatgaccagccggctgcaagttatcaacagctgagctaagctcttccacgcaagctcgagctctagcttcctttgcccaggctggtgaacgagagttcacagcccagtcgagcgctagatcctgatccactagctggtcttgcaggtggtggatttctgttctcaattcattggttctttcgccatccgcaacccatagatcgttcctatgtcggagttctgcacgaagctgatcaacttgtgcttctagatccccaatcggatcgttactaccactgctgctaccatgggaggcaaaaactcctccccaaatagatagtaaaaagtttttaatggggggccttccctccgcagccctagtcttggtgctcgtctttgggtaccacctttgaacagaagcaacaaaaatttgccgcttcctcaccgagagcacagatacaccaccgtccagcctcttgccacggagggtacactctactctcgccaccgctccacgcccatttcgtgttatcttattctggccttagtctgcccgaggcaaggcttacccatgacgaggcatgtgaccagttaaagggtccgcggttagcacaccntacatacacgttcaatctttaatcaacctgggtagaacatcactcgttcctaacccaagtcccgatttaagtatttccacccttaggattgtttgttttccttaggatgaaaagagcatcatagggaactttgcagtaagatcccaccatgctcccaatgaaaatataaccttgcaggtagaagtcatctttcctcaggataacccctgagcaaggccttaacgcaaaagacaacctctatccacaagatctaagcagggctaagcatttttgtaaatcaaattttgatacttccaaagaagtatctataacaggtatggatatcaaggaaggaaatgcatcaaagggtttcaagcaactcctataaacctaatgcacatttcactagacttaaagtgtgcgaaaagtatttaaaaacacaaggaaggggttgcatgcaccggggcttgcctgagtaacactaggttagtgtttgttaggcgaccacttgacgatcatccttatcctagcacttgatcaggcaggttcgttcatcagcatctccatgcagagtagtccgcgcttggggtcgacttggctcgtcttccgcattacgcgatcaattatcgtacctaattgagatgcacgatgcacatgaatgcatataaacaggaatattacaaacctaaatagtactatgcgatagcgaattaactcctagcggcgaggcgttgaacaatttcatacagagatacntaattatcgtcgtacaattaagcgcaataattacgcttcttgaacttatcgcaaacatcacgaacaacaaactatacacatgaaatacaattagcctaatcacaatttatcagttaattaattaaattctgaactaatcccttgccttataaattatactacatctttataaatgattaaaatattttatcattacacatgcctactaaaattctactcggttcactaattcagctaagtgaccagaatagcgaaataattcgccatagctgaatctggctcgataatcgcaagaactgcgaagtcgacgagagtttcgtgacttacgcaatttatcgagcaacttaatgagtatcacactagtacattaatttatttaatgattgaaccattctaaacaatttatcagcttagcgtttccacatcagacacgaatccgcgagatcggtagcgattttccgatccaggcaatttatcgagcgcttagggaatatcgcgctgctagcttcgtcttcacccgattcttgggttttcttgctgacgcgcggaacgacgatggtcctaattcaggcgttttgtcgagcaccaagcaagcattgcacggcatgatgacgtcgaggcgaggatcaaagatggacaaccggcacggcgcgatggcagcttgagccttgaacagagacgagaccgacggcgaggttgaagctggacggggagccgatggcgctggggcaagggggtgaggccgagcgccatggggcaagctggaggacgagctcgggcgtggagatagcagaggggcgagcaccacggccaggcgagcttcggcaagcgcagctggacgcgagcagaggcagggattcgagctgggggctggggcgagttcgccagggagcagaggaaatccgagcgcaaggaggaagaaacagctgggctgggcgcgcagagaaatcggctggggagtgagggggaagcagctgcgtgcagcgaggaggttccaggggcgcgcccgcgcggcaccagggggaagacgagggcgcagggagccatggagaggacgccgagaatctgagttgaggctggacaccgcgaggaagaagacgtgggcgcttggcttcggaacttctgccgacgagcagggtttttaacagtgcggcggctgagatcttttccaaagataagatcggctggaaaaatccaagctgcgggcggctggagtggaggataggatcgcgctggatttttccacggatccagaacggcggccggatgaagatgagcagaaaaatcacggcagaaaaaatcaaagggagggaagagagcccctgtaccaacacatgaacgaggaattttccccttttta

SEQ ID NO: 104937 - DNA, 1824 bp, Zea mays
  Clone ID: MRT4577_27203C.1
aacaaaaaattctttttatttctaaaacggaaggttattacataggaacagttacatttattacaagtcctgatatactcaaagggcataacttattacaatatcaggaaggtaggaaccctccaaagcttaaacataagcctaactaatcttcctccaaaactggaaacaccctccagccttaggaacacctaaagtactcctcatcacctacaacaacatgggttcaaaaaccctgagtacaaagtgtactttcgcaagtcttaaccgactaaaaaaaatgactctcaaggatatgctggttaaataggaatcaaggaaaaggctttagcaagaatcaacttaaatacttttgcagaaataacttactatagggagtccttactttcaatattttaacggcagattaaatattaatagactctggttgcatctagtctaatttcaccatctcatcaatacaacatcatttttattcataatgtttacatcctgacttaggttgcaggtcggagatcaagtctccactctccggggatataacggcgatccaaatcgatttactcagctgaggatctctaaccacacgacatatgtagcacttaacccttgcatatgtcagccgttcccacaaatcctccacaacgtgaacaggtccgcgccacccgagagcacaccaccgcttttaggcggtactttgccaggagggtacgtgccactcttgccatctctccactcacagtgcgcgattgtcttttcatgtatggaatagtcgggttcaagcttaccctgtcccatatcgtggccagttaagatagtccttgatcatacaggcctacatacgcatccaatccttaattaacctgggtagaacatcacatgttcctagcccaagtcccgatttaagtacttccatccttagaattgtttgtgttccttaggatgaaaagagcattatagggaactttgcagtaagatcccatcatgctcccaatgaaaatattcttgcaggtataagccatccttcctcaggatatcccctgagctaggcattaatgcaaaagacaacctctatccacaagatctaagcagggctaagcatttttgtaaattgtattttgatacttcatcagaagtatctataaaggtatggatatcaaggtaggcaatgcatccaatagtttccaagcaactcctataaacttaatgcacatttcactagacttaaagtgtataaaaatcttttaaaaaacacaaggaaggggtaaatgcaccggggcttgccttattgcaatgaagaggttccaaatccctctattaaatacccagttagatggctcccatcacttgatgagcaagcactgaagcagactcctcttcagaaaccacttcttgaatttcatcttcttcttctaggaattctttgccgagcatggaacaagtagtacacggccaagaatacttgtgggaagccttgtccacggggaggtgaagaacggttgggtttggtcaccacaaacaagaggttggcattcagctctggagtaaagcaaaattggtggctgaaagagaggatgcacaccagcaagaataccaggactccaacacctttgtagtggactgggactagagctcgagaacaagggagaaaagcttttctgaactcagccgtggaacacactgaataaataggcatggggaggggtcactgagctcatccacaattcagtgcaagaatacaagggatgtcaacacagcatactaattgacgtggctcccatgcactaaatgcacacaagtctacacgtgcacctaggacactat

SEQ ID NO: 104938 - DNA, 366 bp, Zea mays
  Clone ID: MRT4577_27204C.1
aagggaaaacaccataaaacataaaaaacttgtttgacaattcaacccgggatggccccaaaaattgcaaaccctttagtccagctgccaaaaaaagcataaaaaagctggggcaaaaaccaaatgtcaggaagcttagggaaaaaaatcttcccccttgggacaacatccccttccgctaatttggaccattgcccccccattggggctctggggctccatgcccattacaaacaaacaggtattttttttatacaaccccattaaaagcccctttggggccgcttttgtggaacattcacttgaaaaggggggcccgccaattcctgtccatttagggcccaaataacatcattgggttccccc

SEQ ID NO: 104939 - DNA, 621 bp, Zea mays
  Clone ID: MRT4577_27205C.1
accccagactccagccagttgcagcgtgtgtgagggtggtaaatcttctgtccacaccagtgttcacctctccccctcccagtttgcctagtccctaggtggtgaccatcgtcagcagttagtccacctcgccgtagaccagtaactcccagcacgaggactgaagattcaagctgaagtggtgactgaagaggaatctactccagtggctgctgatcaagtggaggagccatctaactgggtagcttgtagagggatctagacctcttcactgcagcaaaggcaagccccggtgcatgcaaccccttccttgtgttttttaaataatttttgcacactctaagtctagtgaaatgtgcattaggtttataggagttgcttgaaaactattggatgcattgcctaccttgatatccatacctttatagatacttgatgaagtatcaaaatatgatttacaaaaatgcttagccctgcttagatcttgtggatagaggttgtcttttgcattaatgcctagctcaagggttatcctgaggaaggatgactttctacctgcaagaatattttcattgggagcatggtgggatcttactgcaaagttccctataatgctctttt

SEQ ID NO: 104940 - DNA, 891 bp, Zea mays
  Clone ID: MRT4577_27206C.1
ggccgcttttttttttttttttttcaaagaattaaactttgaaatgttataaattatttataattttgaaatatatgctagctcaatgacaatcctcaataagaattataggagaggtacttagacttataagaaggtcgtgccaattggcgcttaacaccatccacagtagcacaaatctagtacctgcaacaacatgggttcgaaaaccctgagtacgaattgtactttcgcatgtcttacccgactaaggaaaaatgactctcaaggatatgctggttaaataggaatcaaggaaaaggctttagcaagaatcaaattagatacttttgcagaaatagcttactacagtgagtccttactttcaatatttaacaccagattaaatattaatagactctagttgcatctagtctaatttcaccatttcatcaatacaacatcatttttattcataatatttacatcctgacttaggttataggtcggagatcaagtctccactctctagggatataacggcgatccgaatcgatttactcagctgaggatctctaaccacacaacatatgtttctcgtaactcttgcatatgtctatcattcccacggatcctccactgcatgaacaggtccgcgccacccgagagcacaccaccccttttagacggtcctttgccaggagggtacgtgccactctcgccatctctccactcccagtgtgcgattgtcttttcatgtatggaatagccaggttcaagcttaccctatcccatatctagggcatgtggccagttaagatagtctttaatcatacatgctacatacgcatccatccttaattamctaggtagaacatcmcyattcctagcccagtctcgattaagtacttc

SEQ ID NO: 104941 - DNA, 3135 bp, Zea mays
  Clone ID: MRT4577_27207C.1
acaaaaatattcttttcatttctaaaactgaagggtattacataggaagagttacatttattacaagtcctgatatactcaaagtgcataacttattacactagcaggaaggtaggaaccctccaaaccttatacacaagcctaactaatcctcatctagaactggaagcgccctccagcctcatgaacacatagagaactcctcatcacctacaacaacatgggttcgaaaaccctgagtacggagtgtactttcgcaagtcttacccgactaaggaaaaatgactgtcaaggatatgccggttaaataggaatcaaggaaaaggctttagcaagaatcaacttaaatacttttgcagaaatagcttactaaagggagtccttactttcaatattttaacgccagattaaatattaatagactctgtttgcatctagtctaatctcaccatctcatcaatacaacatcatttttattcatgaggttcacatcctgacttaggttgcagggcagcgatcaagtctccactctccggggatataacggcgatccgaatcgatttactcagctgaggatctctaaccacacgacatatgtagcacttaacccttgcatatgtctaccgttcccacggatcctctactgcatgaacaggtccgcgccacccgagagcgcaccaccccttttaggcggtcctttgccaagagggtacgtgccactctcgccatctctccactcccagtgcgcgattgtcttttcatgtatggaataaccgggttcaagcttaccctgtcccatatccagggcatgtggccagttaagatagtccttgatcatacaggcctacatacgcatccaatccttaattaacctgggtagaacatcacttgttcctagcccaagtcccgatttaagtacttccatccttagaattgtttgtgttccttaggatgaaaagagcacattatagagaactttgcagtaagatcccaccatgctcccaatgaaaatattcttgcaggtagaagccatccttcctcatgataacccctgagctaggcattaatgcaaaagacaacctctatccacaagatctaagcagagctaagcatttttgtaaatcatattttgatacttcaccagaagtatctataaaggtatggatttcaaggaaggcaatgcatcaaagggtttccaagcaactcctataaacctaatgcacatttcactagacttaaagtgtgcaaaaattatttaaaaacacaaggaaggggttgcatgcaccggggcttgcctggaataacactaggttagtgttgttagacgttgtccgcttggcgatcatcctttgttctgatacttgttctgattatccatcttcaggttaatccaccagcatcatcttgcgaattagtccgcgcttggggtcgacttgagtcatcttccgcatcacgtgattaattatcgcgcctgaatgaaatgcattatgcatatgaatgcatatagaaaggaatatcaaaaaccctaaatagtgctacgagatgacgaatttaaacacttagcggcgaggcgttgtacaattttgtacggaaacactagttattaatatatgactacgcgcaataattacgcttctctaaattaaccgaacctaacgcgaacatcacaaaacaacaaattatacacctttaatacaattagcctaaccacaacttatcaattaattaattgaattctaaacttatcccttattttataaattacactacatctttataagtgattaaaatatttcatcagcacacatgtctattaaaattctactcgagacactaattcaactaattgaccggaatagcgaaataactcgctataactgaacctggctcaataataacaaaaactgcgaagtcgaccagaggttcgtgacttacgcaatttatcgagcaccttaatgagcctcacactaacacattaacttattcaacgatcggattatactgaataatttatcggcttaccgtttccacagctgacatgaatccatgagatcagtagcgatttttccgattcaggcaatttgtcgagcgcttggggaataccgcgctgctagcttcgtcttcatccgatccttgggattcctcgatgacgcacggaatgacgacgatcttcgattgaagtcttcgaccgagtacttgataagagatgcacagggacctcacttatttttgtctaaagtccgagattcgtggtcgacgagatcgagcagagaagaacgaggttcgccgggctcgacaacgatacgggagagtgacatatatggagctgtaggtctggcgagctgacgtaagggatcgtagctgctgcttcgacatgaattacttgctgccgagcatgacggaagccggggagctgccgacggtcggcccgagaacgacgatggagcagcggacggacgagcaggaaaacattagagaaagggatcacgccggtcaacagagaagcgcgcggcgagcatcagggaaacagacaagcgactgccatgggagggactccgagcggggggaaaaactgcgcgcggggaaggaggcctcggcacagcggccatggccggatagagaggggatgggacggcgcgcagactaggcgagtagagaagagtggctgagctgggtgagctcggaccggcgaggagaacagagggtagggcgcggcagcctggaagaaataacacagtccgagcgccggccatggagagacctcggcaggacgctctcccatgggagatacagggagatgggaactcgagttgtagggagctccggtcgggctagggattgggcgagctgcacggccgggagctccatgggtgggagaaggagcgctcggctggccggactggaaaagagaagaacaggggcgccgtggctggatgcgagaaagagcagagagagagctcagctgggagaatgacgacggtaaaaatcctagcagcagataagaagagacggcaggaatttcaacagaagaacagtggtgggattttcttttgctttccagaatacagcgacgcggcatatcagatggaagagagaaagcggtggagagataaggcgagggaagggagaggtacg

SEQ ID NO: 104942 - DNA, 353 bp, Zea mays
  Clone ID: MRT4577_27208C.1
ctacgagttacgtggagaacgctcacgatgatgcagaggatcggcttgatctctatgccaacctcaacacgccacagagagaaaaactgagcgaaattataggtgctcttcacgaaaaggatgaactcttggttagccaagacgactgccatattaaagaaaacaaaaagcatgtttaggtcaaaaatgcttatactcaggcagctgaaatacgtgaaaaattaactagagagctaagaaccggccatgatattatctcagcaccttagaaacgaaaccgctaaatcaatcgcaaagattgctaaactagatgagcgagatgattcaattgttcgccttagaaacgataatgc

SEQ ID NO: 104943 - DNA, 256 bp, Zea mays
  Clone ID: MRT4577_27209C.1
ctcagtaagcttctgaagacactagtctaactcctacgcaataacgaccacagctacagcgcttggacgcagtacgcagcagcagtaggagatgaacgccctcgtcgccacgtccacgatggtcttattcgtcaagcagcgcatcgcaagcgcgagactcaccgtggactgctccgccaacggcgttgacgacaacggcagcagcaacagtgggtcctacgcatccaacttgaacacggtcaagtgagggaggcgt

SEQ ID NO: 104944 - DNA, 1905 bp, Zea mays
  Clone ID: MRT4577_2720C.1
caggcttcctgatggtagaataaaggtctggatacatgttgctgacccaacatgcttggtcaaacctcatagcatcattgatagggaggcaatgcacagaggaacatcaatctttctaccaaccactacttttccgatgttcccagagaggcttgccatgaattctatgagcttgcagcagggtaaagaatgcaaatctgtaactgtatctgttattttaaacctagacgggaggtaattttctacttacaactcattttttctgctttctgagtgggttcttttcttgtttcctttgagcttgacttttctttttcttttttttaaaaggaatttcttaagaatgtagtgcattcattgacattcctcattctgtttgtgctgtgaatagtattgcagaatatactttagaaaattcagtcatcaaacctacttatatgttgacgtatgagagtgcaactgtattgctttacatgaacctggaagaagaggaagaactaaggattcttcaagaagctgctaggattcgtgaacagtggcgtcgtagccagggttcaatagacactgcgatgatagagccacgtataaaggtgtcaaatcctgatgatcctgaaccaaatatcaatctatatgttgaagatcaagccaatccagcaatgcagcttgtatctgaaatgatgatactttgcggtgaggcagtggctgctttcggttttgacaacaacctccctttgccatatagaggtcacccccagtccaacacagcagtgtcagtgttctctcatctacctgaggggcctgcaaggagctttgccaatatcagcgtgctccgtgctgcagaaatggattttcaaaaacctgtaccacatggtgtacttggtattcctggttacgtgcagttcacctctcctatccgaagatatgttgacctgctagctcattatcaggttaaagcttttcttagaggtgactctccaccatattcagctggcgatctagaaggaatgacatttattgcgagcatgcatgttaaagtagctaggaggcttcatagcaatagcttacggtactggctgttggaatacttgaggcgacaaccaaaggggagaaagtacagagcactgattctgaagtttgtcaaggatcgtatgggagctctgcttttggtggaggttgggatgcaagttacaacgacaatttcacgtgggaaagcgggagatcaagtcagtgttactgtggaaacagctcatccacgtgatgatatattatcacccagagaggttgtagaggacaccaaggtttctgagtaaatgcatgtgacgatagcttatcagacaaagaggttatagaggacaccgaggattctgagtaaatgcttgcaaagctcactcgcactttgcagtcttgtgttcctctgccgtttactgctgttcatttttgtggcagtgatataggcgatttatttccttggaaaatatctgctgattcttcaagttagcgacttgcgtagcatggctacaatacaaatggtaaaaggactagggtattggtcttggtgccaaagctcattccaattcgaggacgaaatgatgaaatcataggtggttttcattggtatacagaatacagtccgacagttcgtttcttccgaggtaggttctctttgtgccgaacaaggttccaagtgctgataactgggaattttgtatagctgaacacgcatgcaacatttttgtacctgaatttggtacctctgacgttgtcggcacattctgctatatttgaacactggggtggatgatcgatgtacagaatagtaataatttctatatcatttccttatacgccctcaataaacgccctcaagtatttaattgtactatactccctccgttattttttatt

SEQ ID NO: 104945 - DNA, 594 bp, Zea mays
  Clone ID: MRT4577_27210C.1
ggtcaggaatacccgggccgacccacgcgtcaggacaccttgcccatattcaggtacttatagggcatggatatgggaagcttccttactgtccttgagctctagattccctgcatatgtaaggtggtccttgtgccgtcaagatggtgtaacttcctctccccagtctctagccttgatctgtactagagccaagcacgccagccctctccgtggtgaccattgtccacatcactgtggctagagctcccaacagaaggagtgtaaatttaagatgaagtggttgtggaagaggagtttgctcctttgcctattcatcaagtggatggagctatctaactggttattgggtagaaaggtcttgagcctcttcactgcaacaaaggtgatgaggagtactctaagtgttcctgtggctggaaggcgtttccatgtctggaggaggattagttaggtttgtgtataagctttggagggttcctaccttcctgctattgtaataagttatgcactttgagtatatcgggacttgtaataaatgtaactctttctatgcaataaacttcagttttagaaatgaaaagaatgttttac

SEQ ID NO: 104946 - DNA, 1251 bp, Zea mays
  Clone ID: MRT4577_27211C.1
caatcattaattaacctgggcggagcatcacctgttcctagcccaagtcccgatttaagtacttccacccttaggattgtttgtattccttaggatgaaaagagcatcaaagggaactttatagtaagatcccaccacgctctcaatgaaaatattcttgcaggtagaagccatctttcctcaggataacccctgagctaggccttattgcgaaagacaacttctatccacaagatctaagcagggctaagcatttttataaatcatattttgatacttcaccagaagtatctataaaggtatggatatcaaggaagacaatgcatcaaagggtttccaagcaactcctataaacctaatgcacattcactagacttaaattgtgtaaaaataatttaaaaacacaaggaaggggttgcatgcaccagggcttgcctttgttgcagtgaagtggttctagatccctctatccaatacccagttagatggctccatccacttgctgaataggcactagagcaaactcctctttcacaaccacttcatcttgaatttacactccttctgctgggagctcagagagcttcagtgatctcacaaaccaatagtgcgggcgtgaactcgaccgaaaatggcgcgagttaacgggtcggcgtagaggtaattcactgcgccaaaccacggcggcggagttacggtcgaggaaaccttcgaagatccctggccaccgtgagatgagatgaaactcgatggcactttggagatgcgcgtttggtgcaatggcctgaaaccgagtacgggggcgcctgggcgatgttgaactcgcggtagcgctgcggatgcgacgagggagaacgtcagcgaggaggcaggcgacggctggagaatttctagggagccgacgagctgttgcagagagagcagcaggtccagtaggcaacagcgaagttggggagccgagcgccggcacggcgatacaggagctagagacagtggtgttcagcagctccacacaatgatgtgccagagcaaggagacgagaacgcgtgcagtttcagccatgatccacggactcccaacacgcaaactccacgaaggaagagatcgtgactgacaagtggtaacaacagaacggcgtgtccaggcgaggcgagtactggggagaccgagcagagaggagagcgggctgagaacaggaatgcgaggggcactacgagaagggagctcggctgctgctcccggccggcctcg

SEQ ID NO: 104947 - DNA, 957 bp, Zea mays
  Clone ID: MRT4577_27212C.1
gagcagccgagctcccttctcgtagtgcccctcgcattcctgttctcagcccgctctcctctctgctcggtctccccagtacttgcctcgcctggacacgccgttctgttgttaccacttgccagtcacgatctcttccttcgtggagtttgcgtgttgggagtccgtggatcatggctggaactgcacgcgttctcgtctccttgctctggcacatcattgtgtggagctgctgaacgccactgtctctagctcctgtatcgccgtgccggcgctcggctccccaacttcgctgttgcctactggacctgctgctctctctgcaacagctcgtcggctccctagaaattccccagccgtcgcctgcctcctcgctgacgttctccctcgtcgcgtccgcagcgctaccacgagttcaacatcgcccaggcgtccccgtactcggtttcaggccattgcaccaaacgcgcatcttcaaagtgccatcgagtttcatctcacctcacggtggccagggatcttcaaaggtttcctcgaccgtgtggcgctagttttgtgctcacttaagagctcccagcagaaggagtgtaaattcaagaagaagtggttgctaaagaggaatttgctccagtgcttattcatcaagtggatggagctatctaactggtgatctggtagaagaattttgggatcttctcctgcaataaggagaagttatattcccttatctttgggttaattacttcatgtggaggacttgaagcttacattgttttcatatatctcttatggaaaggattcacccttccaattgttgtagttaagttatgcacttcgagtactatcaggacttgtaataaatacctctctttctaccatgtaaaacttgagttctgaaatgtaaagtgtactttgtaaaagccttccgctcgaaaaaaaaaaaaaaaaaggccccta

SEQ ID NO: 104948 - DNA, 480 bp, Zea mays
  Clone ID: MRT4577_27213C.1
accaagctcggaattcggctcgagattcaaaatgggtggttctaaccgagaaggcggcaaggcgaagcccttaaaggccccgaagaagcagaacaaggacctcgacgaagacgacttggctttccttgagaagaagaaggctgacgagaaggctcgcaaggagttggctgccaaggccggcggcagaggccctctgaacactggcacccagggcatcaagaagagcggcaagaaatagacgacatacgacgaagcaatatgttattgagaaacgtttacatgagcttgctgcgaagtttgcgataatatgggcggctacaagaggatgtcctgtggtagatgactacatgtattcacacggcatcgactgttggatcaagtggaaaggccgcaccgctcttcgagataagatctgtagtttccgcagggaatgttatccggcgttgggaaatatactttttacatactgatttgacatct

SEQ ID NO: 104949 - DNA, 585 bp, Zea mays
  unsure (1)..(585): unsure at all n locations
  Clone ID: MRT4577_27214C.1
acggccggggaagttgccttcttgcctcaggccctagccttggctcactgcttatgtgtggtgatccttgagtttgcaagcctatgntaaccttctccccaaccatcagttgacgctgttcagaacttgtgcgccaactcactaggaatgccatggtgaccatgctcaccctcaccatggccaagattcctcggaggttgtctcggtcgtgtggtgcccgttccctactcctcgcagaactcctaccagaaggagtgaagattcaagctaaagtggtgactgaagaggaatctactctagtagctgctgatcaagtggaggagacatctaactgggggttaatagaggtatcgagtatctcttcactgcaataaggtgatgaggagtactctatgtgttcgtgaggctggagagcgtttccagttctggaggaggactagctaggtttatgtataagctttggagggtttctaccttcctgcttttgtaataagttatgcactttgagtatatcaggacttgtaataaatattactctttcgaaacatgtaaaacttgagttttgaaaaggtaaagaatgtttgc

SEQ ID NO: 104950 - DNA, 496 bp, Zea mays
  Clone ID: MRT4577_27215C.1
agcagtggtaacaacgcagagtactttttttttttttttttttttttttttttcttttttttttttttttttttttttttttttttttttttttttttttttttttttttttttttttttttttaaaacggggaaaaggggggtccccacacccaaattggggaaaaaaaaaacgggggggcttgaaaaacaggacagggaaaaaaaaaaacaaaaaacgggggccccccgggaaacaaaaaaaaaacccagggtggggggaaacccgggccacagggtatttttttcccggggcaaaaaacagcttaaaacaaaacaccgggggaaaaaacaaaaggaaaaaacaaaccgggagccccaccgggcctagggaaaccaaaccaggcggccgaaggaacaacccttttacagccggaaatttcaaacttccgggcaccttgggggccccccgccccccaagaggcccaaatgggcagattttgtcccctctccccgg

SEQ ID NO: 104951 - DNA, 572 bp, Zea mays
  Clone ID: MRT4577_27216C.1
gacgcacaccgtcgggcggatgctggccacgctggagctgcgctccacgcccgtcgacaccagggggtacgagacgctgatccgcctcgtggacaacacctgcagcgacagcttcgacctgtacaacggcctcttcatgtacaacaagaactccaccgagctgctcaaccgcctcgagtgggccatggactccgtcaagaagaggctcttcgacggcctccacgacgtgctccggaagcagctcttcgagggctccccgcacgccccccaacgtctcctccccctcctcctccaacgtgcgcaagtagccgtcctcccaatgtcatatgtttattagtaaaaagtaaaagatccagccccaattctccttctcttctccgaccaccactgtgcttgcttgccgctcatgtcacggtcgacagcctgtatctgtatctgttattgggaatttggcagctggccgttgggatttgtgatatggtgatgtagagaatgaataaagaggcagtctttgtgcaaaaaaaaaaaaaaaaaaaaaaaaaaaaaaaaaaaaaacgtccagatgcaatgta

SEQ ID NO: 104952 - DNA, 264 bp, Zea mays
  unsure (1)..(264): unsure at all n locations
  Clone ID: MRT4577_27217C.1
cccacgcataagctcaagtgttggcatgaggaggcnccttanngnccccatttaattgattggagatgctaaagatgcgtacatggatgagccaggccccggtttagacccacttttgaggaaaagtctgtggagcgcagcgaagcaagcaaagcaggatacagaaatcattctaaccacgcattccatggaagaagctgaaactctttgggacagactgcgtctcatggtcgatggaaaactccagtccattggccctcccaa

SEQ ID NO: 104953 - DNA, 468 bp, Zea mays
  Clone ID: MRT4577_27218C.1
gaaaaaaaaaaacttttggtttttttttaaaataaaaaaaaacccccagccaaagaaaacaaaatggcccggggggtttttggttaaaccctgggggggcccagggaaaaatccctatccaaggggccaaagaaattcggtcgcaacccaggaaaaaaaaaacccccaaaagaacccggggaaaaaaacaaaatttttaagggggggccccgtttttttttggtttttgaaacaaggggaaaaaggacgggatccccctttaaaaaacaaacccaaacaaaattggggcctttacccccctttggttttttgacccaacccccaaagaaccccccccttgaggggacctggttaaaaaaaaacccccccccttaaagggagggagggggcgaattttccggacaaaaaaggggatctaaaattaaaggcacctggagaaccttttgggcctaaacaaaaaatcaccct

SEQ ID NO: 104954 - DNA, 817 bp, Zea mays
  Clone ID: MRT4577_27219C.1
attcggctcgagtgctacgacagggagcgctcctctcacggcggtgcagctgctgtgggtcaacatgatcatggacacgctgggagctctggctctagccacggagcctcccaacgacgacatgatgaagaggccgcctgtcgggcgcggagagagcttcatcaccaaggtcatgtggcggaacatcgtcgggcagagcttgtaccagctggccgtgcttggagctctcatgtttggcggggaacgtctcctcaacatccatggcgcggactccaaacccgttgtcaatacgctcatattcaactccttcgtgttctgccaggtgttcaacgagataaacagcagggagatgcagaagatcaacgtcttccgcggcatgttcggcaactggatcttggtcggaatcatagctgcgacggtagcgttccacgtggtgatcgtcgagttcctcgacacctttgcgagcaccgtaccactcggctggcagctgtggctggtagagcgtcggcctcggatccgtcagcttgctcgtcggcgccgtcctcaagtgcgttccaaatgaaccggacgatggagttcgcgccagtccaaatggctacgcgccgctgaccggcggccctgacaacatataacagctgaacctgagcggacgacaaggtactgacgacgtgctgatttttttcgcgttaggggtcataacagattatattatgtaaaaagagatggtggtgacgacaaggcacctctattttgatgggtcatacttagaagtggtaatagcctctagattttacgctacaaactttaaagatcgaaa

SEQ ID NO: 104955 - DNA, 372 bp, Zea mays
  Clone ID: MRT4577_2721C.1
cgtggacgcgtgggctgacgcttggatgggatgcattcgtaccctagaaagcatagctgccacatactcaaattgagatgatctatacaaatttcccagatacatgcaaggcaaactacatacacagtatgtgaacaatccaaagcatattaaacgggattgcatgcacatcgataatcactatgcatacaggcactgaccaccaaatgaagaatttacggtccatgtatctgaatcaagttaggaagctcttattgatcacctagatcggtaacacatacacttggaacaccaacaagctgactctaaatatctgccccggtactgtcgggggcttgctagtcaactgcgtgcccgtgttaaacttctggc

SEQ ID NO: 104956 - DNA, 212 bp, Zea mays
  Clone ID: MRT4577_27220C.1
aatcctttcaaaaggacgcactccagatctttccgcgagacctcatccctcccgatcccgctccgtgtccctcaccaacactgctggcgctgccgcttcgcccactgaggtcttgtcttacgcagaacgaccggagcccagcgaggccacgatgcatccagtgggagatgctgaagctcagcatacacgatggcatacctggagcacatacg

SEQ ID NO: 104957 - DNA, 388 bp, Zea mays
  unsure (1)..(388): unsure at all n locations
  Clone ID: MRT4577_27221C.1
aaaaaattaatatcttaataagtatctgcttttatatctaatttttagggctagtttagaaacctcattcttccaaggatttccaattcctaaggaaaattagttcatttacacttggtaaagaaaaattttcacttggtaaaggaaaatggaaatccattaaaaaaatagagttccacactagcccttanaactaaaggtctagcatgtgttattgtgttgtatgtgccttgatttgatgtctgccattgtccgatgtggcgcgccgctcacgtttctcaccgcgcatcagtacggcggcttatcaattacctgtttgcttcatgccggagtctccttcctatgcccaccccagagtctctccatcctgtgcccaccccagagatgc

SEQ ID NO: 104958 - DNA, 370 bp, Zea mays
  Clone ID: MRT4577_27222C.1
gcgcggccgggccgcgaaccggagggcggccacacattgttgactcaaagaggccgagagagcatgagctgcaaaaggggctagggcacactagtaccccagaatctggaccggagagcgaccgcacgaacagagctaattgggaaggaccagatccgatccgcaccagtatgggagcacgagcagagggcattttttgttaaggctcccacacagaacgggcggagggctcctgctggttcctaggcagcacaggaggcccacacagcaccagagaaacccgaactctgaacgaggccaccaagaccggctaattggagcgagcaaccggagtgccatatacagaatgcggcgcaaggcaactgaggac

SEQ ID NO: 104959 - DNA, 938 bp, Zea mays
  Clone ID: MRT4577_27223C.1
tgctacgacagggagcgctcctctcacggcggtgcagctgctgtgggtcaacatgatcacggacacgtgggcgctcgcgtgggccacggacgcgcccgtgggcgacttcatgaagaggccgcctgtcgggcgcggagagagcttcatcaccaaggtcatgtggcggaacatcgtcgggcagagcttgtaccagctggccgtgcttggagctctcatgtttggcggggaacgtctcctgaacatccatggcgcggattccaaacccgttgtcaatacgctcatattcaactccttcgtgttctgccaggtgttcaacgagataaacagcagggagatgcagaagatcaacgtcttccgcggcatgttcggcaactggatcttcatcggaatcatagccgcgacggtagcgttccaggtggtgatcgtcgagttcctcggcacctttgccagcaccgtcccactcggctggcagctgtggctggtgagcgtcggcctcggatccgtcagcttggtcgtcggcgccgtcctcaagtgcgttccagttgaaccggacgatggagttcgcgccagtccaaatggctacgcgccgctgcccggcggccctgacaacatataacagctgagcctgagcgccggagaaggtactgacgacgtgctgattttttcgcgtgagggaacctcgtcggaaccaaccaaccactgtctaggttcagttttaacagattatattatgtaaaaagagatggtggtgacgacaaggcacctctattttgatgggtcatacttagggtggtaatagcctctaaattttacattacaaactttaaagatcagtcggactttattactattcatttttgaactaatcggattgtgatccatcaccacccctagtcatactagaaacaaagcctctcactaatggaagtacattaatt

SEQ ID NO: 104960 - DNA, 149 bp, Zea mays
  Clone ID: MRT4577_27224C.1
ttgctgcagggcgatgtgaacctcaaggaggttgatagagtgtgcaaggctgactgttgccacatacagggaaacgagtctgctggaccgaccattgccgttgtggtgcagttacttgagggcctctatgatctcgagtgtgccaccac

SEQ ID NO: 104961 - DNA, 314 bp, Zea mays
  Clone ID: MRT4577_27225C.1
gcttcacgaaactcgacaaaccaattaacttatttaccaatgcacttatttttgaaatttacagcccagctaatggctgattcacggtgaggcaaatccatgtacattggatgagaatgactcgcgtgaacttcatcgcacgttacactccatattaatccggctcaatccacttacatgggccgcgtagggggacgcgggaaatccatgaccggttcctttacgcttaccagttttgcctataggtggtcgagttacagctggccgtgagcatggccatagccgtgacctgggtggaattgggatccgctcac

SEQ ID NO: 104962 - DNA, 297 bp, Zea mays
  Clone ID: MRT4577_27226C.1
ccaacaagaatgcggttggtgggcctagtgatccccggacgcccgggcggactcttggaccaacccggtaattgcggaccagatcatgaaggcatacaagctttacgtatagggagcaatgttacagcttggggcactgatggtcatagcatgtctcctgtgagaaattgatatccgttgacaattaaccacaacatccgagtgggaagcataaaggggaaactgtggggagcctaatgagcgacctaactaacattattcgggttgctctcactgcccggtttccactcaggaaac

SEQ ID NO: 104963 - DNA, 626 bp, Zea mays
  Clone ID: MRT4577_27227C.1
gccggccgggccgggactctgcccagctaagctaagctccctccgtccatcggcatggcgactaccactactaccatcctcctcctcctcctcgtcgcagccacagccgtctcggcggccgacctctccgtgtaccacaacgtgcacccgccgtccccgtccccgctcgagtccatcatcgcgctcgcccgcgccgacgacgcgcggctcctcttcctctcatccaaggcggcctcgtccggcggcgtcacctccgctcccgtcgcctccggccagactccgccctcgtacgtcgtccgcgcggggctcggcaccccggtccagcagctgctcctcgcgctcgacaccagcgccgacgccacctggtcgcactgcgcgccgtgcgacacgtgccccgcatcggtcggtgtgcagttagttgtcctgttagtctatgctacgttgtctgcaataacggacgtgacccggggaaaaaaaaactgtttcgtcacgggtagctagagaatcacgtaatggctcttgttttcgtttgtgtcctataatgtgtggctattggcctgtttcgagaggttaaaatttggaggtgctgcatcaaattcgaaaaaaaaaaaaaaaaaaggccccta

SEQ ID NO: 104964 - DNA, 834 bp, Zea mays
  Clone ID: MRT4577_27228C.1
agctaagctccctccgtccatcggcatggcgactaccactactaccatcctcctcctcctcctcctcctcgcagccactgccgtctcggcggccgacctctccgtgtaccacaacgtgcacccgccgtccccgtccccactcgagtccatcattgcgctcgcccgcgccgacgacgcgcggctcctcttcctctcatccaaggcggcctcgtccggcggcgtcacctccgctcccgtcgcctccggcgggcggcgcgccgcccgtgacgctgcacatggacggcggcgtggacctgacgctgccgatggagaacacgctgatccacagcagcgccacgccgctggcgtgcctggccatggccgaggcgccccagaacgtgaaccccgtcgtgaacgtggtggccaaccttcagcagcagaacgtgcgggtcgtcgtcgacgtcgccggctcgcgcgtcgggttcgcgagggagccctgcaactgagcccctgaatccgtccgtgccctatgcccgggaggaaggaggaaacgcgctgcggctgccgcatcgatcggtgtgcagttagttgtcctgttagtctatgctacgttgtctgccctctgcaaaaacggacgtgacccggggaaaaaactgtttcgtcccgggtagctaaaaaatcccgtaaggctcttgttttcgtttgtgtcctataatgtatggctattggcctgtttcggaaaggttaaaatttggaggtgctgcctccaaaaaaaaaaaaaaaaaaaaaaaaaaaaaaaaaaaaaaaaaaaaaaaaaaaaaaaaaaaaaaaaaaaaaaaaaaaaaaaaagcggcc

SEQ ID NO: 104965 - DNA, 1732 bp, Zea mays
  Clone ID: MRT4577_27229C.1
ccggccggggtgcttgggcgagagtattactcattgggtacctcgaggccggccgggaacactctgcccagctaagctccctccgtccatcggcatggcgactaccactactaccatcctcctcctcctcctcgtcgcagccacagccgtctcggcggccgacctctccgtgtaccacaacgtgcacccgccgtccccgtccccgctcgagtccatcatcgcgctcgcccgcgccgacgacgcgcggctcctcttcctctcatccaaggcggcctcgtccggcggcgtcacctccgctcccgtcgcctccggccagactccgccctcgtacgtcgtccgcgcggggctcggcaccccggtccagcagctgctcctcgcgctcgacaccagcgccgacgccacctggtcgcactgcgcgccgtgcgacacgtgccccgccggcagccgcttcatcccggccagctcctcctcgtacgcctccctcccgtgcgcctccgactggtgcccgctcttcgagggccagccgtgcccggcgaaccaggacgcctcggcgccgctgccggcgtgcgccttctccaagccgttcgcggacacctcgttccaggcgtcgctgggcagcgacacgctgcgcctgggcaaggacgccatcgccggctacgcgttcgggtgcgtgggcgcggtggccgggccgacgacgaacctgccgaagcaggggctcctcggcctcggccggggccccatgtctctgctgtcccagaccgggagcaggtacaacggcgtcttctcctactgcctgcccagctacaggtcctactacttctccggctccctccggctgggcgccgccgggcagcccaggaacgtccggtacacgccgctgctgaccaacccgcaccgcccgtcgctctactacgtgaacgtgacggggctcagcgtgggtcggacctgggtgaaggtccccgcggggtcgttcgcgttcgacccggccaccggcgccggcacggtgatcgactcgggcacggtgatcacgcggtggacagcgcccgtgtacgcggcgctgcgcgaggagttccggcggcaggtggcggcgccgagcgggtacacgtcgctgggagcgttcgacacgtgcttcaacacggacgaggtggcggcgggcggcgcgccgcccgtgacgctgcacatggacggcggcgtggacctgacgctgccgatggagaacacgctgatccacagcagcgccacgccgctggcgtgcctggccatggccgaggcgccgcagaacgtgaacgccgtcgtgaacgtggtggccaaccttcagcagcagaacgtgcgggtcgtcgtcgacgtcgccggctcgcgcgtcgggttcgcgagggagccctgcaactgagcccctgaatccgtccgtgccctatgcacgggaggaaggaggagacgcgctgcggctgccgcatcggtcggtgtgcagttagttgtcctgttagtctatgctacgttgtctgcactctgcaataacggacgtgacccggggaaaaaaactgtttcgtcacgggtagctagagaatcacgtaatggctcttgttttcgtttgtgtcctataatgtatggctattggcctgtttcgagaggttaaaatttggaggtgctgcatcaaattcgtaaaaaaaaaaaaaaaaaagcggccaaaaagcggccgatagaggcctattattggaaaacggtgaggatggtc

SEQ ID NO: 104966 - DNA, 1307 bp, Zea mays
  Clone ID: MRT4577_2722C.1
cattgggtacctcgaggccggccgggaacgtctcattaagcgctctgccggccagcctagtgctctcggctttctttcatctccctccttttgccacttgctatagctttaatgcctggcactttgcacgtcgtcgtcgacttcctgagcacccagttcgggctgccgttcctgccgccgtccaagtcgagcagcgcggacttcaggcagggcgccaacatggcgatcacgggcgccacggccatggacgcccccttcttccgctcgctcgggctctccgacaagatctggaacaacgggcccatcagctttcagctgcagtggttccagcagatcgccacctccgtctgcggacagagctgcaagagctacctgggcaactccctgttcgtgttcggcgagttcggcggcaacgactacaacgccatgatcttcggcggctactccatcgagcaggccaggaaatacgtccccaagatcgtcaacaccatctcgaggggcatcgataaactgatcggcatgggcgcgaccgacatcgtcgtccccggggtgctgcccatcggctgcttccccatctacctgaccatctaccagagctccaacggcagcgactacgacagtctcggctgcctcaacagcttcaacgacctgtccacgtaccacaacgccctgctccagaagagggtggacatcatccagagccggcacaggaagacggcgcgcatcatgtacgccgacttctactccgccgtctacgacatggtccgcaacccacagagctacgggttcagctcggtgttcgagacgtgctgcggatcaggcggcggcaagtacaactaccagaacagcgcgcggtgcggcatggcgggcgccgccgcgtgctctagcccggcgtcgcacctcagctgggacggcatccacctcacggaggccgcgtacaagcacatcaccgacgcctggctcagggggccgtactgccgcccgcccatcctgcacaactaatccacagtgcatatggacatgctggaccggcggccggcagcgcgttgtcttttttataaataatttatttattattcgtacaagctttggttggatccatcggggcgccgggggttattaattatagcattggttggtcctttcgttatatttgaccatatattttttttgtttggggtaaggtgtttattatattttgcgttgctaaagaaaaagagctgacgatggcaaagtgtacgtggaatacgatgataatgccatgattatttatagtccttaaaaaaaaaaaaaaaaaaaaaaaaaaa

SEQ ID NO: 104967 - DNA, 1149 bp, Zea mays
  Clone ID: MRT4577_27230C.1
catgtgctcaagtatgacagggacttgatcctgcacaatgcgctcctagacatgtactgcaagtgcgggagcttggaggatgcggatgccttgttccacaggatgccacagagggatgtgatctcatggagcaccatggtatctggtttggcgcagaatgggaaaagcgtggaggcattgagggtttttgacctgatgaaatctcaaggtgtggcaccgaaccacgtaacgatggttggagtactctttgcctgcagccatgctggtctggtggaagatggctggcactactttaggtccatgaagaggctctttggcattcaacctgagagagagcaccacaactgcatggtcgatctccttggccgagctgggaagctcgatgaagccgtggaattcatccatggtatgagcctcgagccagattcagtcatctggagaacgctcctaggagcttgcaggatgcataaaaacgccagtcttgcagcatacgcagccagagaaatacttaaactggagcctgacgaccaaggcgctcgtgtgctgttgtcgaatacatatgcagatctgcggcagtggacagatgctgagaagccatggaaagcgatgagggaccgaggcatgaggaaagagccagggcgaagctggatcgagctggagaaacgtgtccatgtgttcatcgctggggacctatcacacccgtgctccgacaccataattcaggagctgaaccggttgatcggaaggatcaagtctcttggttatgttccccagacagaatttgtgctgcaggacctcccgaccgagcagaaagaagacctgctgaagtatcacagcgagaagatggcgatagtgtttgggacgatgcatgcggtggatgggaagcctatcaggatcatgaagaacctgaggatctgtggcgactgccacgcgttcgcgaagcttgtctccaagagcgaaggcagggtgatcgtcatcagggaccctgttcggttccaccatttccaggatggagcttgctcatgtggtgactactggtagccaggtactgatgttgttctgtttccagattggtttcacttatgggtgacaatgggatctaatttttacactataaagtttaaatataggatcgtactatattttatt

SEQ ID NO: 104968 - DNA, 375 bp, Zea mays
  Clone ID: MRT4577_27231C.1
gggggggaaaaaagggtttttttttgccaaaaaaaaaaaaaaagatggggtttccacacccccccgggcgggatgagaaattttccccttttttttagcccccgctttttttatatagccctgttggggggttgggctaacaagcaccccgaatcggtgatacaaaaaaaaattcttcgggttggaaaaaaaaaaattggggggggccccttttttaaaccaccatccaccaaacgatggaaaaaaaaaccgaaaattaagaaaacgacaacggtttttgggtttgaaaaaaacaaacttggtggggacaattaatattttcaaaggtgggaaaaggtctggaaaaagggggtcaaacccaaaaaaccccccccg

SEQ ID NO: 104969 - DNA, 896 bp, Zea mays
  Clone ID: MRT4577_27232C.1
acaaacattctttaccttttcaaaactcaagttttacatgtttcgaaagagtaatatgtattacaagtcctgatatactcaaagtgcataccttattacaaaagcaggaaggtagaaaccctccaaagcttatacataagcctaactaatcttcctccagaactggaaacaccctccagcctcaggaacacctagagtactcctcatcaccttattgcagtgaagaggtactctatccctctattaaacctcagttagatggctcctccacttgatcagcagccactggagtagattcctcttcagtcaccacttcagcttgaatattcactccttctggtaggagttcttattgcagtgaagaggtactctatccctctattaaacctcagttagatggctcctccacttgatcagcagccactggagtagattcctcttcagtcaccacttcagcttgaatattcactccttctagtaggagttctttgccgagcatggaacaagtagtacacggccaagaatacttgtgggaaaccttatccacggggaggtgagaaacggttgggtttggtcaccacaggcaagaggttggcattcagctctagagtaaaacaaactttggctgaaagagaggatgcacaccagcaagaataccaggactccaacacctttgtagtggactgggcctacagctcgagaacaagggagaaaagcttttctgaactcagtcgtggaacacactgaataaataggcagggggaggggtcactgagcgcatccagtccatggggagaagggggcaaacctgggctagggagggggttataccagcagtacataaggactgcacactcaagcagtgaactttggctagaatttgagggcaaggaaga

SEQ ID NO: 104970 - DNA, 441 bp, Zea mays
  Clone ID: MRT4577_27233C.1
ggggaaaaaaaattttttttttttgccccgaaccccgggggggcatcagacaaaccttattaaattccagaataagcccaacatttaaacctagcaaactaaattgccccccaaagcctacaaaaacaaagcgcttaaaaggctcaagggattaaaggccctggggacaaaaaaaaccaagcccattcaggcccgggggaaaaccacagtttccaaaaactcaggcctttttggggatataatttgggtcacgggggggaccaaaaattcagtccatccaaacggggtaggggccataattggggggggaaatcctatgggggggggggggaaacccaacgcccaaaaatgggcaaaccttgcccgaaaagcaaacggggatttttgtcggccaaaccccctccaaaaaaaaaaaaacgatgtgcctcctaaaaggccttg

SEQ ID NO: 104971 - DNA, 378 bp, Zea mays
  unsure (1)..(378): unsure at all n locations
  Clone ID: MRT4577_27234C.1
gccacacctgcacaggatgaaccaatcactaaaaccgatgctcagggggggatttcacctgtttgagcggtcgactccncatttgaggctctcaacatcaacaaatacgatgttgctctcaccgtcgatcctctataccatcaaactaccgctcagtttaatcaacgctgcgcacacggccttactacgcataaccttatactatatcgacgctcaccattgctgtctcattcactaaaagctccatacaaacgcatcctaactgatatgcatactgatcacgctgccacactctaccattcatttcctacagaacccatacatgaaatggccactcaaaaacatccatgcaatgatatctctccaccctgaccgata

SEQ ID NO: 104972 - DNA, 607 bp, Zea mays
  Clone ID: MRT4577_27235C.1
gccatcacacagtacgcaaattcctcgtcaactctctagcatacgcatcaaccagcaactgcaatccaccaagttatccacgatgctggagatcgccatgctctcgctctcctcgacgccgttcactacttggaggtaaagccagagcgccagagcaactcatgctgcagccgatcgccgcgtctactctgggaccccctgccacccatagtaacatgtagctctaagtgccactggcgacatgataactaacgacgatcacgcctgagctgtgtgcctcctctatcgacagcattgcgaacggtaacgaagccgtcatgaagccgcgtgctgctggcagcaacacgttactaccatgctgaccaagtcgagatgcccacaatgaacgtgcaccagcccgcgtgatgctgccggacccagtgtaggccgaggcgcagatctccaaaggcggcaaggtaggaccgaagcgccgtagagcctgtaagaataggggtgtgctcacgaaattcaactgcacgagtgggaacttgtactgcgcgctccaccggtactccgactagtacgagtgatagttcgactaccggactgctgccagctacgccattgc

SEQ ID NO: 104973 - DNA, 768 bp, Zea mays
  unsure (1)..(768): unsure at all n locations
  Clone ID: MRT4577_27236C.1
ttgggtacctcgaggccggccgggaatatattcagctttttttttaaactttctaattcaagacttggggggttttatcaagacgctgtatccggggaaatttcttagtgcaggattgtgaagaggtctaggtgtacacacatgtaagttaacgtacagaagggccgctttcctgggagaataccgaaacttgacgcaagaaagtcgactttatcgattccaactcacacgattacaatccaaaatcatgtcgcggaaacacttttttcccaatccagagggcgtcgtgctgcacacgctgcgctcgctctgcgcacgaaacaagcacatggcgctcgacgaggccaaccgcgtagtctacaacttatcccacagacccaatgaagtcagcatcgtgtctggaggcggttcgggccacgagccggcgtggtcgggtttcgtgggcgatggcatgttgtcggctgctgtgtgtggagatatttttgcgtcgccgagtacgaagcaagtcatggctggtatgcgaaacgtacccagtacagagggcataatactctgtatcacaaattacacgggcgacatgctgcattttgggctggcgagggaaaagggccaggcgctagggtacaaagtcgatgtcgtttgtatggcggaagacgcagcgctgngtcgtgctcagagtgggaaagtaggacgaagaagactggcgggcaacttgctcgtcatncagctgatcggcggtgcatcactacagggctgggcatttgagcg

SEQ ID NO: 104974 - DNA, 425 bp, Zea mays
  Clone ID: MRT4577_27237C.1
cctacccttgggggagacgggggaaggacaccaggggtcacccgggaaaacccgaccgggacctgggggggggccaaatatcccgaaaaagaaatggaaaaaaacgtggcctaaaaaaaggcaaaaaccgctcccgggggaaaacaggatacggtccaaaatccaaaaaagaaaagaccggggagccaaaaggggaaaccccggggggccaaagggggggggcaaactgccagaaatgggggggggaaaccggccgggccaccagcaggaaaaactgggcccacacgcggtaaaaggaagcccccaaaccgggggaaaggggggtttttctttgggccacagggggggtcttcatttgaacgagggaaacggcaaagcccggagggccttacaccccggggcccaagaagggtggacccaacggg

SEQ ID NO: 104975 - DNA, 361 bp, Zea mays
  Clone ID: MRT4577_27238C.1
gggttggggtttttttttttttttttttttttttttttttttttttttttttttttttttttgggggaaaattttaacttgttagggatttaaccccacccaaacctttttggtccccaccaaatttaacaaccattttgtggggcgggtttatttatacatgaaatcattgccttttcatttcttaagttccccaccatggccggagaaacaaggatttttaattgggggaaatccccctttggggggggcttttttttaaaggctttttttttttggccaaaagcctttttttaatttgggggaaaaaagaacatctttttttacggaaaaacccaaggcttttttttttgtctaaaaa

SEQ ID NO: 104976 - DNA, 364 bp, Zea mays
  Clone ID: MRT4577_27239C.1
gggccgcgcctgacgtcacacttttgaaagtttctttaaatcctgttttggatattacgcctggtgtgattgtaggcgggcggcaccgccgcggttgttcttctctagaaaagggccttgttttttttagcgcgctcggcgcccttaaagaaagagcgtggtcctgggttatatttcccaccgatcttggttcctcgcaacatacgagccccccgcgtggagtgtttggtttgaggtgcttcacccatgaactatctcagattccctgtggtgttctcactgcccgttttgggtatggggggcccgaggggttttttccttagtgaatcgccccccgggcgggcacaggcggggggctttttgg

SEQ ID NO: 104977 - DNA, 1988 bp, Zea mays
  Clone ID: MRT4577_2723C.1
cctcgaggccggccgggccggggtgtgtgtgtgtgtgtgagcaccgtcacctaaaaggcccccagagtcacatgagagtcaccgatatgaatcccaaagcatggaaaatacagctcacaaaatcagctccactcctgcctgcaatcttgcattgagtaaccaccgaaaaacatatgcaaactgctctcacatgcaatgcaatgcgtgaggctttgcaccttgcagcgagcgtcggaagtatatgcgtgttcgccggaatcctgcattcctacagggggaaagtgccagggccatgggcgaacgcggcggaatgcgcagcgcgcagcctccagaggctataaaaacctgcctcgtcctagctagctagtcacacgtctcattcaagcgctctgccggccagcctagtgctctcggctttctttcatctccctccttttgccacttgctatagctttaatttgcctggcactttgcacgtcgtggccggccggggcctgtgcttccattggtcggcagcaagcaagcaacaaggctagctagcgtccgtggatcagtcatgggcagccagaggcagaggcaccgagcggtcactggcctcccggcggcgggcgcgcggatgctggccctgctgtgcgcgtcgtcgtgggtgctggtgctcgcgacggcgcagaactacagcgccatcttcaacttcggcgactcgatcaccgacaccggcaacctgtgcaccagcggcaggccgtcgcagatcaccttcacgcaggccccctacggcgagacctacttcggcacgccgacgtgccgctgctccgacggccgcgtcgtcgtcgacttcctgagcacccagttcgggctgccgttcctgccgccgtccaagtcgagcagcgcggacttcaggcagggcgccaacaactgcgatcacgggcgccacggccatggacgcccccttcttccgctcgctcgggctctcccgacaagatctggaacaacgggcccatcagctttcagctgcagtggttccagcagatcgccacctccgtctgcggacagagctgcaagagctacctgggcaactccctgttcgtgttcggcgagttcggcggcaacgactacaacgccatgatcttcggcggctactccatcgagcaggccaggaaatacgtccccaagatcgtcaacaccatctcgaggggcatcgataaactgatcggcatgggcgcgaccgacatcgtcgtccccggggtgcttcccatcgggtgcttccccatctatctgaccatctaccagagctccaacggcagcgactacgacagtctcggctgcctcaacagcttcaacgacctgtccacgtaccacaacgccctgctccagaagagggtggacgtcatccagagccggcacaggaagacggcgcgcatcatgtacgccgacttctactccgccgtctacgacatggtccgcaacccacagagctacgggttcagctcggtgttcgagacgtgctgcggatcaggcggcggcaagtacaactaccagaacagcgcgcggtgcggcatggcgggcgccgccgcgtgctctagcccggcgtcgcacctcagctgggacggcatccacctcaccgaggccgcgtacaagcacatcaccgacgcctggctcagggggccgtactgccgcccgcccatcctgcacaactaatcctcagtgcatatggacacgctggaccggaggccggcagcgcgttgtcttttttataaataatttatttattattcgtacaagctttggttggatccatcgcggcgggggttattaattatagcattggttggtcctttcgttatatttgaccatatttttttttgtgttcggggtaaggtgtttattatattttgcgttgctcaagaaaaagagctgacgatggcaaagtgtacgtggaatacgatgataatgccatgattatttacaaaaaaaaaaaaaaaaaagcggcc

SEQ ID NO: 104978 - DNA, 667 bp, Zea mays
  Clone ID: MRT4577_27240C.1
ccggccgggaacaacacactgagcgacatttcaaataacacagctgagcgcgacgtatgggatccctcgctaataacatcatgtgtcgcgggtgtcgtccttgcagcgctcgtcgccggcgggacatgcgggcccccgaaggtgccgcccggtcccaacatcaccaccaactacaacggcaagtgtctcaccgccagggccacctgtcaccgtcagcccaacggtgccggagctcctgacaacggtggtgcgtgcgggatcaagaacgcgaacctgccaccctacagatgtatgacgtggtgcggtaacgttcccatcttcaaggactgcaaaggatgcgaatacatgctaccaggcgagatgcaatgaaaaacctgagtgctcgggcaatccagttacggcgtacatcactgacatgaactaccagcctatcgctccctaccacttcgacttgagaggtaatgccttccgatccctgtgcaaagcccgggctcaacgactagattcgccactgcggaatcatgcacgtccagctcagaatggtgcgatgcaagtaccccgtcgtgcataatatcgtgttccacatcgagaagggctgcaacctcaactacctgctcaggctggtgaagtatgtggcggacgacggcgacatcatgctgatggaaat

SEQ ID NO: 104979 - DNA, 242 bp, Zea mays
  Clone ID: MRT4577_27241C.1
gcggcgctcgagccggccgggtccgactagaccgtctagatacaagcggtccaccacaccgctgcagtcgccgtgctcgcgcatggagcttggaggcggagggcgaggcggtttcctcctcctctctgccacctcttccgtcgccgtccgcgccctccgcgccatctccgacgccaaccagaggaagttcgcgaagccgtgcggtgcctgcaaggcctatggctgttactcttgtacgctct

SEQ ID NO: 104980 - DNA, 215 bp, Zea mays
  Clone ID: MRT4577_27242C.1
tttttctccacccagaacggggggtccaattaaagcaaattagggctgcaactggtacattcgactcgaataggacccaaaaatactcacggcaacatcactggccacacaaagcagacatagagctatggataaacaaggctggcgcattgcccagccaccaccatcttcagcacccaagggaaaggactgatcgaaagttacgcatatacctt

SEQ ID NO: 104981 - DNA, 608 bp, Zea mays
  Clone ID: MRT4577_27243C.1
ccccgcgtccgccttcagattgcactacttcgttctttccaaaccgtgttctgatcctgtgactatggaaagtttgattgcatattaactgtcactgcctatgaatgttttatgtatcatgtgtcgcctgtttatgtcttctataggcagtgcatatgcatgctacaaggttaactacaaacttggatgattgaaaatagtgatagggttatgtgccttctgtcactatcttctgagattgtagagtgctatgaaggcaaagccatcacctcttttctctcaacaacattttgggatttttacttgttttttcttctgatctactagccagttcaagatccacaaaagatgactgaaattattgtcaaagcactggaaattactggacagagaggtatcattaacaaaggctggggtggccttggaaccttgtcagaaccaaaagattttgtgtatctactagacaactgccctcatgactggctttttctgcactgcaaagcagtggtgcatcatggtggtgctggaacgacagccgcaggtcttaaagcagcgtgtcccacgactattgtacccttctttggtgaccaacctttctggggtgaccg

SEQ ID NO: 104982 - DNA, 274 bp, Zea mays
  Clone ID: MRT4577_27244C.1
cactcgatgaagacacagaactcgagctctatgacatcctgacctctaatgcacgcaagtctgcgtcgatgatggcactcccaatggaaaggacgaagaggtgacttatgcatcagctgatgaagtgaagcagcttatgtgtgaacttaaatctctgtatatgactgatcgtgtgaacttgacttcgtgaaacttttgtgtgtgaactcgatcgctatgtgacactgttgcgtgcgaactcgacggctttataaaactactatgtgaagatctg

SEQ ID NO: 104983 - DNA, 493 bp, Zea mays
  unsure (1)..(493): unsure at all n locations
  Clone ID: MRT4577_27245C.1
ttcgttcggagcgcacacacacacaaccagatctcccccaaanccacccggcggcacctccgctncaagaagcagancngngngaaaacccngaccggcaagacnancacccncgagggggagncgncngacaccanngacaacgnnaaggccaaganccaggacaaggagggcanccccccagaccagcagcggcncaggggggggggcaaacagcnngaggacgggcgcacgcnngcngacnacaacagccagaaggagagcacccnccaccaggggcnccgccccaggggaggcaggcagaacnnngggaaaacccngaccgggaagacaaagacccgggagggggaggccncggacagganngacaacgacaaggccaagaaccaggacaaggaggggaagcccccaggaccaggagcgggnnanccgcngcagggaaggaccnangaggacgggcgcacgccnggcgacnacgacaancagaaggaga

SEQ ID NO: 104984 - DNA, 151 bp, Zea mays
  Clone ID: MRT4577_27246C.1
ttctcctttttggtacgcaaacgggcaaacaaaagatatttttcaaatccacagcgggacataaaaccatacatttacgtgacacaaaaaatgacccccatatcaaacaacaaccccttctattaatcatattacactccacatttttcat

SEQ ID NO: 104985 - DNA, 380 bp, Zea mays
  Clone ID: MRT4577_27247C.1
cacgtactactttttttttttttttttttaattaatttggggttcaattggaaaaaatggcggggattttttttcacctggtaaccggctccccaagggaggaccaccgtggttggctgttaccataataaggttggccaggccctcgttggttttccaaagcccttaaaccccggccaaaacctttttccaccgcttcccccttaccaaatttggaggcctttggccccttttttacccttagattaatattcagggcggcccaggtggctttttccgttctggctccattggcagggtttccggaaccttttccactgggaaataaaccccccctttggagccacttgggggcggttacctcttacctagggccaggg

SEQ ID NO: 104986 - DNA, 488 bp, Zea mays
  Clone ID: MRT4577_27248C.1
tacatttctaaaaaaaaaaaaaaaaaaaaaaaaaaaaaaaaaaaaaaaaaaaaaaaaaaaaaaaaaaaaaaaaaaaaaaaaaaaaaaaaaaaaaaaaaaaaaaaaaaaattaaaaaaaaaaaaaaaaaaaaaaaaaaaaaagttttttccttgcccggggcgggccttttaaaaggggcaaaattttggaaaatttccttcaaaatttgggggcccgttggaaccttgctatttaagagggccaatttcccccttttaaggggagtcttttaaaaatttaattgggccgtgttttaaaaacttgtgaaattgggaaaaaccttgggtttcccaaattaaatgcctttgaaaaaaatcccctttttccaagttgggtaaataccaaaaaggccccaaccaatcccctttccaaaaatttgccaaccttaattggaaaatggaccccccttttacggggcattataacccgggggttttggggtttaccc

SEQ ID NO: 104987 - DNA, 263 bp, Zea mays
  Clone ID: MRT4577_27249C.1
tccacgcgtccgcggacgggtataccactggtatggacggcgtgtagatcctcagcgtaaggcttatattaaacaatttatggcataacacgagctacgattgtaggaccttgcatgaagagaaggccccgagctatcgctcggcatattagatcgatatctgcatagctcgcaacagccagccacagatgcatgaaactattcactggatgcagatagcaatgcgctaaatgctgactgattgcaaataatggtgaaaaatg

SEQ ID NO: 104988 - DNA, 1308 bp, Zea mays
  Clone ID: MRT4577_2724C.1
gaggagaatgcgaccccatttgcgtcaaatttgttccgtcgcacatttacatgtacacaagtgcacagaagtccgaaattttcaagcagcacgcgcggtgaccactgtgaaagaacaccaagcccccaagcatggaggaagctctgtttactagccaacacatggcaagggctgctatattaaataaacatgaaaagtcagatgagttcttatgtgacgatctcaaccatttcaagcccttgaagatgcattcttagcaacctttgtattcacatcttgtgtattgattgaaagagagaacaccgtggtgaagcgaagcaaacactaactgtgctactactactactaaattttttttttgtctataaacagaaaataacctgaaattgcattctgttgcctatcggattagcagggtttggaagggagaaggtactgaatggtgaatagttacaacagttttggcggaggaggcccatagagatcaggctggctatgcttgagcctttggacccaatgagcaagccaattcttgtgatcatgagtctcctgacagatcgagcttggcatattgtcgagtgtgccatctctgtcaggaacacatataaacttctccagtatctgaactatttgagagaagtcaggcctcttctccggatgcgaggcccaacattgctcaattagaagacgtacttggtgttgggcagctagtaggaatggccggcctcacattcttgtcaaaaacagcgaaagctgcttgaaatgggttcagctcttcatatggtatcgtttatacatgcatattcatacaaataagtgctagaatgcacgcgtcgctgtctataccggacgcggagttttagtatcttccatgacggtttctgataaaagggatgtgtcgctttacgtagctgatggatacgcattgtatgtaaattaaagtggtatttgtaggttttcacttgtcagtagctcgactgtgttgttttttgggtttctttaacaataggactgttcctttgtttgttggttaggaattgctgtttaggtgcccggtctcattgagaagtttggaactggtcgaagtttgtttggagcaaacttgtgcaaaaacgctcgcagagaaccaccagaaaggaattcagtgatgacacagaatactggtggactgctgcatgctccaaccggcttgatgacattaggatgattgaggcgtgacggagtggcgacctcggtgtggaactgcttctcaagctgagcagccagctctgcatcttcctcatcatcaggctgtctgatgaacttgac

SEQ ID NO: 104989 - DNA, 521 bp, Zea mays
  Clone ID: MRT4577_27250C.1
gccacttggatcatcattacttgaagagaagtatattcatggcccatagtgcttattgatgaaaaactgctggtcttggcaaagtagaggtttttttgtagttatcctgatcttataaatcttgccaagatggtaattgattcggatgaacgaaagagaactcgacaatgttgcatgtacagtttttgtctcggatgggtaatctgcatagccatatactcacatcacatggcatacaaagaaaggctgtttggttccccttttccatggaaggttagaagcaagatgcctggtaattggtgcaacatgaagtttatatacctgtgttctgcccgcaaaatttatctgggtaatactttcggtcaaaacacgtgatgtacatccaatcatgggtatagtttgttgatatccacccttctgtttgtaaaaacctcccaaaccccatctcataaccctctttagacgtggttggctcatgaatgaattgctctatataatgattacttttatctgattgatgt

SEQ ID NO: 104990 - DNA, 554 bp, Zea mays
  Clone ID: MRT4577_27251C.1
acgactttccaccagatttgtggaatgaactcatgatgcaccacctcatctataatagattgatttttcaaaccaaacaaccccttaattaacctaggcaaatgggcttacttgcaatgcccatgtgcacttcctgcgcattttgcaattccttttgtttcctgattttctttatataaaagacttgacttgagtattgtcactttcatcgctactgtgacaatgctttgagtacttgaattcagaaatcatgtatcccgcagggagcatagcaagaatcgctgtatagctcattttagttgccgtaaccatacaatgcagttgctttctcaacatatttattcgttttggttgctgcctgctattctgctaaggaatgacaatagatgatagcttaaactatttggagcgttcttgcttcaaacaaagattagtctcagtttcacagcaaatatggggcactgaaagcttgtttaccgtgtagatgttcagttcaacacaaatcttgtttttctgattctccctatatataggactatggaatactattctca

SEQ ID NO: 104991 - DNA, 344 bp, Zea mays
  Clone ID: MRT4577_27252C.1
gtgttggtgttttttttttttttttttttttttttgggcccaaattttatgttcatttcaaggatcaaaaagggggcacagcactgtaaagccccacacactccgggtaaacttgtactcggggaaaacatgaattagggcaaaaacaaaattacatgtttgggctaaaattgattaaaaaacagctgggggacccccaccagtatccatttgattacataatagccccgctgggaaacaaacaacttacacaaacaagttttatgccttaagcggaaaccgcagcttcaggtttaagaggggcccttgcgccgacaagataaccccttgggtactccctggcc

SEQ ID NO: 104992 - DNA, 414 bp, Zea mays
  Clone ID: MRT4577_27253C.1
aagctctttttttttttttttttttttttttttttgttggtgcttggctgatcctatgttgtttgctttgcttttgttgcgtggttggagcactgtgtctctgccgtgctcgctcttggggtctggcctctcacattgtcggggggggggggggggagatttttttctctaggcccttgtgctgcattgatggaccctcgtggctcctgcgtcacatgtggaaagcgctaggatcccacgcagggaaagtgcctggggcgtcattggtgctctctggggggtgctggatgccgctttctctgctgcttgtgggtcgcccgccctgcccgccgctcaggggcgaattcctgcgcacctcggcggtcgttctgagtgcgtccgcgctcggggccgaggcctgggcgtgtcttgggc

SEQ ID NO: 104993 - DNA, 682 bp, Zea mays
  unsure (1)..(682): unsure at all n locations
  Clone ID: MRT4577_27254C.1
ctggttcgcaggcaggaaattaggtgttatggggattggggaatccatatttaagggtacagttaccactcatggagcgagttgctgattgggatggatttgaataactttttgaggcagattaatattatctcgggcatttaaagcgaattatttttttgcatagctttactacttaaaatttctagatctgaatttgtattgaaagttcccattgacaactgaggcgtggtgacactctaaaatatccaaggtgttgggagcctttttgtttgagtaaaattttcacaagtctgtcttagtctcatgaaaaccaaaatgttgacactctcgttagcagtaactttctgatactaataatccaagttaccaagcatatcattctgtttctgctttaccttttgcttcgtggttcatataataccagtagcttgtgtatggaatattggaactgatcaccatatgcataattttctgtttgtgtgtttagaatagctttttttagagcaagtttgagtccgggctttctgaaataagtgcaagtttaagtccaatccttctgaaatatattatatatgctgntctgatagaaataagaacacacttatgtgtgaggtatttggatcccatttaagatacgttttgagtttctttcatttgttgagatttcagactatagacc

SEQ ID NO: 104994 - DNA, 348 bp, Zea mays
  Clone ID: MRT4577_27255C.1
atcgcgatcgccacttcacatccgagcctcagttcgcatccacgtcgcgtacgccgcgcagatcgaatcgtcagcgcgcagacatggtggaacagactgagaaggctttcctcgatcagctgtgggttttcctgagctcagtcaaatccggtgaggccaataatcctgccaaggttgacaaccgattctggaacagcatgggccttggcttcacgactgccagggaagcaccttcaagggacctactttgaccagaaatgtccattcgctcgcactgtatctatcagagagcagaattcttgctggaacatgccacagtgctaacatgaacagaactatcattggtcg

SEQ ID NO: 104995 - DNA, 369 bp, Zea mays
  Clone ID: MRT4577_27256C.1
tttttatcacatggaacaagggttatagggtgtgtcagaaaatctgaggtatgctgcttggccagcgccccgagccggcgatttatttatagagagcggcgccaggcgttcatgaactagatgtgacggatgtagactggcgcgtagctatgacatgtgcttgatcacatctgcagggggcaggaataatacctgtgaatgaaccttactgtgcaactgtgatcagagcagccttgacatgagcgtgataattggctaacgacattagatgcagcatgtgcagacagcttgcacgaggttgctggcgaaaagctctatgaatttactatgatactaggtcacattgaggactatatgaagaataagcat

SEQ ID NO: 104996 - DNA, 783 bp, Zea mays
  unsure (1)..(783): unsure at all n locations
  Clone ID: MRT4577_27257C.1
acgctagttaatctagtttgaattgatgaatcgtcaggtttcacgagaatctggtcaaagtatttgcgcaccaaagtgtttctgtagtacgtgtacgtgtacgaacataagtttggtatatcgcaggtttgtatttgcactcctgcctgcctgacccgtgtgcttgtgcaggtattccttttggtgctctgcggctgcgtttttcgtcgtgctgcacgggccagggccattccaagtatacaacagttcacctgctagtcttttacgctaaggcaaagaggtctgtatatgttttggtaacaaacgaccgggtcaacagctgcgggacccacaactgcgttgggtcagagcccaactaatccaccgaggtagtgtttggatggatggatgaggaaagataaagagagatgaggtgggatcattctaacttaacacatgtnnttggtttggagacccagagtcagaatcaaggaatatttttaaaaaatagtggataagattatccctcaaaaaataaagaacagggtcaaactagggttagtctagaacgaagcaccccacccgtgagtcgtgatccagcagtccagcccatgcaaatgtntgggcgtttgatttcctactgtatacgacgatagggtccgaacagcttggcttgcacacgatcggccgngctcggcccagcaacgaccacccctggcactggcagcggtgccaaatgggccatgggcccggtggttctaactttcttcactgctccaggtttttcttgggtcttgatcttcc

SEQ ID NO: 104997 - DNA, 215 bp, Zea mays
  Clone ID: MRT4577_27258C.1
atgggttaaaagaccgagtcctaaagattcaaaactcaaaaatttacgtggcaaacagggggggaaacagggcacgcgtacagctataaagtagagtaagggggggggcccatggtagcgaactatcaaacaccaagttgtgggaagacaagcgaccaggccacatccacaaccaagccaagcttttaaagacactgtcggcgggtgcaatggct

SEQ ID NO: 104998 - DNA, 285 bp, Zea mays
  Clone ID: MRT4577_27259C.1
ttcccggtcgaccactcgtccgagttgatcatttctgcattaataactctagtagttgattagttcttaggatcgtaaattaggtggtaggaatgtaggcaagtaccattccaaggaattgaaagagagctaagcctaaggaagagaatagcaagaaaaaaaggaaatgttcagtgttaagcttaatgttttgtcacgaggacacacttcatgcataattgttacgttctaaatttgatccatttggtcttgtgggtttgattacattacagttctgcacatacc

SEQ ID NO: 104999 - DNA, 319 bp, Zea mays
  Clone ID: MRT4577_2725C.1
gtcgggcttcatttccgccacggcgccgcttcctccctcgccatggccctctttgctgcagcacggcgcgccacggcctcctccgggcccggcctcctccggggctccgactccccggggtcccaccgcagcgccgacctggtccggacgctcggtgtcgccgtggagccgccgaagccccgcgcgatgtcgtcctccgcggggcacgcgacgagacccggctccaacgccgagctacccagcgccatcccactccgaaatcaactaggccgaagacctgctaggaccaccaccgcattgcagagttgttgtttttttt

SEQ ID NO: 105000 - DNA, 298 bp, Zea mays
  Clone ID: MRT4577_27260C.1
cttaaaaaaaaaaaaaaaaaaaaaaaaaaaaaaaaaaaaaaaaaaaaaaaaaaaaaaggaggaaaacgaaactaaagaaaaacgggcttgcgaacgacatgcaagctactttagtagacacttaaattgagattacctgactcgtagttttacggccggcgcgactggaacaaaccgggccggtgaccaacctgaagctggcttggcttaaatccctttttgcccatctccctttcgcgggggggggccctggccgagcggcctggccctctggtgcttagcctcaatggcaaagggt

SEQ ID NO: 105001 - DNA, 1015 bp, Zea mays
  Clone ID: MRT4577_27261C.1
atcaccgccatggcctagatgcacatacaaacgaacaccacgtaacccactcgcatccccctcttctttcgccccctcctccatccatggtgcgaagaaagtgtaaccatccaagcactttgtcggaggagagagggagagagaggatcaatcaattcgtcctaaatttaaccctcctaaaaaccacttatattactacttttatttatataaatccgtccccatcccaaccatccaccagcccgcccgccccgcctgatccgtcccagcgattgctatgagtttaggtgattttaccacagatcttcctcttttttttgtatgtaaataaagtttgaggtccaggctcgtcatgtaaattcgggagcgagtgaaatcgggtacgtaggaattaggagcagagggacaagagggcctggctgcttggcaacagcaacaacagaaaaaatgggggaaagaagagggaagggccttcttgatcaagaatcaagatctcgtctcctgtctgtctcctctctcggggagggagggagggaggattggttagtcgttggattaggttggggagtgggaggtcgtgggagtagttaggtaatctgtcctagttcatcaatcaacgaggttttctttttctctttttgggttttcgatggaattgtttttgtccgtccgtccatgcaaccaaggaagaaaagaaatttccaaggcccatggagaatctgtacaaaagagtggctacgtgcaagagggcaccgttgagtctgtgagcagaagcaagcagcagcagcagctaggttgttcagtcaggcagtggatgagctgtgtgtgagagagagacatttattttgtggcgttttccctttttcccccttttctcatgttgtaatatcctgctgtgattgaaatgaaatcaagctgtataatactggtagtattattaggctatccgcaaccgttaccccaaaaaaaaaaaaaaaaaaaaaaaaaaaaagtactctgcgttgttaccactgct

SEQ ID NO: 105002 - DNA, 809 bp, Zea mays
  unsure (1)..(809): unsure at all n locations
  Clone ID: MRT4577_27262C.1
nganaggacaatcaattcgtcctaaattaaccctcctaaaaaccacttatatccctacggttatttatataaatccgtccccatccaccagcccgccccgcctgatccgtcccagcgattgctatgagtttaggttattttaccacagatcttcctcttttttttgtatgtaaataatgtttgaggtccagactcatcatgtaaattcgggagcgagtgaaatcgggtacctaggaattaggagcagagcgagtgaaatgggggcaaaagagagagaagggccctcttggatgatttgatcaagaatcaagaagatctcgtcacctgtctgtccctgccccttccttctcctctctcggggagggagggagggtcagggaggattggttagtcgttggattaggttggggagtgggagtagttaggtaatctgtcctagttcatcaatcaacgaggttttctttttctctttttgggttttcgatggaattgtttttgtccgtccgtccatgcaaccaagaaagaaaagaaatttccaaggcccatggagaatctgtacaaaagagtggctacgtgcaagaggagcgttgagtctgtgagcaggaccaagcagcagcagcagctaggttgttcagtcaggcagtggatgagctgtgtgtgtgagagagagacatctatttgtggcgttttccctttttttccccttttctctcctgattattgtatgttgtaatatcctgctgtgattgaaatgaaatcaagctgtataatactggtagtattattatgaatcaatcagacaatctgnn

SEQ ID NO: 105003 - DNA, 798 bp, Zea mays
  Clone ID: MRT4577_27263C.1
atttattataaatccgtccccatcccaaccatccgccagcccacccgccccgcctgatccgtcccagcgattgctatgagtttaggtgattttaccacagatcttccggccgggttgagtatgtaaataaagtttgaggtccaggctcgtcatgtaaattcgggagcgagtgaaatcgggtacgtaggaattaggagcagagggacaagagggcctggctgcttggcaacagcaacaagaagaaaagggggaaaaaaagagagaagggccctcttggatgatttgatcaagaatcaagatctggtcacctgtctgtccctgccccttctcctctctcggggagggaggattggttagtcgttggattaggttggggagcgggaggtcgggggagtagttaggtaatctgtcctagttcatcaatcaacgacgtttttctttttctctttttgggttttcgatggaattgtttttgtccgtccgtccatgcaaccaagaaagaaaagaaatttccaaggcccatggagaatctgtacaaaagagtggctacgtacgtacaagagggcagcgttgagtctgtgagcagaagcaagcagcagcagctaggttgttcagtcaggcagtggatgagctgtgtgtgtgagagagagagacatttatttgtggcgtttttcctttttttttctccccttttctctcctgattattgtatgttgtaatatcctgctgtgattgaaatgaaatcaagctgtataataaaaaaaaaaaaagaaaaaaaaaaaaaaaaaagcggccctt

SEQ ID NO: 105004 - DNA, 1558 bp, Zea mays
  Clone ID: MRT4577_27264C.1
cattgggtacctcgaggccggccgggaagaaaggaaagcggtgcgagcggaggaggcgaccgaagcgccacttgcttgagtagcgaagcgcgagagcaatggcgtcgctgtcgtgcgcctccacgctgccctggacccccgcctcctacccgcggccctcggcggggcgctgcctcacggcctctcgccgggctccgtcgctggtcatcgtcgcccaggggaaggtcaagaagtaccctcaggtcatattgacagatgacatagaagaggtggggaagaaaggggatacaatgaaggtgcgagctggattctaccgcaactccttgcttcccaagggcaaggctgcgcttctaaccccagcagtccacaagcaaaatacaatagtggcatctgagaatgaaaatccacctttaatgccggcaatcatgactcctggtggtgcgcttgatctcgcaactgtactactgggaaatcgtataatcttcattggccaatatattaactcccaggtggcccaacgtgtgatatcacagcttgtaacacttgctgccatcgatgaagaggctgatattctgatatatcttaactgccctggtggaagtctctattcgatcttagcgatttatgattgcatgtcctggataaagcccaaagttgggacagtgtgctttggtgttgttgctagtcaagcagcaattatccttgcaggtggcgagaagggaatgcgctatgcaatgccaaatgctagagtaatgattcatcaacctcaaggtggatctgagggtaatgtggaggaggtgaggcgacaggttggagaaaccatctatgctcgtgataaagttgataaaatgtttgctgctttcaccgggcaaccacttgacatggtgcagcagtggacagagagggatcggttcatgtcttcttcagaggccatggatttcggattgcttgatgctttactggaaacaagatactagagaagggacacaacccacattctattagcagactagaaatactgcagaactggagccaaagttagatgcttgccgtccatctcgattaaagccctggaatgacagatgtttaccgaagaacaagatttgattccattgcatttatggttgtaccattcaccagcttatggtggcacgtaggatggcattgtcatgcactcatgctaaaacgatgaagactgtttaatgtagacctagatgatctttgcagatgggagaaaagtgccagtttgcaaacttatagcccaggaaaggagaagtggtttaagaaatcgtttggattcaacatattggatttatggtgagaccgtcacatgatttttatttgtatgtgggcaactactcgtgttagcgttcaggaaaactcatacattcggatgttgcaaatacgtcttcaaggattttgataagggccccgtttggtttggatactttgaattgaattttattctaataatcataatttggacacagatcaattaaaaaagtatgtttttttttataaaaaaaaaaaaaaaaaagcggccgccaccgcggtggag

SEQ ID NO: 105005 - DNA, 127 bp, Zea mays
  Clone ID: MRT4577_27265C.1
gtggtgtggaccggaaggacttgaactcatatggtagccgtcggggtaatgatgaaataatggcaaggggaacgtcagcaaacaataagatcgcgaacaagactatttacggagaagtaggacccaa

SEQ ID NO: 105006 - DNA, 265 bp, Zea mays
  unsure (1)..(265): unsure at all n locations
  Clone ID: MRT4577_27266C.1
ggggggggggtggtggttatccaaataaatctcagtgcagatgtattgattatttctaggaaacacatgtcggtctgagggcaccattgtcgagtccatctcatatgtaatctaaagctggcacctccaacgttgggttgctgcatggcgggggtcagcaaggggaactgnttgtatggcaccaattgttgttgctgctgcaggaaggttgcgccctatgggttagccactgcccctggcttaagtggctgctgtcgctgttgtg

SEQ ID NO: 105007 - DNA, 324 bp, Zea mays
  Clone ID: MRT4577_27267C.1
gagctcactgacggcggccgcccttctttttttttgggggggtttgttgatatatatgctgaacgaagcaacgaagcagagcaaagaactgaacaagcgatcatacagaacctcaccgtgcccgagattcttgcgcacagcatttccactgaaactaagcaaccaatacgtttgctcaatggtcacatgacccgatcgagctaaaccagttgctgacaacatgaggccccatgcagggtgatagaatgcatgaactcaaactatagctgacggagacatgccaagcatcttccagagcccagtatggaactcaatgctcgagcc

SEQ ID NO: 105008 - DNA, 359 bp, Zea mays
  Clone ID: MRT4577_27268C.1
gaggaaaaaattgcccccatttaggggggaaagggccattggtttaccagggggaaaacaggttccgggccaaaaaaaaacaaaaccagtttgggggaacaggcagaaggctggccctgcctgaaacaagaccggggcaacccttaagggtcctttacaacccccaggcctttagctttccacaaaaaaaaacggggggggggggggggagcagcaggtttgccgatgccccccgttttaggggaacttggggggggggaacaccttgttgttgacggggtcggggaggggggccaacaggttttggaacgggcccacccccgggacaaacccctggatgaaataacccggggggggga

SEQ ID NO: 105009 - DNA, 403 bp, Zea mays
  Clone ID: MRT4577_27269C.1
acgcgggtatggccaataatatatgcatggtcataataaagttttggttttaatgaaaaaaaaaaaaaaaaaaaaaaaaaaaaaaaaaaaaaaaaaaaaaaaaagaaaaaaaaaaaaaaaaaaaaaaaaaaaaaaaaaaaaaaaaaccaaaaaaaaccaaaaaaaaaaaaaaaaagggccctgggccgaaaccacccaaagggcaaattttgaaaatatcaataacacggggggccgttaaaccatcaataaaaaggcccaaattccccctaaaaggagcctaataaaaattcacggcccgacatttaaaaacgagaggacggaaaaaacccgggggtacccaaactaaacccccttaaagaaaatccccttttgccaagggggagtaataccaaaaaggccc

SEQ ID NO: 105010 - DNA, 262 bp, Zea mays
  Clone ID: MRT4577_2726C.1
caaagagtgaaatttatttatttggaattcagaaattccaggttgtatgacatcagttactcaataagtgtgaattctccaactcttcttttaatcccattttagaatttaatatagagatctctgattggcaggaacactagaaataaatgttccatggccagtagtgcaaatgtaggattgtaggttttgaaaaaccaccctaagccatattaagggggttggaagaaccatcgaagcctaaggcatagaagaaaatttg

SEQ ID NO: 105011 - DNA, 634 bp, Zea mays
  unsure (1)..(634): unsure at all n locations
  Clone ID: MRT4577_27270C.1
ggacctcttgagttggatgcttggcagatggaacaaacaaaactatttcaagcacttctctttaatagtttgtttggaaaactgttcattggatcaaaagcatcaaaaaccccaagggagttcattctcaagaaagatgatgtgttcctttggaacaaagaaaatatgtatttgcttttacctgtggattctactctggattctcataaaagtgtttgcatcaactggagtgtaattgatgtagtggctacagctgttggattcatgagaagcatttattcagatggcaaatgtaacctaactgataaacttaattatgaaaaaaatggtgaagatcttattcatttggccaacaagtcatgcaagggtaatgatcttaaaaatatggtggttctagcaattcacactggaaagatctatactattgttgttgtatctgatttatgtgccaatagtaaatttgatggtacaactgacaagaaagaagcaaaattccggacatttgcagaatattttgagaagaagtatagtatatttctttgtcatcctttacaaccattgctagtgttgaaacccacccataatcctcacaatcttctttcctcaaagaatagagatgaagacaantgttgtg

SEQ ID NO: 105012 - DNA, 245 bp, Zea mays
  unsure (1)..(245): unsure at all n locations
  Clone ID: MRT4577_27271C.1
cggcaggaaccggctcttaaaacccgtttttacccaccctaatgatcaccccgggggcaaccccccgaagaaggggnactagacgacgaagggggccacacaccannnccccaaagccagccaaaccaacacgcccggccaanacccaacaccganncacaagnggaancngcccaaancgccggaaggaacggaagcgcggaccaagcgagacgacccaccaggcacgcaaccgagcggaaaca

SEQ ID NO: 105013 - DNA, 297 bp, Zea mays
  Clone ID: MRT4577_27272C.1
cacaccccgcggctcacgttactacacttcacttcaacgacagcctgaccgaacgcgcgacctacttgtgggccgggaaaatgcctaccaatgaggatcgccctgctgagccaccacaaggtgtatccacccggaccgccctcaacgatggacccgcttgagttcatcttcacacctcatctctctcttcgacgaacagggctccaggattgcctcaatcatgcttaccggtgggagaccgacgacctccatagacctgatcgcggtggtggcagcgcacgcgttattgctgatctt

SEQ ID NO: 105014 - DNA, 771 bp, Zea mays
  unsure (1)..(771): unsure at all n locations
  Clone ID: MRT4577_27273C.1
ggggctcttcttccgttccgtccgcccgcccgcctgcccgcttctctctccccctctccctccacccaacccgcgagaccgccggcagctccaggacaggaggaggagcggcttcaattcgtccccgcgccgcgcgcccaggacccgcccccgctgcctctcccgagctccattttggcgccaacagtggttcacataggtttgcgcttgagaatcgagctgtcaatgaagctactttccgttgccctgatgagctaggatggaaaccacagaggacgcctatcatatcatccgatggaaacatcttacacgcaagacagaccacactgccactgaaggaaataagcaagtctctccagcaaatgggatatgatgtgatgccttcagatgacgctggtcgatttgtgtgcaactatgtctattaccactcgcttaagtttgcagagaagcatggcatcacgtctctcttcgttcatttccccctcttcctggcaattgatgaggaagttcagatgcaatttgttgcctcccttcttgaagtcctcgcttccttgaacttctagtagtaacctgatggtagatctatctcttccagcggtgtattgttcccaatttatttggaagggttcccaatttacatgtggagtgaataagaatgaggaatcattcatgggagttatgtgtgcttcanaatgtgtaaaaaaacagctcttcntcaagacatgtccagncagtacagatgtacaantatcccaaagtggtttatatgac

SEQ ID NO: 105015 - DNA, 429 bp, Zea mays
  Clone ID: MRT4577_27274C.1
taagggacaaaactggactcgaggccgctttttttttttttcttttttttttttttttttttttttgggggcttttaggttaattgtgcacaacgcaggagagcgggagcccacggtaatcatggtgcgaggcgaaaacagctggtaggcaaaatcggggggggggaaatgcacaaacagaacacggactgggagcgcgaatcatggggaggagctgaacagaaagctgcccccggatgatgggagggaagggaaggcaggggagtgccaacataaccaccagccacctaaaggagagcggaggaggtctccattgacattgcttgctccagatgcggccggggaccctgaggtcgagcacctgcctgccgccggccggcaggaagacagaggtgtacctgggcgtgatgaacccgtctaagctggccc

SEQ ID NO: 105016 - DNA, 1383 bp, Zea mays
  Clone ID: MRT4577_27275C.1
gccggccgggccggggagtcagaaaagccgctcttcttccgttccgtccgcccgcccgcctgcccgcttctctctccccctctccctccacccaacccgcgagaccgccggcagctccaggacaggaggaggagcggcttcaattcgtccccgcgccgcgcgcccaggacccgcccccgctgcctctcccgagggttccaggttctcatcaggcagaggcagaggtcaccttctgctgctcaacgcaacactgcacatacatacatacagatgggttccgaggggccttctcccgtcaccaccaccgtccacgtcactgggttcaagaagttccacggagtcgccgacaaccccaccgagaagatcgtgcgcaacctcgcgtcgttcatggacaccagagggctgcccaagggcctggtgctagggagctgcaccgtcctcgaggccgccgggcagggcgcgcttggcccactgtaccaactgctggagtccgccgtcgtctccggccggggacgtgggatgccggctcaggagcgagtgattctgctccattttggcgccaacagtggttcacataggtttgcgcttgagaatcgagctgtcaatgaagctactttccgttgccctgatgagctaggatggaaaccacagaggacgcctatcatatcatccgatggaaacatcttacacgcaagacagaccacactgccactgaaggaaataagcaagtctctccagcaaatgggatatgatgtgatgccttcagatgacgctggtcgatttgtgtgcaactatgtctattaccactcgcttaagtttgcagagaagcatggcatcacgtctctcttcgttcatttccccctcttcctggcaattgatgaggaagttcagatgcaatttgttgcctcccttcttgaagtcctcgcttccttgaacttctagtagtaacctgatggtagatctatctcttccagtggtgtattgttcccaatttatttggaagggttcccaatttacatgtggagtgaataagaatgaggaatcattcatggagttatgtgtgcttcaaaatgtgtaaaaaaacagctcttctcaaagaacatgtccaggcagtccagatgtacaaatatccaaagtggtttatatgacaggtgctattgttctcagagatgtgtttcactctgttctttgacatttacagaaacatttttctgatcatcagatcatatgtaataaagtaacttacaaacatggtgcaacgatctgtgtttttcaatattttaactgtcaataattaaaaataatattttgaaatggcttacctttaatctaataccttttcttttaccttatttacaatggggggggggccgctttaaagaa

SEQ ID NO: 105017 - DNA, 475 bp, Zea mays
  Clone ID: MRT4577_27276C.1
gcgcaaaaaatcaaaaattcgccgagagcacaaaccctaatggcttctctctcaatggcttgcggtgacgttagcttctgtcatcctttccgctcttcttctccaaaggtctcacttcgcagttccgttcatttcgcgacgagtctttcctcaagtcactccatttctgggcttcgcgctgttttgcctctgaagatttctacagttgcttcccccaattctcaaaagcttcattcttttaccgttttcgctcataagggctacaagatgaagacccacaaggcctcagcgaagcggttcagagtgacgggtagagggaagattgtgaggaggagatctggaaagcagcatttgttagctaagaagaacaacaagaggaaattacgtctatcgaaaatgacggaagtgaaccggagcgactatgacaacgtgatcggagctctgccctactttgaagtcaatcgaaaggcgactt

SEQ ID NO: 105018 - DNA, 375 bp, Zea mays
  Clone ID: MRT4577_27277C.1
gccccgaccccgcccacatagactagttttcataacacacacagaaggaaacccaaagcctacacgacaacaaaaaaaaccaagaaagacccagccaaaaacgggaccccaaaaaaaaaaaacaagaaaccgaccccgaaaaaaaaaaaaaaaaccaccatgccagtcaaaaccaacaaaaatcgagggggggggaaaccacagccacgccaaaaaaggggggggcccaaacaccccacgggaggcccctggaccccaaatcccaacgtaagaaacccggccatgccaaaccaaaacacatctccagaggcccccaacatcaaacacgggacggcggaaaaacccaggaccgggaaaccccaacgtgcccaacca

SEQ ID NO: 105019 - DNA, 625 bp, Zea mays
  Clone ID: MRT4577_27278C.1
ccggccgggattttcgtgacgtcttgtcacgccgttgatcttcgagccgccgcccggccgtggtgcaaaggacaaagcacaacaacaaatcaccaataatgtctgacgagaacgcgaacggtacacccggcgagcaggcccctgccaactcggaacacctcaacattaaggtgacggataacaacaacgaagtctttttcaagattaagcgcaccaccaaacttgagaagccgatgggcgccttttgcgaacgtcagggcaaggcaactagttccgtccgatttctctttgacggaacgcgagttcagcccacggacacaccagatgcgctcgagatgcaagacggcgatactcttgaggtgcaccaggaacaggttggaggatcttcactgtaaagaggagaggaagttcggcgagggatgcatcacaagaggagcacatcagatggcgaattagccacacgacctggtctttgaaactagatcccgaccgtcacaggttggatttattggctttttgcacctctgatgacagcgagattgaagccagctcgacaacttatttacgactggggtaatacaacctgactatttacggaaaaaaaaaaaaaaaaaaacccgcggcc

SEQ ID NO: 105020 - DNA, 495 bp, Zea mays
  Clone ID: MRT4577_27279C.1
ttcccgggtgcagcccccgtcacaaaagcggtcaccaccaagaatttgaggggtggcgtgcccgaagaccacgtgccacaatcggagttccacgcaggactagctatgggtctggtctcgtatcgtgagggcaatggctaccagcatccagcgcctccgcaagcacaagccaagcatgtcgcctaggatggcgcagccgccggctggatcaatgccacctacccgccgctggagctgccggctgaagcagcacatgtcatataggagggccatgccaccgggaccatcaaacgcgtatgtcccatccccttgctggctaccggagccatatacggtcatttcatctgcgctccatgatgcatctgctacggactacacctacacaccacaatgctgcgagagggcttgttactctatgagcggactaccgccttataaagctcaccatcattgattttaagagccggagagagaatgagcttgcggtggaatgca

SEQ ID NO: 105021 - DNA, 404 bp, Zea mays
  Clone ID: MRT4577_2727C.1
gcaggaccggatcgcaggtcggcccagcgacccggccggcattttttagggatcatttgtggttgcttcggtggtgatttgcctccggcgcatcggatttctatgccggttaatcggtttgtgcgaggagagcctggatcgatcggatcgtctgcctattgttcctttctttgttgactggtcagttacgctgtgccctagttttgttcaggacctgtacctgttcaatatagtttccgttgcataatctgtaacccttatgcaccctattttctccatctagtcttctttgtgctgaatcgggccaggtgtttgctacctacatttacagaaaaatgtttcgtttatttaggatgcttaattcagttgatgaggatatggatatgaagcctgctggatgaatg

SEQ ID NO: 105022 - DNA, 581 bp, Zea mays
  unsure (1)..(581): unsure at all n locations
  Clone ID: MRT4577_27280C.1
cagttttaaatcccaacttcaatttttattctaggttttagactttaatagaattcacaacaaacagataaaatatccagtataatatgcaagtattttttttactaattatcttacctcgttatttgaaaatttatttcaaatatgcaatgcacacatgaaatgtttatttttaagaaaatatggttttaagtattttagttaaaatttcatttaaaagtgaatattcattacttgattattttagggggaagtaatgtattttttttctatcatgagttactttaacacgtaaaaaaatattttatatacagtcctagaaggggataatccattcattatttcttgaaatttacaaactgaatttctatttctattttaccttaactaatattgttttaatgtttctatttatttttagaagatggtgggttccaaagtataactattcattagggacactttactttgatttctattattattccccaaaatcagatttcgggcgttacaaatcctacccccttaaaaataatctcgtcctcgagatttgnaagaaaaaggatacaataggtatggtt

SEQ ID NO: 105023 - DNA, 411 bp, Zea mays
  Clone ID: MRT4577_27281C.1
gtatcccgttgtggacatgtacatgctcctctcacggcacagtatacttgcaatgactgtagccttataggaggaccctcatgcctatgttgacgcctgtaaggacgctactgagaacgaagatagcatgcgcgctgaccctggagctgtcactgttgctggaatgcaactagcagacaggctcccactctgccatgtgcgtatatgaaccgagagcgaacgtcaactgtgttgttcatctcactagtggcatgcccatactgatgagacgctcactgggtatactatcaacgtcgtcgcgaacgcttactacgacatggacttagctctggtcagcattgaacacacggagggcattcctgcaaaacagcaactggtcatttctgtccctaagcatcataaagactggcg

SEQ ID NO: 105024 - DNA, 368 bp, Zea mays
  Clone ID: MRT4577_27282C.1
ctcttaacctgaaaactgaaggcccgagggcgagtatgcagtggctagggggacgtgcgcagagacctttctcctgttatcgccgtcgccgtcgtcaagcttgatgcccttgtaccacatggcacaggcgacgtatacggcgaggtccactagcgagagcgcggcgaggaggaagtataacctgtcgaggtggccggagttaaggttcccagtgatccaccccggacgcttatacctggcggtgaggctcgtgactacgctcaccagcatgatgctcacgtagttccccagcgagatggacgccatgcacagcgcgctgccgaagctcttgacgccgtcgggcgcctgcccgttgaagaacttcagct

SEQ ID NO: 105025 - DNA, 380 bp, Zea mays
  unsure (1)..(380): unsure at all n locations
  Clone ID: MRT4577_27283C.1
atagcctcgcgcccgcggacgcgngggcgaggggaggggtgggcaaggcggcggggacgcacacgacccacccaaggagctcaaagagatgaacgcggcaccaggcctagatgaagggcatgcctcaccaggggaggagtaccgagcgatccacgcagagcgaagcccaaggcggcccactataaaagcaacaggcgcaccagggcacggcgcgaagacgcacgacggcagcgcaaaggagaacccgacgaagagcgcggaggccaccaggagacacaggacagcacagcctgatctagtgaaatccggagagaaggctgaaggagatgccgcatcggagaaacctgcgcaccagaaggcaggcacacctacaccaacgg

SEQ ID NO: 105026 - DNA, 207 bp, Zea mays
  Clone ID: MRT4577_27284C.1
cacgcgccatcgatagtgtgtatctgtatcatcgattgatcatcacacaatacgcgagctgttccaacatgcttaatgtggctgctataaccacatggggtgataccgcgacaatgtggattcaccgattacacgcgctgatagcgatggccctggcaaaaggcctggcatgacccttggacaaagcacttgccaacgcgcctctta

SEQ ID NO: 105027 - DNA, 331 bp, Zea mays
  Clone ID: MRT4577_27285C.1
ttacctttttacctaaccttttctatttttggaaaaattgtggaaatacaccccctgacacccccaatacccccaaacgtacaaaaaaaacgccctttgaacccacacgaacacaccacagcaagacaaacacaaacccccctactaaaaaagcaacccaaacacacgcccccaatcttcgacaccaaccccctgcccaaaaaaaccatcacatgcattaataaccacgcactgaacaaaacgtatccctgcactgtaaaccccttaaaacaattcaccaaaacaaacacaccagcaaaatgagtaaaattgcaaaaaactccaataccac

SEQ ID NO: 105028 - DNA, 402 bp, Zea mays
  Clone ID: MRT4577_27286C.1
ccctggagaaggaaaacgtgaagcacttcctcagcttcatcgacagcctgcctctgatcgtccctgacaacatgttgctggtctactacgactacctagtctagcaaagctcccccctcccatctgaagctcaggcagaggagaagggatctgggaagaagatgaagcggtgtactacaagcgatgaagcaagcaaagggttccggcagccgaccatcctctatggatcgagttggcaaagcgaagccgttgctgacaaacaaaactcttgtggtctgccatgccattgcacgggcgcctttgcatgatgacgttgctcgctgtaataagtgtaaagaagaaaaatgtctcgggttttactagcttgacatttcttgtctggcaaattgccggattattcag

SEQ ID NO: 105029 - DNA, 289 bp, Zea mays
  Clone ID: MRT4577_27287C.1
caaacacaggcacgaacaagcaagccaacggaacaacaacccaccaaccaaactcagacacaccttaaatacctgacgatataaataaattaataccaaaggcccattcaaatgtgtacagatctgcaggcgtcgcaacagccaaatgaacgaacgcccacacaaagcaacaaacgcgagcaaactcacggtcaaaagtcgaaaaggttaactagaaccgtacggttcaaggccagcatcaggataggaccggtctgcctgacaccagaccctatcccagctcaaaacc

SEQ ID NO: 105030 - DNA, 311 bp, Zea mays
  unsure (1)..(311): unsure at all n locations
  Clone ID: MRT4577_27288C.1
actctagcgtcttcctggtcacctactaccgcgcataggatgctgctgcatctatcagttcggctcatcatagcgcgcgtcatcgctagctcaagtgtcttctgcactgcttgcttgtctgctgcttccctctcagttccgcactgtctacagaacagataagaagctngcgacccgancatatcttnccgtgcacttggggttctcccggaattagatatcaattataccgattattgcatgtacctaggcctattcaatcaagacgctattcatcgaatctattacagacatcgagcttcattcctgca

SEQ ID NO: 105031 - DNA, 375 bp, Zea mays
  Clone ID: MRT4577_27289C.1
cggaccacccatggggtattcagacctatcacgaacaattaagtccccgttttgccggagaaaacgcagagtttcaaaccccatttgcaaatttaaaaacaagagttgcctaggagtaactttccgatcagtcagataaaaagggggggggggtgcctacaaataatgccccataaaatacacgaacaggggggaggtttttgagttgggggggggaaaataaacgagatgcctgtacaggggacccaaacaaacacattaagtccggggtaattaacaggggctactacaggtatggggttccacgaatccttatgccttgatctcctttgcctgggggtggtggtggtttttttggggggttccgggtccctt

SEQ ID NO: 105032 - DNA, 212 bp, Zea mays
  Clone ID: MRT4577_2728C.1
aggaaagattatgaaaggaacaggctctttaaaaaagaagacaaaaagccagaattgtgtcattggggtgtctctttctgttttactgtctactaccataagaactatctcaaataactggagcatcaagggatgttagggtgtccatctgaagaaaaaatagctttttttttcttagttcggggaaacaggtgggggaaaagccccgggtg

SEQ ID NO: 105033 - DNA, 371 bp, Zea mays
  Clone ID: MRT4577_27291C.1
atactgtaccggtgttctacatgaaattgttatgcgataacaattcctcacaacatattagtcgcctgcataaacattaaagtctcctgtgctctctgagtagatgaaaatcacatcattaatggttctctcattagtcagcatttcactgagtgaaacaatgtaacgccacctgcatttatgaataaatcaacacgcgcggagaggtacgtctcgtatttcgcgctcttttgctttctctctcactgactctctttgctctgtctttcgtttctttcgagcggcgtcagctctctctaaagtgcgagttctgatttctacactactttgagttatcgcatgcaatatcatatgtgaccaaagcccaaaaa

SEQ ID NO: 105034 - DNA, 394 bp, Zea mays
  Clone ID: MRT4577_27292C.1
ggttcacttgtttggaaacatgtttcgtgggaactgtggtttgatggcgtcgattaaattatgaaaaaacaatttgaagtagagccaacactgtgtcaagccatttgtctttatgctagatatgatggttaggatggcatgaaatgccaaagcaaattggacataacatttggtaaagtaaatgttatatttttttggaactgataaggttgcttttttcccgagaacgtgtccatttacacgtgttttattaagaggtgaaaaatcaagttattacaaagccacagctatccttctgtaaaacgcgagcagcgtttacagaaggcatttgcacggccacggcaattgcaccagaacatgaatcacctaaaactgacactcatgcggattacat

SEQ ID NO: 105035 - DNA, 352 bp, Zea mays
  Clone ID: MRT4577_27293C.1
ccaggtcatccgatgatgcctgccatatgacgggcacttcatcgccctttcctttcttccttgtacgacgtgcgtgcttcacaggccggtgcagaggcagcaggctgcgtcaagcgacttatcggcaccaatccccccgtggatgatgaatctggttctgatcgatccagtccacacgaattggtgcctggatcttgcgccgcgatacctcattatttgggcgccactgccagtttgcatcaccgtgccttttccccggcaaaatgctatgggtggcagcatcctctgggctctggcggcctgcccgcgtacgtgcctgccacaagcccacaaggcttagctctctctcgac

SEQ ID NO: 105036 - DNA, 470 bp, Zea mays
  Clone ID: MRT4577_27294C.1
aaaacagagaaaccaaaccctttttcataagtactggcgggtacattaaagacaggaacttatccccgatctggcaaacctaaaacaaggagcctgagaaggggttattcctttgcgcttgtaaaattcaactgagaccactgcaaatgccgcctttttgcttcgttactcggggggtggagcggggtgctacccctgatcagcgaaccggagatcaaaaaaacccccggctgccctaaaacaccttgggagaggggtttttctggtgcccgggggggggggggttttttaccgcgggcgagtcggcaccagtggagtctgccctgggtgtgggtgttgggggactgcttttcccgctggtaccggtggctatgtccaagggtggaagctttattttggccaggaaaaccccgaaatgctgcatactcttcatgtacatgtccatgatttgggtcccggccacctttacc

SEQ ID NO: 105037 - DNA, 730 bp, Zea mays
  Clone ID: MRT4577_27295C.1
cttgtgggaaaataacatatattcactgcaaagctggaaggggccggagtacaacaatcgtcttgtgctatctggtcaaatacaagaatatgacacctgcagcagctttcgagcatgtacggtctaaaagggctcgagtgctgttgacacattcgcaatggaaggctgttcaagaattcagcaagaagaacacggaccttcctgctctcacgagcggtcccgcaacagcatctccagcacgggacgaggcaccggtaacagtagcggatctgaacggcaataatgctccagagtttcttgcggaggatgccagcttgtctagacgcaacaccacaccgtcgaggccaacgattaagatgctgtcatgcttgtttccttctcgcatctgatgaatggtcactggacgtcgggtgtccgaggcgcatgcgtggtagcccccggtcgatctgtctgcgaagcggtgtgcagtgcagggcggcgcggcggcagcatacctttccgaaaagaaaacggcatcagcactggcgttagtcatatacttgtccatattcacccgatttgcctatatatatatatatatatatatatatatatatatatatatatatatatatatatatatatatatatatatatgggaaaatatcctatgcaattacttatcctggtgcaagcatgcaatcaagcgatctggtgtatccgatctagatctaatgatgactgttatttt

SEQ ID NO: 105038 - DNA, 590 bp, Zea mays
  unsure (1)..(590): unsure at all n locations
  Clone ID: MRT4577_27296C.1
ccggccgggaccatcacgagtctttcttaaagtgagcgtgatgcctccctcgcctggcgcgatcgcgacatgcgcgtgctttttccacaactgggttatttgcgacacccactgagcagtttgcgcgacacgacatcgagtgcgactgagatctactgaacctcacgacgcaagacagcgactgagaacaacgaaaccgcaattatggttctcgccgggtgttgcgaggctctaatcgccatattcctcccacccctagcagtcctcctccgccgcggctgcagcggctcatttctacttaatattcttttgacgtgccttggctggatcccaggcgtggtacatgcctgggttgttatcgtcgccgaaccctcacgacaccactcgcgacgacccagccacagcacaacctacaccaaccaccacagctcctcgcacgccggncgtcaccaccaccaccaccaccatcacggcgacggacaccaccatagcagccatactggacgccaccacgctcgacctgcaagaagaagctacgatcgtcccgcgtatcgcgatgggtatgatgttgcgcctgcgccggcgaggta

SEQ ID NO: 105039 - DNA, 1640 bp, Zea mays
  Clone ID: MRT4577_27297C.1
ccggaccccagttccgggccggccgggagtccccgaggaggaggaacagctaggtgtggacaggcagctctcagtctcacactctgccaatcccaatcccagcctgagttctgctctgctctgcttctagccatggtggcctcgcggatcttgctcccgctgctgctctccctcttcctaggctcgcattgctgtaccggagcggcggcggcgaagcggcagctgctgcaggcgcagagtcgcaggtgaagttcgacttctccccgttcctgatcgagtacaagaacgggcgcgtgaagcggctgatgggcaccaacgtggtggccgcgtcgtcggacgcgctgacgggcgtcacctcccgcgacgtgaccatcgacgcttccacgggcgtcgccgcgcggctctacctcccgagcttccgcgccagcgcccgggtgcccgtgctcgtctacttccacggcggcgcgttcgtggtggagtcggcgttcacgcccatctaccacgcctacctcaacacgctggccgccagggcgggcgtggtggccgtgtcggtgaactaccggctggcgccggagcacccgctcccggcggcgtacgacgactcctgggcggcgctcaggtgggtgctggcgagcgcggccgggtcggacccgtggctggcccagtacggcgacctgttccgcctgttcctggccggcgacagcgccggcggcaacatcgcgcggatcaagggcgtggcgctgctggacccctacttccagggccggagccccgtgggcgccgagtccgcggacccggcgtacctccagtccgcggcgcgcacctggagcttcatctgcgcggggaggtacccgatcaaccacccctacgcggacccgctcctgctgccggcctcctcgtggcagcacctcggcgcctcccgcgtgctggtcaccgtgtcggggcaggaccgcctcagcccctggcagcgcgggtactacgccgcgctccagggcagcggctggcccggcgaggccgagctgtacgagacccccggcgagggccacgtctacttcctcaccaagcttggctcgccgcaggcgctcgccgagatggccaagctcgtcgccttcattaaccgcgactagcagccgccggagtaaatccggtacatgcaggccgctgcagtgccgcgacaacatcagcatacctatagtaactagcgagagcgaggtgattggtagtggtaattacatttttttttgggtccttgatgatgattactgtgcgtcggaagaaaagaacggttcctctctccagaaacctcgtccggacggataggaggggaccggtgtgttcgcttgcgcggcgttgcgtgtcattgactgcagtctacaggctaccgtgccgtgcactgttaactgcgtgtagcgcggtactgccagactgccagttacagtagtcttcagagtataatattttttagtatagaagcgtcactctactaccgacccaatgcatcgtgtaacttttgtggtactagtgctatatggtggtgattttgtcggagtggtcaaaaaaaaaaaaaaaaaaccggcctaaaaaaaaaaaaaaagaaaaaaaaaaaaaaaaaagcggccctttaggagggtaatgcgcgc

SEQ ID NO: 105040 - DNA, 377 bp, Zea mays
  Clone ID: MRT4577_27298C.1
cccacgcgttcgctaagctagacgctactcctaatctcagagctctcctccgggctgcgaccatgccaagaacggtgcgtactagccaaaaaagctggtgaacaggctgctttctgggacgaggagcaagacgacaagggatctggagccggatcccccgatggctgtgacggtaacctaggtggcaaccgtggcgacgatgctggcggtggcggagaccatcttcatcaccttcgtcatctgcttctacctcttcctgtgcgcgaagcggtaccggggggccgccctgaccatcggctgcgacagggccctgcccctattcatgttcgcgggcagcgcggggtgccacggagacctcaacgaggccttcatcgcgg

SEQ ID NO: 105041 - DNA, 1677 bp, Zea mays
  Clone ID: MRT4577_27299C.1
cggggtcgaaagcccaccccacgatccgcgccacaaaatagtgcggcgcgcccagccctgtcggctcggctgcctccgcctccgctccgcgctgcgcatataaccggacccagttccgtgccggccgggagtcagtccccgaggaggaggaacagctaggtgtggacaggcagctctcagtctcacactctgccactcccagcctgagttctgctctgctctgcttctagccatggtggcctcgcggatcttgctcccgctgctgctctccctcttcctaggctcgcattgctgtaccggagcggcggcggcgaagcggcagctgcttcaggcgcgtcgagccggggacccgagctcgcagtcgcaggtgaagttcgacttctccccgttcctgatcgagtacaagaacgggcgcgtgaagcggctgatgggcacgaacgtggtggccgcgtcgtcggacgcgctgacgggcgtcacctcccgcgacgtgaccatcgacgcttcgacgggcgtcgccgcgcggctctacctcccgagcttccgcgccagcgcccgggtgcccgtgctcgtctacttccacggcggcgcgttcgtggtggagtcggcgttcacgcccatctaccacgcctacctcaacacgctggccgccagggcgggcgtggtggccgtgtcggtgaactaccggctggcgccggagcacccgctcccggcggcgtacgacgactcctgggcggcgctcaggtgggtgctggcgagcgcggccgggtcggacccgtggctggcccagtacggcgacctgtgccgcctgttcctggccggcgacagcgccggcggcaacatcgcgcacaacctggcactgcgcgcgggggaggaaggcctggacggcggcgcgcggatcaagggcgtggcgctgctggacccctacttccagggccggagccccgtgggcgccgagtccgcggacccggcgtacctacagtccgcggcgcgcacctggagcttcatctgcgcggggaggtacccgatcaaccacccctacgcggacccgctcctgctgccggcctcctcgtggcagcacctcggcgcctcccgcgtgctggtcaccgtgtcggggcaggaccgcctcaacccctggcagcgcgggtactacgccgcgctccggagcagcggctggcccggcgaggccgagctgtacgagacccccggcgagggccacgtttacttcctcaccaagctcggctcgccacaggcgcttgccgagatggccaagctcgtcgccttcattaatcgcgactagcaaccggagtacgtgccggcccccgcggcatctagtaccttcagtgccgcaacatcagtatacctatagtaactagcgagagtgagaggtgattgttattagtaattacttttttttgtccttgatggttactgtgcgtcggaagaacggttcctcccagcaacacgtccggatggagagggggatcgccggaccggtgtcttcgtttgcgcgcgttgcgtgtcactgactgcagtctacaggctgccgtgccgtgtatctacccgctgcgtctagcagttactggcggttacagtagtcccagagtctaggctgtttgtcgggctttttagtctgctttgacttgaaaaaacaaaaaaaccaacccaagaagttgattg

SEQ ID NO: 105042 - DNA, 366 bp, Zea mays
  Clone ID: MRT4577_2729C.1
gccagctggggaaaatgcttctgataaaccaaaaggaaacagaaaactggatgaccctatgcaagcaactcagaaccgccatggttcacctactggtgctgttgctgaaagctgctctccctcagagtgtacggctttggataaactggaaaaagcctcacaaacagtagaaggtgcaagcagcattgttcaagatattgaagcactgtcaaccattctcacccctatcaaaatttggcttactaatactccaagttcaaccagggaactcaacattgatggagcaaatcagtcgctcagaattattaaaaatttgattgatgctggttcatgccaatcttatgctgcaattgatataagtctgct

SEQ ID NO: 105043 - DNA, 1153 bp, Zea mays
  Clone ID: MRT4577_272C.1
ggccgcaaatttttttttttttttttttttttttttttttttagcagtttaaaagattctttttactacaatcttacaaaagttatacagttaataatatactatatatgaaatggaatggaatggaatggaatgtaatgtgatttaatgtagatcttcccagctccactgaatatattagcgaccgagcaatcagtacatacagacgaataataagcatacatatgtccctggcctggactgatcaactccgacccaattgtgaatcaaaactctacgttggcctggtaggttgcggactttatgttgggtttcttcttgggcgagatgctatcgaggacgagcgcgcagtgcacgttgactttaatctggcggaggtcgacggagccgagctgcagctccacggggacgctgacgaagatgtcgagcgggatgtccccggccttctcgctctcctctagcgcctgctggagccccgacccgaagccgtggcggccctccatggagatgtccatgacggtgacgttcttgtagccctggaagaaggccgggagcttcccggagcacagcggcgtgccgcggtaggagaccacggtgtgggagccctcgccgtacctgatggtgatcatctcgttggggttctcggcgcgcacggaggcggtgagcttgacgtacagcgtcaggtcggaggtgctgaagtcgaactgcgagacggacatgttgctcacggagtaggacggcgccttgggcttgtacacgaagaagaagtaggcggccgtgccggccagcgccgccacgatgaacaacaggaagcagcagcaccagcacaggcagccgcagcagccgcctttgtcctcgtcctcagggtaccgagggacgctgcgcttgcccatggcttatatattggttatgtatagtgataaattattagtatttattagggacgacgtcgccctccggccgccgggctccgactctccgagcgggtgaggagagaggccggcgtcgacgggtggcgggtggggtaggagctgaggccgtgccccggccggcggcgagggccgcactcgcccttaggagtggggttgcatttttgtaggccgggaaagactctctggttgggaggagaagccgggaacatgttcccggccgg

SEQ ID NO: 105044 - DNA, 557 bp, Zea mays
  Clone ID: MRT4577_27300C.1
ctcgtcgccttcattaaccgcgactagcagccgccggagtaaatccggtacatgcaggccgctggagtgccgcgacaacatcagcatacctatagtaactagcgagagcgaggtgattggtagtggtaattacaattttttttgtccttgatgatgattactgtgcgtcggaagaaaagaacggttcctctctccagaaacctcgtccggacggataggaggggaccggtgtgttcgcttgcgcggcgttggcgttgcgtgtcattgactgcagtctacaggctaccgtgccgtgcaactgttaactgcgtgtagcgcggtactgccagttacagtagtcttcagagtataatattttttagtatagaagcgtcactctactaccgacccggaacgagatcctctgacgtggggagaggggagagggcactgccgcgtggcccccgcgtgcgacagggcccgcgtgcagtgaccctactgtcccctgcagtacgtcagaggaaccaatgcattgtgtaacttttgtggtactagtgctatatggtggtgattttgtc

SEQ ID NO: 105045 - DNA, 440 bp, Zea mays
  unsure (1)..(440): unsure at all n locations
  Clone ID: MRT4577_27301C.1
tttttntttttttttttttttgttttggggtttttttttttttttttttttgggcatcaagggatcaatttattgagcaccaatttaacaagcattgcactccgaatattttttttttttttccttacccagggcaaaaccccgggggggggggggaaggcgncaaggcacccccccaaacaggaaaccaagggaaacggntgctnactactggcttaaacaccccaacggggacctcctatagctatccccaggatgtaaattgggccaagaacacccaccaccaccaccaccagggnaccacactaagcatcaacaaaacaagggggnnactggctttttctttttcgaggcaccacagctattcccacccccctttgggtttggctccggctactcaaaaagccagtggcgggaggngcaggntgttgttaagcccc

SEQ ID NO: 105046 - DNA, 305 bp, Zea mays
  Clone ID: MRT4577_27302C.1
aaccacgcgggcggacacacttgcagtgtgtattgccgacacaagtgtcgtcgctctcatatgtctgatccggatctcccacactcactccattaggttcgtttttctctcgaggaatagcggtgatccacacaccgagtgtgctacccagtcatggaccgggcacatgaccgcgtgctctatccgcggaaccatgcgagcaacctctcgcgcgagtgagagctataacaatttctgaacgctccgggagcactcgtacatccatcttgataacgccactgacaggcacgtgaccgattgccatg

SEQ ID NO: 105047 - DNA, 141 bp, Zea mays
  Clone ID: MRT4577_27303C.1
atcacaaaacagatgaaagatacaagcacactggactagatcaataagagagataattgccttgcccctcggatctcatagctattacccatcatcgatgaacttcacatcaatgggttttagccacaagccaatatgcca

SEQ ID NO: 105048 - DNA, 653 bp, Zea mays
  Clone ID: MRT4577_27304C.1
ggcagaactgggcacttcaatccttttctttggatgcaggaaccgtaatatggactacagatatgaagatgagttgcaaactttccttgaggagggggcgctttctgagctaattgttgcattctctcggtaagggccaacgaaagaatatctgctgcataagatggtggaaaaggccatagaaatttggaacatcatctgaaatggtggttacttatatatgtgcggtgatgccaagggaatggctagagatgtacacaaaatgcttcatacaatagtccaagagcagagatctttggatagctccaaaaccgagagctatgtaaagagcatgcagatggaaggcaggtacctccgtgatgtatggtgacacatcacctcaaataagccatagctctagggcctgtttggttcaacttttttctgagcagcttttctgaaaatctggctgtgaggagaatctggttgtagggagaatctgagtatcattatgattacgcgtggaggaagataaagttgttcatagaactcaggatctagaaagtgacggattcttactattacaacgactcaaccgattatgtgtttatgttgattttgcatggtttttgccccccccaattttatagaagctggctgaaaagctcagcgtt

SEQ ID NO: 105049 - DNA, 539 bp, Zea mays
  unsure (1)..(539): unsure at all n locations
  Clone ID: MRT4577_27306C.1
cattgggtacctcgaggccggccggggctccccttctcttcccccggccacgcacttccccgctccccgaccccgcaacctctcaccgccgggccccgccctccgaccctcaacgcgcaaatagcccggctccatccgctacgaggatcccagatgagctaggacaactcgagatatggagactcggggagtgcgcaatgggggactttggtcgacggctcgctgtctgccctgctcatgtgctgcgacattgacatacccaatcgggcgaagggcctggaggaccccgaacgcctggctagagaaactgtctgtaatgggaacgaaattcgaggctctggatgagctgttcaagaagaatatctgngctgnngtttcacctgccccgcgtagcaagggacaattccaacgagccttgcctccgaccaacagaaactgtagcctgtgtgctgaccgggcatttaactcgtttgacacgaaacacgaagcaagtcacgagattgaggaagtcggccgagccctgtgtgtgctccatccga

SEQ ID NO: 105050 - DNA, 577 bp, Zea mays
  unsure (1)..(577): unsure at all n locations
  Clone ID: MRT4577_27307C.1
gtccgcccgcaccccacgccacgtcaccaccgtgtccggcgtcttccgtctctgtttgccgtngaggttctggaccccgcgagcgtcgtcgcctctgctccttggtgcttcgtcctcctcccacgtgtgtgcgcccgaaggacccaatctgaggggtcatcggctaccagcgctaggatcatgtgtgaccaatcgctgcttgcgatttgcgaaccgcgggatcaaggcgtgggagcaaagctttagctgccaaaggggcggaagcggaagagggcagcacattctatagtctctatccattttttggcaccataaactttgttatgaaagtggctggagccaatcgtatcaaaaaattatccaaagcaatctaaagccacctctcgagtgcagggatgtcaagggatttagacgcctttcattagttgtagcctctgctgcccagtctgctgccagtgttgtccaagtcggcacaaaagaaatccaatcaaaggcttgtttgggagcaatgatagaggaggagattgaagggtctgtctccagtgcgcactgagcagcaccacggcgcgggtgcggg

SEQ ID NO: 105051 - DNA, 1611 bp, Zea mays
  Clone ID: MRT4577_27308C.1
gggactcggccgcacgctcagcctcagcatgccaccgtcatcgccgtctcgcccgctattgcccgcttcccactgccccctgcaccgctgccgcttgtaggctcctccacctccgccgcctccttgagctctgtcgcgcgaggccattttttagtggggaatgcgatgtccactttctcatctcctgtggcctgcaccatttgcgcacgtgtgtgcgcccgcaatccccgaacacaggggtcatcggctaccagcgctaggatcatgtgtgaccaatcgctgcttgcgatttgcgaaccgccggatcaaggcgtgggagcaaagctttagctgccaagggggcggaagcggaagagggcagcacattctgtagtctctatccattttttggcaccataaacgagccaatcgtatcaaaaattttatccaaagcaatctaaagccacctctcgagtgcagggatgtcaagctacaagaaactctcacagataaagaaaagaagggtgaccctccacttcaatctcctccaaaaactggatgctagctgttttaacttgtggtcttttgccatgtgcgttaataaaaacgaaagggcctaaagaccacaagttaaaactggatgctagctgtttttcacccccaagatgaacaaagacatgatgcaggtaaactagctaaaagttgcagttatatcaggtcctgtttagcgatctatatatgttcttgcaaaagtttccgggtttaagggatcaactggctctgaaagataaaaaagttcatgtgactgaaatagcaaaagctgagagaaccaattaaggcatgatgctgtttcaaaatgctggtcatactatagatccgtacgtattctgcagcgtgcatgtgcatgcatagataaaaaaatcaggtcaagaacattgtgtgctgctgattgtttccagagaaactggcacgctatactgccctttcaaacagaaaatgctaggaatggagcatgcatggacactgaaacacagctacatgcatatgacaaaggtcgtgtctaacctcttgattggttgccggcagccgccgaggagcgtaaaatagatttgcttgcacccgcacattccgggcgcagccgtgcagccaaccaatcagaaatgcaggcgcagtcaacactcgtgaggagcctaggcgttgagagctgggcaaccaatcacacggtaattgtatgcacccatgcacaggtcgaggaggctcctgtgtctaattgtgtgcagcaagtcaaagagtctcgattgagcctagcatgagcaataggggccactcaggctagccaaggagactgcctacgaaccaacacaaaggtccacaattctgatcctttgtaaacaaaggacataggcaagtcatccttggctatcagaggcaggcccttattgacatgtaaggcttctgctctgcttgtcacctctagctagcttggtagcttctgtgactggtctgttgtgctccttccatggaacatctatttatacatgtatctcgtagagagaaccgtatcattttttccttttttttgttgttgttccaggacatcttattctctaattggatagcagcatatattct

SEQ ID NO: 105052 - DNA, 687 bp, Zea mays
  Clone ID: MRT4577_27309C.1
attgggaccctcgaggccggccggagcgccaactccaacctcagcacaccaaggagagtacgtgagaggagcagccatggctccatcgggggtggtcgcggtgagcacattcatgggtacccgcctgccggaccccgggccacatacgagcgtgcgggccccgactcccgttcccccggggcgggaacttgaaccctgctccgaataaggtggggaagacatcgacctcctttgaccggtcgatgcggttccccggcgccgtggcgcccaactacctgaacctctcggtggacgccaagtacgagtgctacccggtcgttccctcccacatcctacgtagtacctgcactgcgagttgaacatcgctgttaccacaacctgggccagaatgaggaccccgaaatcatcggcagcctcttccaggcctccgaagtgaacgccacccggttgaagccctacagtggacgggtacggtcatcccgcgggtgcgtgagagagaggtcatgcatcaaccgctgggacaggctcgacaccctcaaggccctctacttcgagtggctcaccggcgtgacctgggacgacgccgtccaggtccactatggtggacatccgcctcctacctgacacaaacaatgccggtctccatctcgacgatcctctgtatagaagtgaccgtgatcggctaca

SEQ ID NO: 105053 - DNA, 429 bp, Zea mays
  Clone ID: MRT4577_2730C.1
gaaaaagtcagcacattgcaagcaataataatggagacgacgactaagctccggtggagccggcccggctccttcctcctcgtcggcgcggcgctcctggcgtccgccgccgcgtacggcgtcaacgtcagccatttctactaccacttgcagaagcggaagagagctcgccaaggcgtcagggaaggaggcgtacaggcccgacccattcaacgtgaccaacaaatttaacgccgccgatcacagagctgccaccatcgaccgggtgtgagatgcgggagaggcccaggatgcctaagagccgatggagcttctggcacaatgacaacaacgactacaggggctcgctaatgtacaccattggcggaggaaacacgccaaccatcatcaggcaagagctccgcttcatagcaccaccaaacattggac

SEQ ID NO: 105054 - DNA, 2628 bp, Zea mays
  Clone ID: MRT4577_27310C.1
ccagaatctccattttagtgaacctgcatcttggtgtccgcccgcaccccacgcacacgtcaccaccgtgtccggcgtcttccgtctccgtttgtcgtgaaggttctggaccccgcgagcgtcgtcgcctctgctccttggtgcttcgtcctcctcccacgtgtgtgcgcccggaggacccaatctgaggtaggagaagcaccccctcctcgcatcgcgtcacgcccccaccaccactgccgtaggcttctctccggcgctcccgctcggacgcgcgctcagcctcagcatgccaccaccatcgccgtctcgcccgctgttgcccacttcccgttgtcccctgcaccgctgccgcttgtaggctcctccacctccgctgcctcctcgagctctgtcgcgcgtttttagtgaatgcgatgctcatttgcaccgtaccctcgtcattgccgggacaattcggcacgagcgcacacgtcaccgtgtccggcgtcttccgtctctgtttgccgtgaaggttctggaccccgcgagcgtcgtcgcctctgctccttggtgcttcgtcctcctcccacgtgtgtgcgcccgaaggacccaatctgagggcctcaatcgttgaacacaggggtcatcggctaccagcgctaggatcatgtgtgaccaatcgctgcttgcgatttgcgaaccgcgggatcaaggcgtgggagcaaagctttagctgccaaaggggcggaagcggaagagggcagcacattctatagtctctatccattttttggcaccataaactttgttatgaaagtggctggagccaatcgtatcaaaaaatttatccaaagcaatctaaagccacctctcgagtgcagggatgtcaagctacaagaaactctcacagataaagaaaagaaggttgaccctccacttcaatctcctccaaaaagggtttagacgcctttcattagttgtagcctctgctgcccagtctgctgccagtgttgtccaagtcggcacaaaagaaatccaatcaaaggcttgtttgggagcaatgatagaggaggagattgaagggtctgtctccagtgcgcactgagcagcaccacggcgcgggtgcgggagaccgggccatggcggcaccggccccgagccccatccctggcggtggcgcggcatcaagccctggcgacggcggcgcccggtgcctcacactgagctgctctaccacctgacattacgcgtgcagcaccagcgacatcgaggccaaggtccggccaaccggccggaacccctgtctactatggttgttgtcgtgaactctgaggccaggggtcgcccgtgcaatcgcatccgacttgacctgaccttgccgtcgtctaggagggcgatggcggtgaagggtgcggcagtattcactggaccgtcgcttcatcaccatttcttagtttttgctgatagtcgtcatctccacggttgccacatggcctcaaatcgtgaagacaagaaggggagatgcctgcctccgtcagcccgtcgtctccaggtgcagatacaccatctccatgctcttcgatcccgacgtcgtcctatcagttgtcttcggcaagaatggcgggctcgagcagatcagtattaggaagggctatgtggacatgtgcactgtcgatgccacaactttgaccaagattagtgacgtatctccctcttctgttctatcagattattcacttattccccttgatcttgaagaactttctgcattagaagttctcttctttgtagcttcgatcctcctattgtgagcataatcagatgacaaacataatgaaggcagaacatcagatattgaagtgcaaccaagatttttagtgctaggggcagttgatgactcgacacctgtggaaaaactttgagcattcaatgtagtattcctggaattaactacatgtgcataactacccgaagaatcagaaacatataaaactccaagatcatgctcttccggcaagcctccagtagttgttgaggatgatgaagcttatgagatactcttctgcgtgtatggatgcccatcactaaatacagaagctttcttgccactttgagagaaatgacggcatcggtctggacgaatggcgagctcgacgatctagagtcagatctggtggggaagaagtctggtcggtcattaccgacggcaacgctggctgcagagctgatcgtgccaccagcataagagatcaaggagttttttaccatcgccgaggcggccagtacaagcgcttcgcttccaatgtcttactctttcagcacttggatagtacaagcgtgctgaagatgagcatctcattggtttaaggtgtgacgacagttcccttgactattgggctcaccttgcccaggaaataactcttgaccatgtgaaggcagttggctttcttggagatggttttggcgccacactagagatgagcaaatgaaacttgatataggttgttagcaaaattcagtttttttcagcaataccactcaaaatttagtgatgctaacaaaaatatagaataacaattagtgtttttgtatattaatgtatttaatcacattggttccgtagcaaaaaaaaaaaaaaaaaaaaaa

SEQ ID NO: 105055 - DNA, 1857 bp, Zea mays
  Clone ID: MRT4577_27311C.1
atggggtcagttaccgatggattcttgtggaaggagttactgcaccgtgttgtggcagcgaaacggaggagcgaaatagacgagactgattcagagagcaactccttcgacaagaatgatgacatgtctaaggatgagatgacagtgctaggtgggagaggtgaggatgttgttagagttgatgaatgcaatgatggcggagatgtgactaaagtcaagaaaaggcgtagaggagtgactaaaccagttaaggttgagggtggcagcaaaagcaaatccaaggtttgggaggtttttgataaggtgaatgtgccaaatccatctgataaggagaatccattattaaaggcaaagtgcaaatattgtaaaaagctttatagttatgcacaaggatcaacaacaacgacattgtcaaggcatatgaagaactgtggaaagtatcaaaagtatatcgaagagaagcttgatcagactctcttgaactttgctccttcagcgacaggtgaatctggttctggtctccctactatctcatcacctaaagattataatcatgagcaagtcaaaaaattagttgccaaaatgattatagttcatgagtatccatttcgaatggttgagcacacatggtttaatattctcatgaagtatatgaattcgttgtatgaatttaatggtaggaagaccataagagttgaatgtttgaagttagaccctccacataaaggatatgtgataggacaagctgcttatgaatgtgttactgcatggaaaatagaagataagattgtatccttcactctagataatgctgcaaacaatgatagtgttatccgtggtttgagggctagatttgcagctagacaagggaatgctttcattgcaaaatactttcatgtccgttgttgtgcacatatcatcaatttggttgtcaatgatggaacaacaacattagcttctttgatagaaaatctaaggttaacagtcaagtacctcaagaagtctccatctcgcatgcataagtttgtagagatatgtagatctcttgcattgcaagttggagaagggatgagacttgatgtgtcaacgaggtggggttcaacatacaagatgttgcgcactgctatagcttacaaagaagctattaagacatatgctgattcagatttgaactataaatgggaacctacaactgaagaatgggatttgtttgttgcaattgagcctattttagcctctttagctaaagtaaccactgcattgtcagcttcttcttaccccactgcaaaactattttatcctcacattgtggatgtcaaaattgcattgaaagcagcaatgagttctactgatttgaatatgagaaaaatgggtactgcgacgacggagaagttcaataagtattgggaagaaaagaacaatgttatggtcattgctactatcctagatccaaggtataagatgagatatattgcgtggtgctttggtaagatttttgatgcatgccaagttgacttagagatagaagaagttagaggtgaattggaaaagttgtttgaagactatgagatgcaacatagagagagaaaagctgctcaaactgacaaggagtttgatttgcttaactggtggaaggttaactcacatagatttccagtggtgtcgaggatggcaaagaagttcttaactgtgcccactacctccgtgtcttcagagtctacttttagcactgagggtcgaactctagatgattaccgtaactctctaagcccttctatggtggaggcattggaacaagatgaagaggatgatgttgaaaacatttcatttccaaaaagtttggtggagagcaactag

SEQ ID NO: 105056 - DNA, 481 bp, Zea mays
  unsure (1)..(481): unsure at all n locations
  Clone ID: MRT4577_27313C.1
aaagaacaagggagaagtatattacttcaaatgcatacaaaatgtcattattacaaaattcgatatgcaggaaattttagccaaaaaaccgttgtactcttgagaaaaatctccatggaaaacaaggtggctaaagcttggcaaaacagcaatttacacacggattgtgatattgaagtttctaagccctatataaatgctaatattaggaatattaatatgtcaaaaagacacattgtatcgnttactttgtgtgcataggaccaacacacctttggcttgaactcccacgccttagttacgggaccactactctttttgttctgaagcttaaagagattactacaattttgtncnaaatgaagggatttncatatgcgattgtatgtnttnatatttataaggaacacaagaaaaagtgggctttttggaatttttgtatgaaagtntgnnngttaagagaatggnagatgaaaagtga

SEQ ID NO: 105057 - DNA, 460 bp, Zea mays
  Clone ID: MRT4577_27314C.1
aagccagggaaaacactaattccagggaaaaaatctccagcctattttttataaaccaaagggcattaaaggaggccggaagtttaaggggttttaaaataaaaaaaataattgggttttaaggccccgttcgaaaacagggaagcccactcctaacttgaaaagaaaagaaaatttttaattgtaagttttccaaatgggagcccaaaaaaaacaacattgacggattggcaaacttaaattaaccggtttgaacagttttaacttaatgggttttccagggctttgaaaggttatccaaaaaagggtcgtttgaatttggcccactaagaaaagcctgttacctaaaaaaaacggttcaaatttaaagggctgggctcaatttgtccttgaaaaggtgaaggcaaatccaaccaaccttgccaatgttggaataaaaaatttttttaaaaaacctaac

SEQ ID NO: 105058 - DNA, 217 bp, Zea mays
  Clone ID: MRT4577_27315C.1
cacgcccacgtacttcacgttcctgaagctcttgcaggacacctaggtcgtgggcgagtcgagtcacctcctgtcggcacacgctactggtcgaccgcgacaaacttgccaaggctctggcgtcggtgaccaccgataacgtgctgtcatccgtggagaaccacgtccttgtcagctacttcgaccgcatcaagctggacgacttcaacacacacag

SEQ ID NO: 105059 - DNA, 407 bp, Zea mays
  Clone ID: MRT4577_27316C.1
gcaatctatagtgcaggtcactattctgaacagttcctgttctgcacgcatacaacatactagcgtcttgctgccgcgccatatagattgataaattgatttttctctaaagtagattttgcagttagtccgtgttactggagattaaagtttttcagcaggattacttgggtccaattagctgcgtggaagtggctgtgtagtgttagagattaaaatcacccagtagtgctttttcaacggagtcatgttactcgattttttttaaatgcttatagcgccttctagatatgcttgtgatgttttgatattaattttgtttttcaaaatcagaccagatagtaggaaatttgtattgtcttgtgaacaaatgctattttttgaatgaatataatttgttgtctttg

SEQ ID NO: 105060 - DNA, 125 bp, Zea mays
  Clone ID: MRT4577_27317C.1
tcgcgcggagcttgaggaaacacatggctgatgaaggctaggagggggtgccgcctgccgcgatggtggtggaggcgccaaccgaggactctgggctgccctctgagctgatggccgtgctacca

SEQ ID NO: 105061 - DNA, 451 bp, Zea mays
  Clone ID: MRT4577_27318C.1
tgtacccattcgtgtctccgcaaacacctagttccgctggccaccgcctgaggccagtggagaacacatggtgagcggacccaccacgatcgcgtcagtacacagggacggcctaggacatcttttctgggaacgagccgcgtactcgatgggatgaccgaccacacttagcactggcactcagcaattcacctcgctcctggcaacaattcttcacaggtctgagcttgcagccacatccaacaactaggttctatgcttgatgggaacaactaccatctttgttgcaaaacatgtattaaccatatgtatcaacaagatgaaggacaccgatctatcttgatgagctcattgaggacatccataagaaatacaacgaccagcatcagcttatatacatgaggatagctgtgacataacatgtacaattctgagtgtgaatcttctgatg

SEQ ID NO: 105062 - DNA, 269 bp, Zea mays
  Clone ID: MRT4577_27319C.1
ggtgaagccgccgccgttgccatgtccatagccaccgactgagactgagatggggggtttggccaacacccacaagagctatgcgtacttcttgcatttgcaggtgaagttcatgagaacgcgcgctagcaactcagactacagggtcaggatgatgctgcttaaccaagacatatacaagtcccacacacccagattcagagttggtgtgcgattcaccgacatggacatgccagtactcattatttgtgttagtatagcaagggata

SEQ ID NO: 105063 - DNA, 295 bp, Zea mays
  unsure (1)..(295): unsure at all n locations
  Clone ID: MRT4577_2731C.1
gtgttttttccccctttgaaaagcacaccagggggttggaaaaaanccctggggacttttcaacttggccccctgaaaaagatcaccctggatgcagcactacaggctattgttgctgtaaacagctaaaagagagaaagagggtaaggctggatacacaatgatgcagtagcacgcatgattcattttaaggccaatggcatacagccaatggaccgggcgcgtctgggacaacacatttggcttaggaacgttaggtggacaggttcggacacctaaagcgggagcacattaa

SEQ ID NO: 105064 - DNA, 324 bp, Zea mays
  Clone ID: MRT4577_27320C.1
ctggaacatgacgagtcaccatactaagctcgaattcgctcgaacgggttaactgggaggtgatcgttgtcaaagatgacctcgtcaatgcattttgcctgcctggtgacaaggatgtagtcttcactgcgatgcttaacaaattcagggccgatgctgaggttgccactgttgttgggcatgaggtgcggtccttggtctgcaggttaatgtgtggattagggtgactgcagagcattggaactaactatgtggctagtttttgtaggttgccatgctattgcgagcactccgctgagcagatcactaagaacctctgggtgg

SEQ ID NO: 105065 - DNA, 514 bp, Zea mays
  Clone ID: MRT4577_27321C.1
gggcactgaaccaccgacatacaacatggaccgcctccgtctccaccgactacggactgggcggcggcctgctggccaaccgcccggcattctgcaccagcatcacgcgaggaagccgggtgtgggggaggaacccccagatgagcaggaaccgggagagggaaggcaggaacacctgcatgaagtttccccgggactgggtgaggagggacctgggggggggcgggttcgggctcattggctggaaggggccgaccagcggaccgggcaataacgggaacaggcttacgggggctctttttatacagaatcggccaggagctgggccaagtttccaagaccccgaccaggaactcccaggtgtggctggggctagggacgagggacctggggctgtggatatgggctcacctttggacagaataggatacaagggcaggaccgaggactacttcgagaagagaagtgggtaagatactatacatcataacctggggctgggctgcgatgcgat

SEQ ID NO: 105066 - DNA, 317 bp, Zea mays
  Clone ID: MRT4577_27322C.1
cctcctttaccctatctttctcgccgcctgttatcttgctgcagctacgctcgctaggagagctcctacccaacgtgggctccctcccattccattcccctcccgtttcaccagtttctggcccccaccttatcacgcacaaaccactccaatttcccacctgactcatctccggttttatccactcccgcttacctcttcctcacgtacgggatttgattggtggttaatcttctccttagatgaagcacattatccgttcatcatcctaatagactaaacttagccgctcccgttcccacgctaatgctacaccc

SEQ ID NO: 105067 - DNA, 538 bp, Zea mays
  Clone ID: MRT4577_27323C.1
cctcgaggccggccgggccgggacatgcacccacttcaccttcccatccattataaccaccccgtcccacaaaaccactacgccgactcgccgaggctgcgagggagaacccagcagctcccattaatggactgcgcaacagcttaaactccgccgcccatttcaaacagaaccgaaccggccgcagcatcgcagcgcagcggtacgcgcctcggaggtggagggaatgtcggaggcggtggcgatcctctcgctctccgcgtccgccgtggtagaagacgtgctgcggcagcacgggtgccgcctcagcgaccgcgacctcgcgtcccgcagggccgaggaagctgcggggaggaggaacgaggcggcgggatggctgcgccgcacggtgggggccgttgccgcgcgcgatcttccggaggagccgtcgggaggaggagtttcgcctcggcctccgcaacggccagatcctctgcggcgcgcttaatcgtgtccacccgggcgccgtccccgaaaggtggtcgtgaatacggcggcg

SEQ ID NO: 105068 - DNA, 981 bp, Zea mays
  unsure (1)..(981): unsure at all n locations
  Clone ID: MRT4577_27324C.1
aattcggcacgagctctcctgcagctatatttcagcctgctttcttggacttggcatttggtgcagcatttgcagttttcttgcggctggagatgcctcgaatttgggaaatataccctcttggacgtgttgtgcatcagtttatgaacgcctttactgatcatcgtgattctgagattcttattgtcagccatttttcactcttactgggctgtgcacttccgaaatggatgtcatctggattaaatgaccgaccacttgccccttttgccggaattctcagcttggggataggtgataccatggcatcaatgatagggtacaagtatggcgtgttaagatggagcaagacaggaaagaaaacaatcgagggcacggcagcgggcataacatcggtgctagcagcctgctcgatcctggtgtcactcttggcttccagtgggtacattctttcgcagaattggctatcgctcctgatagctgtcacattgagcgggttattggaggcatacactgcacagctggacaatgccttcatccccctcgtgttctatagtcttctgtgtctataagggtagcatcctgtacatctaactgaccttgatatcctctttttgtttacacgctattagtatatacgtagtgcaatatgttatttcgacattactcacttggtctcctcggcgcatcaactgcctggtgattcagttcaacagatcacattctgtgtaaccctgcctttcggaagttgagaggacgtgctcatggttgagacagtcggtacaggcatatgaccagaagtagaaaaataaaatgttctccagtcgttcagtagagggtgtttttggcggagctgggcagttggatgctgtacataaagtttttttttatatgaacctgttgactgttgttgggacgaacagtattgaaacatgctgtgatgctgatcaatttgatcactctatttgctctttcnnnana

SEQ ID NO: 105069 - DNA, 127 bp, Zea mays
  Clone ID: MRT4577_27325C.1
ctcgagcctttttgcagtgtgtgaactcaacatcatggtggaaactgtacaccctctctcacgaactcaacatcatggtggaaacttactgtacaccagtgactggaaggagcgtcattttcaggca

SEQ ID NO: 105070 - DNA, 454 bp, Zea mays
  Clone ID: MRT4577_27326C.1
ccccgaaaccctaatgccttggcccaaatccggtatacaaagcacatcacaatacaaattacggtcatcaatcggaagtatacacaatggatttatgtagatcgaaccttgttcttctcgggtctggttcggtggagcgaatcgaagaggaagacgacggcggcagcgcttcgcggttgatttgggaaatgtttagtctgctaatggcaaatctcagtccacgttcatcccagtctttgattcgtggtcttagcgtcatgttcgtatgcgtggcgttgcgttctttccgagttgtatactcggtttgcatcctgttaaggggccgttcgttttgttcagaacgcattctttggaacggttttacgtggaacgttagttttatttgtattaaaactgatgagcaggaatagtttcagatcataatccgaggtaaccgaacgggcactaagtttgg

SEQ ID NO: 105071 - DNA, 383 bp, Zea mays
  Clone ID: MRT4577_27327C.1
ggcagacaaacctttttttttagacccacaggggaatgtttcctacccctgatgccaagagaaactgcccacgcaacatcagcaaatttactttgaagacagtacagacattagtaggactagcatcccaaccacagattgcataatcggatagggggttagacccacggaacagacccgggggggtcactttatttcctccgtaagaataaacccagcttaggctacctcctccattttgttttccccagggtcatcctccaaagggggcatgttagtgtaagccttcggagcctcctcgacctggttgatgctcaggcccagcttgagcatgcgggggatgcggctgcaaagggggtgggatcgggggggctaaagcctga

SEQ ID NO: 105072 - DNA, 518 bp, Zea mays
  unsure (1)..(518): unsure at all n locations
  Clone ID: MRT4577_27328C.1
ccacgcgtcctaaagctagagacaaccgctgtttaaacgaattcatcgccatggcgtctcgtggcgttgctggggcggcctactcctcctcctccctctcctcaccgtcccccctcgctcgcctaatctctcgccgcggccttgccggtgccgcagacggccatgggtctgcgaaggtgcccttgtggaaagatccgttgagcccgagcaagtggaaggaagagcacgtgagtttaccctagaatatcttgtttaaagtcattgaagctaactacattgaggttgtgatgattatcgtactactcttaggcatacagcctgtgagtacattatatcttctttatgagggtctgccactgagctcttgagttcatttggatgcttaagtggaacctgagaatgtcttctgggtggaaaacacaatacttggaactagtgcccaactttttggccttgnnnncnnataccattgtacctacaatcttaggtggcctctgtcatcagttgaancaatatcc

SEQ ID NO: 105073 - DNA, 248 bp, Zea mays
  Clone ID: MRT4577_27329C.1
cgcacccataacacgcaatgggcataactcaatagtgctcacctacgcagactacaacacggaggcgtgctacaataccaaggtcacatatcatgcatcaccgcccaaaaactgctaagccggcacagctttgcctaacatagacatcccgccatgggtcttaactcgcctgaagagcattatacgtttatccacgacactcccaaatcacactctccctgcaagacgtccgcagccaatctttatac

SEQ ID NO: 105074 - DNA, 932 bp, Zea mays
  Clone ID: MRT4577_2732C.1
cattgtaccccgggagcccggccgggcgtctcgctactgcttcgtcgccgtctcctcagctcgacgcggctatagctgcactgaccgccgcgtgcccaccggcaccgctcagtgctagcgcgcgctcatggcgtcgcttggccagctcctcctcgtcgccggcctggccttcctggtgctgctgctgggtgcccaggatcacgggcgtggagagcaagcgaccggcggcggcccggccgttggagcagcagccgccgccgctgctcctcccgcgcgggaggctgtaatcatcagccggcaccagcattcgcagccgtcggccgcggcgatggcggagagcaagcggctccccatccctccgtccgggccgtccactaagtggaactacgaggcgaatcacgagaagccgtcgtcgtcggagtcgggctcgggccgccgccgcctcgggtggtggtggtccccgtgacgcggccggtggcggtgggttcttgagagctgcagagatctcaaggctcagctagcgtcgtgtgtgtcgtctgcttcgttcaccatcttctctcctactagaaagaaatttgcgcagatctcatggagtactggcagtattgctgctctgattagtttcttgtcgagtgtgcatgaaatggctgtgagatctgctgatgtttctttccggtgtagaatggaatcgtctcccctaataataattataataataatacattctgaagctaaaaaaaaaaaaaaaaaaaaaaaaaaaaaaaaaaaaaaaaaaaaaaaaaaaaaaaaaaaaaaaaaaaaaaaaccaaatctaaaagacacaaaacatacaaagaaatacaataaacataatagacaccaaaaaaaaatacactgaacaaaattaaaaaaaactaaggggggcggcgttttaaggggtcacactttttaat

SEQ ID NO: 105075 - DNA, 287 bp, Zea mays
  Clone ID: MRT4577_27330C.1
catacactgtaaagatccacgtaccaattatatgttagtagcacttgaacgctaatacggtaccgaacggacactcgatggaccttaaccaatctatgcttacagacgagtctttctacagagatgaccattgaacctataactgccattgcggcacaagctcacacgtagctacactacatcagaacctataacagtaatgtggcaagcacatcacacagatgagacactcatctaacctataaagatcctgacgctgaatcaaagactcctcctgattcatggct

SEQ ID NO: 105076 - DNA, 408 bp, Zea mays
  Clone ID: MRT4577_27331C.1
atcttatggaacctaaaaaaacatgaagtatatcatagtgacggtcagagagcactccgaacatcaaaatagaataggtcacctttgtattccctatctaacacatatcatccaccctcgctgctgctccaatgatgctatagcatacataaagcttctcaggagcactcatacaaacccacttttgacgcaaaaatttcactatagagggctacactttatcactcttagaaactagcgagtaccgggcccatactcttgatggcgcaaagctgattcttggtgaaaaggacacctgctacactcgaatacctgaaatcaaaacatacactgggagaatcaagtgcctaggacgcatcgggagcattatctaaataggttggcctccttttaactcaacaatcacca

SEQ ID NO: 105077 - DNA, 1306 bp, Zea mays
  Clone ID: MRT4577_27332C.1
cctcgctgtgctttgcctccccccatcgtcctcatgggaattttaaagggaagcgcctgctagcagccacctctccctgccgcagctagtcagcatcttcagtcttgcactcccccctctgcagtctgcactagcaaggaagcgagctgcgcgcgcgatgccccagatgccccaggtggacctggtgtgcggcgcgtcgggcgccggcgctggcgccggggacaggaaggtgtcgtgcgagacggtcatcgcggggggcagcggcgacgcctcgccgccgccgccgccgccgccggacccggacttccctcccgactcgataaccatccccatcggcgacgacgcggcgttctcagagctgaacccgatgtacgagcgggacgactccaccaagggcagcaccaaccccaagtccgcggccgccgccgtcgccaaccccatcgtcgcggccaagacgcggtccaactccacgcgcgccgcggggggcgcacccccgccccccgcgtccggcaccactttcttcggcctcccagccaggatccgcccgaccttctcccggcgccggccgtcgcagtcgcagtcgcagtcgcagtcgcagggccggatcttgcgcgacaagcgcgcgggcggcgaggtggagccgcggtcgcccaaggtgtcctgcatcggcaaggtcctctccgaccgggagcggcacgggcggcgccgtggctggtggcacggcgtggcggccatgttccggtgcgacggctgcgcccgcgttgcccgcggcgcgtccaggaacatggcggcgctggaggacgatggcgtggagcagcagcagcagcagcaggcgggcgttgcgggaatgcggaggttcaagtccgggaggagagctgcttcgtggggagacgaggcgctggccacggcggcggtgggcgatgtggacgaggggatggagatgcccgacagccaggacgctgagcagtggtcccggcggccgcttagcgccacagatcttggcgccgagctaggacttaaccttcgcaacggtttcttctccgcgcgtctgttctctgtttcttcctcctaccgcaacgccgccgcgcgcacgatagctcgaccgcgccctggcttccccgcccaccgcgcgcccgccccggccgccgcgccgcgcgcccccgccgcgccatgcgcgcccgccgccgacaccgcagctcgcccgccaccgccgccgacaccgcagcgcgcccgccaccgccgccgcgcgcccgccaggtttcgaaacatcactttacaggggaggtgctgccaaattttttattga

SEQ ID NO: 105078 - DNA, 231 bp, Zea mays
  Clone ID: MRT4577_27333C.1
gtgctctctagtcggcggccgccctctgcaccatgtgcgtgagctacggctcgtccgcgggcgccatcaccaccatgttgggcaaacacgcaatgtacgagacatagaaggcaccacagcgcgtgagccacattgagcgcaccagacccgtccggtgcagcgggaaccatacagagagtcggtgactgtccacatagctcaccagcaggatgtacccgtgctgcaggaacg

SEQ ID NO: 105079 - DNA, 383 bp, Zea mays
  Clone ID: MRT4577_27334C.1
ctcggcggccggaaggtgacctgctcgttcgaggacgaggtcatccgccccgggcacgagagggtgatccgtccggagggcatgccggtccccgggcggaaggacggcgcgcgcggcgacctcagggtgaagctcgaggtcgtgttccccacggagctctccgacgagcagcgcgccggcctcgccgagatcctcagagggtcctgctgatcggtcggtgtcgccgtcggtccaattaagtcctatcgtatcaagttttcttgggcgtgtgaccgtgtccgatgagtaactgagtacataaagagagatggtcgacgttcgttgtacatacgggttgtctatgtatatgtcgatatatatgaaacgtgaggcaagccttgtgt

SEQ ID NO: 105080 - DNA, 585 bp, Zea mays
  Clone ID: MRT4577_27335C.1
ccggcgttcaacgggtgggcgacgacctggtgctcagggcggaggtgccgctggcgggcgcgctcaccggctggtccctctcgttccggctcctcggcggccggaaggtgacctgctcgttccaggacgaggtcatccgccccgggcacgagagggtgatccgcggcgagggcatgccggtccccgggcggaaggacggcgcgcgcggcgacctcagggtgaagctcgtggtcgtgttccccacggagctctccgacgagcagcgcgccggcctcgccgagatcctcagagggtcctgctgatcggtcggtcggtccgagtccgagcgtgtatcgagttttcttggccgcgtccgttgcttcgataattcgatatgatttactcatagcgcgcgtggatgagtgagtaactgagtacataaagagagagggtcgacgttcgttgtacatacgggttgtctatgtcgatacatatgaaacgtgaggcaagccttgtgtagttgtgtacctgcctacatacctagtgatggcagccgtggttatggataaccgtgggtttcgtacccgatgaatatagatacggtac

SEQ ID NO: 105081 - DNA, 458 bp, Zea mays
  Clone ID: MRT4577_27336C.1
cccaaaagaaaggaggccgggggaataaacttattgggccacagttttcccaaaaaaaaaaacgggccctggggtagacggcagcagcccatcccggagcaaaaagaaaaatcaccgccaaatttctaaatagttcgggaaacaggagggccccagagcttccgagccctgaaccttaatttaaaaaaagcaacttggggggggaaaggatctaacgagccctaagggaacgctgtttgctccctgctaaggagtaaggagggacaacggggtccttttaaaagttaaccatcccaaagctcctaaggggtcttgaaaaccctctttggaaaacaaaaaagttgcctttaagaagcctaccctgcttaatctaaaaaaactttgcaagcaagtcatttggaattgaccaatcataaacataaagggttggcttaatcctttcttaattcgggctcttg

SEQ ID NO: 105082 - DNA, 385 bp, Zea mays
  Clone ID: MRT4577_27337C.1
atatattttaattttttttttttttttttttttttttttttttttttttttttttttttttcctccacaaaaaaaccaagggttttttttaaggggataacagcccccagttaacaataatgggtacggaaaatataacccaggacagggaacacagtaggggagggccacacatacacaaacgggaaaccaacaccaccataacattcctaataataataacctacagcaacatttttacacgggcttttttttcctttccaatccctcctttaggtaaaaaaggcaaaaacgggcggaggacgacgacgacaaaaagggaagtttcctaagttttggaaccaaaagggggaccacctcctccgggtttcctttttcgcccggg

SEQ ID NO: 105083 - DNA, 305 bp, Zea mays
  Clone ID: MRT4577_27338C.1
accacgcgtccgctgcttcccggtctcctgcgcacgatggcttcgccccctccatggggggctgcctcgccggcgagcccgacaccgctaatcggatccgcctacaaggcgagaggcaaaagatggagcttacagtcaccaagctgctcacacacgtgctcgtcaagaaggagatgcacatcctgatggtggtacttgacaccgccggtatgaccaccatcctgtacaagctgaatctaggcgagatcgtctatactcatcctcaccattggattcaatgctgaaactgtggagtacaacaacat

SEQ ID NO: 105084 - DNA, 195 bp, Zea mays
  Clone ID: MRT4577_27339C.1
attcggctcgagctcgtgttctccgtcttgtcgcaccgtggaggcacttccaactggggggcctgtagggccccgaccgcctaatcaagaagggagagcacaaacctcagaccacaggcgtcctggaccgcggctccatgtagcaagagcgattctgactcatgctgcggcgccaagaagccggatgactggatt

SEQ ID NO: 105085 - DNA, 475 bp, Zea mays
  Clone ID: MRT4577_2733C.1
aaccaaaccaagcttccagggggggaaaatcttaaatgggcccccgggggggggggggccccaaaaaatatgggcaacacaaaggggggtcgaaggtaattcttgcatttcaaaacccagaaccatacatacaggggtacataaatataggggggggatagcaaagcaatatatggttaaaactatcagcttttaaacccccaaccaatcaaaccaaggggggtggacaacaactaatctcacaaaccaggggaaacaacacaaccccctcgcccagggggccacaaaaaaaaaaggggggtggtaaccccgaaaaaacccagggccgaaaaaaataaacgggggaggcaaatttgccacacaaatttcgaaaaaaggaggggggcataacttgggactagataacaagggggaacttgggaaacctaaaacacttcctggggacaattggcgggccaaaaaaaaaaaccccccc

SEQ ID NO: 105086 - DNA, 288 bp, Zea mays
  Clone ID: MRT4577_27340C.1
aatcgtcgtagaaccgggaaaagcgagagaacgtcgtgacaatctcgccgttgccctgtccttcgccacgacctccgccactcgggcttcaattggtgatcgtgggggttcatcggcgaccagagatcatgtgggggtgggtagtcactcgcactgctgacaggcgtccgctcaattcctcgtcggtagtgcggcggattcacaaatccgcgcccatcgtgccagcgcccttctcgtcatcgtcctcggtgaagagcaggtagtccaggaggaggtctacaacgagaa

SEQ ID NO: 105087 - DNA, 663 bp, Zea mays
  Clone ID: MRT4577_27341C.1
ccggccgggaggaatctttcgtgccacagcgctgcaagcacaagcaggatcagtaagagttaaaggctcagtgatgaattcagggtatcctccttatcaacagatcccacgagcacgcggttaccgccaaacgcctgcaaagttggacaatcccaacccatcgccagccatgggaggatacacactcaagtcgcagcaggtttatgcttgtgcaagcagcaaatgctcgcctggtgtggctgcgaagtgcgaacatgagagcaccccatttccatctcccagctggaccaaagaagagcctattggataggatagcgtctgacaccgacatatacacaagatcccttaacggcattgttgccgctgccgcagcgtcagtagacgccggtgctcactgccggaacgtgggtgtcgtgccatctggcatgccaaggatgtattagctgctgaaatgctggcgaagtcctaggttccttggccacacagcttctctaggactggggactgcaagaagaggcatatggtaccagtagtaattcataagaggtgatcaagagtcttggacatgtcgttttccacgccatgtgttgaggcgaaaacggttgccagattgcgcacaactgaaggatcgatcgattcaatggagattacgtatttgttcac

SEQ ID NO: 105088 - DNA, 990 bp, Zea mays
  unsure (1)..(990): unsure at all n locations
  Clone ID: MRT4577_27342C.1
gccaccaaaaagcactcccgaacccgactctcctcttgctcgctctcggtggcgtctccgcctccgcagtccgcactcgcgcacgcttcccttcccttcctcgcccacgcggacgcggccacggccgctccaagctagcagcagagcgagagcagccaatttggcgcacctctctcactctccctccctccgttcagcagcgttcgtttcgttgctcactcagatccagccattcaggtgagagagtaggggcagcgatgcccacgccgccgctccgtggggcggggctcctgctccgtatctgcctcttcctctgcctctcactccgcccccgcctggcctcctccgagcccgacgccgacaaggcggcgctgctggcgttcctctccggcgtgggccgcggcgccaccgcccgcgcgcgcatcaactggtccaccacccacctcgcctgcagcgccgacggccccggccccggctggacgggggtcacctgcagcgcggacggcgcgcgcgtcgtggcgctgcacctcccggggctgggcctctcgggcgccgtgccgccgggcacgctcggccgcctcaccgcgctgcagctgctcagcctgcgctccaacgacctctccggcccgctccccgccgacctcctgcgcctgcccgcgctcgagggcctccacctccaccgcaacgccttctccggcgcgctccccgccgccctcgcggggctgaccgcgctccaggtgctcgacctctctttcaacgccttcgacggcgccgtccccggcgcgctcgccaacctcacccgcctcgtcgcgctcgacctctccaacaactcgctgtccggccgcgtcccggacctcggcctccccgcgctccggttcctcaacctctccaacaaccgcctcgacgggaccgtgccggcgtccctcctncgctttcccgacgccgncttcgccggcaacagnctcacgcgcccggctccggctcaagcgc

SEQ ID NO: 105089 - DNA, 314 bp, Zea mays
  unsure (1)..(314): unsure at all n locations
  Clone ID: MRT4577_27343C.1
cctgcagnngcgtaccagnnnctttcccttatttagtgagtcgtattttagaagcttgggcgtnnaatcatgnggtcatagnnctgtttccttgtgtnnngaaattgtnntatccgctttcacaatgtccagcagcagacatacgnnnagccggnnaagcatnnaaagtgtnnaaagccnntggggtgccnnntaatgagggtgagctanannctcacannntaattgcngnnttgcgcttcaaactgcccnnngctttnnncagtcgggaaaacnnctgtcnngtgccagcttgcatnnntaatgaatcngnn

SEQ ID NO: 105090 - DNA, 252 bp, Zea mays
  Clone ID: MRT4577_27344C.1
tctcctcgcatttcttcccatccgatccccccttcgtaaccaaaaccccaactcgtcccgcatcgatggcgcccaaggccgagaagaaacccgcggcgaagaagccggcggatgatgagcccgcggccgagaaggcgcccgccgggaagaagctcgaagcgtagtagcgggtctccgctggcaagtccgctgccaatgaaggcggctatggcaatatgggcgagatcaagggcaagtcgatcgtggagacct

SEQ ID NO: 105091 - DNA, 1174 bp, Zea mays
  Clone ID: MRT4577_27345C.1
ctcgaggccggccgggataccaccacgcctagactgtgcctgcatccctcatcgctcggctcaatcgctgatcagttctgcggccggcgacgtgtgctagctcacgacgacgacatggtttccccttcagttcctctcctttaatttcggtcgaatgtatcacgactactggagctgatgacagcgcaagtcacaataagcaaacataatctctctgctcgttttcctctgtgtcgtcctgccgcgcgcagggctcggcggtgaagatcgggacgtggggcggcgacggcgggagcccctgcgacatcacggtggcgccgcggcggctggagagcatcaccatccgctggggcaaggtcctcgactggatcgccttctcctaccgggaccagagcgggaagctgcacaccgccggcccctggggcggcaacggcaaaggagagggcacggagacggtgagttcttcttcttcctcttcttcgcctttgcattgacgagcagacatgaggatccatccatctacatcttgcacatgctgcacgcagatcacactggaggcctcggagtatgtaacgggagttgcctggtccgtgggcccgttcaagttcaagaacgtggagcgctgcatcacctccatcaaggtcgtgaccaacctccgcagctacggccctttcggccacggggtggacagcacgcaccacagcttgcccgtgatcgacggcagcgtcgtcggcatgttcgcccgcgcaggggattttctcgacgccatcggcttctacgttctcccagatgccctccctgctctaaaaccgacgacggaccctgctgaacaagaagaaaaagaaaaggactctggccatgaacagaatgggaaggcaaaatctaaccaagaagaaaacgaggactccaaaaacgagaaggataaaccctgcttgtcgtagttcgttttctactacaaaaaatgaatcctaatctttgtcggatatctgtttgtgctcttgttgtgagtctcttcagctattgttccaactattaatatatatgtacatgcgtgggagctatgcattgtaataatgaattttcagaaaaataaagagtattttcccttttttttatatctacatgtttctaattttaatttactatattaaatagcaaaatatatccatgcgtt

SEQ ID NO: 105092 - DNA, 844 bp, Zea mays
  Clone ID: MRT4577_27346C.1
ctcgaggccggccggggaaccataccaccacgcctagactgtgcctgcatccctcatcgctcggctcaatcgctgatcagttctgcggccggcgacgtgtgctagctcacgacgacgacatggtttccccttcagttcctctcctttaatttcggtcgaatgtatcacgactactggagctgatgacagcgcaagtcacaataagcaaacataatctctctgctcgttttcctctgtgtcgtcctgccgcgcgcagggctcggcggtgaagatcgggacgtggggcggcgacggcgggagcccctgcgacatcacggtggcgccgcggcggctggagagcatcaccatccgctggggcaaggtcctcgactggatcgccttctcctaccgggaccagagcgggaagctgcacaccgccggcccctggggcggcaacggcaaaggagagggcacggagacgatcacactggaggcctcggagtatgtaacgggagttgcctggtccgtgggcccgttcaagttcaagaacgtggagcgctgcatcacctccttcaaggtcgtgaccaacctccgcagctacggccctttcggccacggggtggacagcacgcaccacagcttgcccgtgctcgacggcagcgtcgtcggcatgttcgcccgcgcaggggattttctcgacgccatcggcttctacgttctcccagatgccctccctgctctaaaaccgacgacggaccctgctgaacaagaagaaaaagaaaaggactctggccatgaacagaatgggaaggcaaaatctaaccaagaagaaaacgaggactccaaaaaacgagaagataaaccc

SEQ ID NO: 105093 - DNA, 667 bp, Zea mays
  Clone ID: MRT4577_27347C.1
ggccgcttttttttttttttttttattttttttttttttttttttttttttttttttttttttttttttttttttttttttcttttttcattttttccccctttcgccgaaaaggggaaccgggaaaccccatgggaccaagggtttcccaagggaaaatgggaaatccctccttgttaaattgggaaaaccttaaaaaaaaagaaaacccgagctaccaaaaaagcccaaaaaggaaaaaagttacagaattagggccaaaaagcaaaaaacccacaaaagcggtttggactttggacccctgacaacaacacaccaacgagcggaacatgggcaaacggccagggcccggacaaacggggaaactattaagacatcggccaggggccaggccaaacgccaaacccagggcgccagggagcacgagacttccccctggcccccggagcccagacgaaccttctgaacgttcttctgaaccgggaaagggaaccagcgcaccaaacctcggatcatcagagaaacctgaaaccgaaggccggaagggggggcgcaaggcaacaacgcatggcccgacgtcgggcccggggaacacgcggaaaccctggagggaaggaccgggggcccagtaagccacgaagccccggggggggtggcccaacatccc

SEQ ID NO: 105094 - DNA, 707 bp, Zea mays
  unsure (1)..(707): unsure at all n locations
  Clone ID: MRT4577_27348C.1
attcggctcgaggtttgacattgcgtgctccaagcgaacagttggagtcaattttctcgaaagaaccatttgctgaaccttcaatacccgaccttgatgatccgatggaagaactgtcaatcgatgacatagagattgacgatgaagtagcagtagccctggcacaagcagcatcgtccacatcccaagggaataagagaacagcagtggaggaggagagagcgaagctgtttgaagggtcaaacagtgcggataaaccgagaatgagaacgcagcaggagattctaaccaaatataggtttggcggggacgccgccgccgcagctgctcatgcgaaggataagctgatgcagaggcaggagaaactggagagaattagccaacaaaccgcggagcttcagaatggagcggagaattttgcttccctggcgcaggagctcgcgaaaacaatggagaacaagaagtggtggaagctataaactgggtttgtttgtacgtatgtgtgttgttggatgacacccgtcgttgcgaattggggcacataccagcattaccattttttgtgtccgtattaaacactttggatattctttttgtgttttggtgatgtacgtgtaaagataaaaaagagagaatgaatgggaaccctcttctcctagctaaaanaaaaaaanaaaaaaanaaaaaaaaaaaaaaagggcggccgc

SEQ ID NO: 105095 - DNA, 770 bp, Zea mays
  Clone ID: MRT4577_27349C.1
cctcgggctcttccgggataccaccgcgcctagactgtgcctgcatccctcatcgctcggctcgatcgctgatcagttctgcggccggcgacgtgtgctagctcacgacgacgacatggtttccccttcagttcctctcctttaatttccctcttgctagctccaccaccagaatcagacggtcgaatatatcattcacgactactggagctgatgacaacgcaagtcacaataagcaaacataatctctctgctcgttttcctctgtgtcgtcctgccgcgcgcagggctcggcggtgaagatcgggacgtggggcggcgacggcgggagcccctgcgacatcacggtggcgccgcggcggctggagagcatcaccatccgctggggcaaggtcctcgactggatcgccttctcctaccgggaccagagcggggagctgcacaccgccggcccctggggcggcaacggcaaaggagagggcacggagacggtgagttcttcttcgcctttgcattgacgagcagacatgaggatccatctacatcttgcacatgctgcacgcagatcacactggaggcctcggagtatgtaacgggagtggcctggtccgtgggcccgttcaagttcaagaacgtggagcgctgcatcacctccttcaaggtcgtgaccaacctccgcagctacggccctttcggccacgggggtggacagcacgcaccacagcttgcccgtgctcgacggcagcgtcgtcggcatgttcgcccgcgca

SEQ ID NO: 105096 - DNA, 501 bp, Zea mays
  Clone ID: MRT4577_2734C.1
aaacgggcatagcagttcttacagcattatcatcgactcttaatacatcacagagtgtatcacgtaatcaaggacaacgctccttggggcccacatgaaacatacctaacacttcatatcaaactgggagtccctcatcaaacactaagcccacctctcagatgatcaccatcttagttctaaccaactgagctggctcttggtgagtctaccatggctgaacctgggccgacccacagaccacatcattaaagatctacgccagctggtcggagataacgatcttaaccatctcggaggtggagcccttgcgctttccaacgttcttaatagccttgtcgaccagcatgcccacccctacgctgtctcgtgtgtggaccaggcattcatgcaccggaggatgcactcgtactagcattgcatatacctgagtctgtatatagcaccgacctatgcctgccatacctagtgccagggagaaactgatagcctttgacaaca

SEQ ID NO: 105097 - DNA, 443 bp, Zea mays
  Clone ID: MRT4577_27350C.1
gggtcccgcaacaccagatttaaaaaaaaggaaggaatccccccaaatgggaagattcgaaaaacgaatttacaggtaaaagaagggcaaaggaggggtttagtttactaaacaaaacaaaaagaggcacacagcaaaaaggaagggggggggagcaaaaacacggaccaaaaaaacacggggaccgggccatttgggaatggtacgaaaaagtaaccaaacttgtcccggggggggggggggtaaacggaacaaataaattaaaccgggtaaaggaccccggggagggagccgaggatggggagcaacacactgatccaaaactccatggagcaaaaaccgggggggaagaaaaccccaaggggggggaggaggaccgagcccagaatttccaaacaccggggggaggacaagcacaggcccattttttttctccacctggg

SEQ ID NO: 105098 - DNA, 398 bp, Zea mays
  Clone ID: MRT4577_27351C.1
acgcgtccgggcatgaatgttttagaattgaaacactgaggtctaaataacatgctagccattttcattgtttttttctaactgcaaggcaataagatgattgctttagtcatttcaattctagcataatgaaatacgtgtggtattccttggattattttggatgtttccaaggaaatgactatctgtactctaaagaaaggaaatgcattactttataattttgtccatgaaatttaacacctccttactgacattgccatcatttgtgagatattttcagttctgaagtaatgtgctgagcaatgtttggagcagtagcttctacagttacatgtgtacctactgaagtttcaaatttactgcacatatttagattgcgttgtttgggccctcaa

SEQ ID NO: 105099 - DNA, 1309 bp, Zea mays
  Clone ID: MRT4577_27352C.1
ctattgttgctgagacctctttgatgtcattattgcgatggagttacaagacaggcatggaaaaatccacaagctcctcaaatggacaagttactttggtaaatggatctgaatttgcgattatctctcttatggcctcagagaatgacttgaggattccagaatctctgccatgccttcatgacaaagtacttgcagcagctgcggaagcactaatgagtttctcaactgatcagagaagaaagcagaatccagcagcagggattattggtggcttcattaaaggaatgaaaggcaaggctgaagaaaatgcaaaaatgagagaaagtttgacattgcgagctccaagcgaacagttggagtcaattttctcgaaagaaccatttgctgaaccttcaatacccgaccttgatgatccgatggaagaactgtcaatcgatgacatagagattgacgatgaagtagcagtagccctggcacaagcagcatcgtccacatcccaagggaataagagaacagcagtggaggaggagagagcgaagctgtttgaagggtcaaacagtgcggataaaccgagaatgagaacgcagcaggagattctaaccaaatataggtttggcggggacgccgccgccgcagctgctcatgcgaaggataagctgatgcagaggcaggagaaactggagagaattagccaacaaaccgcggagcttcagaatggagcggagaactttgcttccctggcgcaggagctcgcgaaaacaatggagaacaagaagtggtggaagctataaactgggtttgtttgtacgtatgtgtgttgttggatgccacccgtcgttgcgaattgggacacataccagcattaccatttttttgtgtccgtattaatcactttggatattctttttgtgttttggtgatgtacgtgtaaagataaaaaagagagaatgaaaggaaccctcttctcctggctacatgcgaaggataagctgatgcagaggcaggagaaactggagagaattagccaacaaaccgcggagcttcagaatggagcggagaattttgcttccctggcgcaggagctcgcgaaaacaatggagaacaagaagtggtggaagctataaactgggtttgtttgtacgtatgtgtgttgttggatgacacccgtcgttgcgaattggggcacataccagcattaccattttttgtgtccgtattaaacactttggatattctttttgtgttttggtgatgtacgtgtaaagataaaaaagagagaatgaatgggaaccctcttctcctagct

SEQ ID NO: 105100 - DNA, 690 bp, Zea mays
  unsure (1)..(690): unsure at all n locations
  Clone ID: MRT4577_27353C.1
ctattgggtatatgtatgttatgtaatatagtatgaagttatgaagtccgacccataccaccgcgcctagactgtgcctgcatccctcatcgctcggctcgatcgctgatcagttctgcggccggcgacgtgtgctagctcacgacgacgacatggtttccccttcagttcctctcctttaatttccctcttgctagctccaccaccagaatcagacggtcgaatatatcattcacgactactggagctgatgacaacgcaagtcacaataagcaaacataatctctctgctcgttttcctctgtgtcgtcctgccgcgcgcagggctcggcggtgaagatcgggacgtggggcggcgacggcgggagcccctgcgacatcacggtggcgccgcggcggctggagagcatcaccatccgctggggcaaggtcctcgactggatcgccttctcctaccgggaccagagcggggagctgcacaccgccggcccctggggcggcaacggcaaaggagagggcacggagacgatcacactggaggcctcggagtatgtaacgggagtggcctggtccgtgggcccgttcaagttcaagaacgtggagcgctgcatcacctccttcaaggtcgtgaccaacctccgcagctacggncctttcnngccacggggtggacagcacgcaccaccagct

SEQ ID NO: 105101 - DNA, 1090 bp, Zea mays
  Clone ID: MRT4577_27354C.1
ttgcattgggtacctcgaggccggccgggacctatctgtctattgggtatatgtatgttatgtaatatagtatgaagtccgacccataccaccgcgcctagactgtgcctgcatccctcatcgctcggctcgatcgctgatcagttctgcggccggcgacgtgtgctagctcacgacgacgacatgtcctgccgcgcgcagggctcggcggtgaagatcgggacgtggggcggcgacggcgggagcccctgcgacatcacggtggcgccgcggcggctggagagcatcaccatccgctggggcaaggtcctcgactggatcgccttctcctaccgggaccagagcgggaagctgcacaccgccggcccctggggcggcaacggcaaaggagagggcacggagacgatcacactggaggcctcggagtatgtaacgggagttgcctggtccgtgggcccgttcaagttcaagaacgtggagcgctgcatcacctccatcaaggtcgtgaccaacctccgcagctacggccctttcggccacggggtggacagcacgcaccacagcttgcccgtgctcgacggcagcgtcgtcggcatgttcgcccgcgcaggggattttctcgacgccatcggcttctacgttctcccagatgccctccctgctctaaaaccgacgacggaccctgctgaacaagaagaaaaagaaaaggactctggccatgaacagaatgggaaggcaaaatctaaccaagaagaaaacgaggactccaaaaacgagaaggataaacccggcttggtcgtagttcgttttctactacaaaaaatgaatcctaatctttgtcggatatctggttgtgctcttgttgtgagtctcttcagctattgttccaactattattaatatatgtacatgcgtgggagctatgcattgtaataatcaattttcagaaaataaagagtattttccctatttttattaaatctcttcgtctactgttcaaaatatgtacatacgtgggagctatgcattgtaatatcaattgactactggaattggttgacttggtagattttttaaaaaaaagggggcc

SEQ ID NO: 105102 - DNA, 1154 bp, Zea mays
  Clone ID: MRT4577_27355C.1
ccggccggggcaccaccgtggctgctcggtcgagagcctggaccactgctctccatttggaggcagcagattgaatgatcatttcatcctcgcagtcgcagacatacattgtcccgttctctcgcggcgggcgcctgacgatctcgtcctccgcgtccgccctcctcgttgcccacgcacgcctgaaggcgacggcggcgctggctgcgcggaggaagcccgagcggacattccgtttgctcgcaggccggattgcaaggccccctctcccaaattgcaaggatagtcaggaagctaattaacagtgttcgaaagatggtccaccgcgagccggccgaggcggcggcggcggcagcagcaggaggcgagaccagcatctctacgcagcctccctcatcatcccagcaggctgcgccaccaccggccgtgttagtgtacaaggtcgggtatcctccccggaggagcctggccacggagttcaccagcacgctgagggagaccttcttccacgacagcccgctgaagcagtgcaaggaccagtccgtgtccacgaagctccagatgggcctgcagctcttgttcccggtcttgggttggggcaggacctacagcctgagcatgttcaagggcgatctcgttgccgggctgacaattgcgagcctctgcattccccaggatattggctactcgaagctcgcgtatttggatccggagtacgggctctactctagcttcgtccccccgttgatatacgctgcgatgggtagctccaaggacatagcgatcgggccagtcgcagtggtctctcttctgctaggttcgcttctgcagaaggaggctgaccacgacaaggacagggaggaatacctgcgccttgcgtttacggcaaccttcttcgctggcatcactcaagcagctctgggattcctgaggctaggtttcctcatcgacttcctgtcgcacgccgccatcgttgggttcatggggggagcggccgttactattgccctgcagcaactcaaggtatgtgctcggcatcaagagcttcaccaagggaaccgatatagtcttcgtcatggagtctggctggggttcaattcgtcatggatgggactggcagacagttgcgattgccttcacgttccttgcttttc

SEQ ID NO: 105103 - DNA, 224 bp, Zea mays
  unsure (1)..(224): unsure at all n locations
  Clone ID: MRT4577_27356C.1
accagcacaaacccaaaggtttgctactctgattaaacaaatccattacttattgctccataacaaggaacatctgttnctatgcaacctgctacaagattccagcccagcactttactgaaataagnnttttgaatacactgtattttgtacacttccanaagcancctcacgggcagtacgaccgatatcatcggtagattcttcctggaatttagttttac

SEQ ID NO: 105104 - DNA, 190 bp, Zea mays
  Clone ID: MRT4577_27357C.1
ggaggccaccaccatctctagaaccttggttctaggcttcgagtttccctcccccagctgaggcgggaccgtaggagccagacccaggccgacgaaagcctgctgactggccggcggtgggtggtgctgccggcggtgagggcgggagccgggaccagcgcttggggggacgggaagtggtactgagggc

SEQ ID NO: 105105 - DNA, 420 bp, Zea mays
  Clone ID: MRT4577_27358C.1
gggaacgacctgggaaaactataaaaaaaaaaaagggggggacaaaaggcagcaaaaaaaaacaggggggcaaaacagccattttacatggggagggccaaaacaaaatcccttttttaaaaaaaaaaacccacgggggccgaattgggaaatggaagggaaaaccgggcccggggaggaagggggaattgggcagggaaaaaataaggccggcaacgcggttgcccacaaggggggggaacacctggggcaccatcctttcaagggggtccaggccgttcctaagggttggacaaacggggggaagccccgggggagaatcccgaacgtgggcctcccgggccccaaaaagggggaggggggccgggtaaaccgcctgggggagctttgggggggacttttgggggggggggatctcct

SEQ ID NO: 105106 - DNA, 192 bp, Zea mays
  unsure (1)..(192): unsure at all n locations
  Clone ID: MRT4577_27359C.1
cgcactcgnngnnnccgagcccataccctagcacgcgccacccccaccacgggtgggacacaccgattgcgggcacgaaacanaccgcncgcaagaccaccgggggcaaggcgccacggaagcagcacgcgaccaaagcaggacgcaagcactcatcggaaacgggcagcaaaacgcactcatactagaaaa

SEQ ID NO: 105107 - DNA, 331 bp, Zea mays
  Clone ID: MRT4577_2735C.1
aacggttaaactcggtgggtgggtatttgaacgtagcatttctacaaacttacatagcatttcttatagaacgtggcccctctaacatgaccaaaactttacatgggcttattctaacctaacagcagcaatgtgaggccccctaactatgtagcatctgtatttatatatatatgatatattctcatataggaaattctacagtaacaaggtaccaatggaataaaattgaatatttttattgggggccttgactttgagaacttttacatgccgacacacttggcccacctgaaccagcaccaaatctttttcggcaaacggtagggtt

SEQ ID NO: 105108 - DNA, 286 bp, Zea mays
  Clone ID: MRT4577_27360C.1
cggcaatgccgccgctaagtcttgggcgccaaaagcaggcgaggagcacgtgtgcacgcttgtctccaagcggctccagggcagtgtcgtgccactgcctgcgcatggtcgagtgcggcctggtcggctacagtttcgccgtcacggagtggcgcgggcgtgaccagccgcaggacctggacttcatcgatgactgcttatttatgcttgacgagctgcaggagtgcctgctactcgccgagcggctcgggccggaatggtcctcctgcaagaggtgcccagtgcg

SEQ ID NO: 105109 - DNA, 287 bp, Zea mays
  Clone ID: MRT4577_27361C.1
attcccgggtctggtccgtggccagggcgtggtccatgctctccgctactaccgtgttactccagcaggggggcggcctgtcggacttgtccggtctcaagagctccgcgtcgctgcccatgcgccggaatgccacctccgacgacttcatgtccgccgtctacttcaggacccacgcggtcggcacgagcggctggccgtggcgggcgccgacggacgcgaagctgaaggtggccatcaatgggttcggccgcatcgggcgcaacttgctgcggtgctggcacggg

SEQ ID NO: 105110 - DNA, 733 bp, Zea mays
  Clone ID: MRT4577_27362C.1
gaaaaaaaaaaatcttttcgcatagtcgcattcaccctgcgtgcgctctcttttgctctctctctctctctcgtggcaacgactgcgcgagcgccggcgcctacgccaggtgcccaggcctccgtcggtcatttcgccaggcattcgtcgcgggctcttcgccggcgacgagcacacccaccaagaaggcacacaattctcttcccttcctgctgtgagaaactccgaaccctgtcttaagctacttgtattatgcctactagattcgatttttttttacaaagaaaatgctttacatgtgtagccccatgtattttgctgggtccgcccctgtctatatatcatgtacatcgtatatctctgaactttggacatttgagatggacagtgcgtcatcatatccttgttctaatcaatggcttatatagactaagataaccgtcaatcgatgactaaaggcatttggttatatcagatgcttttcagttctgaatccgagcagtgcttctctacatacagtcgcatcccgcatgccttttgaattgcaaaattgtacctagtcaaggtttcgattttcgagaataggcttctatctaagatgttcagcactcgtggtccatttcagtgcacttatcagtatcacaaacattatgttggacagacaaattctcgtgacagtgcctccctggttgccctttcgctgaagttactgaatctggaatctgacatcatg

SEQ ID NO: 105111 - DNA, 410 bp, Zea mays
  Clone ID: MRT4577_27363C.1
aacaggacccaccccaaaccgggtaaataaaacggggggggagccaggaaaaactaagaccccccctcagatcacccccattttattaaaacccaaaggaacggccccgggggggggcgccgatgacgggggggggggggccgaccagcccagatcagagggatttggggggggggtccgaagcaagggaccttaaccaccttggggggggagccgtggggggggcccaccttttgaagggccttaacaacgtcaatgccctaaacaaccgggccaaaaacaacgggtttgccgcaaagccaaggggccccaacggggcaaaaaaaaaacgggaagccgtgggggtgggccccggggttggccagggagagcaccccggggggggggggcttgcacacaaaccttcgggg

SEQ ID NO: 105112 - DNA, 752 bp, Zea mays
  unsure (1)..(752): unsure at all n locations
  Clone ID: MRT4577_27364C.1
cctcgaggccggccgggccggggttcctattctccccataggtacggaagacgagcaagctaactgccctagccccccaatcagatcggaccgtgcggcggaccgaggcaccctgcccccgcgcgcacatgctcatgatcgatcgccgacagggtggtcttcttctagatggtctgcttgaactgcccatgcgccagcaccgatcaccaaaccccagacgacctcctgcacaactgtgcacagcaataggaacnagaagacgatcgctcgaaagcgtcactcgcgaacgtgccgtcatacggctcccagacacgcctctacgatcctccaggatgcgtgagacaagctgaaggacgaactgctcaattgatcccaacaagtctgtatgcgctctgctgcttgggaaatgctcagatttactcatgtattcttcactccacagactggaatagaaaatcgacttctttgcgaaggtaattgaatgtttccagaaagctgctgacgatgtacctgcagtccactgatgtgttatgttcaactcgaacgtagttatatagttccttgatctacgctgatccgtaaggacatcgcttctgataaggatgtgttgcggaatagggatcaaggaatggactgcggtcttcaagaatttttttcagctttccactgctatgatcagattggtcttggtcgagagttcctgggatgaggaacatggcactgtaccatgttccatgtgtaactggatgacc

SEQ ID NO: 105113 - DNA, 157 bp, Zea mays
  Clone ID: MRT4577_27365C.1
tccaacttctagggctagtcacgcttccttggggcatcgatggcatgcgtcagcaccttgcagagctgccccattgccagaacagcacagatcaacaccagacccatgggcagcaaaagcagcctggcgaaagggtcaccaccaccaaccttacagt

SEQ ID NO: 105114 - DNA, 194 bp, Zea mays
  Clone ID: MRT4577_27366C.1
cctttttgttttttccttaccaagacagtgcacctcatggggaaattttgcgaattaaaaaagcccacggaatggccgggtaaaatttcaaggctagaccgaacaactttgttggcacggtagaaggcggcagtataagacgggttcatggggccaaccggaacgaagggcatatgatggcccgggtacaacaa

SEQ ID NO: 105115 - DNA, 1312 bp, Zea mays
  Clone ID: MRT4577_27367C.1
cctcgaggccggccgggacttacctccatgttctttgaagatgcttattctcttacctgccgtgatatagtattagtaagagagtgctgtcatggccgtggttttacctcgcgtccgtctctcttcaccgttggtgccaagttcacaagtatcagatctggtgataaatgaccgggaaaaagaccacggcctcctctgccggccgcactcgaaagaaggccaaggtggtgttggaggatgaggaagaggcagggttggaagatgaggaagaggcgactgtgacactatccgtggagaaggacgcactggagtgtgacatctgctgcctacccttccagtccgaagtttttatgtgcaagaacggacattctgtatgtgcaaaatgctgcatccgcacgaacggtaagtgctggacctgctccgagcgcattggcgacatacgttgccgtccgctcgagaagctcctggcggcggcgaccacctcctgcatgttcaagagcaacggctgctacgacgtcatcagctacctggagaaggtgacccacgaggagacatgccagcgcgcgccgtacaagtgccccgtccacggctgcgcctatagcggcctgcggctcggctaccacgtcgcacaggaccacggccacgacgacgacggcctcgcctccgtcgtctttatctacggcaaggcggtggcgaccgtgcgcaaggacgagccgttccgcgtcctgctgcagcgcaacacggagcgcgtgttcctgctgctcaacggccacgatttgctacaggggcgctcgctgtccctgctctgccttggcccgcgcttccaggatggcgtggaggtggagctgaagtataagatggaggtgagcggcggtgcgccgggagcgctcacgctgtcggcgtctggcaccataccgttcgcccggcggctcgatgggttccaggccaaagggtttctcttcgtgccggatgcatactggggctccgccggctcgatttccgtcaccgtcagaatttacgtctgacgtcgcctcgtgctagctggtgtggtgtggataggttgattcctactggtcaaccgttcgttcgtctcgttggtacttaccctggttcagtggttgtttatgcactctacgtgctgatgctagtacttttgttaatcgcaacaacgtatgctagtacttttgttaatcgcaacaacgtatttcctgtcgttttacattctatgttattccctgggacctactaatgctaaaacgtacagttgcctgaattttagatttctttcaagtgctttaaaaaaaaaaaaaaa

SEQ ID NO: 105116 - DNA, 342 bp, Zea mays
  Clone ID: MRT4577_27368C.1
gtttgaaatggtagaattaagaatatttttctcatcccttgagatttctacgctattgatcttggttcctagtgtctcaggaaagaattacaatccgactctagcatgacttccatcggatcactaaaaaagactacttaaggtgatagtgtagaggattaggcataatgcgtgcgtttaattgcacggaacctttcagggaaaaaaatatttagttcagagggttggagggcaagatgcctctcggggatacatatgtcagtacgagattacaatgtcctaacggccaaatatactcaacactgttaaccttttttataaggtggctaataaaaaataaca

SEQ ID NO: 105117 - DNA, 631 bp, Zea mays
  unsure (1)..(631): unsure at all n locations
  Clone ID: MRT4577_27369C.1
aattcggcacgacgacgacatcacagcgcacagcgcagttgtggttgcagtttgcttcttcgctcgacatgggcacgggaggcgtagcgctggtcgtcgccgccctcgccgtggtgttggtgtcgagtgtgtggacggcgctggcccacctggtgtggcggccgtacgccgtcgcgagggcgttcgcgcggcagggcatccgcgggccgccgtacagggtcttggtgggcaacggcaaggaggtctaggcgatgcgggcggcgacgagcggcgacacgctggacctcgcctcccacgactacatcgcgcgcgtgatgccgcagtaccgcgcgtgggtgtcgctctacggcaaggtgttcctgacgtggtccggctcgactccggcgctgttcgtgggcagccacgacatggtgaagcgggtcctgttcgacaaggcggngctgtacggcaagacggacccggggcccaccatactgtccctcatgggcaggggcctcgtgttcaccgacggcgacgactggtcgcgccaccgccgcgtcgtgcacccggcgttcgccatggacaagctcaagtcgatgacgggggccatggcggcgtgcgcggcggaggtgatccggnggtgggaggcgcg

SEQ ID NO: 105118 - DNA, 365 bp, Zea mays
  unsure (1)..(365): unsure at all n locations
  Clone ID: MRT4577_2736C.1
ccttcnattttcccccccccccccccccccttggggggtaaaagagannaacgccggaccccaacacgggggaaaaacaaaagggcaggaaaagggcccccggaccagggaccaggcgccaaaagggaggacccaaacgggggggccaacacaggggaaagggaacagcaacaacccgaggggcccgccacgacccncaaagggggcggccccggagggaaacccgcgaagcccgggagcccaaagaaaccacaggcaacacggccgccagcaancccggggccccggccaagcccaggaccaccccggccaagggcaaccggaacagaagggacaacaacagcccggccaaagaccgagggggg

SEQ ID NO: 105119 - DNA, 642 bp, Zea mays
  Clone ID: MRT4577_27370C.1
ggccgcttttttttttttttttttgttttttttttttttttttttttttttttttttttttttttttttttttttttttttttttttttttttttttggccgaaacaaaaaaataaaaccccgccccggcccaccggagtgaaagttgggggcccccccccgggcaaaagcaaataaaaaaatttatccccccgccccccaaaaaaagggaaatggccaccgggccatgacccaaataaaaagaccccatttaaggggggccggcccccccaaaaaagaaaattggggcaccccccaacaatcccgggggggcggggcccttgttgggaaaaaaactaaaaaaacctggacgctgaatccggggggcggggcaaacttgaccaacaacccggggtttttgcccccggggaaccccggggaaagcccggggggccacttgacaaaaagggggaagttgccgaaaacccaattgccgaccttcacatttgacggggccgcccaccttgacctggaggggaaaaaaccccgggggaaccccctgtttaatggggtaaggaacttagggggaaacgggaccggacttggcccaaagaagggggacccaaacgggaaaacccggggggccccggaactgggggggga

SEQ ID NO: 105120 - DNA, 307 bp, Zea mays
  Clone ID: MRT4577_27371C.1
gaaaaaaaggaatggtttattaattacaaaggtaatttggttaattaaaccagggaaaaaatgggggccccctgggtttatttaaataacgcaacgggttttttagtttaaaccaggggggggggaaataaaaaattgaacaccccgcaagtttggtcagggtaaaaagggggtgggtgccttaaaaaccagggggggcacgttggattcataatgaaaaggtttttgggaaaaaatggcgttttaacaaatttggggacgcctttttgtaccgattggggggggtggggagatttttttttttttt

SEQ ID NO: 105121 - DNA, 196 bp, Zea mays
  unsure (1)..(196): unsure at all n locations
  Clone ID: MRT4577_27372C.1
caacatagaatgagtggattgctggtaacgtagtgatcaccaaggcctcaccggtggccatccggccgtcggagttgggacgaacgccaacgccgccgcccgccgtcggtggctacaccatcgttcctctggccgcctcgacggtgccggcgacatcatttgtgcgcccnatgagggcgttactttnntcgtaggc

SEQ ID NO: 105122 - DNA, 150 bp, Zea mays
  Clone ID: MRT4577_27373C.1
gggggttaataacctccattactacatgtaaaaccctacacatgatcaccacccctagtataaagctctacttatcagcccagccaataactgtatttcaattcataacgacataatgcccatgaaccacaacttccaccacaaccgaaa

SEQ ID NO: 105123 - DNA, 2665 bp, Zea mays
  Clone ID: MRT4577_27374C.1
taggacgaattgtgtaccgggccccccctctacgcgaccgctatttttttttttatattttttcatattgttcttgaaagtattgcaggccggccgggccgggcctgaccagaccaaaggcagtagcaatgcagcttcctcctcgtcttcctcctccacctcagctgctcatgctcctcccagtcctctcctcctgcccccaatcctcttccgcccctccctcgggcctcttccccatctcctgatcacactcgctcgcgcgccatgggcggccgcgcctcccgccaccgcgcgcagccgcacgaccagtcttctcaccctcctcctcggccgccgcccaagcagcagcagcagcagcagggccagcagcatcccaacaaccgccccaacaagcccaagcagcagcagcagcccccacctccacgtcctccggcggcacaccacgggccccccggctccggcggcgggccgacgcccgtggcctccccctttcggcacgcagccatgggcaaccgtgcgtcgggccaccaccgccacgccaccgagcagcagccagagacgcctccccttcccaagcctcgaagccggccgggccggccgcctctccccacgccgcagaccccaggccccagcccggcaagcagacatgggcaaccgtgcgtcgcgccaccaccgccaagccgccgagcagcaaccggcgacgccgaccctgccgaagccccagccccagatccagccgccgcctccgcctccgccgacgcagacgcagcagtaccagcaggcgccgccgcagtcgcagcagaagccgaagccggcggcggacgtgggggcggtggggcgcgtgctggggcggcccatggaggacgtgcgcgcgacctacactttcggccgcgagctcgggcggggccagttcggggtcacctacctcgtcacgcactcggagaccgggcagcgcttcgcctgcaagtccatcgccacgcggaagctcgtccaccgcgacgacattgaggacgtgcgccgggaggtgcagatcatgcaccacctcacgggccaccgcaacatcgtcgagctccggggagcatacgaggacaggcactcggtcaaccttgttatggagctctgcgagggcggggagctcttcgaccgcatcatagccaagggccactacaccgagcgagccgccgcctcgctctgccgcgagatcgtcgccgtcgtccacagctgccactccatgggggtcttccatcgggatctcaagcccgagaacttcctgttcctcaataacaaggaggactccccgctcaaggccacggacttcggtctctccgtcttcttcaagcacggggagacgtttaaggatcttgtgggaagtgcatattatgttgctcctgaggtactgaaacggaaatatggggcagaggctgacatatggagtgctggggtcattctttacatccttctgtctggtgttcctcctttttgggcagagaatgaggatggcatatttgatgctgtcttgcgcggtcacatcgatttctcttctgacccttggccttcaatatccaatggtgcaaaggatttggttaagaagatgctgcgacaagacccaaaagaacgcctgactgctgctgaaattttgaaccacccatggattagagaggatggagaggccccagataagccacttgacattactgtcattggtagaatgaaacagttcagggcaatgaacaagctcaagaaagttgcattgaaggttgtggctgagaacttatcagatgaagagattatgggcctaaaagaaatgttcagatccctggatacagataacagtgggacaattactcttgaagagctaagatctggtttaccaaaacttggtacaaaaatttctgaatcagaaattaaacaattgatggaggcggctgatgttgatggaaatggtaccattgattatgcggagtttatatcagccacaatgcatttgaatagattggagaaggaagaccacatactcaaagcttttgaatatttcgataaggatcacagcggatacataaccgtagatgagttggaagaagctttgaagaagtatgatatgggagatgacaaaactataaaagaaatcattgctgaagtagatacagatcatgatggaagaattaattaccaggagtttgttgccatgatgaggaacaacagccctgagattgttccaaatcggaggcgcatgttctaactgtcatggacaatcacattgaatactttcaagaacaatctgcccttagacataatctttgtcccattttctttttggaacagccgttaagaagactccttaatttgagatccatgtctctgctgcccggacctgtttgtcccaaaatagggtggtgttatagtgattcgtacttgatgctttgagcttcatggactcttgcgtggcaatgtttatccccattgtacgtctggttgttctgctgcttcgatctgaggctttctttaggtgtaaacggatatctgaattattaggataaatttaatattttaaaatagatatgtataaaatttgatgttaatatcttcttatgttacgccgcccccttcgcgatctagcggtcaccacggtcacgttcagtcccggcccgtgcaggcgggcgtcctt

SEQ ID NO: 105124 - DNA, 2338 bp, Zea mays
  Clone ID: MRT4577_27375C.1
agtccaatagagcttcctcctcgtcttcctcctccacctcagctgctcatgctcctcccagtcctctcctcctgcccccaatcctcttccgcccctccctcgggcctcttccccatctcctgatcacactcgctcgcgcgccatgggcggccgcgcctcccgccaccgcgcgcagccgcacgaccagtcttctcaccctcctcctcggccgccgcccaagcagcagcagcagcagcagggccagcagcatcccagcaaccgccccaacaagcccaagcagcagcagcagcccccacctccacgtcctccgccgccacaccaggctccccccgcctccgccgccgccccgggcgcggccaccgtcggccgcgtgctgggccggccgatggaggacgtgcgcgcgtcctacacgttcggccgggagctgggccggggccagttcggcgtcacctacctggccacgcacaagcccactggccaccggtacgcgtgcaagtccatcgcgacgcggaagctcgcgcacagcgacgacgtcgacgacgtccgccgggaggtgcagatcatgcaccacctcacgggccaccgcagcatcgtcgagctccggggcgcctacgaggatcgccactccgtcaacctcgtcatggagctgtgcgagggcggggagctcttcgaccgcatcatcgccaaggggcactactccgagcgagccgccgcctcgctctgccgcgagatcgtcgccgtcgtccacagctgccactccatgggggtcttccatcgggatctcaagcccgagaacttcctgttcctcaataacaaggaggactccccgctcaaggccacggacttcggtctctccgtcttcttcaagcacgatgtggatgtggatttgacttgaccgattcgccgggttggacctggacggtttcaggcccagcattgccaaaacgagtgtctatatatggaataatggaaatggcattattcaccatttttgttgtgtgttatgcattcgttactaccctctgtcccaaattataggggagacgtttaaggatcttgtgggaagtgcatattatgttgctcctgaggtactgaaacggaaatatggggcagaggctgacatatggagtgctggggtcattctttacatccttctgtctggtgttcctcctttttgggcagagaatgaggatggcatatttgatgctgtcttgcgcggtcacatcgatttctcttctgacccttggccttcaatatccaatggtgcaaaggatttggttaagaagatgctgcgacaagacccaaaagaacgcctgactgctgctgaaattttgaaccacccatggattagagaggatggagaggccccagataagccacttgacattactgtcattggtagaatgaaacagttcagggcaatgaacaagctcaagaaagttgcattgaaggttgtggctgagaacttatcagatgaagagattatgggcctaaaagaaatgttcagatccctggatacagataacagtgggacaattactcttgaagagctaagatctggtttaccaaaacttggtacaaaaatttctgaatcagaaattaaacaattgatggaggcggctgatgttgatggaaatggtaccattgattatgcggagtttatatcagccacaatgcatttgaatagattggagaaggaagaccacatactcaaagcttttgaatatttcgataaggatcacagcggatacataaccgtagatgagttggaagaagctttgaagaagtatgatatgggagatgacaaaactataaaagaaatcattgctgaagtagatacagatcatgatggaagaattaattaccaggagtttgttgccatgatgaggaacaacagccctgagattgttccaaatcggaggcgcatgttctaactgtcatggacaatcacattgaatactttcaagaacaatctgcccttagacataatctttgtcccattttctttttggaacagccgttaagaagactccttaatttgagatccatgtctctgctgcccggacctgtttgtcccaaaatagggtggtgttatagtgattcgtacttgatgctttgagcttcatggactcttgcgtggcaatgtttatccccattgtacgtctggttgttctgctgcttcgatctgaggctttctttaggtgtaaacggatatctgaattattaggataaatttaatattttaaaatagatatgtatgaaatttgatgttaatatcttcttatgttacgaagcatattattttaaataaaaatatgattttgtataaattttttat

SEQ ID NO: 105125 - DNA, 2127 bp, Zea mays
  Clone ID: MRT4577_27376C.1
cattgggtacctcgaggccggccgggcttctcaattggtgccacctcgaccctatcccaaatatcttcgtttcgaactctatccctttttgtgtgcccacaaaactaatgttacatatgcatctctgctacactcaattgttggacatgtcgcatttttgtcggccaacattcagcactgtataacatcgccgtcctatagaacttacctttaagcttttgtggcaccctcttgtcacagaggacgctagaagcatgacaccatttcaactaaacggctgaaattctatgcataacatcttcatgaatgtcaccaatcaccatcctcttgaagcatcgatcctatcgaaaagactccttagccacaagttttccattgagggtaacatctccattctcatgtctagtcgcgctgaaattgtacatcatgttctcgatcttagtcctactaagtctgaaaccttttgactccaacatgtgcttccacaactctagtttcctattaacaccttccctactctcatcaactaacaccacaccaaaggatatccccttgtatgtttcttgtgacctcatccatcaccaaagcaaataaataagggctcaatgctgatctttgatgtagtcctattttaattggaaagtcgctagtgtcggcatcacgggttcggacaaatgcttgccttgcacaaaataggaaattacgtcgtgattttgtcgcataaaatgggatatttactttgcaaaatgttggtttcgtggtggatttcttgcggggtttagttttttctctatatattatccttttttgttttgaaccttaacaagtgaaatgatttgtttatttgcacactgacatgagcaaactgaatgagaatccataatggatgatgcaggggacacgtttaaggatcttgtgggaagtgcatattatgttgctcccgaggtattgaagcggcactatggggcagaggctgacatatggagtgctggggttattctttacatccttttatctggtgttcctcctttttgggcagagaatgaggatggcatatttgatgctgtcttgcacagtcacattgatttctcttctgatccttggccttcaatatctaatggtgcaaaagatttggttaagaagatgctgcgacaagacccaaaagaacgcctgactgctgctgaaattttgaaccacccatggattagagaggatggagaggccccagataagccacttgacattacggtcatcagtagaatgaaacagttcagggcaatgaacaagctcaagaaagttgcattgaaggttgtggcagagaacttatcagatgaagagattatgggcctaaaagaaatgttcagatccctggatactgataacagtgggacaattactcttgaagagctaagatctggtttaccaaaacttggtactaaaatttctgaatcagaaatcaaacagttgatggaggcggctgatgttgatggaaatggtaccattgattacgcggagttcatatcagccacaatgcatttgaatagattggagaaggaagaccgtatactcaaagcttttgaatattttgataaggaccatagcgggtacataacagtagatgagttggaagaagctctgaagaagtatgatatgggagatgataaaacaataaaagagatcattgctgaagtagatacagatcatgatggaagaattaattaccaggagtttgttgccatgatgaggaacaatacccctgagattgttccaaaccggagacgcatgttctaactgtcatgtacaattttattgaatactttcaagaccaatatgcacccttagacataatcctggccccattttcttttgggaacaactgtaaggactcaatatttttttagatcaatttctctgcagccgggacatatttgtaccaaaataggtggtgttatagtgactcgtacttcgatgtttggagcatcatggactcatgggtggcaatgtttattcccattgtactcggagcgtctgctttttcgatctgaagcttcgatctgaagcttcgatctgaagctttcctcaggtgtaaacccatatccgaattatcccccaaattttatattttac

SEQ ID NO: 105126 - DNA, 406 bp, Zea mays
  Clone ID: MRT4577_27377C.1
cttaaaaaaaaaaaaaaaaaaaaaaaaaaaaaaaaaaaaaaaaaaaaaaaaaaaagaaaaaaaaaaaaaaaaaaaaaaaaaaaaagtttgtccctaggccgagacaccctaggggcaaaattatgaaaatatcaataaaattgggggccggtggggcatccatttagagggccaattttgccttatcctgaacctttttacaatttattggctcgctttttaaagggcccatttacctgttaaaaccgtgggtttaacaaacttaagggccttgtttacatcccctttttgggaaaaaccttgttttcaaaaaggtcaatacctttcgccctttccaactttttcccatcttgaatggaaaaaggaagccccctgtagaggccctttaaaaaaggtgggtgtggtg

SEQ ID NO: 105127 - DNA, 269 bp, Zea mays
  Clone ID: MRT4577_27378C.1
aatcgattcgcacgccggtggacggcgtctcactagccaacaacgcgacgatcgggttaaaattctcatctaccggccagggcaattctgtggctcgattgatcggtctgtcgtaaggcaattgatcaagctagatatatatataggagattcgtcgaacgagctactagcgaaatgggttccgccgtcctcttttactgcatctggatcgccgtcatcgtcacattgtcctcgtccatggtcgctgtcggggacggagacccggggga

SEQ ID NO: 105128 - DNA, 190 bp, Zea mays
  Clone ID: MRT4577_27379C.1
caatggaggtctcagcactgactgaccaatgaaaccgtcacgattgttacccatccgttccagttccaggcaagctgtacgtgcctgcgcagattacgcatctcaccgtcgatgactctgatcaagcagacgatcccttcattctccatggtcggcggagaagctgtacatcatatattcatatatcagt

SEQ ID NO: 105129 - DNA, 395 bp, Zea mays
  Clone ID: MRT4577_2737C.1
ggctctgtacttctagtttcatctggtagacaaaaataccaaagtattacaatgtacgtgaaaaaacttcacgtcccactaataaccttaacaaacccttgatagaacattagaacccagcccatacaaaaaaaataatcttttttgggattatataaaagaaagaattccttggcaggaaaacccaaaaagaaaagcgcatcaacaatttctacatccagcaatcctactgctttacagcaagcctttttaattaccttggccaatatatgtaccatgcgccacagcacaggggctgatggtcgtcagatttccccattgagcgcggatcgtgcgttttgtgcaccggaacagcgacttgtacacgaagcctgccaggggcccaccgagcaggg

SEQ ID NO: 105130 - DNA, 453 bp, Zea mays
  Clone ID: MRT4577_27380C.1
ttctctgccttttttcgttttgttttttttgcggggtcattaactttagacaaaaaaacatcagtaccgctgtttttaagcccacgcgtccggtcgagcccaaccgcacatgctcgcgaggcaggacagagagagaggcgggcagcaaaacaatgaaggggaaagaggaggacgtgcgcctgggcgccaacaagttctcggtgcgccagcccatcgggacggcggcgcagggcgccgctgacgacaaggactacaaggagcccccgccggagccgctgcttactccggtgtgctgttacctggtccttctaccgctcgggcatggccgagttcgatcacagattgcctgttgtttccttgaagatgatcggagagaaggatgatgacaggtccacctccaagggcgccaccgctggaatccatggcatgcccggttactgattgggaatgatt

SEQ ID NO: 105131 - DNA, 307 bp, Zea mays
  Clone ID: MRT4577_27381C.1
tccttggtgacctccaaccattcagagggaccgggacagcgcggggctgtggtgatgtccatgaatccgccgattagacctgctcaactccccatcatgtatgcatagaagtctcgacttcacgactcttacaagctcgtgaggctcttttgtgagaacttctttgaccctcccacaaagaacttgaccaccatgaacacaggtgctcccaccctcttgagaggatttgacgacttctagtaccagcccatcaaacaaatcatctagagctgcatcaatgaccaataggagaaattgtcccccatat

SEQ ID NO: 105132 - DNA, 279 bp, Zea mays
  unsure (1)..(279): unsure at all n locations
  Clone ID: MRT4577_27382C.1
ctacaggataaagggcccctttatccccgaggaggaggagattctttggggtctcgcgtaactccacngctcgcgaaactaaactgcaatcggtcacgccatatcctttcctctgaggaaggcttaccttctgcaattgagcaacccactcaaaataacgagaaaacaatataatatctctcaccattaggtatcaaaatatttgaatgagctaataaacattgtcagaataataactgtgttcttagatcttaaatgctttaataaaaaatgttatct

SEQ ID NO: 105133 - DNA, 314 bp, Zea mays
  Clone ID: MRT4577_27383C.1
aaaaagggcctttaaattaaaccaattttaccggggaaagttaaaaacaaattgtctaaggaaaaaaggttacaggaagttaataacccttgggggggtcccagtgaaaaaaaatttaatccccccttaaataaagggtttgggaaggcagtcaaataacccaaattacgatcttaaaacctaacccacagaatggccattctggggaaaacaaacctctttaaaaaggcctgtagaaaggggtttttttagttaagcaaaagaaccccttttggacgggggaaaaatctacaccctttaaggggggccccttt

SEQ ID NO: 105134 - DNA, 794 bp, Zea mays
  unsure (1)..(794): unsure at all n locations
  Clone ID: MRT4577_27384C.1
ctcgaggccggccgggccgggagtttggctgcagctgcacggatttggcggtttgcactccacccgacgttgctttgcccgcaacctctgcttgccacgacccacgatgcagtgcaggggtgcagccagatccagttcctgggcgtcctccagtcctcctcctcctcctcctccattccggccctctcgcccgtccgtctcctgcccccgtccctggtcggaccacgagagccccggactgcgttcacctctgccttttgttcacccctgcacgcgttctctggcgctcttgtctcgtgcgtgcgacaacaactgggcgaccgccgccgccgccgccgccgccctacgccaggtgcgcaggactggcgtcctgccatggctccaggccaagatcgttgatcccgtgctgcaggtcatcagaaggggagcagaacccaagcaactggccttctctgctgccctcggtgtcacgattgggatctttccgatatgtgggaccactgttattctcggtgctgttgctgtagcaatgttgggaagtcgttgcaatgctgttactcttatggttctaaatttggccgccactccaattgaactaagcttgatcgtccctttcttgcgtttgggtgaagctgtcaccggcagcgggcacttccccttgacggccgacgcactgaagaatgttctcactggtcatgcctcanaggatgtgctgatgagcatcgtccatgcgatgctgngttggcttattgctgcaccaatcgtactggtcgtgctgtacgccgtttcgttcc

SEQ ID NO: 105135 - DNA, 1628 bp, Zea mays
  unsure (1)..(1628): unsure at all n locations
  Clone ID: MRT4577_27385C.1
accagctcctgggcgtccgtcatccttccatatcccgccctccctcgtcggagcacgagcaccaaaggtgcccagatcttcgtcggccctgcccctgcttccttcaactccaccaccaggcgatgccctagacgcacgagtgcggggcagatccagttcctgggcgtcctccagtcctcctcctcctcctcctccattccggccctctcgcccgtccgtctcctgcccccgtccctggtcggaccacgagagccccggactgcgttcacctctgccttttgttcacccctgcacgcgttctctggcgctcttgtctcgtgcgtgcgacaacaactgggcgaccgccgccgccgccgccgccgccctacgccaggtgcgcaggtcttcgtcggatccttcgccggcgaggcgacgagcacctaccaggtgatgcccccggcttaattgaatgggctctcttctcaccaggactggcgtcctgccatggctccaggccaagatcgttgatcccgtgctgcaggtcatcagaaggggagcagaacccaagcaactggccttctctgctgccctcggtgtcacgattgggatctttccgatatgtgggaccactgttattcttggtgctgttgttgtagcaatgttgggaagtcgttgcaatgctgttactcttatggttctaaatttggccgccactccaattgaactaagcttgatcgtccctttcttgcgtttgggtgaagctgtcaccggcagcgggcacttccccttgacggccgacgcactgaagaatgttctcactggtcatgcctcaaaggatgtgctgatgagcatcgtccatgcgatgctgggttggcttattgctgcaccaatcgtactggtcgtgctgtacgccgtttcgttcccttgtttcaaggtcctggtcaacaggtttgggtggtattccttcgagccccaggaccccaatcaaagcggtgtagccagtgcctgggccggacctctgcagttacgtctgtggacatagctgcagatgggtcgctgacatctggagccggccatggcatggccccaaacgtcagtgactcgacgtaattgcagaggaaacggtttcagccagtgaggcatgctgaatgcccctggaattgtgtgcaccaagttctttgtgatgccgtcggattgagatgggttccggcatcatgttgctcggccatcccaggcactggcgaataaatatgatgacttgagaggcatgtgtcctctgtgattgtgtatgctggtttcacaaccatatatagcgagatgcgtatttatgcggggaatttatgaagtcttgataaataaagctaggaagcacaggggtcacggaccattgtgccattcttcccgatgtaggcgtgggttgtgttcagcacaattttctgtaggcgttgtacatgcttgcaggaattcagtgccagctgtttgaaatttgaatcataggttcagtggcaaggcaacttggtgcttaagaatcctactaaaatgcactcactacgtttcaattataagatttttctaaaaaaaaaaaaaaaaaaccaaannnnaaaaaaaaaaaaaaaaaaaaaaaagnactctgcgttgttaccagtgct

SEQ ID NO: 105136 - DNA, 1327 bp, Zea mays
  Clone ID: MRT4577_27386C.1
gccatcctatcctagatgttgctttgcccgcaacttttgcttgccacgacggaggccagatccagctcctgggcgtccgtcatccttccatatcccgccctccctcgtcggagcactgagcaccagaggtccccgtaccgcccttacctgtgctctccttatcttctcctgatcacccctggtgccataactgggcgaccgccgctcccgccctactccaggtgcatagatcttagacggacctgcccctgcttccttcaactccaccaccaggcgatgccctagacttaagtgaatgggctctcttctaaccaggactggcgtcctgacatggctccacagccaagattgttgatcccatgctgcaggtcatgagaaggggagcagaacccatgcaactagccttctctgctgcccttggtatgacgattgggatctttccgctagatcgtccctttcttgcgtgtgggggaaaccatcactggcagtgggcacttccccttgacagacaacgcattgaagaatgttctcactggtcatgcatcataggatgtgctgctgagcatcgtcaatgcagttagtgaacaacctgtctgcaatcagtactgctcatgcataggataggagcacggttcttgctttgctgcgacattgacataattgctattgtcgacaacagatgctgggttggcttattgctgcaccatttgtacttgccgtgctgtacgctgtttcgttcccttgtttcaaggtcctggttaacaggtttggcagcattccttcgagccccaggaccccattcaaggcggtgtaggtagtgtgtagcatgctgaatgctcctgaaattgtgtacaccaaattctttgtgatgccgttgggttgagatgggttccggcgtcatgttgctcggccatcccaggcactggcgaataaatccgacttgagaggcacgtgtcctctataattctgtatgctggcttggtaatcatatagtgagatgtgtatttatgaatttacgaactcttcgtgaataaagccatgtttggataaaggattcccggaccattgtgccattcttcccgatgtaggcgtgggttgtgttcagctcaattttctgtaggcgttgtacatgcttgcaggaattcagtgccagctgtttgaaatttgaatcataggttcagtggcaaggcaacttggtgcttaagaatcctactaaaatgccctcactacgtttcaattataagatttttctaaaaaaaaaaaaaaaaaaccaaaaaaaaaaaaaaaaaaaaaaaaaaaaaaagtactctgcgttgttaccactgct

SEQ ID NO: 105137 - DNA, 247 bp, Zea mays
  Clone ID: MRT4577_27387C.1
aagaccaacattgtgaaaagactggtttagacttgttttactgacaagggggtcctcgagtaaaagccgttgacataaccggcaatgtttttttcgtttttaaaaacaacaaagcttttttgggggatttttccactttttttgtccgacagcttcaagggcttgaaacaacaattttttccccagaagaaaatctgcctcgaaataagcttgtgtaagccccttgggctccctaaataaatttgcc

SEQ ID NO: 105138 - DNA, 1151 bp, Zea mays
  unsure (1)..(1151): unsure at all n locations
  Clone ID: MRT4577_27388C.1
taactttgctgagagcaataggcttggtgaaggaggctttggtgctgtctataagggcatccttcgtgatggtcaagaaattgcagtgaagaggctgtcacagagttcagggcaagggatacaagagctgaaaaacgagcttgttttggttgccaagctccaacaaaagaaccttgttaggcttgttggtgtttgcttgcaagaacatgagaaactgcttgtgtatgaatacatgcccaatagaagcatcgacaccatccttttcgatcctgagagaaacaaggagctagattggggaaccagattcaagataataaatggaattgccagaggactacagtatctccatgaggattctcagctgaagatcattcaccgggaccttaaagcgagcaatgtccttttagactctgattatacacctaagatttcagattttggcctggctaggctatttggaggggatcaaacccgggagattacaagtcgcgttgttggaacatatgggtatatggcacccgagtatgccatgcgtggccactattctataaagtccgatgttttcagctttggcgtcttggttctagaaatcttaaccggaagaagaagcagtggttcctttaacatcgaccagtctgttgacctcttaagtcttgtttgggagcactggaccatgggaacaattgctgaggttatggacccatctctgagaggcaaagctcctgcacagcagatgctgaaatgtgtccacatcgcgctactgtgtgttcaggacagtccggtcgataggccgatgatgtcgacagtaaacgtcatgctcagcagcagcacttcctctctccaggctccgttgaagccagtatttttcattcccaagagtggttattactcaactgtttattcagaatcatatcctacagcttcccaaaccacaggggcggtatcaccaaatgaagtgtcaattacagaattggaaccaagatgagccttgaagcatcatgttgccacttgctagagtaattggattattatattgcatgaataaactggacatagcgcaatgctctagcgtctgtattactgacttttcagttatgtttccactggcccctctaattataaagtcgtatatttcagttaaaaaaaanaaa

SEQ ID NO: 105139 - DNA, 288 bp, Zea mays
  Clone ID: MRT4577_27389C.1
gaggatgatcaaagaattcgtcggcaaggaggtgatgataagatgaatcaacagggactcagtggagactatgatcggtaggatgttcgacaacatatcctctgtaaaatctgcatacattcagctgcaggaagaccgcagccgatatgaccctgacgagatccagggagctgataaacttgtcatagaggagcttacagatctttcagagctcgagcatgcttacagagaagaacatcctaagccaatagctgcatcccctcaagattcacgcttgctctctgaaat

SEQ ID NO: 105140 - DNA, 440 bp, Zea mays
  unsure (1)..(440): unsure at all n locations
  Clone ID: MRT4577_2738C.1
ccggcncgacccacccatccgtncgaaaaaaaaatactgttatatcctttttattttttaaaacaaaaaattaacaaatatggagcaatttttaaaaaaaaaaaactacaaaataaaaaaaaaaaaaaaacaataccaaataattgggcccccccttctaaaggatccaacctaccctccccctccttccaactttttaccttttttttaggctcccctaaatccaatcccctcccccccttttaacaacgtcggccctggaaaacccttgcctttccccaactaaatccctttgccaaacatccccttttcccaactggccctaaaaacaaaaagccccccccccatccccttccccaaaatttctccacccctacttcgcaaatggccccccccctttatcccccccttaaaccccccgcgttgtgtgggttcccccc

SEQ ID NO: 105141 - DNA, 478 bp, Zea mays
  Clone ID: MRT4577_27390C.1
gtggactttttttttttttttattgatagatacatctagctactattaacacactgttcatatcaagtacacaagatgatggatggtgcagcctaaagaagaagaaccatgcacgcacatacaaaaaccgtatgtgaatacacgctacagatataatatacacgacgtgctcgacatgtgtcctcctatataggggtcgcatgtgaaacaatcaaatcgtagccgaagacaaactaatcccgtacagcatacgatatgttcctaccagttgtccaggccgtaaagcggactcccgggcgtctggttgggctacatgccggggaactggaactggaacggcggcggctgggccatcgcggcggcgtactcgaccaccggcggcgccccggcgttggtcgccggcgacgaccgagcgcgggctcccgctgcggcggcagccgcctccgccacggccggggagacgcgtccgagggaggag

SEQ ID NO: 105142 - DNA, 400 bp, Zea mays
  unsure (1)..(400): unsure at all n locations
  Clone ID: MRT4577_27391C.1
tttttccccccggggaaacagangctggtaacagaaaaactgtggaaaaccctttggggggaaaacaagacgggggaatggttgaacaaggagccataaaaaatggggtgaacacgcttttctattacagggcgggaaaccactaaacaatatcgggctttatgggggacctctagtgaacctctacagtgtctattttaagaaccaaactaatttacagccagggggcccaagacaggcataaggggcacgtgttcatataacgctgctggggctgaatagatcaggggtctcaactgggaaacaccagaggggtacgttgcttcccgcggagagcagtttccacatggtgccggggacaaacaattaattttactccatgcaagatttttcctttccc

SEQ ID NO: 105143 - DNA, 429 bp, Zea mays
  unsure (1)..(429): unsure at all n locations
  Clone ID: MRT4577_27392C.1
cccacgcgtccgcccacgcgtccggacgatgcaaaaggttcttgtgtacattgttacaatgagttcaaacttcatggatctggaaccaaatacaacaaggatttcacagtttatactaaacagctccaggcataccctatcgagcaactatttggccacagttgctccaaatacttccaaaagcatggtttttgatagaaattggcagaaaaaggccattgtttcagttatggaagctggtggtgtcaattggttagtagaacttctaagggttattcgaagattgaatttgaaagagcagtggactgacttgtcactccactntataactttgtactctctgaagtcaactatatctgaaaatgttcgtgcacaaaatcatttcagaagtatagggggaactggaggtctattaaatggactgggact

SEQ ID NO: 105144 - DNA, 486 bp, Zea mays
  unsure (1)..(486): unsure at all n locations
  Clone ID: MRT4577_27393C.1
gtaccggttcgcaggtcgacgcatcgtatgtgagcggctggcagtagcgggccgggatgaaattggtcttgaccgcaccgtgtccgatggagacgtcggcgtatgacgtgttgtccagcaccgtaaacgaggtcgcggcatcgaccctgggtggatgaacggccgcgagcgcgatcagcgccgccgtgccgacacctgctacgacccacagacgctggcggattgacgtggattgcatcattgaactcctggttggaaaaaggagaaaagggcgcgtttgagcatgcggcgcacgtgtcgcgccgaccggcggcgcgggctagaacatcgtctcgatgcccgcatagacaccggtttggccgtgacccggcgccgggttcgtgccccagccggcgttcctcggccccagccccgggctctgcggattgacgccgaaattggcattggcgctgntgaacacatgcgccgccatgctgtacaggaacg

SEQ ID NO: 105145 - DNA, 333 bp, Zea mays
  Clone ID: MRT4577_27394C.1
atacattgggatgagtacttgacatgggccatgggccgggttaaaaacacccgcattgattccacctttgatttaccccaaacactgtgcgagcgaacacccgctatgtagcgctgagccggggtgatatataggtttaatatttgtggggggggtaacaataatgcaagaatttcttaaaacaccagaccacagtccttggaaggcagggaaaaaaaggaccgccaaagactaataggcctttaggggtttcggaaaagacgcttcgatggccttggtaggctgcgacccgctggaccccgaccgggaggcccttggggaagttccctaaag

SEQ ID NO: 105146 - DNA, 309 bp, Zea mays
  Clone ID: MRT4577_27395C.1
ggaccggccggaataattttcgggttgcgagctcacattttgggccgccctaatatctttttaggggtctttttacgctgaaaccccattaaacacctacacatctgaaatataggaatacaggaaaagcgattaattatacaacaataacaccctatgttattcaatacactagtgccacatacacacaaaaaacatactttccaaggtttctacacaaaaaggatcatgtgattataataagtcagattatgtgaaacaatacacttcacaggcgaatggttttttccatggataggacaataatag

SEQ ID NO: 105147 - DNA, 376 bp, Zea mays
  unsure (1)..(376): unsure at all n locations
  Clone ID: MRT4577_27396C.1
acgctctctaccgtccgagaccccaagcgccagggctnctgttgtttcgttgtgtaccattgctgtcagaaaaaacaagaggatctccaatggaaagaacggtggcaagaaaaagaccgtcgaccctttctctaagaaagattggtatgacatcaaggcaccgtcngtgttcaatgtgcgcaacatccggaagactctcgtatccaagacacagggtaccaggattgctttttagggtctgaaccacaaactcttttaggtttgcctaactgatctttattgcaactaagattaagcttacaggaaaatcaggtttcaatctgaagaattcaatgcaggaatttgcatacaaactttttgggctttttttttacca

SEQ ID NO: 105148 - DNA, 190 bp, Zea mays
  Clone ID: MRT4577_27397C.1
ttcactgatttgcacaactacataaatatggggggggtttttgacagacatatgggggaattgcaaatgcttgttgagaactctgaaatcctttttgaagcgttcaatcttaaaacccgcagagatacatctatactaaccattggtcaatcattagaggatgcttcattatagagatcacctgacttta

SEQ ID NO: 105149 - DNA, 231 bp, Zea mays
  unsure (1)..(231): unsure at all n locations
  Clone ID: MRT4577_27398C.1
ttggggtgtggtgtttttttttttttgagaacaacgcgatacaccttgcgcgaacaaatttccaatgggtcgggccacggacaaagggctagctctccttattaaaagacacaccgctgttttacatcccgttcttccgcctatctgaatagcttgcttggtgtggggtggcttacccagttctccncaatgacccgttccatcccctggggcaaccccagggcctgaatg

SEQ ID NO: 105150 - DNA, 271 bp, Zea mays
  Clone ID: MRT4577_27399C.1
ggactttgaagtgattcagtttcctctacggatgagagactggctcaagaatatcctcatgcagctttatgaagccaactctgaacacgctggttatctaaatgagaagcagagaaataaagtcaagaaaatttacctggatgaaaagaggcttttggctggggaccatcccattgatcttctcttaagggactttaagaaaaactaccacatgtatgtgtatcctgtgcactggcagtttagtgaacttgaccaacaccctatggataga

SEQ ID NO: 105151 - DNA, 319 bp, Zea mays
  Clone ID: MRT4577_2739C.1
cagcaactgagacaaaacagaaatccattctgtatgatgagcgaagtgtacacaaagtataaccaattaccaagcatatatgtttggtgtacagtggcatgggccccgattacagagtgcttgtgcacagagctcgaaaactagctcaacaatactatcttgtgtaccaagaacccattgcctacagctcagctggtacagagagtagcttctgtgatgcaagaatatactcagtcaggtggagttcgtccatttggagttgctttacttatttgtggttggaatgatggacgaccatatttatttcagtcagatccat

SEQ ID NO: 105152 - DNA, 203 bp, Zea mays
  unsure (1)..(203): unsure at all n locations
  Clone ID: MRT4577_273C.1
ttattgcgaataaataattcacagctctgcaagctagtatattttttttaacaggccaacgggtttttattaatggatagggactngatacagtacccaataatttcaatggtcaatacatacatttgacaaacaagtttctccaagggggggggggggagaaaaaccaccgttccccccctttgtaccatgaaaagcccccc

SEQ ID NO: 105153 - DNA, 1103 bp, Zea mays
  Clone ID: MRT4577_27400C.1
gctgatcaaatgtcgcacccaagccatgtcaagaaaggaatgccctacgtccgattgggaaagagcggcctaaaagtctctcgaatcattctaggatgcatgagctatggctctaaagaatggcaagactgggtacttgaggaagaagaggctttcaggcatattaaagcggcgtacgacgctggaatccagacttttgatacagcaaatgtatattcgaatggagtttcggagattattctcggcaaggcgatcaagaagctcaacattccgagaaacgacatcgtcatcatgaccaaggtccacggagctgtcggtcgtgctccaggagtgaatttcctaaagtcaaaggagaatccagaagaagtggggtatgtgaaccagcgcggtttaaatcgaaagcacatattcgaatcagtggaagcatcactagagcgacttcaagttaaatatatcgatttgcttcagtgccaccgattcgacaacgatacgccgatcgaggagacgatgcaagcgcttcatgatgtagttcaagctggactggtcaggtacattggcatgtcgtcgtgctgggcgtggcagttccacgcaatgcaaaactacgcaataaacaataagctcacgccattcatttcgatgcagaatcaacacaatttggtatacagggaggaagagcgggagatgtttccaacgtgcaaatactttggtgtcggcatgatcccttggtctccgctggctcgagggttcgtcgccagaccgctaggccaacaaacggttcgaggcggttgcgacatgttcatcaatcagtatgacaagaaccatccaaacaacaggaagatcgtcgagagagttgaggaggtggcgaagaagatgaatatttcgatggcccaggttgcggtcgcttggaccttgcaaaaggatggagtcgctgcgcccatcgtcggcacgacgtcgctcgataatttgaaagacatcatcggtggggtaaatgtcaagctatccgaggaggatgtggcatacttggaggagctgtaccaaccgcaggcgatcataggacacgcctgatggagaagtctccgcaatgaatgaacgtttgaaaggtc

SEQ ID NO: 105154 - DNA, 1038 bp, Zea mays
  Clone ID: MRT4577_27401C.1
ctatagtgtcacctaaatccccagtcgaccactactgacacttgctcggtgtcgctcccaattcacgtggccaacagctcatctcctcctgcaaacccctgcccaccctaccccatggtcctgcagcagatggtccggttgaaggtgctagacttgcttataagcgtcctgaaagaattcctggtcctgaagggggaggctgctagtgccgtccacgggaaggaaggaggagatgacccggtcttgcaggccatcgcagcgagcttgctgcagaggaagtggaaagagttcaagcagtccgatgaatcctggaaagaagccccgaggaacttcgttaacctgggaggcatcgacgaggacatcagcgccatggtgggtatcctgaagcggggcttgggtgttggatgcatccactcatggctgtcgagcaatcagatgcagcgcgcgacagctacaggcggcttgccaggggctcacatggttgcaacaggccaattccgcacgccagcgatgaacgcaatggtgcaggaggcccataggcatttggccagggaagcatctgcccatgatgcggggacatcaattgtttgcaagcgcgccgtcgagcttctagatgggataaacaagcgattcgatctctggtgcaagctggaccaggaattgccgcgcacgaaccaaccgtcaccgcaccaagaagaaggccatgagtcccgtgacctcaccgccgtcctgcggggggacatcaaccgagcgaggcagcatgacatatacctggctgccgatcacgcgatcaagcaatggcgcagcttcctcacatgcgtggagaagactcacctgaagcgggatatatgatgaggccactggcaaccaccacagcgtgagtggcgttcagtcgatgcagactcagacatacacaattaatataagtaaataaataaatttaatgagcgagaggccgtgacaccagtccctccgatcctgagaataattaatatttgtgcgtactatcctcatcgtcaatatattggtcctttgatt

SEQ ID NO: 105155 - DNA, 428 bp, Zea mays
  Clone ID: MRT4577_27402C.1
aaagccaaaccaggctccccccagttttattacaaaaaacaaacccccaagggaaccctggggaggggggaaccaaacccattcatttggtttcaaggggggcaaaccaggctccccccagtttcactaaaaaaaacagcccagttaaaaaatagaaacgggcccaaacaaccccttttttttggtttttggaaaaaaaaaaaactttttgggggggattccaaaaccccgaagggaacaagctttgggccccattaaccccattttttttaaatggcccgaaaaacaccccagggtttttccccccccgggagaaaaaacaacaaagggcccccaggggggccccttggaaaacccttaacaaaaaaaagaggtttaaaaggaaaaactttggcccctaataggggggacccagggccgggcttttg

SEQ ID NO: 105156 - DNA, 1168 bp, Zea mays
  Clone ID: MRT4577_27403C.1
atggttgcaaccggccaattccgcacgccagcgatgaacgcaatggtccaggaggcccataggcatttggccaaggaagcatctgcccaagatgcggggacgtcaattgtttgcaagcgcgccgttgagcttttagatggggtcaacaagcgattcgacctttggtgcaagctggaccatgacttgccgcgcactaaccaaccgtcattgccccaaaaaaaaggccatgagttccgcgacatcaccgacgtcctgcatgggaacatcaaccgagcgaggcagcatgacatatacatggctgccgatcacgcgatcaagcaatggcggagcttcctcccatccgtggagaagacacatggccatgggccggacaagtaggcgcattatgaggcccccggcagctaccccaaaccccagaacacagcgtgagtggtgttgtgtcgatgcagactcagacatacttccccatataaataaataaatttaatgagcgagaggccctgacaccagtgcctccgccgactccctccgatcctgagaataatatttgtggggactgtccctccgtcctcaaggccattgtgctggtcaattgatttcccgcgatttcactactggtgcaatctggaccaggaattgccgcgcacgagccaaaaaaaacaaaaacagaaaaaagaccatgagacaagtaacctcaccaccgtcctacggggggacatcaaccgagcgaggcagcatgacatatacctggctgccgatcacgcgatcaagcaatggcgcagcttcctcacatccgtggagaaaacgcatggccacgggcatatatgatgaggccactggcaacccccacagcgtgagtggcgttcagtcgatgcagactcagacatacccaattaatataagtaaataaataaatttaatgagcgagaggccgtgacaccagtccctccgatcctgagaataattaatatttgtgcgtactatcctcatcgtcaatatattggtcctttgatttcccgtgtgttcacttactattgttctctaattactagtcctgatcagttccggacgactaagctgtaataatgtatcttttcttttcttttttattaataaaagcccatatgtatatatatgcgtcaataaagcgcctatgggtagtaaacac

SEQ ID NO: 105157 - DNA, 233 bp, Zea mays
  unsure (1)..(233): unsure at all n locations
  Clone ID: MRT4577_27404C.1
gtcgcgtttgcagcataggcagatctgagttacccgtcggatccgatccgtgcccttgggcggggtgagtatgtgtgggggagggtatctnatccatggcatagatgcccacacttaacgctctcatggacctgcagaaggatactaccacctcttgcagtgcactccactggcgacgaaccatatagctactggtgcgctaacaatgtgggcccatcggataaccgatacgg

SEQ ID NO: 105158 - DNA, 593 bp, Zea mays
  Clone ID: MRT4577_27405C.1
actagttctagatcgcgagcaccaccccgtacgtgttcgataaaatgcttcaaagaaggtaaccataccaggctgaagatgtggtgattttatgcatagcaaaacaagcaaccaaacaaactcctatgaaaaccaggccagtatagcagttcaaccaaacacacatatgttgatttgttggggacaggcctagcctagccaagctccaattctagccaggcttcagctaagccaggaaaccaaacacaccctatatgtcccagataagatatttgtgacttagcaaaggcacatttggacaatttgacatgaaatttgttgtcttgtagaatagacagcacagctttgatatactctagaatctagatgttcaggccatgttttgctgtaaataagtatatcatcaatgaatactactacacacttatgaagtaaaggttccaaaataacattcataactgtctgaaatgtggctggccctcctatgacaccataaggcattacattatattcataatggccattatggcttttaaatgcagtcttatactcctctccctctgccattttgatctgatgaaaaccagagcaca

SEQ ID NO: 105159 - DNA, 149 bp, Zea mays
  Clone ID: MRT4577_27406C.1
gcgtacgtaatgctcggaattcggctcgaggtacgatactttatttttctcccaaaacatctgctgtaccaagcaaccatgtgaaagataaagggtccaacaaccttctcattgaggaactatgctacggtcgggcactgtaatgaggt

SEQ ID NO: 105160 - DNA, 333 bp, Zea mays
  Clone ID: MRT4577_27407C.1
ggggtacaatgcaaatctcgtcgtcgtcgccatacttgtgcaagttccatggatggcagcaagaacaagaacactgatcttccacgaacgcaacgattaataattcattcactaataactcgactcaaccggccgtcaagggagtccatggacagagtctggactacatacgatcaagcttaatcctgcttagcttcatccggaaaggccgtgcccgtgcgcgcgcggccgtgtccacagttgtgcttcgcggccatgcccagcgccgcgctcaccccgggggggttcgtcttcgctcggggatcattcgcggcctcggcctcggcctctgcc

SEQ ID NO: 105161 - DNA, 682 bp, Zea mays
  Clone ID: MRT4577_27408C.1
ggcccgacaggggccaaaagggagaaacaggttcaaaggatggcccggccttgggaccaatccccaatttttagccaaaaagcccccccctaaaaaagagattttttttgaataaaaaagacctttttttatagactactcggggaacatagtctataaccccgggggggggggagggccttttttccagcagggggggaccccgggggaaggactttaacgactttgacccccccagttttggacgggggcctgcccgggccaaggaggacagggcccccttccttcacccggaacctgggaaagatgggaccagaaatgtgggaggcccttttcccaaccctgggggttttttttacaaaggggggggggttccggcaaacaaggaaagttcggttcatcttaccccggggggaggccccaacaaaaattctgcctttgaaaaaaacagtcccggggaaggggctttttttggcaaggggggccccttcgatggctccccggggggcctggaacccaaggccaaggcttttccaaaatggggggccccccttgccaggttttttaccctggccaaatttttttgggctggggaaaaccttgggcgggttgaggaaagccttttaagtctgtcccgccatggctggccggggggcgcccccccgagaggcggggggggccc

SEQ ID NO: 105162 - DNA, 317 bp, Zea mays
  Clone ID: MRT4577_27409C.1
gcgatctaaaactttgattttttttttttttttgatgatcatacaatgtttatataaatctccaaaatcgaaaggccaaagcttttttttaacaagctgaataacatcttcatccaataactcgcagatttatgccaacacatcgaggcgaatgttctgctgatcgacccctaacaagagcatatttaaattgacggtcccaatcgccacaaatcgctctacatatatcaaaggctaccgctcctttcctcataatcaacgctccttcgaacattgggtggtctcctcgtacctcattataaactcttacaagggtg

SEQ ID NO: 105163 - DNA, 363 bp, Zea mays
  Clone ID: MRT4577_2740C.1
aattcggcacgaggagagagaactagtctcgagttttttttttttttttttttttttttttttttttttttttttttttttttttttttactacggcctgcgcagaacaatcatcgggttctccaaaattatgcggccaacccagcagcattcacattcacctgccaagtcctgaattataaagtaattactactagcaaaaggggggctaaatcgccgccgccgtctcgtctcctagtctaaacacaaaagcatccgccgccgaagggggggtacttgccgccctccttccccttggtctgctcggcgaccgggaccgcgggcccacacggggtccacccggccgctgccatcctgaccttg

SEQ ID NO: 105164 - DNA, 734 bp, Zea mays
  Clone ID: MRT4577_27410C.1
cggaatacaggccgggccggggtcctatcctgtccagatcgccggcgcgcagcctggaggactcccctcctccgaccccggcgccgtcgtcacttcgtccctccccgcacaaggaaaaatcagaggcggatctcgatcgcccctaccagacagcactcttcgctcgcgggcaggtaccatgcctttcgcaatcatctgagtagtagaatggcctcgaaagctataaggaggaggcctaccgagaaagaaagagagagacatatggaaacaacaatgccggaatctgtcacagcacctcttctaggaaatagtgcccaggggaataaatcggaggggtatgagcctataccggatttctgggatggaaaatcacgcgagtgccttcattgggtgcatattgtatctacttttattactcagtctgcaagaaagatagtaaatgctatttcggagtttggttcgttcctagcaaggttctttggttgctcccgtgctccccaaagttcacaaaatgcacagacaatgctaattcacctcagtccattacaggaggagagattaaaattcttgagacaaagattaaatgtgccatttgattgttccgctgtcaagcaccaggatgcactaaaagaactttggagattggcttatcctaaccgagaacttcctcctctgaaatcagatctatggaaggaaatgggctggcagaactctgacccagcaacagattttag

SEQ ID NO: 105165 - DNA, 421 bp, Zea mays
  Clone ID: MRT4577_27411C.1
ggacctttgggctgatttatgtgcttggcctaagaagacgcccgattctactgagctcagcataattcgaatgggtatacttgtcggactcttgtttagacgaattgtgcttgtaatggtgagtcgcattgtcatactcgtgatattaagggtgttcctgcgtagttcgtccctcatgaggtccctgggtcgatggcggccgaggttacgattcgtggttcgtttatgcccgttatagttcatggtggcttggttgagactactgcgtatggtgcgctcggtcattatactgatttccattagggtgataaggtgctggtttcgtctgcggatcctcctgataagcgttaggtggatttgagttatcggagtaagactctttagggtgggtcttagtgcactgaggagaagcatattcgga

SEQ ID NO: 105166 - DNA, 286 bp, Zea mays
  Clone ID: MRT4577_27412C.1
gtctcttgcttctaagagccggagaaagcgtttgcgtgcacagaggagggacgctttccggagctgcggaggcacgaacaatggacacccagaaagatgttcaaccaccaaagcagcagccaatgatatatatttgtggagagtgtcacaccgaaaatgaaataaaatccagggatccaatcagatgcagagaatgtggatacagaataatgtacaagaaaaggactaagagattggtggtttttgatgctcgatgaaacagtggagttgaggaatgtcttcatac

SEQ ID NO: 105167 - DNA, 190 bp, Zea mays
  Clone ID: MRT4577_27413C.1
gttccgaccacgctgtagtttggtcggctcggtatatagagagggggagatgagcgctgctgctgaggacgcgggctgggccgattgggggatctggaggcgggagcagcggactcgttggcgtgggaatgttgcgcgcggaccctgggctgttacgagtgcttttgcggccgttcctgacgttggttgt

SEQ ID NO: 105168 - DNA, 239 bp, Zea mays
  Clone ID: MRT4577_27414C.1
tctccttccccttttacaagaatcatacaagcgaagaaatttttttcatgtccaatggttccaatccacaacttacaagcaagtacatggaaaggattctcaaatttattagctgttacaaattacacgcacacccaccaaaacgttcattctcaatcctgtgatgccttgaaaaggctggatattttacttgatgtaattttaaatccgcactaccaatttttgccccttgtcttaca

SEQ ID NO: 105169 - DNA, 387 bp, Zea mays
  unsure (1)..(387): unsure at all n locations
  Clone ID: MRT4577_27415C.1
gcctgcgtgaaccgggcccctattaccacggtcgacctcagcgttcgaacttagatgtcattctacccacctgttgtggtgaaacggtaatgccttttagcatcagcaactattgcttccattctacccacaaaagaggtaaacattggtgcctctcttacaacaacagcagtagctacgatgtaggcatacatgcataagcactgaatggctacacacgcttnattagacaagccgctccgaccattaggaagggcagaccattcgttctgagcatctatttctatggagtttagtactggtaatcaataagagtgtctgatgcatgatatgtgcgacctctcacacataaagtgttagagatctatattttaaaaaaaaaacaag

SEQ ID NO: 105170 - DNA, 281 bp, Zea mays
  Clone ID: MRT4577_27416C.1
tattcggttgccatttgctgtcaacatgggtcccgtgttgctgtcttcatttgtctattatctatgcatatttcaggtccacagatacgtggaaggtctttgttgggctatgagatactactatcaacgtgtttgttcatggcagtggtatgtaaatattgaccatctactgtgagaatttgctatcgcattttctgtggcagataaaacatcacttgattgagtgtgaaagtattattcttcactttttttgcaaagcgcaggagaactgcgcatcatta

SEQ ID NO: 105171 - DNA, 423 bp, Zea mays
  Clone ID: MRT4577_27417C.1
cccgggtgtagcctcaggaatcttgtgtcttaaacaaggagcaacctccaggtaatctctgaaagaaggaaactgcaagggaggaaagaggagtaacgatgagaggaagacgaagtctaacgcgtaagtttaacgatgaggttactgcaaaatacatggaggcctaccgtctgaagatgattcaccatgacgatcctatgaaatattttttcaactaaaagtgtgttaaatgtacgcactgccttataacattggtggcaccttgccttgctgtgacacctgtgtaattgtaagatatactatttacctgtccaataccaacgaggagctgtgaactactctagcctaggaatggctatgcctattttacaagtctgctgtgtctgataatgataaaaaaaaaaaaaggcatgcggtctcata

SEQ ID NO: 105172 - DNA, 218 bp, Zea mays
  Clone ID: MRT4577_27418C.1
cacaggggagaaccggcatatatataagtacgtcctttgacacggtagccctaggttctatcaagcgtaaccatctgcagtacgactgcacgattttcgcataagcagagaccaacaacgtgatattaccatggtttgccctggtctttaggcgtcacagttcagggcctagcgtaaacatagcctccgtcctggaaagctttactggtgcatggata

SEQ ID NO: 105173 - DNA, 319 bp, Zea mays
  Clone ID: MRT4577_27419C.1
gcacaaacggatactggcgcctctctatagtccgaatgtgccgccggagagggaatgaaatgtcataccccaaacattgattcgtttgcagcccttacggacctaccagctctctcccacatgtttatggacctctgtatctcactctactcttatacatctccactagtaatctgctaacatccaaaccgttactgacgatgaggccctgttaccggccgacaaagccaagcccacttacatcgcctacaaggaggtggggaaccaacaatcttgccgaactgccaccacacccccacaggggtttagaatccaacca

SEQ ID NO: 105174 - DNA, 721 bp, Zea mays
  unsure (1)..(721): unsure at all n locations
  Clone ID: MRT4577_2741C.1
taccctcggagcctgccgggacgtcccacccctcctgcatttcaaaataatatctccctgcgcttttcctagccctttgtcatccaaggatacaataaacaaccggcgcttttacacccccgccaagaacaggagcaacaacaataaggctcctcgcaacaatccattctcatccatggcgaagctcatgaacaagctggtcgattcgttcgagcacgacgagatactggacgtcggctgcgtgcgcgccgtgctggccgagctcgtcctcaccttcctcttcgtcttcaccggcgtctccgccgccatggccgccggaaaagacaggtccttttccccctttatgaaacgtacgtggctctgcacgcgcgcaggatccgacgggaagcccggcgacgctatgccgatggcgacgctggcggcggtggcaatcgcgcacgcgctggccgctggcgtcctggtgacggccgggttccacgtctccggcggccacctgaaccccgcggtgacggtggggctcatggtgcgcggccacatcaccaagctccgggcggtgctgtncgtcgccgcccagctgctggcctcctccgccgcctacgtnctcctccgcttncttagggggggnttggtgaccccgtggctcgccctgggctgggtcttcagcccggtgcttggcctgggggtggggggggtcctcaccttcctccctgcttttggcccc

SEQ ID NO: 105175 - DNA, 278 bp, Zea mays
  Clone ID: MRT4577_27420C.1
cgatgatatgatttgatactatataaaaaaaaaaaaaaaaaaaaaaaaaaaaaaaaaaaaaaaaaaaaaaaaaaaaaaaaaaaagggcggcagctcgcgatctagaacggagattcagatccaaacaaatccgcatccctctctcctcggtttcctctccaaccaccaacccccagatcgaagcgatctccgcggccgccctctcagggattccgcgggacaaagtaaggcgtaaaggccccaggaggcggagggaaccgcaaagggcggatggggga

SEQ ID NO: 105176 - DNA, 359 bp, Zea mays
  Clone ID: MRT4577_27421C.1
gctagcctagctgaagttctttatccggtcaattcaagccgccagatacgatcacaagaacacaggtaagaagcttccaagcctctgattgcttccggcgcggtgacatgtcatgtctccagtctcctgggcgccggccgtcgtcgtcgttgcggctctagctggctagcgtggcgaggaccatgcctgctgtgcttaacaaggaggggatgaagaagcggaggaggaaggacgggcggcgcaggctcaagctgtcatggctggcgtggccgtggtcacggagaagcgacaagggggacgcgggcggcgacggggacgacagcagcaaggaggggaagaagcggaggaggaagggaggg

SEQ ID NO: 105177 - DNA, 604 bp, Zea mays
  Clone ID: MRT4577_27422C.1
cattgggacctcgagccggccggaaaaaaaattagctagcctagctgaagttctttatccggtcaattcaagccgccagatacgatcacaagaacacagttaagaagcttccaagcctctgattgcttccggcgcggtgacatgtcatgtctccagtctcctgggcgccgcccgtcgccgtcgttgcggctctagctggctagcgtggcggggaccatgcctgctgtgcttaacgagaacgaggatggcgccgccgctgccgatctcgagaggcagcagtgctggtgctcttgctcctgcctgccgttctgcctctggggcgcgtccgggtcccggggtcccaggaatcccggcggctcgcgggcgaattggaggcggtggcctcgcaggctcaagctgtcatggctggcgtggccgtggtctccgaagagcggcaagggagatgcgggcagcggcggcggcgatgacagcagcaaggagggaacgaataagcggaggaggaaggacgggcggcgcaggctcaagctgtcatggctggcgtggccgtggtcacggagaagcgacaagggggacgcgggcggcgacggggacgacagcagcaaga

SEQ ID NO: 105178 - DNA, 765 bp, Zea mays
  Clone ID: MRT4577_27423C.1
acttttagctgcagcttaagcaatggtcgtctccctggtgcttccgttcgccctcctcgcgggcattctcctcctctccggacatgccttggctgggccggagaccgctgcggagcccggcgagatggtcctgacgctggacgccggtaacttctcggaggtggtggccaagcaccagttcatcgtcgtcgagttctacgcgccatggtgtggccattgcaagcaactcgctccagagtacgagaaggcagccgccgttctgagggatcacgacccgccgttggtgctcgccaaagtggacgcgtacaacgagaggaacaaggagatcaaggacaagtaccaggtgcacgcgtaccccaccctcaagatcatagagaacggagggaaggacgtgcgtggctatggtggtccgagggatgccgatggcatcgtggagtacctcaagaagcaggtcggcccggcttccgtcgagctcagttcggcggaggctgctcaggcatccatcggcgacaagggggtgactcttgttggagttttccccgagtttgctggtgtggagtacgagatgttcatggccgtggcagagagaaaacggtcagactatgatttctttcacacgtcggacgcgagcatttctgccgcgtggtgatggagccatcaggggcccctgctgttcgtctctttaaacatttgacgagctctttgttgattcacaggattttgatacggatgctcttgaaaaatcatgaagtgtctggtttccct

SEQ ID NO: 105179 - DNA, 854 bp, Zea mays
  unsure (1)..(854): unsure at all n locations
  Clone ID: MRT4577_27424C.1
tcgaggccggccgggacattgtccgtccccgacctccgtctccacagcgatccgataccatgtccatgcttctacagttcctctttctcagcctcatcctactcgcagcctccaaacgggtggtgatggccagcagttcgcctactccggcttctccaccagcgatctcgtcgtcgacggagctacaaccatcacatcaaacggcctcctcgagctcaccaacggaacggaccagcagacaggccacgccttctacccaaccccgctgcggttcacgaggtcgcccaacggaacggaacttcacgggcgccttgcctgggcagttcctcggcctcaccgacatccggaacgacggcaacgccagcaaccacttcttcaccgtcgagctggacaccatcgagaacaaggagttcggcgacatcaacgccaaccacgccggcgccaacgtcaacggcctcagatccctcaactccagctccgctggctactacgctgacggggacgtcgacgccggcgagttccacaacctgagcctgatcagccgtgaggctatgcaggtgtggatggactacgatgccacggcttcaagcatcacggtcaccatggctccgtcgaaggctgcgcggcctgaacggccgctgttcacagccacccacaacctcacaggcgtcgtcaccgacgctgcatacgttggcttctcctcggcgaccggcacgatcaacacgaggcattacgtgctcggctggagcttcgccatgaacggtccagctcccgccattgatgtttccaggctaccncagctcccacgcatgggccccgagcctgtatcaagggcactggagatcgttctgccg

SEQ ID NO: 105180 - DNA, 188 bp, Zea mays
  Clone ID: MRT4577_27425C.1
ccttaattttccttttttttatacttcgctattctccagcttggcacattatagttttccacaaatctgaaaattgaatatacacaactacatcaattcctcgacacatactaagctggatttatatattggattgttgaataaactttctccaaaacgaacctaatatatcacgtacatcaacatgt

SEQ ID NO: 105181 - DNA, 726 bp, Zea mays
  Clone ID: MRT4577_27426C.1
ggtaccctcggagcctgccggggacctctgtctcacagcgatccgataccatgtccatgcttctacagttcctctttctcagcctcatcctactcgccgcctccactatacgggtggtgatggccagcagttcgcctactccggcttctccactaacgatctcgtcgtcgacggagctacaaccatcacatcaaacggcctcctcgagctcaccaacggaacggaccagcagacaggccacgccttctacccaaccccggtgcggttcacgaggtcgcccaacggaacggtgcagtctttctccacctccttcgtgttcgcaatcctgtccgtgtacaccgacctaagcgcccacggcatggccttcgtcgtggcgccgagcaggaacttcccgggcgccttgcctgggcagttcctcggcctcaccgacatccggaacgacggcaacgcgagcaaccacttcttcaccgtcgagctggacaccatcgagaacaaggagttcggcgacatcaacgccaaccacgccggcgccaacgtcaacggcctcagatccctcaactccagctccgctggctactacgctgacggggacgtcaacggcggcgagttccacttccacaacctgagcctgatcagccgtgaggctatgcaggtgtggatggactacgatgccacggcttcaagcatcacggtcaccatggctccgtcgaaggctgcgcggcctgc

SEQ ID NO: 105182 - DNA, 389 bp, Zea mays
  Clone ID: MRT4577_27427C.1
accggtcgtccttttttttttttttttttttcaagatccaaaggtacatttttttacggaaacaggtgctgagccttagtctggcactaaccatgcaaacctatttaacattaatacatcatactgacaaacacaggccccatatatatagaacgaacaaactgtgccaacatggtcgcttgaggttctaatatatctcttacacagtactatccccttcaattactgatgggaaagactcaagcattccttttacaggcgtgctcacacactacttggctgtggctaaccataccatatgagcgctgcgatgtatttatcgaaaactggtgcattaggtaggaatacccttgaggcgttgctccaaggcctgagattcataatggtgt

SEQ ID NO: 105183 - DNA, 163 bp, Zea mays
  Clone ID: MRT4577_27428C.1
cggacgctgggcaggacgcgtgggcggacgcgtgggcggacgcgtgggcggcgctcaagcccaggcggacagcagcggcacggacacgggtctagtccagccaatcgtctacaggccctctaagactacttgccggctctgctaggcgctgggaaaagaaggt

SEQ ID NO: 105184 - DNA, 820 bp, Zea mays
  unsure (1)..(820): unsure at all n locations
  Clone ID: MRT4577_27429C.1
acccctgcccccgagatcccctttcctcgccccccgaccgtgatccccgtcggtgaccgccatcctcccccgcgacagatctctatgtttgagatctccgtgcttgagggaagccccgccattcatgcctccgagcgccaccattctcgccaccgagctcgcgccctgcacgcccgcgccttcccctccccctgagacagccaccccactcgcgggcacacccaccaccgcgacagccaccaccccctgctcgcgttcttctcctccaagttagccgccgcgagttctccgtgtttgttgatcttcgtccccctgctcgcgtgtttgttgatctccgtcccccctgctcgcgtccttcctccctgagaccctgacctgctcaccaccgctgctcacccctctcctagcccccctcctgctagaaagtggatctcgtccttgctcacctgctagaaagctattcgcctagctccaccggtcccagctgctagcaccgccaacctgctaggcactccctcgagccgaaggtgagggccatgccctaccactttttcggttagatctaaatttcggtggaggtgagcgtggatgaggtcaggtatgtcgcctccttctcttcctccaccgtcttctatacgctccaggcttgcgctggtgttgccggccattccttgtgctcgacctcgcgtctgcgttggactccacacctctgccactgtctccagcgccgacgntgaagcccattgtccctgctcaccctggcgacttgtagtggactctggaaacccggtcaatgagtgcagcagttcatcacatcact

SEQ ID NO: 105185 - DNA, 2176 bp, Zea mays
  Clone ID: MRT4577_2742C.1
tcgaggccggccgggggaggacgtcccacccctcctgcatttcaaaataatatctccctgcgcttttcctagccctttgtcatccaaggaaacaataaacaaccggcgcttttacacccccgccaagaacaggagcaacaacaacaaggctcctcgcaacaatccattctcatccatggcgaagctcatgaacaagctggtcgattcgttcgagcacgacgagataccggacgtcggctgcgtgcgcgccgtgctggccgagctcgtcctcaccttcctcttcgtcttcaccggcgtctccgccgccatggccgccggatccgacgggaagcccggcgacgctatgccgatggcgacgctggcggcggtggcaatcgcgcacgcgctggccgctggcgtcctggtgacggccgggttccacgtctccggcggccacctgaaccccgcggtgacggtggggctcatggtgcgcggccacatcaccaagctccgggcacgagttcacgggcccgtccatgaacccggcgcggtccttcggtcccgccatggccaccggggtctggaccaaccactgggtctactggatcggcccgctgcctcggcgggtccctggccggcttcgtgtacgagtcgctgttcatggtgtacacgacgcacgagccgctgctcaatggagacatctgacgaccgtcgggcccccagggcagtgagcacggttcatgcttgttttctgtaaaatggttcgttacatgcaagcatgatgcatatattgacaagtgtaattaatagcagacggttggttgttgcgcatgttggatgctgggatgtgtaaaacaggtcagtctctaaaagcattgtacatacattggctaaggtagatagtgtggcttggtgtagggccttttaagggcttgctttagctattggttatgtgttttttttggggttttcctgccaaggaagtctttcttttatataatctcaaaaaagttttttttttttggtatgggctgggttctatcaagggtttgtaaaggctattagtttaccatgtagcagaaaaactattgggacgtgaagttttttcacgtacattgtaatactttggtatttttgtctaccagatgaaactggaagtacagagcaaaaacttatttaaaaaaaaaaaaataactagtccatgagcttctgcctaccaatcaaatgtggcctttcagatttagaagagttattagtacacagcatggtcgagtaaagccaaagccaagaattggactgaatcatacttattatctcctatgacaaaaacgactgaatccaccgatatttgtttaacgtcgcccttttgatcacgaaaattaacaacggaacggaagctggtgaaaacgactagcagtgctgaccaagatgtgcgatgcaggtgaccccggtgcacgccctgggcaggggcatcagcccgatgcagggcctggtgatggaggtcatcctcaccttctccctgctcttcgtcacctacgccatgatcctggacccgcggagcctggtccgcgccatcggcccgctgctgacgggcctcatcgtcggcgccaacagcctcgccggcggcaacttcaccggcgcgtccatgaacccggcacgctccttcggcccggccctggccaccggggactggacaaaccactgggtctactggatcggcccgctgctcggtgggcccctggcaggcttcgtgtacgagtcgctgttcctggtgcagaagatgcacgagccgctgctcaatggggaaatctgacgaccatcagcaccttcatgcttgtttctgtaaaacaggtcattatctgcaagcatggtacatacattggccaaggtaattagagaggcttgctgtaaagcagtaggattgctggctgtagaaattgttgatgggctttttttgggggtttcctgccaaggaattctttcttttatataatctcaaaaaagtttttttttttggtatgggctgggttctatcaagggtttgttaaggctattagtttaccatgtagcagaaaaactagtgggacgtgaagttttttcacgtacattgtaatactttggtatttttgtctaccagatgaaactggaagtacagagcaaaaacttctctaaaaaaaaaaaaaaaaaaaagcggccc

SEQ ID NO: 105186 - DNA, 195 bp, Zea mays
  Clone ID: MRT4577_27430C.1
tctcgagccgattccgctcgcggttctcccctccactgcgattctccgtttccgacttggctccggccgccgacttcctgtcggcgtgcgcctctggttccattccccgtgcgctcttcctgatcccgaggcgtcttctgctcccaattccgctctcatctgcgcgctgcgaccgccccgcagctgcagcctctt

SEQ ID NO: 105187 - DNA, 604 bp, Zea mays
  Clone ID: MRT4577_27431C.1
ctcgagccggcgggagatcttggtcccatctaccttcaagtctcgctacgtatcagtgcaatatataaacgcagccgctatggctgagcagcaccatggccctctcctccacgtgcttcgtcggcaaggcctgcgaacgtgccgtctgcgtccgcgctttcgtcgaggctccagcgtgactagtgcgcatagacgcgtggccgaaggccaagtgcagctggcggcgtccggcgatgctcctgctggtacggccccgaccgggtgctgtacctgtgcccactgtccggcgaggcactcgtagctacctgacggtctgagttcccgggcgactactgctgggacatcgctgctgctgtcgggggaccctgagatattcgccgagaaccggtagctggaggtgatccactcccgctgggccatgctgggcgcgctcgtctgcgtcttcccctagctgctcgcccgcaacggggtcaagctcggctaggccgtgtggctcaaggcctggtcccagatcttcagtgagggcgtgctgcactacctcgttaacccgaggctcatccacgcgtatagcatccttgctatctgggccgtcatgtcgtgctca

SEQ ID NO: 105188 - DNA, 229 bp, Zea mays
  Clone ID: MRT4577_27432C.1
cgtcgcgctgctcaacgggtactaggcgctcaagcgcggccagggggtggtggtgccatcgcgggtgccattgctgaccatcctcgtcgccttcggcacgtcagcgctgggtatcgtctacggcacgctttaggatagctgggaccccgacaaggaaaggtagttgttcagcattaaccgagcccactagaacttgcaattgccaagttacgataaaaacccttggcac

SEQ ID NO: 105189 - DNA, 162 bp, Zea mays
  Clone ID: MRT4577_27433C.1
gtacacagcattaacttgtttttttttcttcaggcaccgatccaacgggtagtcatccagacatgggtgaggaataccacgttatcactcttgtgcatattctgatagtgaacgttctgaagaggtttgttacatgaacggactaaggttatcttatggcag

SEQ ID NO: 105190 - DNA, 673 bp, Zea mays
  Clone ID: MRT4577_27434C.1
ggccgggagacagtctcctctcttctcccattcagatcctatcgtaagacttacggattccgtgcttcgatggtgcgctgaagcagacgtcctctctccctgccttctcctcctcgccttctttgccaccgcggactacggggggccggaagtctgcccctgcgacgggggcgttaacaaggcccagcgcttcctgcccgagaccgagttgctcccggacacgcacaagcaccgcaagaacacggagctgctgatcacggagctgatctgccagggcgtgacgcactcgatcatcgacgagttgctgatggacctccacttcccgagcttccgtgtctccgacctgcaggaggggggtgaggtcttgcttgtcggtctctactactacaacagcctctgcctgatcctcttcaagggcgcgaccactcctgcatgaggcacatcgcacctggccctgcagacctccgcgccgacaggacctaagcatcaccatattctggtactgcaagctaccatcgagaacatggacacatgtgctgcgcctctgtagcttggattactgtcttaatctgtcgagtagttggctgctcactgctggaacttattatcgtgaggcatatgacatggacatgagctatgctatcagtcaagagacaaaaaagataagcggccg

SEQ ID NO: 105191 - DNA, 568 bp, Zea mays
  Clone ID: MRT4577_27435C.1
gccgggggcgttgggcctaggtgtggctctacgtgacagacttctgcctcgggcagtggctaggcatgagccgcgatcgcgaccgcgatccggcggtgaatacattctgggcgagcgtcccgaggcggatccaccggcgacgactacttaagagcactgcgatggaagggtttggcttgctggcgcgggtggctgcaatccatgcatgcgctcccaagagcctcgtggacccatgcgcggcctctgcggggacctgcgggcgcctatgactactacttctgccccttctcagcgcctacaggacagggacctggatctcgcacttgcctcctgcttacgcgctgagggggcgagcgcgaacttctccttgcacctcatgacgtcagagtgacctagaggacgcgcgctgacttgttggttgctcctctgtccacctaatccgatccttgaatgaggcgcatcatgaaccgaccaaccaggcgatgcgaggagatgccgtgctacacgatggggaactgacctcagactcgtaacactctgtcgtggatgcctagccaggaaagagctt

SEQ ID NO: 105192 - DNA, 682 bp, Zea mays
  Clone ID: MRT4577_27436C.1
ggccgggccgggcaatcatataagaagcacagctgattccgctgttttcctctcccctcgcctcctcccgtccccctaaggtatccgaagagaggaatcacaaagacgatcgtctcctccgggtgaaggaagcctggagcacaacgaggatgagtgccacgacacctacggacccatcctctgcatcaataactgtggcttcttcaacagcgcggtgaccatgaacatgtgatctatctgccacgaggagatgataactgagcaggagcttgccatgctggatgtctcctctatcgacagcatcacgaacgagaactatcggctccatggagccgtactggagctggcatgaacaccgcaacatgtgctgcccaaaccgagatgccaacaatgaacgtgcagcagcccgatgatgctgccagacccagctcagggggtggcggcgatctccacaggatgaaagtatggacaaaccgacgcagcgcctgcaggaagagggtagggatcacggcattcaactgcccgagtgcgaaattgtactgtgcgctgcaccgctactccgacaagcacgaatgaaagatctactaccggactgctgcgatggacggcattgccgatgctagtccgatggataacgcacacaagctctacaagatctaggcccgattacctacggttgttg

SEQ ID NO: 105193 - DNA, 121 bp, Zea mays
  Clone ID: MRT4577_27437C.1
cccgcgtccgataacacgaccgcagtaaacttacaggatagaattacaacctggcacacgaagaccagggaggcatacaaaaggaagctggaactgaaatgcacagagatgtaaccgcagc

SEQ ID NO: 105194 - DNA, 353 bp, Zea mays
  Clone ID: MRT4577_27438C.1
ggggggataaaaggctaaacctaacactagtttttgacaaggccccgaaacccaaacaacaaccaaaaaaaacaaccccgggaaaggacgaggctcgacaatggcaacaaaaaccctaacaaaaacccgaaaaaaaaggggaaaattcggggaccaaatcaaacaccaacaaaaacactacccatgggaaaaccaccggcaaaaacaccattccatcccccatagcagcgccccgggaacagcccccagaaaaggccgccaactgggccgccaccccgggcaggccgccttatggggaaaaaaatcccacaaaaactggccccacagacagagcaaacaaccccggagggaac

SEQ ID NO: 105195 - DNA, 630 bp, Zea mays
  unsure (1)..(630): unsure at all n locations
  Clone ID: MRT4577_27439C.1
ggccgcagcaggnacgacagcccgaaaccagtgggcaaacaaaggattcggctcgagtgatcctgtcgggcgggcagcaggaccgtggcgccgcggacgagcccgacggcgaggaggacgacgactacaagcacatgacggacgcgatgtgccgtgtgtacagcaacgcgcccagggaattcaccatcatcgacaggggcaggaggaactccgtttgcttgcacaggaaggggttcgaggagctgtacgtcttcagccccggatcccagtaccagtggtacggcaagtatgcctacgtggtcgtagggcctgccatgctggagcctgtgatgctgaagcccggagacacgtggcggggggctcagtacctgcgcaaccccaatctttaggcatgctagcagctgggagaattgatgaccctggacacatcaaatgttcccgtacgtgtatccagatcatcagatgaggtcaggcgagatgcaaaattggcaaccacaatggtctacagatgttggaaatgctgtccatatatagcgaattgctgatgacaaggttcaatattagaatgatgagatttactatatctaaaaaaaaaaaaaaaaaaaaagggcggccgccaccgcggtggag

SEQ ID NO: 105196 - DNA, 1352 bp, Zea mays
  Clone ID: MRT4577_2743C.1
cattgggtaccctcgaggccggccgggaggacgtcccacccctcctgcatttcaaataatatctccctgcgcttttcctagccctttgtcatccaaggaaacaataaacaaccggcgcttttacacccccgccaagaacaggagcaacaacaacaaggctcctcgcaacaatccattctcatccatggcgaagctcatgaacaagctggtcgattcgttcgagcacgacgagataccggacgtcggctgcgtgcgcgccgtgctggccgagctcgtcctcaccttcctcttcgtcttcaccggcgtctccgccgccatggccgccggatccgacgggaagcccggcgacgctatgccgatggcgacgctggcggcggtggcaatcgcgcacgcgctggccgctggcgtcctggtgacggccgggttccacgtctccggcggccacctgaaccccgcggtgacggtggggctcatggtgcgcggccacatcaccaagctccgggcggtgctgtacgtcgccgcccagctgctggcctcctccgccgcctgcgtcctcctccgcttcctcagcggcggcatggtgaccccggtgcacgccctgggcaggggcatcagcccgatgcagggcctggtgatggaggtgatcctcaccttctccctgctcttcgtcacctacgccatgatcctggacccgcggagccaggtccgcgccatcggcccgctgctgacgggcctcatcgtcggcgccaacagcctcgccggcggcaacttcaccggcgcgtccatgaacccggcacgctccttcggcccggccctggccaccggggactggacaaaccactgggtctactggatcggcccgctgctcggtgggcccctggcaggcttcgtgtacgagtcgctgttcctggtgcacaagacgcacgatccgctgctcaatggggaaatctgacgaccatcagcccctgtgctgtggcgcatgatgcttcatgcttgtttctgtaaaacaggtcatttatctgcaagcatggtacatatattggccacggtaattagagaggcttgctgtaaagcagtaggattgctggctgtagaaattgttgatgcgcttttctttttgggttttcctgccaaggaattctttcttttatataatctcaaaaaagattatttttttgtatgggctgggttctaatgttctatcaagggtttgttaaggttattagtttaccatgtagcagaaaaactagtgggacgtgaagttttttcacgtacattgtaatactttggtatgtttgtctaccagatgaaactggaagtacagagcaaaaaaaaaaaaaaaaaaagcggcc

SEQ ID NO: 105197 - DNA, 184 bp, Zea mays
  unsure (1)..(184): unsure at all n locations
  Clone ID: MRT4577_27440C.1
cccgcggccccgttccggatttcccgcacgcgtccaggcgtaacgacataagcggaggaggcggatcacaagcaggcgaaggcgagggtccgagggaaggtgcaccagccatggctcacctaaccttntaccgaaactatggcaagacgttcaagacaccaacgcgctcttatgagaaggagcg

SEQ ID NO: 105198 - DNA, 166 bp, Zea mays
  Clone ID: MRT4577_27441C.1
cccttttgctgtctacctcccgatgtctcagagttgttgtagacgataaagggtgacaggcgcaaacgcccctacaaggtgccggtagtcttccagagcggtgcgacccagcccgtggaggactaaatcttggagattccctcactcgaaaatttcctgaagaatt

SEQ ID NO: 105199 - DNA, 686 bp, Zea mays
  Clone ID: MRT4577_27442C.1
gccggccgggcctcggaacatcagacacgtcgcctgctactagtttgtagaggtacctacaacaggaaggaaaaccgtcgtcgacgcgccttccattccagtactcgtggaggaaacgaacaccagccgatgccttggttacgtcaaggactgccgccgccgaggtgtccccgccgtccgtggtcgtttcttccgcctggaagcctgtctcctgcggctcgctttgtgtctgttccgctgcgtctacgtgcgcgtgcggtccgtgtggtcgcgcgttgagctgatcccgtctctgattgatcagtgctgagcacggagtgccgctcttcctgtgccgcttctatcttcttcaacttccagcgagcataacgtggcgaagcaagtgtaccgagcgagaccgctaagacgcacttctacttacgagctactagagcgccaaggagttctcaatcctgctcaaatcctacgacacccgtgggattctagctcggtgacgtgctcgcctgtggatcgttcgggcacatcgattcctactacttcctgcgccacctcattgaacggatacgactgcaacttcttctgagcgaccgactgcaggcatgttcttgagcctgcctgtttctactctgtgtgtgatgagccatatatctgatgatcaagcattggataatttgagctacctgaat

SEQ ID NO: 105200 - DNA, 578 bp, Zea mays
  Clone ID: MRT4577_27443C.1
gtggcccccggggcggaggccacccgacgaggagcccagactacgacgactgaggcggctatggcggtttcacaggtatcagagctcccagcctgcggcgcgcgagctttataatttttatatctggaatcaaaacactgaacatcgggccacagttttacaactgacaaagcggtgactcttcccaccttcacattttaaaactttatccccatttccccttttgcccttttggcaaataggcaaaaagcgatcagccttccccctatctaaacattcagcatgtctaatgggaaaatggctaccgcctcgcaccctgcaataaagcagtaggggttgcgggtatcctgaccactaaacttgtcacttttccagtgcccaacgccctagctttctgtcctttctctttctttccttccgccggctccccgttttaccccttaaatcttaaaattcgtaaccggtttcgagttacaggtttacggtttatgggcccccgacccctaaaaaacgagatagtgaacggggtgagcgatcgccctgtgggccattaaaacggtcttcggcctttgggccta

SEQ ID NO: 105201 - DNA, 830 bp, Zea mays
  unsure (1)..(830): unsure at all n locations
  Clone ID: MRT4577_27444C.1
gtttcctccctctctcacggtcctcctactactccccacccccaccacagcgacgcatcaccgcgggaagcacgcaccggcttaggcatcccaagctccctagtccccttcccaccccacacggcgagatcttggtctgatctcgctagcgcgtggtcagatccaccacacccgctcaccaagccatcgcgcggcggagacccgatgtcggcggcggtcgaggagcagatggtagtgaaagcgatccgggaggagtgcccgtgggagtccctccccaagcgtctccagtccactctccacaccaaggacgagtggcaccgcaggattgtcgattattgcatccgaaaacgattacaatggaatacctgctttgcccgtcgagtttacagggaaggggaatactatgaagaaatgatgcgctatctccagcgcaatcttgcattatacccataccatcttgcagactatatatgccgagtattgaggatctcaccattcagatattactgtgacatcctgttcgaaactatgaagaacgaacaaccatatgatagtattccaaacttcactgctgctgatgccctaaggctgactggtattggaagaaatgaatttattgatactatgaacaaatgcagatcaaagaaactaatgtggaagctgaacaaatcaatcgcaaaagatttactgcctacacagcctgttgacttcccaatcgangcttggntggggagtttgtctggttaactttacattggaaagagtcaagaaactttcagaagaagaaacagcaccatagacaaaatctgcaaagaggaagccaattcata

SEQ ID NO: 105202 - DNA, 264 bp, Zea mays
  Clone ID: MRT4577_27445C.1
ctaggcctctcttttgttgctgcgttgtctcatacactgtggacggtggctctgtccttgcaacccaaaccttatagtctcacgcctggacctatgcgcgttctgaccggaagtacacaggagtgtctacctttggtgcactgactcacatgagcgacccgacatacgcgcatagtgctgatgggctacctccgtaccatgtagagggtgctacagaccttcatagccgaagatggcggagtggaccttgtggggctcgtacta

SEQ ID NO: 105203 - DNA, 147 bp, Zea mays
  Clone ID: MRT4577_27446C.1
ctccgcgcactcacccaactcgccgccgacgctgtcaacgccgcctgctgccgcagccgccatgggagcgtacaagtgtgtgtcggaactatcgatgcatgaagagctctcatgtgatgcgctacctgcaccgactagcgctggtgg

SEQ ID NO: 105204 - DNA, 395 bp, Zea mays
  Clone ID: MRT4577_27447C.1
acccaaacttcttacaaaggaacccaattccgcaaccgtcagcctatttcaatagccccccttgcctatactataccctccatcaatgaaaccttcttatgatacacctcaagctaagaccgtcttcctatacaacaaatccaacgccgaaatactcctccctcatcacaagtccacaagcatagatggtggcgagaagaaggctaagaagaaggcaaagaagtcggtggaaacgtacaatatctacatcttcaaggtgctgaatcaagtgctcccggacattggcatctcgtccaaggccatgtccatcatgaactccttcatcaacgacatcttcgagaagctggctgcggatgcaatcaatctgtcgctctacaactagaagcctaccatta

SEQ ID NO: 105205 - DNA, 191 bp, Zea mays
  Clone ID: MRT4577_27448C.1
gccacactatttactcaactatagaggagtacccgcccaacgtcaacggactggggctcttgccctataccatcttctcctccaatctcctcagtttcaacatcatccactaatactgataaatccatcgcgaagggtattcttttgatcgacttcaagcacattttataatacatgcacttggaaactct

SEQ ID NO: 105206 - DNA, 252 bp, Zea mays
  Clone ID: MRT4577_27449C.1
gtctgatttgcttcttctctctctccggttcaccttcaatcactcaagcttatcctcttagctggaggctctatcaacccatccaaatccctcctgtagacattagactcctcatcttcaccatggccattgctgggtccagaccaccactgcctgacaaccccttagcacctacggcgaagacctcgactccaacattatcctccatcgagacacgcacaggccccgccgattctgattcttaaccttatg

SEQ ID NO: 105207 - DNA, 1310 bp, Zea mays
  unsure (1)..(1310): unsure at all n locations
  Clone ID: MRT4577_2744C.1
gggtacctcgaggccggccggggcccacttccccccctcctgatttcaaaaatatctccctgcgcttttcctagccctttgtcatccaaggaaacaataaacaaccggcgcttttacacccccgccaagaacaggagcaacaacaacaaggctcctcgcaacaatccattctcatccatggcgaagctcatgaacaagctggtcgattcgttcgagcacgacgagataccggacgtcggctgcgtgcgcgccgtgctggccgagctcgtcctcaccttcctcttcgtcttcaccggcgtctccgccgccatggccgccggatccgacgggaagcccggcgacgctatgccgatggcgacgctggcggcggtggctatcgcgcacgcgctggccgctggcgtcctggtgacggccgggttccacgtctccggcggctctcacctgaaccccgcggtgacggtggggctcatggtgcgcggccacatcaccaagctccgggcggtgctgtacgtcgccgcccagctgctggcctcctccgccgcctgcgtcctcctccgcttcctcagcggcggcatggtgaccccggtgcacgccctgggcaggggcatcagcccgatgcagggcctggtgatggaggtgatcctcaccttctccctgctcttcgtcacctacgccatgatcctggacccgcggagccaggtccgcgccatcggcccgctgctgacgggcctcatcgtcggcgccaacagcctcgccggcggcaacttcaccggcgcgtccatgaacccggcacgctccttcggcccggccctggccaccggggactggacaaaccactgggtctactggatcggcccgctgctcggtgggcccctggcaggcttcgtgtacgagtcgctgttcctggtgcagaagatgcacgagccgctgctcaatggggaagtctgacgaccatcagcaccttcatgcttgtttctgtaaaacaggtcattatctgcaagcatggtacatacattggccaaggtaattagagaggcttgctgtaaagcagtaggattgctggctgtagaaattgttgatgggctttttttgggggtttcctgccaaggaattctttcttttatataatctcaaaaaagttttttttttttggtatgggctgggttctatcaagggtttgttaaggctattagtttaccatgtagcagaaaaactagtgggacgtgaagttttttcacgtacattgnaaatactttgggatttttgtctaccagatgaaactgggagtacangagcaaaacttctctact

SEQ ID NO: 105208 - DNA, 499 bp, Zea mays
  Clone ID: MRT4577_27450C.1
aggcaatataactgaaaaagctaatataaaatgcttaaatggacatttaattttacccaaatccaaaattttactggaagggggggcataaaggtttttggaggtgccctaaaatccccaaaaaagggtataaaaaattttaggggggcaaaaatacaggagccacgattcggttaaaaaaaatttgttggaaaatgtttggtaaaaggacttgagctgagtattccaattggggaagggattggactttctaaaccccttggaccttttttcaagctttaaaaaattgttgacctggtctatggggccttggattcggttggccaagatgagcgataccaaaaggtggttcaaattctttttcgggaaaatgagttcctgcaaaaagaaaggaatcctgattcgggtatacgggttaataaacttgaacaacacttgggttctgatgttcttaaaaagatcctcaatatagttaccgataaaaggatcaaccattatt

SEQ ID NO: 105209 - DNA, 370 bp, Zea mays
  unsure (1)..(370): unsure at all n locations
  Clone ID: MRT4577_27451C.1
ggccgggtcccgaacagaagcgagagagaaccggtttaccaacagagggaccgaccccgccgccggncgcccaccatcnccncgccgctttttctccacacacggggaagaancaagaagagccgnggnggaagagccggcggcggccaaagaccccggggaaaccccanaggaagcggngagccccccaaaccagcagnggcaccagcngcaagagccccaccagncagagaaaccaacngcggcaaagacggaggcgaccaagcagggcgcngccggggncaccagccaaaccaacaacgaccacagggccggaggggcagaacaccggcaacaacccaaacggacccgaccaacaaccaaaggccac

SEQ ID NO: 105210 - DNA, 302 bp, Zea mays
  Clone ID: MRT4577_27452C.1
tcgctcgtagagaggaaggaaaatattcccaaaccctaacttccgatcttgatggggaaaccttgcgttttctttgacattgccggcgggggggcccccgggggcccgattgggattgaactttacccccaccaaggggccaaaaacggggagaactttcccgcgctttgcaccggccaaaaagggcttggccaattccgggaagcggttcaattcaaagggttcaactttcaacggggtattcccgaagttatggtgcaagggcggggatttaacccggggaaacggaaccggggggaggt

SEQ ID NO: 105211 - DNA, 163 bp, Zea mays
  Clone ID: MRT4577_27453C.1
ctcaggagtccgagcgcgcgggtgagcagatcgatgaggcggcgtctgatgctgagtacagctaattcagtcgagcgcctcgcctgagccacagacgaccacttcctacacaacgcgcttcagcacctaccgtgcaagacctacagtccaagatcatgctacc

SEQ ID NO: 105212 - DNA, 1038 bp, Zea mays
  Clone ID: MRT4577_27454C.1
gcacgagccatcacacacgacacaaccccactcaaccggcagggaggccctcttcgtcggcggaggccatggtttccctcaagccgcagaagaggctcgccgcgggagtcctaaaatgtggcaaggggaaggtgtggctcgaccccaacgaggtctacgagatctcgatggccaactcgcgtcagaacattcgtaagctggtgaaggatggattcataattaagaagccacagaaaatccactcaaggtcccgggcaaggagggcccatgaggccaagcagaaggggaggcactcgggttacggtaagcgcaggggtaccagggaggctaggctccccaccaaaatcctttggatgcgcaggatgcgtgtcctcaggcgtctgctgcgcaagtaccgtgaagcaaagaaaatcgacaagcacatgtaccatgatatgtacatgaaagtaaaaggaaacatgtttaaaaataagagggtactcatggagagcatccacaagtcaaaggccgagaaggccagagagaagactctctcggatcagtttgaggccaagcgggccaagagcaaggcttcccgtgagagaaagatcgcaaggagggaggagagattggctcagggcccaagggaacctgcggcagcaccagtatcagctactgctccggctgcagctgcaccaaagaaggcgaagaagtgaaaagggtgatcttctagttctaggacctaattttggagcgccccaactcttttgctgttacatatccaagctgtcagatatctgtaataacatcttagacttgtttgtcccaagtttatttggaacgaattttcacagaatctgcttaatgcttcggtggaacccagttctggttttgctattttaccgtgtagatctggccgctgtggctagcctccgtgcttttttgcttcgatgttccataaccttgtctggtgttgactcgcgatgacgcaggttttgtagtgttctttggtgaattatgagctctgatgtgatattgatacgtgggccgtcccatttc

SEQ ID NO: 105213 - DNA, 946 bp, Zea mays
  unsure (1)..(946): unsure at all n locations
  Clone ID: MRT4577_27455C.1
ttgggaccctcgaggccggccgggggacttggtgcgccatcacacacaagacacaaccccactcacccggcagggaggtcctcttcgtcggcggaggccatggtttccctcaagccgcagaagaggctcgccgcgggagtcctaaaatgtggcaaggggaaggtgtggctcgaccccaacgaggtctacgagatctcgatggccaactcgcgccagaacattcgtaagctggtgaaggatggattcataattaagaagccacagaaaatccactcaaggtcccgggcaaggagggcccatgaggccaagcagaaggggaggcactcgggttacggtaagcgcaggggtaccagggaggctaggctccccaccaagatcctttggatgcgcaggatgcgtgtcctcaggcgtctgctgcgcaagtaccgtgaagcaaagaaaatcgacaaacacatgtaccacgatatgtatatgaaagtaaaaggaaacatgtttaaaaataagagggtactcatggagagcatccacaagtcaaaggccgagaaggccagagagaagactctctcggatcagtttgaggccaagcgggccaagagcaaggcttcccgtgagagaaagattgcaaggagggaggagagattggctcagggcccaagggaacctgcggcagcaccagtatcagctactgctccggctgcagctgcaccaaagaaggcgaagaagtgaaaagggtgatcttctagttctaggacctaattttggagcgccccaactcttttgctgttacataaccaagctgtcagatatctgtaataacatcttatctcgtgtgtcatgttggccaatgtagtagacttgtttgtcccaagtttatttggaacgaattttcccagaatctgcttaatgcttcggtggcccccagttatggttcggcgaaacncaccat

SEQ ID NO: 105214 - DNA, 1175 bp, Zea mays
  Clone ID: MRT4577_27456C.1
ggtggcacggcccggggggggcggtataatagcaaaaagctcctcccagcagtgcacgcgtgaagctcggcggcggccggcacggtgcatcctccgctcttgcctcacctcccggtccatcctcgctgctcacgcgtgcctcacctcgacagcagccttccctcgcgacagggataaggacttaaggaggcgtcgctcggtgcaaagaatccatggcatggggaggtctgttcttgtgcatgggccgccccacgcaggagcaacagaagtcctgccttgcagccgctggtggcttcaactacgacacagctctccaaggcgccacacgcccaaagtcagtgtctaccttgacctctgacgaagctggtggcgaaataggtgacaaggatcttaccgagcgtggattctttgtgaaccgatcgcgtgttctggtcggctcaggttctgacgcctttgtccatgccaaatctgccctcctctcatggaggaactggtggttttcaggcacttggctttagggtgggcgaacgtggaaccggacaccccggtgaaggtaggtacaaggttctgcatctgctacaaggagttgatcccctgggtgacgctgccgcttcagatagcgtatgtgaccgacgtcgattcagacacgtccaaagggtgctcccggtccaagatgtttgccttcggcagcggcactctacagggccatctgctggccggagaggagcggttctcggtacaggtggacgaggaggagagggtgtggtacgaggtgctttctttctcgaagccggcgcacgtcctggcgacgctgtgctacccgtatgtgcagctgaggcagaagcatttcgcgcagcagtcgggacaggcgctcgtcaggcatgtgtccacctgctcttccaagcagaagcagtagtagagctttgtggagatgcactgcacagagaatgctgtatgtattccccctttgaattctattccgacatggcctggtttggcggcgctggggcctgggtgggatgatatatgttcgggcattccgagtggagtttgcccatcccatattttaatttcttcatgatggtggtggatctgttgcagctgaatgaattaagacaggaagatatataaaattcatgcgcacacagaatggcccaaaaaaaaaaaaaaaaaaa

SEQ ID NO: 105215 - DNA, 1179 bp, Zea mays
  Clone ID: MRT4577_27457C.1
aggaaaaattttatcacaactatatctacaaatcaaacacacatctaaaccagttaaccacaaaaactttggttggcaaaaaagaaaaaataaaaatatagacttgtgcgccatcacacacaagacacaaccccactcacccggcagggaggccctcttcgtcggcggaggccatggtttccctcaagccgcagaagaggctcgccgcgggagtcctaaaatgtggcaaggggaaggtgtggcttgaccccaacgaggtctacgagatctcacggtaagcgcaggggtaccaggggatggctaactcgcgtcagaacattcgtaagctggtgaaggatggattcataattaagaagccacagaaaatccactcaaggtcccgggcaaggagggcccatgaggccaagcagaaggggaggcactctggttacggtaagcgcaggggtaccagggaggctaggctccccaccaagatcctttggatgcgcaggatgcgtgtcctcaggcgtctgctgcgcaagtatcgtgaagcaaagaaaatcgacaaacacatgtaccacgatatgtatatgaaagtaaaaggaaacatgtttaaaaataagagggtactcatggagagcatccacaagtcaaaggccgagaaggccagagagaagactctctcggatcagtttgaggccaagcgagccaagagcaaggcttcccgtgagagaaagattgcaaggagggaggagagattggctcagggcccaagggaacctgcggcagcaccagtatcagctactgctccgtttgcagctgcaccaaagaaggcgaagaagtgaaaaaggtggtcttctagttctaggacctaattttggagcgccccaactcttttgctgttacatatccaagctgtcagatatctgtaataacatcttatctcgtttttcatgttggacaatgtagtagagttgtttgtcccaagtgtatttggaacgaattttcacagaatctgcttaatgcttcggtggaacccagttctggttttgctattttaccttgtagatctggccgctgtggctagcctccgtgcttttttgcttcgatgttccataaccttgtctggtgttgacccgcgatgacgcaggttttgtagtgttctttggtgaattatgagctctgatgtgatattgaaaa

SEQ ID NO: 105216 - DNA, 352 bp, Zea mays
  Clone ID: MRT4577_27458C.1
agaggaaccatattcctctcctgtcacgagagacagatcggcaccccatctcttggtgactgtcgttcgctacaggatgaccgcaaagctttatttagcgctggtcgcagtcagtgtcactcatatggttgttagagctcatgctcagggatttctgaatgctgaggccttggatcttctcgctcccaaggccaccggcaggaaatcacaaacgggagaagttctatggtgtaacacccttgtacttgcacagttttacagcaaatcaaatgatatcagagtagcaggaagtaccatgttttaactcctctttctgatcaatggactcttaggaccaattttgaggcaaaac

SEQ ID NO: 105217 - DNA, 231 bp, Zea mays
  unsure (1)..(231): unsure at all n locations
  Clone ID: MRT4577_27459C.1
gctcgagatgcagccatatggaagactatgatatggttcacacgtcatctgtgtacctatggaaactatctgaatatttgttttatatgcatttttattcactcttcagacacgctactcaagaatgccactaatctgctgaacaagcatttgtagcttgtacaatggcagaatgggccaaaagcttagtgttgtgacctggttntaaaataaagtatctgtgaataatta

SEQ ID NO: 105218 - DNA, 857 bp, Zea mays
  unsure (1)..(857): unsure at all n locations
  Clone ID: MRT4577_2745C.1
aatgatcggnttcggggctgcacgtttcagnagggaatatagtagctcaagttgataggccatatatggctgaggacaatctggaagcatcgacatgacgccacctcatcgctcgcggaacgcgtggttagttgatggattaatcctgtatccgccactggtgccactgcttcggtgattgcactcagtcctgcgatgtcgacccatctcagttgtcctccagccctaccgtacgcctcgtgttgtcgatggcagcccatgacttcaacatcgacatataccaagagtcggcaattgcatgtgtgtgtggtggtttggtgaagatggagctatggacggagtagagagtgaatcccagttcgacgctcgtgacgaaaaaccaaatccaagaattattggcattcttgcgaattttgagccaggttatttgtgcggagtcccgatgtgtcgctcgccaagggcttgataaaacgactgaaccagaaatccattgccattcttgtgatatcgtgtcgacttggtcttggtaagaaaaattattgtttgtgttagttcggctgatgaatggagtaactagatatcttagttgtgagcattgatatggtcgcaatcgtgattggcaaatcagcatttttgtcgtgtaagctaagtttatgtttgaagatttaggttatgcgatagggattaaattggtgtttcgtatccaatgtgtcacacgcgtatccaatgtgtcacacctggatccaagacccggacgcgaacataaacaccaagtgtgctgagaccaagtctcacacatatgatgactcatggtatagaaacgaatgttacatcatttatatataacatagttctat

SEQ ID NO: 105219 - DNA, 354 bp, Zea mays
  Clone ID: MRT4577_27460C.1
gcgtgcccaacactttgactatcaggcgctcaggtctaccaagtggctgcctccaccatggcgatctcctccacggagatggccgggacccccatcaggggggaatccttccgtgagggccgcatcaccatgcgcaagaccgtgggcaagcccaaggtggtggcgtccgggagcccctggtacggccccgaccgcgacaagtacctcgggcccttctccggcgagaccccgagctaactcaccgcagagatccccggcgactacggctgggacaccgtcgggatgaccgccgaacccaagatcttcgacaggaaccgcgagttggaggtgatgcactccagctgggccatgctc

SEQ ID NO: 105220 - DNA, 399 bp, Zea mays
  Clone ID: MRT4577_27461C.1
attcggctcgagccgacctcgactggtagcttttcggagcgggtgcgccagcaccatggacccggaagtggtacggaacagcctgaagaccacggtagctgcagacaaaatcaccgtatgcaccactacgcggctccacttgtacgagcactccgtactcatcggagtcagtatcaaagacctacgaacgcggtgaacttctgtgattctttgacgacacccctggtcttgtgagtcccgcggagtacctgagattaggtgatacagtgacactcgccaaccaggtgggatcggacggggttttatcaagcggactcacgatgggcggggtatccctagacatcatcgcatactctgttgacgcggctgccatgggataagaaatagaagtcgagggaa

SEQ ID NO: 105221 - DNA, 410 bp, Zea mays
  Clone ID: MRT4577_27462C.1
ggaaggaactgctaaaagtcgcagcccacatgtataatgtagacagcaccatggagcctattggaaggcttctatgcgggtgcgaggacgcttcaagggctgtgaaagaccggcgtacacctgggagaacctctggttgattattggagctgcctcaagtccatacatccgactctcgacgcccgaagcgggtccttggagacaaatggccatgaacaacatcccaaccttagcaaacatgccagcgctggcatccttactgaagcggatctaatgtggactgtcaggactgtggatctttcaccccaacccctgtagctctatctacaagggtggtagcgcttaagaaccctacgtgacgcgatctccgtgacactacacctcaaaggaggtcttagttcctgaaccac

SEQ ID NO: 105222 - DNA, 153 bp, Zea mays
  Clone ID: MRT4577_27463C.1
atggatcctaagggaaaggggatggtggccaacgacaagaaaaatgagtctgtcctcaacgagccaagagaggacaagcctactgactcaggctcgagtcaaaagaagagagaagggaaaaagaagaggcgcattaagaagatcatctactaa

SEQ ID NO: 105223 - DNA, 230 bp, Zea mays
  Clone ID: MRT4577_27464C.1
cgctcggggtacagctaatatccccatgcccacgactcggcctagatctccggcgagccggacccgcgcggcagccgatctcactctccgaccccgacccgatgggcggcgaggtgcccgatcccctccctatcggcatctatctcggctccacgtactcttgcgtcggcgtggggcatcccgaccgcgtcgagatcttgggggtgggccggggtaaccgtaccacgccc

SEQ ID NO: 105224 - DNA, 297 bp, Zea mays
  Clone ID: MRT4577_27465C.1
cacaaaagacattaattcagactgtataccgacagaggaatccacagcatcccagcaaaatcggggggagagagcaaacatccacggggcctgctatctaccgcatacaaacaggtaccctgggccgcatctacgcagctgctaaagaaacacatccaacacccttatgccagcgactactccatagcgcattagacaagcaacgccccggaaaagctaatgccttgacaaacaacacagaacagtggcgcaggccaactagcggtgacgacgagcccctatccgatcagcaacgcc

SEQ ID NO: 105225 - DNA, 354 bp, Zea mays
  Clone ID: MRT4577_27466C.1
ttgtgttttttttttttttttttgcataataagaaaaaatatttattaaaaaaaccaaaacgtcttataatttagaaccaagaaagtaattcgctatgtcacaaatcaacagcactacaaatttacatgttggttctgacaatatgcatgcatgattctgttcctcattcctcactctctagaagttgtgtagtagcatgctggagggctccagcctggtgacattgaagtgctccagtgtgtgtgcccacctcaggtcctgcttcagctggtgcaccccgatggtgttctccaagaagtcttcacctttggcactcttgtagtcatacatcctggggaagatgttcacccgtt

SEQ ID NO: 105226 - DNA, 425 bp, Zea mays
  Clone ID: MRT4577_27467C.1
attcggctcgagggcagatccacatgcagatttgtggagaccacaccttcatccatgcattcgagcggccaaacgttatcaccgggattcatactagtgatcgaatagaaactaggccatcaactcgagagagcgcttttgcagaccgtcctggccctacaggtgtgcatggtggacgatcacgagatacttattttaagatgacatatcaagggccatctgtatgtgttaacgctgggaaccctctgagtccacaagatcagccgtggtcctgacctgagtgacacagcaggcagaatcaagggtgctaatttgcaacgggaacacacaggagattgtcgtgcagaggagccagctctaaggccaggtagcagaccgcaagttcgctctgaccacaggggcttcaagccaagcctgcaggctac

SEQ ID NO: 105227 - DNA, 330 bp, Zea mays
  Clone ID: MRT4577_27468C.1
gtgctaatataataaatgctgaggtgattgataattccaggtggagatgaagggtctgcaatcactggacctatcgggatggagatgcgctgaccttgggcctagacatctccagtacagcaaacgccatcgcctgagagctagttgtaatgtgattaaacttgaatcatgagcatgtaaattgtgtgctgcatgtggtgtaagggtgctattggacttgatggatccttaaatgatgggtcactaaataatgacatgaacagaaatttctggttgcctcaagtttgcatgactgagatgcttatgttgactgaaagaaaaggagacagt

SEQ ID NO: 105228 - DNA, 358 bp, Zea mays
  Clone ID: MRT4577_27469C.1
ggggcctcaagggcaactgaagaaccattttattttgctgccggcaacaattgatttcatatacaaggcacaactgattcccgggtgaaccggtcccagtttttaccacttggtccggccccacttggaaggttgcatcaacttacaccggtttttctctccgatttaattgcttcgtaagacttgacaacccccttgaactttttttctggaggatctctattaatttgattttggtcaggaagcactttcatcgtttttgttctaaaagcagtcttcacttttggatttggatatgggggcgctcgggatctggcaagacctaaaactgctaaggatgggacataagataaaccct

SEQ ID NO: 105229 - DNA, 400 bp, Zea mays
  unsure (1)..(400): unsure at all n locations
  Clone ID: MRT4577_2746C.1
gaatttcccgggtgcgacgccacgtcgtctcggctcaaccttangtattattccacaccttaaaatatttattatgtcttagtacatgatctccatctnntatcttagagaagaggtctnnnctcttanntcttaagtgngatggtcgatcttaaatcttgaatnnaatatttctatcttaatttcaaattctgatcctttagatcccactctatatctatacccatgtaagttatgatatatgcctggtcgacataaataaaatattagtgcccatttaattctatataaccatnnntcttatccctaaattaataccctttggacttaatcccgtcccataatacaacataccctaactctacattccataggtttggtctaaatccaattttgtttc

SEQ ID NO: 105230 - DNA, 1518 bp, Zea mays
  Clone ID: MRT4577_27470C.1
cggacgcgtgggcggacgcgtgggcggacgcgtggggccgcggcgggacacaccgcctccgccgaactaacgcgacgacgacgcacggcggcctcgtccggcaccggcaggagcgcgatggggcagaagcgcgccttgctggtgggcatcaactacctgggcacggacggggagctgaagggatgcctcaacgacgtggcccgcatgcgccgctgcctggtgggccgcttcgggttcgacgaggccgacatccgtgtcctggccgacgccgacccgtccacgccgccgcccactggggccaacatccggctggagctcgagcggctcgtggcgggcgcgcgccccggggacgcgctcttcttccactacagcggccacggcctgcagctccccgccgagactggggaggacgacgacaccgggtacgacgagtgcatcgtgccatgcgacctcaacttgatcaaagaccaagatttcacggatcttgtggccaaggtccctgacggctgccgcttcaccatggtctcggactcgtgccacagcggcggcctgatcgacaagaccaaggagcaaatcgggaacagcaccaagcagaacagaacccagcagcgccgagagcgcgaaatgaagcctcctcctcccgctcccggttccgcactccgcgtctccctcgcgcgaatcgtccgtggcgtgctggagtctctggggtgcatccactgcagtcgttgccgtgtccagcagcagggcaacagcaatagcagcagcatcagcaaccggtcgctgccgctgtcgacgttcatccagatgctcagggacaagaccggaaggcacgacgtcggcgtgggctccatccgcacgacgctgttccaccacttcggcgacgaggcgagccccaaggtcaagaggttcatgaaggccatgctgttaggcaagctccggcacgacggcaaggaagcggaggagcagtcgcgcgttcccagggaggcagaggtggaggagaccctggcgcaggacgcgcacagcgtcgaggaagtgtacgcggggccggctgcggcggcggcggcggccagggtgccgccgcgcaacggcgtcctgatcagcgggtgccagacggacgagacctcggcggacgcgaccacggccgacggcatgtcctacggcgcgctgagcaacgtgatccagaccatcctcgccggggacggcaagaagcgcggcgtggcgctggcggtgacgaaccgagagctggtggtccgggcgcgggagctgctgtccaggcaggggtacacgcagcagcccgggctctactgcagcgacgagcacgccacgctgcccttcatctgctgaagacgaaataaactccgtgtacagtgaatttcaggcttcattagttcattttacgggatgctacgttgtgttgtgtgtgtaacagaattgacactttgtgttgactcgtggtgtgccgcagcctgcgtatgttatggtgttactgttacgttgttacctgatgacgttgccctt

SEQ ID NO: 105231 - DNA, 429 bp, Zea mays
  unsure (1)..(429): unsure at all n locations
  Clone ID: MRT4577_27471C.1
tttgttgagtgggtggggggggggggggggtnngatcttctattctgtgggggggnngttgtcnttcnnnntgtgntnttcatggattttctgcgccctggggggtgccgattcgggttgtttccgggtgcttcggtgggggctgctccncgnnatttatgcgctggggtggggtcttttgtttttgcgtatttttaaaactgggaacggtctgcgtctggctgtggggtttgtgtcagggtgctgtntttnntgggcatgtcntgttggtgcgtcttggtggggttttnngatcttgcttgttgcgggtgtttccataggttttttgttggtggtttttgctggcgagttcatcctggtgccgtgtggttgtgttgtagtgggttggggtgggggggggcgttctggggggtccaagctttcgttcgg

SEQ ID NO: 105232 - DNA, 354 bp, Zea mays
  unsure (1)..(354): unsure at all n locations
  Clone ID: MRT4577_27472C.1
ngagtacaagcttttttttttttttttttttttttttttttgtacaagctttttttttttttttttttttttttttttattttttttttttttttttttttttttttttttttttaaacacatacatcaaattttttttgaatcaaccccttgtcccaaagagggatagtaaatcgagacagggggggtttttttgtaaaaaaagggaaaaaagcatccataagggggtaaaacgttttccttttggtaggagccctggtgaaaagcttaaaaacttgttggggatgttgttggaaagccaataaagccccttatacaaccctttaccaaatggagaaaaagggctttggatgt

SEQ ID NO: 105233 - DNA, 346 bp, Zea mays
  Clone ID: MRT4577_27473C.1
cccacgcgttcgggacttacctgacccctagccttttcgcgaagagatgatcgagacatacctcggtactatcgccaaggacgggggtagttctgatgaggccaagaagaggatgtatgatcatacgcccaccacccatgtttgactataggctgctaaaaccgatgacatgccataccgattactcggcatgacggccgttatccacattcagcctgacacatatctatagccattcacgaaggaatacggacgatacaaaaattacattcgcctcattactacgagtccagcacctgtggataataacatagcattgattactgacacgatccccaattaccca

SEQ ID NO: 105234 - DNA, 406 bp, Zea mays
  Clone ID: MRT4577_27474C.1
ggggaaacaccaggcgggggaccaattttttcacatttttttggggaaaccaacgggaaaaattccaggggcccctggaaaaaaggggttaccgccagccccagtaccccaaggaatacacggggcgcacccaaataaaaacctttttattaccacccttttcatttatgaaaaaaaggaaacgggggacatacgggaatcaccgttagctttgtttttttgggggaaacgctggccaggactcgatcgaataaaagggaaatgctgtgggggatccccttgggggggaccccggggttatcgcccttgtcggaggggttgggaaaaaacagggtgtagggaaactggccccccctgaaggggtttttgaagcgggggtccttgtttatggcctccacccgttttt

SEQ ID NO: 105235 - DNA, 218 bp, Zea mays
  Clone ID: MRT4577_27475C.1
attgcaacgcatacatatgggggtacagggggggccaccagataacaatgtgggcgatcaaatcaatgagcacatgctaagctctaatcagatcatgggcctgcatgcaattccaaccttggagccgaaacccgttttgtgtacaccaaaattatgatagagcactcataccatccgcacgccatggctgcttctgatccagcatgcctaaactttac

SEQ ID NO: 105236 - DNA, 463 bp, Zea mays
  Clone ID: MRT4577_27476C.1
cgccgacaatcccttcccgtgctccgcagccgctgatgtgagaacaagagacggccgacaagggggatggcccggctatcggcatctatctcggcacgacgtacatcttgcgtcggcgtgcgctaggacgaccgcgtcgagatcattgccaacgaccagggtaaccgcaccactccctcgtacgtcgtcttcaccgactccgagcgcctcatcggagatgcgcccaagaaccatgtcgccatgaaccccatcaccaccgcctttgatgtcaagcgcctcatcggcaggaggctccgagacgcgtctgaccacagcgacatcaagctgtggctcttctaggacctttctggccctgaagagaagccaatgattgtcgtccagcacctgggtgaggacaagctatctgcagctgaagagatctcctctatgagtcttatcaaaacgcatgacattgctgaagctt

SEQ ID NO: 105237 - DNA, 345 bp, Zea mays
  Clone ID: MRT4577_27477C.1
ggaaacccgcaagggaaaccaaaccaacataagagcacattcgggattattaaaacatgggggcaagctttctgaaagaaaacagtagatcaaccgcccggaacaggggcaggctcgatgcaggctctagcacttcacaaaggaattggcacacccatgctaagatgtctcgacgcatggaacctgtggagatggacaatacgcacatgcatctatgggataacgcttaggctgactattctatctaggcacactgaatgctggacactatacacaacacctctgctgcagctgagcgaattaccactgcacataccctaattgagctgagcaatattcttgacc

SEQ ID NO: 105238 - DNA, 1128 bp, Zea mays
  Clone ID: MRT4577_27478C.1
ctcgaggtatccgaattcgcggccgcggcgactacaaatcgcagtgcgacgacgcggccggtttctccccaaactttgagtagtgccgctctccgtcgtcctcttcgatctccatcatcgcgccacgtacgtacggtggtcacatccctgtcgaccgcgcgcgttgggagcgcatccggccgtgtgcattagccgcccatggacgacacggagagagaaaaggagaaggagaaggagaagcacgactgcgggacggacgtcgaggacgaagaagaggacgaggaaggcaacaagcgcgtcgtcgtgcttggcccccaggtccccctcaaggaacagctcgagctcgacaaggacgatgagagcctgaggaggtggaaggagcagctccttgggcaggtcgacaccgagcagctaggagaaactgcggagccagaggtcacggtgctggacctgacgatcctgtcgccgggcaggccggacctggtccttcccatcccgttccaggcggacgacaagggctatgcgtttgctctcaaggacggcagcccctacagcttccgcttctccttcgtcgtctccaacaacatcgtgtccggcctcaagtacaccaacactgtctggaagactggcgtcaaagtggagacccagaagatgatgctgggaacgttcagcccccagctagagccctatatctacgagggcgaagaagagacgacacctgctggcatttttgctagaggctcctattccgctaaactaaagtttgttgatgacgatggcaagtgcttcttggagatgagctactactttgagattaggaaggagtggccaggaggccaatgatgtggccggaccagcagggcagagctgactcgtcggagtacgctgttgttagagctcatagcaaaaagccaagcagaaaatatgtgctatcgcttcaagaatgtttcactactttcttcgtcattatcgattgtgttttgatttgtttcgagctgtcattaattgtatgttgtttgtcgcataaggctgtttattcgcatatataattcctgtatccagatattcagacatatttgtgtagttctattgttcaatttctcaacctgatacacatagggttcattt

SEQ ID NO: 105239 - DNA, 305 bp, Zea mays
  Clone ID: MRT4577_27479C.1
ccgatgacgcgcatgaccctgtcacgcgggacatggctcagagcgacaccacggcactcgaccacagcggcgcgcacgcacgatggcgacgacaacccttgatggcgctaccagagggcaggggcagacgcaggcacaagggggaccggaggcaagaggagctgcacgagaacacatgtaccaaactacgcataagcgttaagctcgtcgtacactcctacaccggaagcaaacaccagcaaaccgacagggacggtgagagggaactctgacacagactgctacccgaagtgcgcacccacaag

SEQ ID NO: 105240 - DNA, 361 bp, Zea mays
  Clone ID: MRT4577_2747C.1
atggtaactttggggcatgcaaagatcaggcccataaaaaaacaaattgtatttcaggaactgggccaaaagcggaccaaccaccaaagggaacccaggggggaaaaaaaaaacccccccaaaaaaaaaaattgtttgaacagggcccaccaaaaggggagaacccaattatggagaagtccaacaaaaaccgttttcaagacccttgaaagaacctttttgggaaaaccgaatatcctaaaaggggggaggctaataatcagaacctcaaaaaaaaaaactggaaaacacttggggggcccatccttaaaaaaacaccattcttaaaacaaaggggggggcccaaaaactccccgggggg

SEQ ID NO: 105241 - DNA, 824 bp, Zea mays
  Clone ID: MRT4577_27480C.1
ctactacaaagtacatgaatttacacacctcataaaactggtcttacaattttatcatttttgtacaatttttggcctaatttacaagctctcagctaaataaataagaaaaaaccatttctttatgtgctggaactagcccactgtggcccagcatcgggcagagtcggtctgcggctgggagccctcgtccgcgcctgctcttttgcgcaaagaccctagccgctcaaaaaaatccaacacgcatccttgccactattggctcctctcactgaccacttcacccaaacccctcaacttctctccttttacaaagtctcgaccccgacatggtcgcgcgagctccggcaaaccagcgtttgattaatctgggcggtgcaacgtaatcgacgacaacagcatccccgcgacctccgaaccatggcggacccgggcatgggcgtgaactcactgcgaggacaccacaacccggtcaccgacggcggaaaacgcagcagacgagctcgatctcgcggccaccgtgtggtagaactccaatcaaaggcgtggagagtatcactgatctttgcagagcacggaacattcaccacacgggtgaaaaactccacgagaaagcctggccacggtgaggtggggaatttagtgggcgtggtcaccaactagggagctggcacacagcacaagagcaaatcagatttgggggtttgaaagggaggttacctaggcctgaacactgccacatcactcacacgatgaccacaaatttggagctcaagagtaggggaaaaacttcacaaaaccaaaccctaaggtggctgaacgag

SEQ ID NO: 105242 - DNA, 767 bp, Zea mays
  Clone ID: MRT4577_27481C.1
actctactctgtttggacagcactagagtgagagcaccatcaccaccatgtacaccaatagctccccaacttccttacttctaggcatactcagcatactcttatcaacgcatccccatgtcatcgcgtcgcagtctccgcgcgacaatggcgtgcgcgccaggtccttgtcgacctgcctactggcctccggcgtccgtaacttctccatggccggctctccgggctacgccaccatcttcgacttctccatccagaacctccggttcgcagccccggggttccgcaagccggaggctgtcgtgctgcccacttccaggcgcggcctccagcgcgcggttctctgcgcgcgaagtgcgtcgctggccatccgcgtgcgcagcggcgggcacagctacgagggccagtcctacaccgtctccggcggcgtgctggacggtaaagccccctttgttgtgatcgacctcatgaacctgaacaaggtccgggtccacgccgcgtcagccacggcgtgggcggagtccggtgcgacgctaggcgagccttatcacgcggtggcgcactcctcgccgtcgaaccggtcgtccctggcgttcaccgccgcgtcgtgctccactatcggtttgggcggacacatctccggcggcggcttcgggccgttgtcccggaagttcatgctcgcggcggacaacgtgcttgacgcgctgctcgtcgacgcggtgggcagggtcctggaccgcagagccatgggccgagacgtgttctgg

SEQ ID NO: 105243 - DNA, 275 bp, Zea mays
  Clone ID: MRT4577_27482C.1
cagatacattacagttcacacactctcctgtctcctgtccattcagccattttttgcgtgccaaaaccaaaataactcacatgctgcacctgccggacctcgcggcacctcacaccatgatgggctctgcgctggctgcattggcccgcgtcaagcaaggggaggctgtgacggcgagggggcgggtgctcagggtcgccgaccccgtgcggcgggagtgcctggtgccggtcccgccgccgccggtcctcttcacgttgaggctcggagacgac

SEQ ID NO: 105244 - DNA, 257 bp, Zea mays
  Clone ID: MRT4577_27483C.1
tactgaaattgaattctaaagtcttgaaacattgaggatagactttaattttacacagtgcatcccaagggttaaacatgtgcacatcaactgagatgggatggtcgcaaagaggattttattacgttcttatgatttttgaaaaagtgccagtctgggaaaagtaagtactttgtgtttccgctccgagaaagttttctaggacctgtggatttaacaactttattttctgaactggggtaaatgccaaactggat

SEQ ID NO: 105245 - DNA, 170 bp, Zea mays
  unsure (1)..(170): unsure at all n locations
  Clone ID: MRT4577_27484C.1
acaaaatgcaaaaacattacttatttctctgggggcaataccttaaaacaacctttgtgcaatatcctctaacaatgggaagcgcctagtaaagaaattttccaaacccaaaataatcncccgtgccattggttgcataaacccacggcaataacatcttcttttggagc

SEQ ID NO: 105246 - DNA, 1088 bp, Zea mays
  Clone ID: MRT4577_27485C.1
gacggcataaatataattttctacagtttggcgatcgccgatcgggaccttccctcagccacaggccgacagcccacgccgtcgaacggccggggatccggtacctccgctccgcccccgactccctctcgccggacggctgcagatccggtcaggccgatccgtctcggacccggtggtagcagtggaggaatccgctgccggtcgatcgatcgggagagatgcggcagcagcggggcggggtcggggccgggaggagggaggacgacccggggctcctcacgagagccgtcgacagggcgttccgcttcgtccgcctcgccgagttcgagatcttcttcgtcctcttcttcctcatcgccttctttctcttcaaggacctcatgtcacagcctcaatacaatcagctatttgtcaagaagcctgatctagataacccctggccttagggagtacagaactacatatgtgtataagttgtagcctactagcctggtcttttctttgagttgtgttgcaagtactctttgaagccctgttatcaggagcatgttttatgattagttagaggattctcttcggtgacgatgaatatatttagctagtcattttaatattggtatgtgtgatactgaggttaatgccggcagttatcgtccacgcggtttatgtgttgtgaagtccaatgagctcggcgagatgatcatatgatataagtgcagttctaagtggcatccagtgtttgtaatagttgacagataatgcttgctggaagacaaggtcactgcggtatgacttcagaggttattgctagattacagatttttgtgctttttcatgacagactctgtagttgaaaaatcacgtgaatgtgattccttcgggcacggtaagaactggagctgttttgctgtgtctttgtaactttgtttgcagagtattcttaggggtatttgtttgggattatataatctagacaaattataatcccaaacaaacatctctttatttagccaagtcaattgcaaggataaagaggtgtattatagtgtgttgtacctttgtatgacagcctctttggttgagtt

SEQ ID NO: 105247 - DNA, 388 bp, Zea mays
  Clone ID: MRT4577_27486C.1
tcgcgatctagaactttttttttttttttttttttttttttttttttttttttttttttgggctgggattttaattaatttttacaaaacagcatgccgattgtaccatgtttattattacaatatgtttaatatgccaagattttccacttggacttggcaaccagagtgaattttaagagggcggaaattaccttttccttgggaaaacaaacccttccagtttggcattttcattcaaaactgacaaaacgccaccctcccgaagctgattatttgggggcactcttcaagtgagtgaaaaaaaacccccttaccagtgtttttcattcccgcggcgatgccctttattgtgaggatgagcgtgtttttcaagccgggcgggtac

SEQ ID NO: 105248 - DNA, 293 bp, Zea mays
  Clone ID: MRT4577_27487C.1
ccttctttttttttttttttttttttttttttttttttttttttttctccaaggaccagtttcagaaccccatccccctaaggggctccgatttcccaaaaaaaaattactttattttttcttgggaaaaccggaatcccctagaaaaacggaaattccaacctacccccaaattaaaaacaaaaagcctgaacggggtttcccccttcgtaccaacaaccaaattaagcttttcagattctcggactgaggcttgtgacctgcacccttcgacctgaaagctccaaacttcc

SEQ ID NO: 105249 - DNA, 458 bp, Zea mays
  Clone ID: MRT4577_27488C.1
ggccgcttttttttttttttttttttttttttttttgacatttccaaagacccactggcccataaacggggaaacctagtagcatgtccgacgggatggagcagagtgaaattgtcacataccaacaaccctttaatagtgaattctcaagagccatcggcaaaactcttaatatctactcgtaaacaggaaaaaaaccgcagcctgggtgcaacggtgatgacctatggaacactttgttcacccataaacactaggcttatgcgtgctgaggacccgttatgacttgcggcctttgttgagtcttccgtccaacagaccataaggaattggggggggaatttaggctattttccactggccacaatccacaatactatactaaagacccgaaaaggaataccatcggtggtcagaggtacgacggcattgtcccaccttggcgctttaacattatg

SEQ ID NO: 105250 - DNA, 423 bp, Zea mays
  Clone ID: MRT4577_27489C.1
aaaacaaaacaaagggggcaacattgaattcaaaaaaacgatggcccggttggccctttggtggccctacccccgggacgcccccattagcaggccggggggccgaaaaaaacccccaaacaccccggggcagttggcccaacggggggtttttgggggcgaggggaaattttgaaaaaaaaagcttaatttgcccccgtttttaaccccacacccccgccattgggaaaaatttccgctcccgggaaaccccctttcgaaaccctggggagccccgtttaagggccccaaacccaactttgtcttaaaccaccctttttggtagcccggggcacaccccccaagggagcccacgggctttcccctttggcaaaaaccctggaaacaactggtttgctgacatctgggcccccttaagctcgg

SEQ ID NO: 105251 - DNA, 505 bp, Zea mays
  Clone ID: MRT4577_2748C.1
cgagtacaagctttttttttttttttttttttttttttttttttacctgcccgggcggccggcccgaggggccaatcccaaggcacaggcccaccacactaggggaccccaccaggggacccagcctggggaaaaaacgggcaaaactgatgcccgggggagaatgctatccgaaaacaattccccacaacaaaccaacccaaaacaaaaaccggaaaccccggggggccaaacgggggggccaaatgaaagaaatagcgtagagcaaacgggccgctttcaaggccggaaacccagccggccaaccggaataaccaaacggccaaaccacggggaaaagccgctgggaaaaggggccctcttacagggcccccgtcactgacccggtgcaccgggtcgttccgctggggcgagcgggttcagctaacccaaaggccgcaatacggggagccacaaaagcaggggacaaccccgggaaaaaaccccagaaaaaaacgcccgcaaa

SEQ ID NO: 105252 - DNA, 227 bp, Zea mays
  Clone ID: MRT4577_27490C.1
ggaggaggccgggttttgcttgccaaatggcgcatgaggcgcacttgccggatccaagcgccaagctctatgaccatgtcatatgcctggcatgctggaaacgatcctaaaccggtcagtattactgtctatgccacagtccgtgatttctcacggtgcgggggggctgccactactggatctcaaagttccggacacattatcaggcctttttattctcgctggac

SEQ ID NO: 105253 - DNA, 327 bp, Zea mays
  Clone ID: MRT4577_27491C.1
accaggggcaaaacaggttccgggctcaaaaaaaacaaaactagtttggtggtacaggcagcaggctggccatgcatgaataaagaccgaggcaacgcttaagggtcctttacaacacgcatgcatttagctttccacagaaaacaactggggggggggggggcaacaacaggtatgctgatgcaccaccttctaggggaacttgagggtggggagcacgttgttgttgacggggtcggcaagggggtcgaacaggttctggaacgggcccaccccggggacaagcccctggaaaaagaaaccgaggatggggagcatggcgagccc

SEQ ID NO: 105254 - DNA, 379 bp, Zea mays
  Clone ID: MRT4577_27492C.1
gccttgttgtttttttttttttgtaatacacagtcatgctcggggcaaccatatgaaacgaatttgttgaccaaggacatgacctcacccgagaagagggagatcacattcaaaaggcttctgaaccaaacttttgatcggggcatttgcaccggaaacaagctaattatctgggtggaaaaccctatgaacaattgtacgtgcttatataaactaaagggcccgaaaaaccgttccaaaccattcattgatcaagaatttaaacccgtaactaagagaaccgggaacggcccaaaccaaggcttgtagaccaaacaaggggaaagccactaatgggcacaagaaacttctaaaagaaacccaaaaaaaagccttaaaa

SEQ ID NO: 105255 - DNA, 413 bp, Zea mays
  Clone ID: MRT4577_27493C.1
ttgttgagaatccaccagccatgtcccacgttgtggcctccggcggcggcggcgctgctcgtggccgcagccgcagcctcgggagcagcagcagggccggcggcgccggggcgttcgtgagggcggggcccgacggcaacgagatgtacgtgcgggcggacaagatcgacctcaagaccctggacgtgcagctggagaagacgcggtcgcaggtgtggctggaccaccagcggtcggaggcgtccccgcggccggagacgccgctgctcgggtgggagatcgacctcggcaagctcgacatccagaaccagatcgcgcatggcaccttcggcgtcgtgtaccgcggcacctacgacggccacgacgtcacaatgaaagatctggactgggggcatgatgggcaggacacggcg

SEQ ID NO: 105256 - DNA, 790 bp, Zea mays
  unsure (1)..(790): unsure at all n locations
  Clone ID: MRT4577_27494C.1
ccgggacgcagtcttttattcccgacagtaactcgatgcctggcccgcatgctcacagcctccttacactgctcctggatctcatcacggcagccctcaaatcggctcaagccatctctcctatcctgggtgtcaaggaaatcttcagcagccgtaccccggtggctatggaatggctcgccaactatccaatacctcgatgcctggctactattcgcaacagcagatgatacctccgcaagcacaacatcaaggtatgcctgtgactaagcagccttccatgccgcctcctcaccctcacaatgccggcgtcccgcaggctcagtttacacctccaagactacagccgcagcaccaagggggacacagtcaagtatatggccacttgccaacatatggcaacccggcctcattgccgcagaagcctgcaactggactttagagaagattgaccggtgatgacggccgtatctgaaacgactctcgacagatttgacttttattgactgcgttatgcgaatttccgatccaggggttcgcatatcacacgcatgcgacacaacacatacacatggcggcgtacagaagatgggataattatggaacgagatcccacgcattatcggcgttcatacggcagacaggattacaggggcataagggngagtttgtttacattgaaagcaactagggtgggccgggagggcactntgnagaaggactaccaaaagtagcagagaggtttctttatcacgaacgcatcatcctcgactgtgacttttgttcatcg

SEQ ID NO: 105257 - DNA, 596 bp, Zea mays
  Clone ID: MRT4577_27495C.1
caagaactctgcagataccacgatctacagcattgagaagagtgtcagcgagtacaaggacaaggtccctgctgaagtcaccaaggagatcgagtctgctgtctctgatctgagggcagctatggctgaggacgatctggacaagatcaagcagaagctggaagcagcaaacaaggctgtttcaaagattggagagcacatgcaacaaggtggcggcagcggcagcgctggcggcagcggcagcagagtggaggagaccagactccagaagctgagtaccaggacgcaaaggaagccaagatgtaggtcgaacctccatcaagtctctagtttttgcatgtgcccatttaggaagtaaacttacctacctccgatttcttagttttctgtgagggttaagaggactgtaatttttgttgccaaattttgggtcacggataagataaattgaggggaacggacccatacgttaattgaaccatttatatactcccgacggcctctcaactattgtttgttgatcttggttgtgtcgataataggaattatttatatggttaacatacttgtgctaaaaaaaaaaaaaaaaagcggcc

SEQ ID NO: 105258 - DNA, 1832 bp, Zea mays
  Clone ID: MRT4577_27496C.1
tttgatggtgcactgcttgagtatctggttagtgagttcaagaagtcagacaacattgatctgagcaaggacaagttagcactgcaaaggctcagggaagctgctgagaaggccaaggttgagctttcgtccactatgcagactgaaatcaacctcccatttatcactgctgatgcatctggtgcaaagcacttcaacattaccttgaccagatctaagtttgagtctcttgtgagcaatctcattgagaggactcgcatcccttgtgtgaactgcctcaaggatgctggcatctctgctaaggagattgatgaggtcctactggttggtggtatgactagagtaccaaaggtccaggaggttgtttctcagatattcaataagccaccaagcaagggtgtcaatcctgatgaggctgttgccatgggagctgcaatccagggtggcattttgaggggtgatgtgaaggagctccttttgctggatgtcacacctctctcccttggtattgagacccttggtggcatcttcacaaggctaattaacaggaacaccacaattccaaccaagaagagccaggtcttctctaccgctgcagataaccagacacaggttggagttaaggtgcttcagggtgagagggagatggctacagataataagctccttggcgagttccagcttgaaggcattccaccagccccaagaggcatgccccagatcgaggttacctttgacattgatgccaatggcattgtaaaggtgtcagctagggacaaagccacaggcaaagaacaagaaatcaccatcaagtcttctggtggtttgtcagaggtcgaaattgagaagatggtgaaggaggcagagctacattctcagaaggaccaggaaaggaagtctcttattgatctcaagaactctgcagataccacgatctacagcattgagaagagtgtcagcgagtacaaggacaaggtccctgctgaagtcaccaaggagatcgagtctgctgtctctgatctgagggcagctatggctgaggacgatctggacaagatcaagcagaagctggaagcagcaaacaaggctgtttcaaagattggagagcacatgcaacaaggtggtggtggcggcagcgctggcggcagcggcagtggaggagaccagactccagaagctgagtaccaggacgcaaaggaagccaagatgtaggtcgaacctccatcaagtctctagtttttgcatgtgcccatttaggaagtaaacttacctacctccgatttcttatttttctgtgagggttaagaggactgtaactgttgttgccaaattttgggtcacggataaattgaggggaacggactcatacgttaattgaaccatttatatactcaaaaaaaaaaaaaaaaaacctagggagggcctctggacaacatcctccagaggctgctagcagcaaacaaggctgtttcaaagattggagagcacatgcaacaaggtggcggcagcggcagcgctggcggcagcggcagcagcagtggaggagaccagactccagaagctgagtaccaggacgcaaaggaagccaagatgtaggtcgaacctccatcaagtctctagtttttgcatgtgcccatttaggaagtaaacttacctacctccgatttcttagttttctgtgagggttaagaggactgtaatttttgttgccaaattttgggtcacggataagataaattgaggggaacggacccatacgttaattgaaccatttatatactcccgacggcctctcaaaaaaaaaaaaaaaaaaagcaacggcgacagcaacg

SEQ ID NO: 105259 - DNA, 1384 bp, Zea mays
  Clone ID: MRT4577_27497C.1
gttgaaaaccaaattagcaagagagagagggcacacactgcaaagatgagtctcataagagggatgggcaacgttgccaagagatggaaagaactcaatggcttgaattactggaagggcctagttgatccgctcgacctcgacctccgtaggaacatcatcaactacggtgagctctcccaggcaacctacaccgggctgaacagggagagaagatcaaggtacgctgggtcttgcctcttcaaccgcagagacttcctcagcagggtggatgtatcaaacccgaacctgtatgagatcacgaagttcatatacgcgatgtgcactgtcagcttacctgacgggttcatggtcaagtctctctcaaaggctgcatggagcaggcagtcgaattggatggggtttgttgcagtagctacggacgagggcaaggaactgcttgggaggcgggacgtggtggtggcgtggcgtggcaccatacggatggtagagtgggtcgatgatcttgatatttccttggtgcctgcttcggaaatagttcttccaggcagcgcagccaacccctgtgtgcatggagggtggctttcagtctacacgagtgctgatccagggtcacagtacaacaaagagagcgcaagacatcaggtgttaaacgaggtgaaaaggatacaggatctgtacaagccagaggagacgagcatcaccataacaggccacagcctaggagcagcacttgccaccatcaacgcaaccgacatcgtctccaacggctacaacaggagctgctgccctgtgtccgcgttcgtattcgggagccccagagtcggaaaccttgatttccagaaggcgttcgacagcgcggcggacctgaggctgctccgcgtccggaactctcccgacgtggtccccaaatggccaaagctagggtacagtgatgtcggcacagagctgatgatcgacacaggagaatcgccgtacctgaaggcccctggaaaccccctgacatggcatgacatggagtgctacatgcacggggtcgctggggctcaggggagcagcggagggttcgagctgttggtcgatcgggacgttgctttggtgaacaagcatgaagatgccctgagaaatgagttcgctgtcccaccgtcgtggtgggtggtgcagaacaaaggtatggtgaaaggcaaggatggccggtggcatctggccgaccatgaggaggatgatgactgatgtaacctgtcaactcatcttctaccagtttgttaccagagaacacatgtatcgttgtgtttaaaactgtacctgactgattttctgtatccaaatcataacttccgttggcttttatcggttgtaataaagcctgaatacacatgcttgc

SEQ ID NO: 105260 - DNA, 514 bp, Zea mays
  Clone ID: MRT4577_27498C.1
gtcatgccaatttgtgggtttaatataacttggtatggccccccctcgagccacatgccggtttaaaaaaaaagggcgacacaaagccgggggggaaaaaaaaaaagggcacggcccggggggaaaaaaaaaggccgggaaaacccaggccccccgggcagaaacccaaacgggggcggggggccgggggaacagggggccagggggacccccggcagggggaagggggccaaccccggggggaggcgcggggggaacccccccctccggaggggggggaaaaggaccccctggggaaagggaaccagggggggcggggggcaaaaaaaaaaacggcggtcccccgccccgcaaaagtaaaacgggaacagaagggccccggggaaggggccccggagaaacgggaccaccggcggggggttaaggcccccctggaaaacccgggggaccccccgggggccggaaaccccgaaacccggctcaaaaccctgggcttggagggaaacgagggggc

SEQ ID NO: 105261 - DNA, 499 bp, Zea mays
  Clone ID: MRT4577_27499C.1
gggtacctcgaggccggccgggccgggacgtgatccgagtccgcgaccagtgtgtctgttactccgctccccctcagtcctcagttcctcacctagtgcgagcgtgcgcgcgggagacgtagatggcggcttcggaggcaggagcggcgacggcaacatcggtgacgccgaagaggggacgtgtcgatctccactgcctgctatcagtgtagtatccaaatcgaggaggcctacagcgactcgacagctggtggcgatcgacttctctgcaacatgatgtcctccttgccgcaccatgaatccaattattggtgatatggccaagaagtccccagatgatgatttcgctgtacacgtggatgtcaatgaaatgaacaccattgctgggcaattctgcggagaggacatggcaatatttctgctcatgaaggagggcgacgtcgaggaccgggtccttggcgctccaaaggcatagctagctcgggatcgttgaactaca

SEQ ID NO: 105262 - DNA, 424 bp, Zea mays
  Clone ID: MRT4577_2749C.1
tgacatgcaattcttaacgcaaatgtcatttcagtgacgttatttaattaaaaatttacagcataatacaatgatgtcaagaatttctaagaatctacaattgattaggatggtaaatgttggcctagctcctggtaatgcagtgtaaattttgtcatcacagcattgtcaaaacaaggagaaatggatcgagggttcagcataactccagcaaatgccaaagatagtcaaccttctccacatgtactatgatctctatatatcacctcaaatccctttgtgtagcctttgcaccttggacaggtccataagaaaagtgatgttaagtcagatgtgtacaccttcaaggcaacagtggggaaaggaaatccggcatattccataatagttatctgatggccacagttggtgagcttgtcttcac

SEQ ID NO: 105263 - DNA, 593 bp, Zea mays
  unsure (1)..(593): unsure at all n locations
  Clone ID: MRT4577_274C.1
ggtaccgcgnccttccctcgngtttttttttttttttttttttttttttttttttttttttttttttttttttttttttttactttaaaaaaaggggggcttaaaaaattccccccgggacaaattcatttgtttggatccccccaggggacccccctgggggttaaaccacgtggacccaaacaccctttgaagggcctttgattaaaaaaccccccccaggggggtttccaaagggggggggggaaatttttatcctttttttcccggggaacgaaaattgctttttcccccctgggcgggggggagccctttgaaaaaggggggtcccaaaaagggccgaaagggtcgaatcttgtagggcccctaaaacctctgggaaatgggaaagcgggggcgggaaaaaccaccagatgggcttttttcccccgggaggagctgccttttggggcgggggaaataggccatgcggccccggtagtttttttggcccaacaagggggttttgctgtataaggcccccaccccaaaaaaactccggttttaccctccccagggccccagggggggaccccccctgtgggggggggggg

SEQ ID NO: 105264 - DNA, 322 bp, Zea mays
  Clone ID: MRT4577_27500C.1
tcgttcagttgaacgctctaccgatgctgtgaaggatggttgactagattcgttgaagcatataacctttgagggatgcatgaccacctgccacatgatgcagaacatgtcaaacgctggactgcagggggaaagaccgtcctctgacagagctacagcgttgactggactactctattcacaaagttggtcttaaagaagtgggtttctaccactacccatgcagagaatgctggaacgtaagacgaaagcggaatgttggacgatgaacttgtgatattcaagattatccaagatctgcacatattggtgactcatggaa

SEQ ID NO: 105265 - DNA, 317 bp, Zea mays
  Clone ID: MRT4577_27501C.1
ccccaaaaaataaaatgcgacgggtttttaaaatagaaaaagaaacgtgaccctttttcaccatagcgccagaaacaaccaattcgccccaaaacaatccgagacacgttaaaaaaaaaattcgaaccccccaccccaaattttgaagtccccaacccacagccttgttttgttacataaaacccatagcccgtttttaaacaaaatagggttgggcctacttccaccgaccctttttggagacttttgttaacccttctttcccaagtttggaatttgggtgtgacttttttggacctgggacttaattgccccca

SEQ ID NO: 105266 - DNA, 521 bp, Zea mays
  Clone ID: MRT4577_27502C.1
catttcgtaacccataaatgctgccgctctccggtcgtgttcttctctcttcttcgcacttctctgcaagctcaaggcgaacacgcgcgtcaacatcttcgaccgttgtccttgcctactatgcgaagcctcccaccactgatcatctgatctactggcgtgcgagagattgaccatttggtgctctgataggatagtataactgatgcgctgatattcatcagacgtgtttctgctatcctgattgcttgtgaatactgaggatgagagtgagactctgattgctaatgatattgccctgggtgattactacagcatgaatgactactgtgccggaattgcatgccctgattatcgatgaattgctcgagagcatgatgattgcatactctgagatggattgggatgagctctgctttgaatctgccactgaggtgtctgcggttgaatgctgcaaggttggtgacacgcattcattcgccctcgctgcttatgatcacgatgatgagacatatgatctg

SEQ ID NO: 105267 - DNA, 307 bp, Zea mays
  Clone ID: MRT4577_27503C.1
gacccacccgtgcggagatgacccagttcattctaaaaaaagggccctccatattcttctactgtgccgcccatgcggtcacgtgccgggacatgttgatgggcctgcaaaacctgcacactaaactaactccctgcaaaaaaatcaacacatcatggacattcgtggcttgatactagaagcagaacatgcaataccccgccgaggctgccaaacctgactgcccccgactatatgctcacatacactacggatgctaacaacgggttacacatactatacagacctcccccatgccctgtgaaca

SEQ ID NO: 105268 - DNA, 201 bp, Zea mays
  Clone ID: MRT4577_27504C.1
atccttgccaggatcaccacatatgcatcgcccttgtgttctcccgatctactctcctcctcagtgaagatgtcttgctgcgccgaggggcgcgcctgcgttattatgcgagaatctcgaccccaccacatgagacgatgagacgaccatccccttggatcgcgaaaccgacgagttcttctctatcgtggggtactcgcc

SEQ ID NO: 105269 - DNA, 532 bp, Zea mays
  Clone ID: MRT4577_27505C.1
cggggaaaaaaaaagggcaaccctttaaaaacaagggtccaaacccaaaaaaaaccaaaaaaatagaatttcaccaggaaacaatcctggggaccggccaaaaattgcccggaaaaagggtcctaggccggaaaacccaaggggccccaaaggaaccgggaaaaaccagcgggcccccaaaacagggggcccaggcaggggcttgctaaattccccccccaaacggttccaaaagggaacccccccggagctaacccccccatgaacccctgggccccccccttgccacagtagtggacgagggcattgaccttgaaggggccatcaaaaacaaccccggggacgttccccttgagggccggccaaaggcaaacggggccccaaaagcctgaagggcctttgaggaggtggcaaaagggctaaattggaccctgcccagccccgcttttgaggaggccgagcacattgcccccccccccaaacttgggccggttaaggggccacttcccactggaagaaaaaaggggggggg

SEQ ID NO: 105270 - DNA, 360 bp, Zea mays
  Clone ID: MRT4577_27506C.1
gagaaaagctaaaatcacgccggagtattaaaaagcgaaactgtaaaatatggacacataatgggaggcacaagtgctaaagatgctcaccttggatcggggcctacagacccaacggtaaccccaatacgcactaatgctcgagattcactagaaggactcgtccatgagacgcaagagggaaacatctatactgggttttgaacaaaacgaggatgcagatgaaaccgactctgctaatcaaccacctgacgacagaccgagtgacgcggtagaaaaattgacggattatagagattcttggcttggcactaaaaaaggcccaactgttttcaagaatgaaggctgcagaaaccatat

SEQ ID NO: 105271 - DNA, 487 bp, Zea mays
  Clone ID: MRT4577_27507C.1
agcagtggtaacaacgcagagtacttttttttttttttttttttttttttttattttttttttttttttttttttttttttttttttttttttttttttttttttttttttttgggaaaaaaaggcgtaataaaaaataacaaacacagtttattgaacatttaaaaacaacgggggggccgggaacaaaaaaccattccgggcccccctggccggtaaaaaaacgggaaagggcagtttaaaaccgctccccccaaagggaaccagggaggggaccggaatagcccaagagacccgcccccggggttacaggggaaagccccccaggaagcccggaattcccggggaggggggaagggaagccaaccgaatcccccctttaattccccggcccaaattttggggagggcacccctccccctttgggggccccccccccccccttcccccgggggcgcccccccgcttggggggggttttccccccc

SEQ ID NO: 105272 - DNA, 480 bp, Zea mays
  Clone ID: MRT4577_27508C.1
acttgttgaactttggtgaggggtgatggcgggttgtttcgccaccctgcctgggggtgggcttcaaaaaggtgctgcagtccttctcactcaccgctgcatcactggcttccaggcttccacgggtgcctcgggtggcttcacctcagctggtgggatgactccctcctccaactttgtgtagcgtgaccaaggtcggcctaaccacattgatgccctcaccagggtgatcgtgcttacttccgagggccacagcttcaaggttgaatactacagacagtcctgtcgccccgactacaaatgttgttgaagcacagaccccagatgctgtggaggacgacaccatcaatcacctcctggtagacccgagctcatatgaagctgctgaacacctgctgcacctaccaacgcttctggcacacacgaaagaatctgcgacgccatcacctatacttcctgtgaagccatgggcctttagac

SEQ ID NO: 105273 - DNA, 605 bp, Zea mays
  Clone ID: MRT4577_27509C.1
gccctttttattccactgaacatctagatctgtaattgagcttgcgcgcgtgtttcatgatttcgttataatatgtggtcgagcgagcagcaacatttgagttgagaagaatacatgacacccgtgtcaactaaccgcatcattttttagttgatggttcttatgccatggaaattcaacggatgttacagccttttcgtaatagatcatgttaaaaagcacgtgacttttatcgactttacaccgacccaagattggtataagcacatgccatacaagaggttcgcagaagcgattatcatggccttaaagaaatataagattacctacagcaagaaatgttctggatgggaagaggatatttttaagtgaaaacatacaatttggaatggtgttccaagtgacttaagatgcaaagatttttcgaaggaactttgtgattgatctgttaagttatgaggacaattcgtgtcgatatgtcatccctgcaaacatacaacaacgacttatcgatattgctaaaaaggattagtttagtgtatggttgtcgacatatttgtctgtcattacaaaattctaaaaaaaaaaaaaaaaaaggggcggcc

SEQ ID NO: 105274 - DNA, 363 bp, Zea mays
  Clone ID: MRT4577_2750C.1
gggaaaaaaaaaaatcccttgaaaaaaggggggtctcaaacccaaacctaaaagaaaacatttgggcccattccccctttggggggaaacggggaaagagaaaacccccttgaatggcagggaattcttaccctaaaaggggggggggagccagaaccgggcgaaccttttaagcccacccaacaaacttttattttttccgggtccaaaccgcggggggccaaattgggtagagccgacccagattcaatccgaccccccggaacttcggggccttggaaaagacccaccacaaaatccgaccccggggccgaccccggggccgacccctgggccgacccctgggtccccccggaaattccg

SEQ ID NO: 105275 - DNA, 385 bp, Zea mays
  unsure (1)..(385): unsure at all n locations
  Clone ID: MRT4577_27510C.1
taccctcgagnccgtccgggaagagatgcgacgggtgcgaggaggaagaaaaggatctcaatcaaaacccaccctctcctccaaacctgagagatctactgccctactactagttagctagctagcggccggcaaagattcggccggcgttgttggatcgccgcccggcggcgccattaacccatcgtccaaacacagaaacactcacacagtgcggccgtgtttcttgtgcggtggggatgggcgcatgttttcatactacaagcggagaggtctactagctgctctgttgcgctgcactgcactgcactgcacgggaggtggtgagtggagaccacggntgntcctgccgcttgcattgctggcagtgtagtgtaagggaaac

SEQ ID NO: 105276 - DNA, 506 bp, Zea mays
  Clone ID: MRT4577_27511C.1
gacccaggcctctacatcaagtcaacttgatcgcttctcctcgtctcctcatcctctcttccgacactccttcctgggtctcacccgtcctagtccccttcaacccccctctttgacaaagacaacaaaccatggctgctgctcccagtgtgaggacgtttactcgggccgaggttttgaatgccgaggctctgaatgagggcaagaaggatgccgaggcacccttcttgatgatcatcgacaacaaggtgtacgatgtccgcgagttcgtccctgatcatcccggtggaagtgtgattctcacgcacgttggcaaggacggcactgacgtctttgacacttttcaccccgaggctgcttgggagactcttgccaacttttacgttggtgatattgacgagagcgaccgcgatatcaagaatgatgactttgcggccgaggtccgcaagctgcgtaccttgttccagtctcttggttactacgattcttccaaggcatactacgcc

SEQ ID NO: 105277 - DNA, 582 bp, Zea mays
  Clone ID: MRT4577_27512C.1
atagtttggagcggaggccgcagcccagaccggatcctgtgcctcgtatcatttgcatacagtgaggccaacggttaagatgtggacggggatgaagagcgttacccggccagctggccttcaatagctagggggctgggggccattgggctcaagaacggtgtgaacgtgtacgaaggccgacacagccgccgttgtttctgaacttatgaaatgagatgtggcccaaggaaatacatgagccagaagctttggggcgcttaaatgtacgaaagtgggggcatcatgatccaggaagcgcgctgcgctttttggcaatgctctagacgagaaagggggcgaaaactttaagatagattacatgatgggcggtgcttaagttggtgccttgaagaatgcatggtgctacccattgaacgagggaagctgcttattcagaattaggatgagatgatcaagtgtgataggctatgatagccgtacaagggtattgctgattgcttaaacgtaccaataaagatgagggtttatattacttgtggaggggtaacactgataaagatagacgatacttccctactg

SEQ ID NO: 105278 - DNA, 227 bp, Zea mays
  Clone ID: MRT4577_27513C.1
agattcataggtactcattagacagcattctgaaccgcgtactgctgtattcagaatacctacgggggataatcacgcaccatgctaggtgagacccaaataggtagacatttgctcagactacagcacaagggaacccatttttcgcaacggtgcgccccctatgtcgaatatcaaatcccctatttgccctccccaagccacgtgcccatacactgcactggctt

SEQ ID NO: 105279 - DNA, 178 bp, Zea mays
  Clone ID: MRT4577_27514C.1
tttgaggatacaatacaggggaaaacagtattcacttcctatggtactacgttgtatcagctatttcttttatttaccacatccaataatccagatgtttgggttcctgcatacaagtcgtcacgttggtattgcctgtttttcgtactctttgtgctggtgggagtttactttgtta

SEQ ID NO: 105280 - DNA, 1038 bp, Zea mays
  Clone ID: MRT4577_27515C.1
tatgagccaaccagggactgctcccagggcctgtgcagcatgtactgcccgcagtggtgctacttcgtcttcccgcccccgcccccggccttcgacatcgccggccccggcggcggcggcggcgacgacgactcctccggccccaccttctcgcccctcgtcatcgccatcatcggcctgctcgccagcgccttcctcctcgtcagctactacaccgtcatctccaagtactgtggcaccttcagctccctgcggaacatggtcttcggttcccgcaggggccgcggccgcggccgtggcggcggcggcggcggcggcggcggcggcgattcaggggctcaggtgccgtggggcgccatgccgccggacgggctggacgagaccctgatcaacaagatcacgatctgcaagtacaagcgcggcgacgggttcgtggacagcaccgactgctccgtctgcctcggcgagttccgagacggcgagagcctccggctgctgcccaagtgcagccacgcgttccacctgccgtgcatcgacacgtggctcaagtcgcactccagctgcccgctctgccgctgcaacatcgccttcgtcaccgtcggcgtcggggcggtgtcgccggagccggagccggagcgccgcgccccgcgggaggaccgcgactggaggagagacaaccccgagctggtcctgacggtgggcggcccctcctcggacccagtgcgtggcgcaccgcagagccagagccagaatgcggtcagcggcagcggcggtgacgacggccaggatgcactggcgcggaaggattgcccggagagatcggaggagggcagcggcaatgcggagataaaggaagactgcgcgctgccggcggtgagggcggcgtcgtcgctgtccgacacgcaccgcgagggccgcatgtccatcgccgacgtgctgcaggcgagcctggaggacgagctgacgatggcccgggagagcggcctcctggcgggttcgtcgggacggtgcccgtgccacggggagcacagcaaggac

SEQ ID NO: 105281 - DNA, 537 bp, Zea mays
  Clone ID: MRT4577_27516C.1
ttttctgagctatcctgtgcattctgacaaaggctacatgactcttaccccaacgcttaagctcggagcttttctcggagcatctccttgcaagcatctccgtccttggcgaatcctcggataccctcgtggagcttgtcgaaagccatggggtcgttgaacaactcccatcggaaggcagcctcgttgtcgacgaatgagaccttctcctccttggcttggtcggcgggggcagcgtctagcttctttggcaccttggcgtcggagttcttgagctcctccaggagtttgggggcaatggtgaggtagtcgcatccggcgagctcggtgatctcaccagtgtttcggaaagaggcacccatgacaatggtgttgtagccgtgttgcttgtagtagttgaagattcgctggacagacttgactcctgggtcggtctcggcagtgtactcctttccagtgctcttcttgtaccagtcgagaattcttccgacgaatggtgaaatgagagtgacaccagtctcggcacaagcgacgggt

SEQ ID NO: 105282 - DNA, 265 bp, Zea mays
  unsure (1)..(265): unsure at all n locations
  Clone ID: MRT4577_27517C.1
gaacnagctccgcggacctggtgaaaatgtggaagcgaagatgaggcagaagttgaagaaagaagacttaagaagcttgcacaaagagcaaaatttgatgcacaatatgatggttctgagttatctgacgatgaagttgatgatgttaagaagaaatccagacgagaacagtccaatgaagggggctattttgacaagctaaaggaggacatggaactacgcaagcaaatgaatatatctgagctcaatgaccttgatgaagaga

SEQ ID NO: 105283 - DNA, 417 bp, Zea mays
  Clone ID: MRT4577_27518C.1
gaccgcacgcgtacgattgacaccaactatcatcatataacgcacactatatcaccaacattaccacccaaattacgatttttacatacactccttggtttctcttaatcttctacaactccaacaatttacccaatattctcaaatgctcctataacttaatttccatctttacacatatcaccacaccaatcttttttatttgaaaccaacattcttctaccctattctatccaacatacaaatacatctactattacatctttaacatcctatttatctccatcacactatacaatcttaaacatacctcacattttatcctatttacttccacacaacatctactctcatcaactttataaaactaatttaacttaagtgtaacctactccactcattaacaatcattttttt

SEQ ID NO: 105284 - DNA, 252 bp, Zea mays
  Clone ID: MRT4577_27519C.1
ggcagatcagcgctgcaccgcgctaccgtacagactacgagacattacgagctacgagcgacggacggacggacgagagcaaacacgcagagacgcacagcgaccgggctgtgcagggcaaggtcgcaccagatcatggtgacggtccaccttctaccgccactatggtaagacgttcacgcaaccaaggcgtccttatgagaaggagcgtcttgatgctgaactgaagctggttggtgcgtatgggctgag

SEQ ID NO: 105285 - DNA, 369 bp, Zea mays
  Clone ID: MRT4577_2751C.1
cccaacctaaaggacaagctcaacgggatgggactgacgttgccgacgcgggacgtttccgttgtcaacctaacggcacagatgctaaaaaagacagtccgcgcgatgtagaaagagggtttgcgctacaaatcggtcaactagttgacaggcatcctctacaattaggacatgaatactatgtgcaactcatacggtgcaagaagcttgatgtgcattatagagagctacattagcatgcatgtgaaaggcgtctatgcaaatagggactttggtgaagacaaccttgttctgtacgaccaaatgttggtcggcgctcatgacatccttaacaagattgactaggttatgtgtagatactgattccac

SEQ ID NO: 105286 - DNA, 289 bp, Zea mays
  Clone ID: MRT4577_27520C.1
catggagttgatgatgatggcgatgatgatggcgatgatggcggcactgatggccccaggcacagtgcaagtgctgactacttcatcccaagccaggtctttctggaggccgagagagctcaatccattgcctatcacctcaaaattgaggagcaaagagcaaaagtacatgacaatgaaaatataggtaccactgagcctggagagcacaagaggccaagaacagcagagaactcatcaaatgaggaggaaacgtcaagtgaaggcaacatgagggtgcatgctgtgg

SEQ ID NO: 105287 - DNA, 294 bp, Zea mays
  Clone ID: MRT4577_27521C.1
gggagctaaaatctcatttttattcaattttaaataaaaagaggattttagccctgcaatccccataagggactcaaatttttttaccactgatcatggaccaaatacacaattgagcaacacaaagccccgtttgccattttcttttttggcacccaaataaaagacggcattttttgttaaacaagaccattttatggttcaaccttacacaaacaccaaatttttaaggactttgcgttcttaaaacaaaattgtttcgaatttgcccatttaattttggggttttatata

SEQ ID NO: 105288 - DNA, 194 bp, Zea mays
  Clone ID: MRT4577_27522C.1
taccaaaagagatactgactcatctctaagcagcaacttgttgaatacaaatggcactctacgacaaccactaatatgctatcagacctttcgtacaaatgttcaagcgagcttattggtccattagatcatgatctaactggggacataatacccgttcgataatagggtttctattaatttacactagcttt

SEQ ID NO: 105289 - DNA, 1107 bp, Zea mays
  Clone ID: MRT4577_27523C.1
gcttggtggcgggggagggtatggcagtggcggtggctttggacacggtgtagggtttggaggagtgaagggtggcggtttcggtgggggtgcaggcggtggagctggaggtggcttaggcggaggcggggggcttggtggtggtgaaggaggtggttatggtaggtggtgccggcaggggtgctggtggaggcggagggcttggtggtggtgaaggaggtggttatggtaggtggtgccggcggaggtgctggtggaggcggcggccttgggggtggttctggtggaggtctcggcggtggtgagggcggaggcggtggtcttggtggcggaggaggagctggggctggtggtggttacggtggaggagcaggtgcaggtggcggcaatggcggggggtatggcggaggtgccggaggcggttacggtggaggagctggtggaggtactggcggtggatacggtggaggtgcaggagcaggaagtggctctggaggcggctatggtggaggcgctggtggaggctacggtggtggtgctggcgctggtagtggcagtggccttggctctggcggcggtggaggttatggtggtggtgccggaggcggaggcggaggtggaggtggaggtggcatcggcggcggtgtgtgattcaacctcttacatccatgcatggcgtgtgcatgcaagtgctcgacgcactcctcttgcagtttcaggcatgcgtggagtcaagctaatagcatgtgtgcgatataccgatcgatcctgatcgtactctgtgcgtaacgatcatagtaaacagaataaagagttaatgttgcaataaattgagtcggtcataattgtatatgatgatatatagtttatactttatacggtatataaactgcgtcagtagcaagctaagctgaggaagagctactttgtaagtttgtattgtactattttagttgtattttgtcaaaataaaggaaatattatgagctaaaaaaaaaaaaaaaaaaaaaaaaaaaaaaaaaaaaaaaaaaaaaaaaaaaaaaaaaaaaaaaaaaaaaaaaaaaaaaaaaaaaaaaaaaaaaaaaaaaaaaaaaaaaaaaaaaaaaa

SEQ ID NO: 105290 - DNA, 740 bp, Zea mays
  Clone ID: MRT4577_27524C.1
actccatagggcgattcgtaccctcgaggccggccgggacaactcatcaaaaaactgaagcactagttcagtgcaccaaaagttcatatcatagaattacaccatgataaattcaaagatgctagttcagctggcaaagaagtggcaacatatggcagcccttgggaggaggaggctaacaatgaccacaacgatcaaagatggcaacctatactgcacatcagccatagcgaacaagggtcactgcatcgtatacacagctgacggtaagcgatttgaagtccctttggcgtatctcagtacaaacgtttttgtggagctcctgcggatgtccgaggacgagtttgggttcacaagtgaagacaggatcacagtgccttgtgatgccgaagtgatggagtatgtgatgtgcttgcttaggagaaagccctcagaagaagtggaaagggcggtccttaactctgttgtaatgccatgcaactgcatgagtaccatgaccatggtttccaagggtcttaaccagtcactatctatattttagctaatgagaagtgttgtatgcatgcatatgtagatatctgtacataccccagtaaacaaggatagaattagaatcttgcagttggttctgtaatgatacaatgaggctgcaatccacaattatagatctcagttctagcaaaacaaaaaaaaaaaaatttgcggccaaagcgaaaaaaaaaaaaaaaaaatttgcggcc

SEQ ID NO: 105291 - DNA, 305 bp, Zea mays
  Clone ID: MRT4577_27525C.1
tagagggtaggtatcaaacggaaggatctcctgaacgtaaaagccgaccaataataggcctatagcgcaccaacaaaaagtacgctaccgaaaatacaagggagatagagggaattaaggagcggaagggcaaaaccacgccaaggactgtcacgtacgacagcacgggacttgagaagggtgtgttaatgagaaaaaccaagccatccgaaaaaaaaagatgttgggttgtgaaggagccaagcctagtaggccaaactggtgagccagatttagtgtaggaccgagagcttaaattgggggtg

SEQ ID NO: 105292 - DNA, 837 bp, Zea mays
  Clone ID: MRT4577_27526C.1
cctcgaggccggccgggaattccactcttcaatctcaacttgacacttttgatacccctacataccacctttttatcctaaaatctcaacacaaccgcaaacatgggtcgccaattcttcgtcggaggtaactttaagatgaacggctctattaagagcatcaccgacatcgttgagaacctgaataagggcaagctcgaccccaacacagaggtcgtcatcgcacccccagccctctacctcctcctcacacgcgagcaccttcgcaagggcctcgaggtcgcagcgcaaaacatcttcgacaagcccaacggagcctttaccggcgagatctcggctgagcaactcaaggacagcggcatcacctggaccttggtcggacactcggagcgtcgccagatcctccaggagaacgacgacttcattgccaacaagacaaagacagccaccgacaacggtcttggtgtgattctgtgctgtggcgagagcctggagcagcgtgaggcgggcgagaccgtcagcgttgttaccaagcagctcaaggctgttgcggacaaggtcaaggactggagcaagattgtcgttgcttacgagcccatctgggccattggtaccggcaaggtcgcaaccaccgagcaagcacaggaggtccacgccgccctccgcgagtggctcaagaaggaggtctcacccgaggcctctgagaagcccgtatcctgtacggtggcagggtctcggagaagactgcaacgagcttgccaagaggcgaacattgacgggttcctcgtcggcggtgctagcttgaagcctgcctttgtcgacatcatcacgctaacc

SEQ ID NO: 105293 - DNA, 257 bp, Zea mays
  Clone ID: MRT4577_27527C.1
gtcaatagcaacagcaactcccttcagcccgttccacagcaactccctcccaagttctcaaccaccttctgcttcggtccttccacaccaccccgatttacccacgggccacgccttcttccttttattttcccggtcacttccgttcccattccacgcgaaggcctttcggcttggcggcggccgtttcgttgcagcggctgggtcgtggcctttcccggtcggcaacggtggccccgcccggcttggccttccgc

SEQ ID NO: 105294 - DNA, 426 bp, Zea mays
  Clone ID: MRT4577_27528C.1
aaaaaaaaaaaaaaattggttttttaaggggaaaaaaagggggggggccaaagggttaaagttggggttaggggcgggaaccggtcgacaaaaggacaaaaatttttgggcgggggaaaattaggggccaaattttgacaaataaaaaaaaaaaaaaaaaaaccgggggggttttttttccggccgggggttttttttttaggggccaaacgggaatttgggggggtttgcaaagggaatgggcattccagggggggtaaaaaagaaaaggggttgggggggaagttaaacatttctgaaaaaaaaagggtaggtttctgcaccccccttaagttaaaaacctttggggggggggggcggggcccctttaaatggtggtttcaaccccccgcgttgggaaaaaagggttttatgggggggaaaagg

SEQ ID NO: 105295 - DNA, 278 bp, Zea mays
  Clone ID: MRT4577_27529C.1
aagggttggggtttttaaaaaaattagatttttttttcttcacaccgaaaatgggggaccgctgcattcgttgtccaccaaaaacaccaaccaaacaaagggggcttctacacaatagaccaatgatgcaggaaaggaggcttttctcccatccgaagatgggctaaaaccaaaaataaaggtgaaattttttattgttcttttacaaaaactacaatccgtaactggggaccggaccctttcgccaaattggaatcgtacaaaactcgtacacctgg

SEQ ID NO: 105296 - DNA, 199 bp, Zea mays
  Clone ID: MRT4577_2752C.1
accttgtctttatcgcgagcggtcgccccttctgatgctttgatatgacggccgcggtcgattgtgtgtctagttggccggtctactgcaatttgtactgtatcatcgtttcaaggtgttccagttactagcccatatggtgtaatattatcacagctattatcaatggaaagccctcagttatatcctcaaaaaaata

SEQ ID NO: 105297 - DNA, 359 bp, Zea mays
  Clone ID: MRT4577_27530C.1
acgcgaaccaatattgaaaatgcacataatctttctttttttttaacggaacaccccaaagggggatatttaattttcagagaacaccttcactccatcaacgatctatccccaaaaaccaaggagatatttagttatccaccttccccttaatgattttcaacatttcagcaccacaatcctcatctactatgggatcctcatattatccaacttcaactccgcaaagatccttatcatgaccttctacaagacactaatccgtcttcctccaaacaaaactgacaagcccataaaatattgcttgcagcttgacctacatatgataaaatgacattgaaaccctttttactggttgt

SEQ ID NO: 105298 - DNA, 233 bp, Zea mays
  Clone ID: MRT4577_27531C.1
tgtttaggcctcaggatgtcttcgtgcatgctacattgcctctgcattgtctttataggccacttgatatcatactagtatggtacgaagccctaatttttttgtgcagtgtcgaactgcatattactaagtgaggaagggatttgagaaacattctcccctataaatacatggaggtgtatctgatgattgttttttttgttacaaagcttatcctagtcttgaatttagta

SEQ ID NO: 105299 - DNA, 123 bp, Zea mays
  unsure (1)..(123): unsure at all n locations
  Clone ID: MRT4577_27532C.1
agaaaaaacatacaccatgattaacttactnnactcccacgttcttnnttttattttgtgtgcgnnatttagnnttcaaaaataaactagcggacgnnacaaatattagagaacattagctat

SEQ ID NO: 105300 - DNA, 2374 bp, Zea mays
  Clone ID: MRT4577_27533C.1
ccggccgggacagcagacatccgtccctatcccgctcctagtcccacagccaccttccctcccaccgccaccattcgggccgccctctctcctagtcccagcaaatcccacttccccaggccccagctccagctcgcctatccccctcaccagcgccgcaggaagatcgcgctgcgcccgccgtctcacgaggaggcatcgatcggcgcggtggcatttaggaggaggaaggggaggctgtaccttgttgacagggtcttagttaggcggggagcggcgagatgagcatgtacgggagggacccctggggcgggccgctggagatatgccacgactcggccacggacgacgaccgcagccggaacctggacatcgaccggggcgcgctatcgcggacgctcgacgagacgcagcagagctggctgctggcggggcccggggacccgggccgcaagaagaagaagtacgtcgacatcggctgcctcgtcgtcagccacaagctcttcgtctggacgctcggggtgctcctcgccgccgccgtattcgcgggggtcgtggccgggatcgccaaggccatccccaggcgccaccgcccgccgccgccgcccgacgactacaccgtcgcgctgcacaaggcgctcatgttcttcaatgcccagagatccgggaagcttccgaagcacaacaatataccatggcgtggtaactcttgcatgaaggacgggactttctgatcctgcagttcggcgaagcctggtcggcgggtactatgatgctggcgacgctgtcaaattcaatttcccagctgccttctccatgaccctcctcagctggagcgtcattgagtacagtgctaagtacgatgctgctggggaacttggccatgtccgtgacattatcaagtggggttcagattacttcttgaagacctttaattccacagccgatagcattgatcgtgtcattgcgcaggtgggaagtactgcaacatcgcctggttcaacgcagcccaatgatcgttattgttggatgaggccagaggacattgactacccacgtccagtggttgagtgccacgcttgttcagatcttgctgcagaaatggctgcagcattagctgcagcgtcgattgtattcaaggacaataaggcttactcacagaagcttgtacatggtgcaaccactcttttccagtttgcaagggaacgacgtgggaggtatagtgcaggtggctcagatgctgcaaagttctacaattcaaccagttactgggatgagtttgtgtggggtagttcatggatgtaccttgcaactggcaattcgtcatacttgactctagccacacaccctaaacttgcaaagcatgctggcgctttctggggtggaccagattatggtgtgttcagctgggataataagctcactggggcacaggttcttctaagccggttgaggcttttcttgagtcctggatatccatatgaagagaccttgagtacattccacaaccaaactagcattatcatgtgttcctaccttccaatatttaaatctttcaacagaacaagaggtggtttgattcagttaaatcatgggaagccacagccccttcagtatgtggtcaacgctgcattccttgcttctgtgttcagtgactatcttgaggctgcggatactcctgggtggtattgtggcccacatttctactctatcgaggttctccgcagttttgcaaggactcagatcgagtacatcttagggaaaaatccattgaagatgagctatgtggttgggttcggaaaccattaccccaagcatgttcaccaccggggcgcctcgatccctaagaacggtgttcactatggatgcaaaggagggtggaagtggagggacaccaagaagccaaaccccaatatcatagtaggggccatggttgctggccccgatcgccatgacgggttcaaagatgtccgcaagaattataactacactgaagcaacgctggcgggcaatgctggtctagtcgcagcgttggtagctttgtcgggtgaaggccatggggtggacaagaacaccatgttctctgcagtgccacccatgttcccttcgcctccgccgccaccagccccatggaaaccgtaatgcctgtgggtgtctgattcttctgtatactgcgtatttagattagtgctcctctcgctataactagttaactactaccatcactatcttgcatatttaacaagatgtagcatcgatttttcttgtttctttcattgttgtatatttgccgtgcaatgtaaggattgattatgtttgtgtatgcatctctgttctttttagataatggagaaaaggttccggctttcctctc

SEQ ID NO: 105301 - DNA, 807 bp, Zea mays
  unsure (1)..(807): unsure at all n locations
  Clone ID: MRT4577_27534C.1
ggtacctcccggcggccgggctactcgggccgcctctcttccagcaaatccctcccacctcctccccgccgtctcacgaggagctagaggaaggggaggctctgtaccagcctgttggaagggggcgagatgagcatgtacgggagggatccctggggcggcccgctggagatatgccacgactcggccacggacgacgaccgcagccgcaacctggacatcgaccgggccgcgctgtcgcggacgctcgacgagacgcagcagagctggctgctggcggggaccgccgaccagccccgcaagaagaacaagtacgtcgacatcggctgcctcctcgtcagccgcaagctcttcgtctggacgctcggcgtgctcctcgccgccgccgtgttcgcgggggccgtggccgggatcgccaaggccatccccaggcggcaccgcccgctgccaccgcccgacgactacaccgtcgcgctgcacaaggcgctcatgttcttccatgcccagagatctgggaagcttccgaagcacaacaatatacattggcgcggtaactcttgcatgaaggacgggctttctgaccctgcagtcaggcgaagcctggttggcgggtattatgatgccggcgacgccgtcaagttcaatttcccagctgccttctccatgaccctcctcagctggagcgtcattgagtacagtgccaagtacgacgctgttgnggaacttggccatgtccgtgacattattcaagtgggggtcagactaccttcttgaagacctttaattccacagccgatagcattgatc

SEQ ID NO: 105302 - DNA, 441 bp, Zea mays
  Clone ID: MRT4577_27535C.1
caccaataacaagatcttaattttacactacagaaaaactgcttttttttaagtagtcgcagaaaataaggccttttagttcagcttctaattttccaaatcagaaacagaaccaaacatacatgtcatgtgtcatgccaagttgccagcctggccggtaagccggttacaatacagcaccgatacattgtaacctaagtctaactccaacaataccacccatttttggagacccatttcatttttgcctacccactcataaatgcatcttctatttgtctaccattatctccaacaacaatacccatctggacaccagtatcaataaaatacttttttctttctttccatcccaccaacctagggccgctttctctctcttctctaattcaaaccacacagaatgggttctggaaagagaaaacccatatttaggttccc

SEQ ID NO: 105303 - DNA, 522 bp, Zea mays
  Clone ID: MRT4577_27536C.1
cacgcctgcgtgtaccgggccgctattacacggtcgacctcagcgttcgttgcagtatgcgagtatggggcccatgtagcctgtgctgaatatgtgatgaaagcagagcatgacgcatactgtccgttgcaggactagcattcagtaactcactcgagatctagaaggaccctgtatgtagacgaattaacatcgggagcatgaatatacaacacacgccactactacctgtgagatgggctgctacctatgaggacaggccacaatgagtatatccctggtttgcccactgccctgactatgttatatcatctgatttagttaaggatgttatgaactaccataagaatcaaagaatgaagctcttgaaaaggaaatatctgaactaccgagtgtggggatgacatgacactgagactatacctgatggatacaatgcacactgactaagtaatgtgcagatggatgcttccctgactaccatactgctcattaccaattgccatggctacagctatgcat

SEQ ID NO: 105304 - DNA, 206 bp, Zea mays
  Clone ID: MRT4577_27537C.1
atctctcttttaccatctactatggtgatgtggtgttatttactcttcggaggaaaaagccaacaacctatgagaactttccttagacctcctaactttttcacaaagacggaagagactccataaccattgatgaactgtcacaagcaagtcattaattcatccacataaacgaacacctgccattatttattaaggataacaac

SEQ ID NO: 105305 - DNA, 566 bp, Zea mays
  Clone ID: MRT4577_27538C.1
cggccgcgtgggcggccgcgtgggttttttttttttttttttttttttttttttttttttttttttttttttttttttttttttttttttttttttttttttttccccggcaccccaatatttcaaaagccaaagggtcaaaaaaaggaaaaactcccaaaacccacagaaacaatttggggaaacaaaaagggttgaaaccctgccatggaaaacggccccccaaaaaaaaaaagcctggggaaacggcccgggctacccggaaaacccaaggcggaaaaaacttccagaaccccaaagggttgctgccccgggccctggctagggaatgggctaacccgggaaaaacggcagaaccccagccattcggggcggaaggcccaaaccccaaaggctaaaaccattcaagctgaaaaaacccccccctgcaagaaaaagcccccccggcctgaaaaaaacggccattgagttgccggattttaaagaaacccttgtaaaacggcttgcaaaaaagaagctttggaagcccctttgggccgttaacaacttgggaagcgcccccccca

SEQ ID NO: 105306 - DNA, 383 bp, Zea mays
  Clone ID: MRT4577_27539C.1
aatgcagggtaacctgtccttgataaggatgacccattttcattcaataataaaggaaccactctgggtctaaagctccacatttattcatgactgtacatacgagctaaaatcgaccgggttattaaacggcggtggtggccccttccatgagagaaaaacttctggcgaaaactatccaagggaattttcttttcctgcctgtaccacctggaatggctatgggaagcttgttgcggacgcatctgtacctgggcccatagatggccctgctaatgggctgggcacatgttttctggggttgcaatatcgggggaaacacaggtgcctgatattgcgactgccttccactgtgcaatttacaccctgtaggattgtcttat

SEQ ID NO: 105307 - DNA, 325 bp, Zea mays
  Clone ID: MRT4577_2753C.1
gaacaacttggcaaaccagcagcaagtgactgggcaaagcgaagctttttggttaatactttaatttatggaacctttttatcatatattattggaagtccaaatactatcaatcgtatatctgaaatgtcaggccgtaccaacaagctttgcatttgatactggttgcatgatatactctctaatgatgggcattgttatgactgatgcaagattccacaggtaaatactaccactttgtgaggcttatgggtttgtgctggttctcacattacattgggaatgcgctttgaatacacacctcaatgctggattcatttaggaa

SEQ ID NO: 105308 - DNA, 660 bp, Zea mays
  unsure (1)..(660): unsure at all n locations
  Clone ID: MRT4577_27540C.1
ccggccgggatcccccacctcctctgcctgcctctttacacggagcaagcgcgcagagaaagagaggccgttccgttcccttttgtcgctgggcagcatggccatcccgctgccgtgcaaggcgctgccgcggcatgacgggacgaagggcagcgggcaggcgtacgacggcgacgaccagccgtcggtggctgcggagctgcgcgcgctgtggggcatggcggcgcctgtcactgctctcaactgcgtggtgtacctgcgcgcgatggtgtccgtgctgtgcctggggcggctgggcccgctggacctggcgggcggcgcgctggccatcgggctgaccaacatcacgggccacagcgtgctgttcgggctggcgtcggggctggagccgctgtgcgcgcaggcgttcgggtcccgcaaccacgagctgctgacgctgtccctccagcgcgccgtgctgctgcttctcctggcggcgctgcccatcgcgctgctgtggctgaacgtgggccccatcctggtggcgctggggcaggaccccaccatctcggcgcacgccgcgtcgtacgccgcgttcgcgctcccggacctggccgcgggcgccgtgctccanccgctgggcgtgtacctccggtcgcagggcatcacgcgccccatggc

SEQ ID NO: 105309 - DNA, 151 bp, Zea mays
  Clone ID: MRT4577_27541C.1
agagcaaccactgacatgcttctcaaatccagggaataaaaccagcccacacgggactctataatgccgccaacctaggcgggcaaccacaaagcaaggggggaactaatttcgaacactaccagcctactaatataaaaaaagaaggggg

SEQ ID NO: 105310 - DNA, 331 bp, Zea mays
  Clone ID: MRT4577_27542C.1
gcgcgccgcggggaccaccccatacaggcctatgccgaccaacagaagtgcgcggagggcgcggtagcgcggcgcgctgaggcggggctacatgagcgcgtacaccgtgcccgccgaggacgacgtgatcgtcgacaggaacgtcgagcgtctgcgcggttagcactggaagaagatggatatgggcggcacgatggagaccacgatcatgaccgatatggccgtgtagactaggcagctcagctgaaaggttagacggagcgagtggtactacagctggtggcacacgctgctgctcaggtggcggtacatggccctggccaggaacacg

SEQ ID NO: 105311 - DNA, 323 bp, Zea mays
  Clone ID: MRT4577_27543C.1
aaaaaccggaccttggcatataccaggggggttcggcaaacatgatatttagacgtcacaggggcaacacggcacatattcctatatgggatgggaggttaaacaacggggggcccttctttggaataaaaaaccttcccggcaggagccaaagaaaacccctcttattagggatgtgtcgcaaaaggccccactgtactaagctgggctctgcccaaccccttggcaaccaatttgacgcctatcaaaaaacaccttactcccatggccccccccccccccccttgggcaggcgcctgggtgggcccaaaaattccgggccg

SEQ ID NO: 105312 - DNA, 383 bp, Zea mays
  Clone ID: MRT4577_27544C.1
aaaatgcccaattttggttaggggattgcatggatgctggggcctcctttacatctggctatgcctaagccatgttttccattggaaaaggaaattttacttccaaagccaaggacaatgcccaagggcttgctaattgcccaattttgtcaagcctgccactggtttttgggatcccctttaacccttatttcccccaaagccacggatcctgcttttgggttgtcttctgatgctgtttaattgggggggggggtctttaaacaggaattgcgggttggaaacttcttttttggttcataaagtgtttttgtccggtttttgaccctggcgggtataattttctggtgcctcacactcctctggctttaaccccctctctt

SEQ ID NO: 105313 - DNA, 272 bp, Zea mays
  Clone ID: MRT4577_27545C.1
gggcaggccctgtccccctacctccttgccagggcaagggtggagtgtggaagacgtgagtcccccagagcaggcctggcccccagctgtgagggcctcagggaggcacgagggggagtgctgggggtctcagctggcttagctcctaagtttaccaaatgttaatttagtcttggggagaacagcaagggctggaggccagtgctgcagggctagccccactcctgacagctgggcccttgaagctccttgaggggcaaggcccaggagtt

SEQ ID NO: 105314 - DNA, 1830 bp, Zea mays
  Clone ID: MRT4577_27546C.1
gcgcacatggatgctcccagctcctactacttagctgccgaggcggcggatcgaccgatcgagtagctacatactgggcgcgcgccgcgatcgagaaacagagagtggatcacggtcgctgacctctgccctccccactccacgcgcgctcgcggatctcggtcgcgtcgcgcgccatggccagcggcggggcgccgtggctggagcggtgcgggccgagcgtggggatggtgctggtgcagctgttctacgcgctggtggacgtggcgctgaagacggcgtacgggctgggcatgcgccccatcgtcttcgtcgcctaccgccaggggatcgccgccgccacgctcctcctcgcgtcgctcgccgccagggggtgcacgctgcggcccatggccgtcggcgcgcggggcttcgcgctgctcttcgcggcgtccctagccacgtgagtcgtgatgatcctcagtcagtggacaggagactagtggagtgcctgctgcatgctctggtttttctgattcagtgcgaatgggacagcgccactggccagtacttgtacctccagggcctccacctggcttcgccgtccatggccagggccaccaccaacctcgctccaggcatcaccttcgccattgccgccgtcatcgggtaggtgactgtttctttctttcttccttcctgttttgggctgcccaaattgttacccccactccggcacgccatccatccggctcgcaggctagagaaggtggacatcaggagcccgaggagcgtggccaagatcgtcggcaccgccatctgcctcgcgggagcagcatccatggcgttcttcaagggcccggcgctcctcggcgcggctcttccctcgaccaccagcgacaacagcgactgggtcaagggaggcatctacctcgtgggaaacgccatctgcgtctccatctggtacatcttgcaggtgcccgtctgcaagtcgtacctggaccctgtgtctctggcgacctggatgtgcctcctggccaccttgcagtgcgccgccatggcgctgttcctggagcccaacaactacctggagatctggaagctgaactcgctctgggagttcccctgcatcctgtacggaggcgtgtttgcctctggcgccaacttcttcctccagtcgtggtgcatagcggtgaaagggcccctctacagcgccatctttacgccgctgagcgccgtcatcacggcgacactgtccacgctcttcctgaacgaacagctccatgttggaagcgtcctaggtgcggttacgatcatcgcggggctgtacgtcgtgctatggggtaaagcggaagatgcgaacggcggacaggtcggatccaagcagacggcagatgcggatggcatcgctgtcacagtagacactccgaccaatctttcagaaccgttgctaccgacagtggctgagccagtgttttgaacttgagtcttgggatttgggaatacccaagttcaaagggaaatttttttccccaatgcataacaatataggatttcttattcgtttttgaagtccaaaagaaatctacaggaaacaaatgtgcgtactatcaaatatcatcacccgattaactgaatctgtgaatcagaatgttctgttcatcctgggttcctctccccagccgctgctggcttgctgtcccgtcccgttttctgtcttccccagatggccccagatcccaaaatcccaatccagatatccgtgcctcggactcggaccctgtccgcccctgcgctactacggcacgccgtcagtgaccctgctgtcagagagatgatcagggggatcct

SEQ ID NO: 105315 - DNA, 248 bp, Zea mays
  unsure (1)..(248): unsure at all n locations
  Clone ID: MRT4577_27547C.1
ccgtccgcgcacgcagcgataaacccgtcgtggctcagcttcattctcgnngtgtcgtnncccgcgtnntctacagcgcggggtgcgagtcctcgcnngttctttgacagcccactcngnnctgtcnngtcgccccgtcccttagaaactacctagatcccgnntcagcttaaccgagggctccnnattctcttcgcggcgcagcgcatctctcggtgtcatcaaagcggcgggcggctggggcggcg

SEQ ID NO: 105316 - DNA, 637 bp, Zea mays
  Clone ID: MRT4577_27548C.1
gccggccgggccgggcatcacaccagtgccaccacaacgcgatatctttcttgctgaagctgctcctgttgcggctctcgccggctaccgccgtcaactgcttcagctatccgcgacaagcgacactccagtaatagtgcagcatgagcactaggcgtaggaacaggacgcccactcgtggatggcgccgccagcgcagggcgcgtacaactcgctgagtaatcggcactccacagtctgtgtcgatccagttctctccgcggagacaacaacatgaggcgcaacgactccctccacggcctgatcactaccacgcgggacgtgcgcatctactgctgagcaatcttctcacccggattacattgacctacgaccagcattgcaaattcataaactgatgctcatgtgtacaaccacgaagactagtgcttcgtagaatcgacagagaactgccacatgatgcttcaactatgttcttacaacctcggacgatgactatcaagaagatgacatgctctgatgattctcttcgacagaatcgatgcatatcttgtagactacgtccgcaaactgctgcacgacatggtgataaaggacatcgtgtacagcaaagtcctcattgtcggaatgttctatt

SEQ ID NO: 105317 - DNA, 346 bp, Zea mays
  Clone ID: MRT4577_27549C.1
acgcgtccgaagctccgcaggccactctgcgcgagttgcttggcctgcttattggccctggagagggtcgtggtcttgctagccatcggcgcctattcgaagaaaacttactggcgaagggcctaaggcctgttaggatgccctgtcaacgacatcccaatctatctgcctccggcctaaatgtactctcctaacattcccgacaccacacagatatactcggaggcccccatcttattatgacctgccaaacactaccatgcctagctagatattcaacactcacctattgagctggctgtgcacgactcttgccagccctgatgactctcatatctctcttgaa

SEQ ID NO: 105318 - DNA, 392 bp, Zea mays
  unsure (1)..(392): unsure at all n locations
  Clone ID: MRT4577_2754C.1
attcccttctctacgccactcttcctttgccactctctttgcatcaaactactttgataatgaaaatcccccttatctcattacagtagcttntaatacctaacactcattccttcttttaccgtaataaacttttcactcatcatacaaatacgatacaccaccttcacaacaaacaacaacaacctatcccttcaaaaccactttccctactacctcaccatcatattcttctaaagctcatcaccttcacaactactcttatcactactataatcatttcactctataatcacacaaatcttattcccattcaactttcagactctttttcaccttctaactttcctcttacttctaagctgcacctaatgtctcactttaactacttt

SEQ ID NO: 105319 - DNA, 822 bp, Zea mays
  Clone ID: MRT4577_27550C.1
tcaaacagcacaagcggtgaatcatttaaaaatagaagagtaccaaatcgacctggggataataacagtaatctgagttcaaattctgatgcaattaaaccacgctgcaaaaggaggcataaaaagaaaaggaagccggtataactttgcatccacatttcacaacatagaccttttttgtgcatcttttttgaggtcatattttagaaaacataggatgaaccacgtctagtactttttttgtgtatcctagtttttcaaacttcactatgggtttcaagtttattagtcatgatatggctacttccacttaaattatagatcctcttgcggcaccttggatgctgctgtgaaacctatattttgctgccatccgacgggcgatctatcagagtttattcattgggtattataaatcataagttcataaccatcaacaggagaaacatatcggttgcagactaacctatcggtgcaaagtgtgcaaatcaatgtaaagagggtggtggggagtgttgttttaaaacatgatatttttagaaagttcctcccacctgcatccttagtttgcacctgatatgttgtccgtatatcataagtggagatctgcacaaacagtagctataaaaaaattatgaagggaaatccggccaccatgtttgtgtggcttgaagttagttatgcttgacctattttgaggcaagttggtgatggtatctgtattggttttgcctggcctgtaccgttttgtctcccatagacaaaaacagtgttagtggttaactgtctcttgaatataatactccgtagatatataaatgc

SEQ ID NO: 105320 - DNA, 188 bp, Zea mays
  Clone ID: MRT4577_27551C.1
agtgtctcgcgcttcagatctcgcccactgatctggatcgtggaagttccttccctatctgtatgtatcatacgcacgcttgttcgcgttcttggctttgctcccaactctctctagcagagtaacatgtctagcacgagcagagcatgtgtgtcagtgctggcaggatgaacgactcccacggttga

SEQ ID NO: 105321 - DNA, 211 bp, Zea mays
  Clone ID: MRT4577_27552C.1
cggccggattcccggtcgacccacctccggctatccttcatgcggtaacgccatctggatgacgtgcataaaataagtctctgaggccgaactaaatctcatgcgcggatggaccggccactgtaaagtcagcgcgtggctacagacttgtaaacactgggctgacgatctagcagagccaatcctccgtactcatggtcgcccggcctgt

SEQ ID NO: 105322 - DNA, 261 bp, Zea mays
  Clone ID: MRT4577_27553C.1
agccagggaaaacataatttcggtaaagtgcagagcaagaggggaaaggtcgacagtctggacagtgatggcttaccatacgtcggagcaagtcttcagagtggtgacattgtcattggtaaggtcacggagtctggtgaagatcatagcgccaaactgatgcacgctgagaaagggatggtggacaaggttgttctttcggcgaacgatgatggggttaactttgcaactgttactctaagacagtctcgctcgccatgc

SEQ ID NO: 105323 - DNA, 314 bp, Zea mays
  unsure (1)..(314): unsure at all n locations
  Clone ID: MRT4577_27554C.1
cgcgtcgagcacgacgggcagcaaccngagccgcggggagctctacctgtgctttggggaaccccggaaacaccgccgggagaccctcgccacgggcctcgactgccagtccgaggaggcggaccaggacctccttgaactggatcgacccgagctccacgcgctctactgcagcaggtacagcacgcaccgggcgcacaaccggcacaactcgccccgctgccgccgctactacagctactacaactgccgcccgggcagccagtaccaccgctaccaccgccgcagcacccgcattacccgctgacgcggct

SEQ ID NO: 105324 - DNA, 550 bp, Zea mays
  Clone ID: MRT4577_27555C.1
ccggccgagttcggcccaccaaacctagctcgcgagacacgaataaagcatcgatcacgacaagatggcgtgcacaaacaatgcgatgagagccttgttcctcctggtcctcttctgcatcgtgcatggtgagaaggaagagtcaaagggcatcgatgcgaaagcgtccgggcctggagggtccttcgacatcaccaagttgagcgcctccgggcatggaaaaaccaacaggactaatgctgtgcactaggcatgggcatcagcgtgacgggcctctgcgaaggcaacaattcctatactctatgccgactttccttcctgacgcttcacggtaagatccagttcaagggcaggcgcacccatcagaagggcatcacggcgccgtgcataaacgtctgccaggaggagtgcgacaaggcgtacgtggtgaaggcggtcgaggtcaccaaggcctgcagcgtcacctgcgccaaggagaagaacccgcgcctcaccgagaactggaagaaagtcctgcacccctcctcctttctgaagccaagccctttga

SEQ ID NO: 105325 - DNA, 1225 bp, Zea mays
  Clone ID: MRT4577_27556C.1
gccggccggggttataaataaaaaaaaaaaaaaaaaaaaaaaaaaaaaaaacgattcccatacacatatcatcgtctttggcggtcgagattcacctatagctagctggagtccagcagcagcaacatggtaggaggagcagcaggaggagaagtcatagggggcggcggctgcagcggcgaggtcgtggtggtggtcgtcggccgggccgagatcgacaccagggcaccgttccgatcggtcaaggaggccgtggccctcttcggcgagagggtcctcgccggggagctctccgctggacgacgaggaccactctcctccgtcaccgagactacccgatcatcgattgcacagaatcgagtggcggcaacaagacccaagcaccacgccaagagtcctgccaccggcgcggtcaccacggctgcgctgcgcgccgtgccaccggtagtcgtcacagcggatcagctggaggaggccaagcagaagctggagaaggagcgggaggagaagcaaaagatggccgggtgcatccagaccctgcaggaggagctcagccacgccatggaggaacttaagaggctcaaggcgcgggacgacgaggaggccgccggaaccaaggtcatcgacctggagatcgacgagggcctctacttcaccgaggccgccgagaagcaaatggcgccgccgccacagggcgctgccggcggagcaggcgagctccagaagaagaggtacgtgacgttcgctgacccgccgacggtcgccaccaccgccgccgccgcgtgccgggcgccaccgttgccggacgtggtgatggaggtgcaccgcgcgccgccccaccagctccaccagccgcacccgcattactaccgggagccgcggttccagaggcagatgtcggccgggcacgaggccgccaaggcgatggcggatgagggaaggaagaagaagaagccgctcatcccgctcgtgggcgcgctcttcatgcggaggaagaaaagcagcaaaagtttccacgacgacgtggcgttttgatccatcaatacatgcatacgtatatgcatgcatccatggagtgatggaggtgcttttattttaaattttttaatatatatgtctggataatggaatgcgcacttctaatgcatggatctttgcaaaataaataaatatatccaatacacaaatataaaaaaaaaaaaagggcggccgccaccgcggtgga

SEQ ID NO: 105326 - DNA, 161 bp, Zea mays
  Clone ID: MRT4577_27557C.1
gaactatgatcttgatccaaccgcctctttgcacaactgctgaataaagggaactaaattaccatagcagctcccctctaaatggtaaataaccaaaaaaccaaacccactccatgttggaagatgtgttcagagctaactatccttcagttagagaagct

SEQ ID NO: 105327 - DNA, 559 bp, Zea mays
  unsure (1)..(559): unsure at all n locations
  Clone ID: MRT4577_27558C.1
aagggtgttcttataatttgtttactatttttgccttattacccatcatataatttttagggccctgcaacacaggcgagagggagttgttttttgaaaaacaggcagccccaaccaccaaggaggagggcgctaccaacccacttggcccaattgttgtttctaaaaaaaacagtggggcgctaaccctccctcttggggggcgggacgaaaaactcacccccgagcgggggggggacctacaacattggaggacgcactggctnccagggttaaaaaaaaaaatccgagggccaaagggaatcaaagggcggaaagcacacgaacaaaatgggcaagccggaaaataccctccctgggctcgaagggggggaaattctatgcttaagggctaaaccccgggaaacccccgggcgtttggggtttcccacccaccacaacgggctcaccaacccaaataaacccctggcaaccaagaacaaacccaaaattacccttttaaaaaaaaaaaaaaggctgcttcttacgttaaaccaagaagggagctcccatcaccatt

SEQ ID NO: 105328 - DNA, 127 bp, Zea mays
  Clone ID: MRT4577_27559C.1
ttctcttttttcacacgagacgacatacgtccgggggatgggttttatcagatgctgggggtgactacccgaaaccgtcataataagataggatctccacaagtgcattagttctaaagaccgaatt

SEQ ID NO: 105329 - DNA, 247 bp, Zea mays
  Clone ID: MRT4577_2755C.1
cagcgtcgttttttttgcgctgtcactcgcagccagcaggtcaagagcgaacactacacaccgcgagcactgttaccatgcatacagcatacatagtctactagaaacgtgatacaacgtcagacaacacaacgaacacgcgagcccttaccaaggaggagcatggtcttgactgggaacctgcgcccagcgccggggaaccgcccctcggcttagcagagctgaacgccgcaccgtcacggacggt

SEQ ID NO: 105330 - DNA, 443 bp, Zea mays
  unsure (1)..(443): unsure at all n locations
  Clone ID: MRT4577_27560C.1
ctctgttacttctgctagctctcaggcgaagcaggcttctaattgatctccgacgacgcttgttggatctaaaaaaaaaaaaaaaaaaaaaaaaaaaaaaaaaaaaaaaaaaaaaaaaaaaaaaaaaaaaaaaaaaaaaaaaaaaaaaaaaaaaaaaaaaaaagggctttctttcccaatcgaagagtagtctttaaggccataacctgcgncctaccaacttttcccaaaccctacgggggtccgcccaaaataatcgtccacggggtttttggctaccaaatcaacccttaccagggcaaaaaggcgtcggccctgctcgtgaactttttcaacaagtgccaggcgaacccaacccactgaaacaaaatctcccagggcggcctccaccttatcaagaaaaaatacacctgaaacctttactcgaaaaggctaataaccct

SEQ ID NO: 105331 - DNA, 272 bp, Zea mays
  Clone ID: MRT4577_27561C.1
gggtcgagcacgcgtccggcaagatcgtggatgggggttccacgacctctcctgatgtcgctggtggccgccaggccagcagtggctgccgatatctcaaaatccggccatgcaaaacccctgacatctggagggtgcctggtacaggacaaggacagaaagttcacagccggggcatggaaaccagccaatccaacattctacggaggacgggacggatcagggaccacggcgaggacgtgagggtaaaaggacacgcgcgcacaagggta

SEQ ID NO: 105332 - DNA, 551 bp, Zea mays
  Clone ID: MRT4577_27562C.1
acctcctcatcctccagacagcctcctcccgtcatcctacatcctggcgttcgcctttgccccttctaccgatgccttcggtcgcctcgcggtcttcacgaacaattactgccctttctgcggccgtgcgatccacatggtccagaacgtcatacaaagctacaaagccattgtagttagataaactgactgatgcatgtgatctccacagtgccctgaatgaccggactgaacaccatagtgtcacaagtggctgcttccatgaccatcatattggagactgtgatgatactatgccactgaacaatgatgttaagctgccgcctctgctgtagtgatgatggagccatcaactggctctgactcgcaagactaccactcctgcattgacatcgtcgttaccattcccgatgcttacaacaatgatgctctgcaagagctcaacttgcacatgctatgtggtgaccactgcctcgatccctgtgtagaactccctagacatcagcacagtcctgctgctgtgccgcgtgtgaaatctacaagaagcattg

SEQ ID NO: 105333 - DNA, 662 bp, Zea mays
  Clone ID: MRT4577_27563C.1
gaggtttggccggggctcccagcccagccgctgcctgcgcgcgcgccagcacgcgctcgtccctgccgccgccgctcgcgctcgcctgcatgcacgcccgccctgctggctaccgcgctcgcccgcgctgtagatgccgagccccgctgggtttgcctgctcccgagccgcccacgtcgtgttctctgacaactgcctcccatgtccgctctgcccgtagtcgcccacgccaaggaaatcggcgcccacgatcgcggaacggcacctaatgcccccactcatggaaaaacctccccaatctcacctcattccatcctgctcgttccccctcgcctcagctaacccttgctgctcgctgtgtccgtcgttgctgggccacggtggtgcttcaccatcgcaggagctcgaggacatccgcaccactacagagctggtcgggtcaccctagcacggcatcgtcgaacacgccgaagctcgccgcatcacctccaccacgctgtcgtctgtgtgcgcaaatcgcgattcgtttccaagcttcgaggaatcgaggatcaagcgttggcgaccaagtgatctggctcttcgagttctacaaagttggagatcctgagcatctgtttggggaagggtgcctttggtgcaatctatgctcaaggtaagga

SEQ ID NO: 105334 - DNA, 197 bp, Zea mays
  Clone ID: MRT4577_27564C.1
ctcaaccatatttaactaacctacttctccaacctaacgccggggcgtaactttgccgtcacacacttccaatcataaatctaacttgttcagcgaacctacctgccaaccttccccacccgcacttacttccatacaattactttgttgtctcacccacatcaaattacctgcccgcacccctacatacgcaccat

SEQ ID NO: 105335 - DNA, 763 bp, Zea mays
  Clone ID: MRT4577_27565C.1
cgggggacgcctgcttctcccccgacgccgacgacccctgtcaccgtcttccgcgccaacgccgccgtcgccatcacctcgcgtcgcgccagatcttcatcgtgcccttcaccagcgacgagcacccaacagactactcctgctgtttcttattgccaataagcacaagcacacttgagaaccggccatcaccatggagacgagactctttatcgcccttcagtgcgtgcagtgcgccaccatgcaggtgaagcagcagaagaggagcagcaacaagtggtgtgtgtggtgtgcaaccagcgtcagtctgtgcttcatgtccatgccaggggctatcgtgctgctgatctccgccgcttcgtccaggacaccaaccttgcccgtggccgccgggagttcgcaccgttggccgagcccgacgtggacagagatctggcggcagttgaggagggagatgtgttccctatcgagaagagtcagacggagtggtccgagtatctggacgatccaggggagacaggtaaaggttgtggtggccttggcgcagatgcttcagatggagaatcggatgaaggaattgaggtgataactgaactgcctcagaaaagacctaaagttaggcctcgcaaagcccaatcagatgtagtaggaaagagaaccaagctgtcaacacatcccactttatgtaataagaggcagcagatcaagcaaggatcaagtccccactgtgcaactactactgctgaagcacaaggatcaaaat

SEQ ID NO: 105336 - DNA, 1339 bp, Zea mays
  Clone ID: MRT4577_27566C.1
gggtacccctcgaggccggccgggctcagcccgtctcctttccaaatttttcacccggcgtctgctcgcctgcgagacgccgcgaccgcgatcaccctctcgggtttctcggacgcgccgccatcgccactccgccactcgcgggttcgttggatcgacgccaccgtcacctcgcgccgcccagaggaggacgcctgcttctcccccgacgccgacgacccccgccaccgtcttccgcgccaacgccgccgtcgccatcacctcgcgtcgcgccatacgcccaggtctccgccgacgctgtcacacgccaggagctcgagtcttcgtcggtccctttgccagatcttcatcgtgcccttcaccagcgacgagcacccaacagactactcctgctgtttcttattgccaataagcacaagcacacttgagaaccggccatcaccatggagacgagactctttatcgcccttcagtgcgtgcagtgcgccaccatgcaggtgaagcagcagaagaagagcagcaacaagtgggtgtgtgtggtgtgcaaccagcgtcagtctgtgcttcatgtccatgccaggggctatcgtgctgctgatctccgccgcttcgtccaggacaccaaccttgcccgtggccgccgggagttcgcaccgttggccgagcccgacgtggacagggatctggcggcagttgaggagggagatgtgttccctatcgagaagagtcagacggaatggtccgagtatctggacgatccaggggagacaggtaaaggttgtggtggccttggcgcagatgcttcagatggagaatcggatgaaggaattgaggtgataactgaactgcctcagaaaagacctaaagttaggcctcgcaaagcccaatcagatgtagtaggaaagagaaccaagctgtcaacacatcccactttatgtaataagaggcagcagatcaagcaaggatcaaatccccactgtgcaactactactgctgaagcacaaggatcaaaatggaccaagtatttggacacgagccgttttggtgggaggaaatgcttcgatacctctggtctgcactggactgaacatgatgaatctgccactactgaggctactactgacgtagtggtggatgatgaggtgcaccctgatttcatctgatctcatgttggtttgaaatgccaaatgctttgtgttttggtagtgtgtagtttggtagccataaattgtgctgctggcagcacattgtcaagacaaaggatgtgcagtacttggtatccgagggaagaagactgttgttcccaagatgttatccagtatgatgggcaattcatagt

SEQ ID NO: 105337 - DNA, 653 bp, Zea mays
  unsure (1)..(653): unsure at all n locations
  Clone ID: MRT4577_27567C.1
cattgggtacctcgaggccggccgggatcgcgagatctagcgagcgagcgcgcacactgcntggcggcaccaggctacgacgatcgagagagccgccgtgccagcacattgtccattgtccgcgcggcgggggatcgggcggacgcgcacataatatggcgcagctgccgcccagggtcccgaccgcggtgcaccgctggccggagggcggccaccacggcgcggcggcgtgggccgatgacttcgccgagttcgctgcgttgcggcggggcgcgcaccgcaggtccctgagcgactcggtcgccttcgtcgaggtggcgcccgcggccggcgagttcgacaggctcgacgacgaccagctcatgtccatgttccccgacgaggccgccgccggcggcggcggcggcgggtcgtccgcggcagggtccgagaacaacggcggcagcagcgacagttacgccgccgcctccacggagctgatccgggaccccaagagggtgaagaggatccttgccaaccggcagtcagctcagaggtcgcgggtgaggaagctgcagtacctctccgagctcgagcgcagtgtcacaacactgcagaacgaggggtccgcgctgtctccccgtgtggcatttctggatcagcagcgtaccata

SEQ ID NO: 105338 - DNA, 298 bp, Zea mays
  unsure (1)..(298): unsure at all n locations
  Clone ID: MRT4577_27568C.1
tnnnnggtgtgttttttaaattgtgttggtttttaaaaaannnnnnnnnaattttttttttttttttgaggaaacccaaacagggaaaatcaaatccatttgttgaaaaaaagaaaagtgaatatttgagtggcatatgactcaaaccaaacactaccctatgggacaagtacaaaaacttttccccacatcgaaattgtgcaaaactaattttaaaattcaaacaggaaatgtcataacaaaaattgcaacttctccaaaaaaacaaaaacctactggtcctccttaataacccttt

SEQ ID NO: 105339 - DNA, 1399 bp, Zea mays
  Clone ID: MRT4577_27569C.1
tcgcatcggccagctcgtcccgtccgtcacaacactgcagaaccaggtgtccgcgctgtctccccgtgtggcattgctggatcagcagcggaccatactgaccgtcggcaacagccacctcaagcagcggatcgcacgtgttgctcaggacacgagagatctggcgagcgagcgcgcacactgctggcggcaccaggctacgacgatcgagacagccgccgtgccagcacattgtccattgtccgcgcggcgggggatcgggcggacgcgcacataatatggcgcagctgccgcccagggtcccgaccgcggtgcaccgctggccggagggcggccaccacggcgcggcggcgtgggccgatgacttcgccgagttcgctgcgtcgcggcggggcgcgcaccgcaggtccctgagcgactcggtcgccttcgtcgaggtggcgcccgcggccggcgagttcgacaggctcgacgacgaccagctcatgtccatgttccccgacgaggccgccgccggcggcggcggcggcgggtcgtccgcggcagggtccgagaacaacggcggcagcagcgacagttacggcgataggcgcggcggcggtggccctgcggcgggaggcaccagcaccaccaccagctgcaatggcttcgatggtggcgagcacaacgaagccgcggacgcgcaggcgacggggcaagctgccgccgccgccgccgcctccacggagctgatccgggaccccaagagggtgaagaggatccttgccaaccggcagtcagctcagaggtcgcgggtgaggaagctgcagtacatctccgagctcgagcgcagcgtcacaacactgcagaacgaggtgtccgcgctgtctccccgtgtggcatttctggatcagcagcgtaccatactgaccgtcggcaacagccacctcaagcagcggatcgcagctcttgctcaggacaagattttcaaggatgctcatcaagaggcgttgaagaaggagatcgagaggctgcgccaggtctacgagcagcagaacctcaagatgtcagccggcgctgctgcctctgaccatggcccgccaccggtgcgcgcggagaaagagctcatgagctagctacccagtcgatccacgcgtgcccgctgtgcagtgcagcccgcccgccttatcattaattaacatggagggaacattgcatcatgatttctctttttttcggattatgtggatgttttcttctttctttctttcttcttccattgacacgtgtgcgttaattctttgtatgttgattttgggatttggttcactgtgcaaattgtggtaaagtcatcagggaaactgatctgttgtgtaaatcacttttttgaagcattacattcctgggaatctggttaccc

SEQ ID NO: 105340 - DNA, 322 bp, Zea mays
  unsure (1)..(322): unsure at all n locations
  Clone ID: MRT4577_2756C.1
gctgggggtgtgtgttgttttaatgacaatgaacacaattattccttggggagtgagcaatagtttacatcatggggcaaaccgagaaccagcgtgcgctcacatgcgtccgggacacctaaaggggaccgggggggcctccctcacttnccgggggcgaagttgggggggtangcccaancgttgttgttgacggggtgggcaatggggggagcgaggggctcgagggggcccttcccggggacgatgggctggactaaaaatccgagcatggggaacatggggaggggggcggtcttgagctccttcaccttgagctcag

SEQ ID NO: 105341 - DNA, 662 bp, Zea mays
  Clone ID: MRT4577_27570C.1
gctcgcgacgccggttcccgctttgtccggcgtgttcgagccgcggttcggcgagaagccgaaggcggccggcgacgacggcattcccgacggcggagatgacaagaaggccacggtcgtggtgccgccgtcgccgtggcggcccgaggcagctagcaagctgagcccgcagccgccgcaggcaaggaggaaggtggtgaccgggctggcgtccctgctgctgctcgccagctgatcaacccaaggagatacgctctccccggctccggctccggctccaaaacaaatttccaccttttttttttgttgcctcccttccctcgctcgcgttcgtcgatccgtccgagggccggctccaggtgttttagcggtttttttccggctcctcggaacagtgagagagaaagaaacgcctcccttttcccgtcgtttttttcttcttcttgttctttctgttcatgcgagaaaaaaaaaacaagagtttcagttgtccgcggccccgggggaacggaaggaatccggggcagttttggttgggtccccttgccctctgttcttgggaggaactgaagcctcggcctggcttgcagtgctgtaccgtgttcgtcaggtcatgtcaggcttgtgacttcaattgaaagaggtactactacagtagtagt

SEQ ID NO: 105342 - DNA, 204 bp, Zea mays
  Clone ID: MRT4577_27571C.1
aattctctccttgcccgatgcgctctctctcttcattcgttcccgggctcaccccttaccagtcgtctctctaggcccttctgcgccgtcgccagtggctcgccgcagctcaggaaggactgccccacgaccagctccccgtgctgcttcgctgaggaaaccgccacagccagcacgcccgggtcctcctccaactcctgttcg

SEQ ID NO: 105343 - DNA, 378 bp, Zea mays
  Clone ID: MRT4577_27572C.1
gtcggtgcttccggggcctaaatttgaaaactcgatacaaatccattttaagggagcaggggtacatgtatgggatagcgcaataataataataataatacacatccactaggcttggtttgtattggaacaaagggggacacgggcacgggctataaatatatatggggtatgcccatgcgggcggggcttggattatttttcgatttttgttcctggggacaacatgtatgcggcttcattattattcagcccaagcatgatgcataaaatgtttggctttatgttgagccgggtggaaattttaatccccagggacgcgttgcacttggggaggggggtttttcaaatggaccctggcttctgggtgacctttgg

SEQ ID NO: 105344 - DNA, 409 bp, Zea mays
  Clone ID: MRT4577_27573C.1
aaaaaaatgggggtggttttcgggggaggtggggtggttttcggcagcggccaagttcccttgaatttcataaacccctgaaaaaaaaaaagaaagaagaagggggagctgaaagctgtttgcccgctccaaaaatgggaacacccgtgacccgcccaacccagcaatttcccctttcgaaatgccccaggggaggcggtggcccttgaaacacccaagatgcccttttttttgcaatctaatccagtttcacataggtggggccggtgccggctcctttttggccattattatgccccaaaaccttcagctttgctagggttgttttggggaaactgtaacctttgtcagggccctttaagtaatcaccggaagggaaaacaaaagcaaaattgctttggctctggcc

SEQ ID NO: 105345 - DNA, 437 bp, Zea mays
  unsure (1)..(437): unsure at all n locations
  Clone ID: MRT4577_27574C.1
gtctcttgggcgctccgggctctctctgtgtttgtttttttctgtgtgtgacgcgtcgccnctctctttttgggggggggggggcgtccttggtgtgatgcgcatgcngggcgtcgggcgcccacggggcgcttttatttagttgccatgcccggactcccggtgccctcgatgatgacgcggtggtggctgggtcgtctcgggactccgctcggtgctccgggcggcggccacggcggtgtggtcggtggctccttctggcggccgccgtcgcgcgtgggctaggcttttgccgtccctggccgcgggcgtgggaggtgccggtgggggttgggatgctgacgccgctcttgtccgcgttgccggcgggtttgccgttgttgaggccgttggcgcccctgtgcggcctctttgggttgtttccgtcggcgcgcctg

SEQ ID NO: 105346 - DNA, 359 bp, Zea mays
  Clone ID: MRT4577_27576C.1
cattggtggagatgtggtcagacgcaaagcacaaggtatgccaattaaataataatatgtttaaaatataaggtatgctacattctccttttgaacatagtgagttagtgatgttggaatttgttacatatttcctttgagcttctaatgttaattgtggacaccataccaatattggttggtagctgagtgttcatttattcttttcggtcaataaaaatttaacaagcttgagtattgttgctagctgaatttgatctattaaagctttatgatcttttgttggcattttggtttcatgattggttaatctaaatgaatgtgcacttatactaaatactggagcattagtgttcaga

SEQ ID NO: 105347 - DNA, 643 bp, Zea mays
  Clone ID: MRT4577_27577C.1
cctcgaggccggtgggcacctgtgcccgactcaaccaatctactcgctgctacaacagagtttgcctgttgccttgcttccacctcccggctgcagctgcacctgctgctcgatcggatcggccgcgcgcggcatgtcgaccaccacccccaccaacgccgcctcccagcagggcgacgacgctgcggctggccgcgcggacaagaagccggcgcaagagacggtgacgaagacggtgcagacggtggaggtgcggtcctcggcagggcagcccgacgaggagggcgtgctcaagcccgtgaaggtggtgcacgagatccccgccaaggacagctccggcgtcaagcaggactaggactagctaagctgcctagctcgatcgatcatctagctaggatcgatgctgctgctgctaagctgagtggatttgatgctgctgcggtcagaaatcttatcgtcatttccaccccccaaccagatcctagctagtaattgcaaataaacaaatgttgcgttggatcctaatgtgaattagtgatctgtgcggcctgccgcttcatttgtaaacatgtactaataagacgcctgattttgtgttcgaaaaaaaaaaaaaaaaaagcggccggggcggccgttctaaagg

SEQ ID NO: 105348 - DNA, 252 bp, Zea mays
  Clone ID: MRT4577_27578C.1
ccgcgtcatcgtccgccagcgcaagcgcgtagcgtcgcaaggccggtgtctacatgtacttcgaagataatgctggagtgattgtgcatcccaagggtgagatgaaaagctctgcgatcactggacctatcggcaaggcgtgtgctgacctttggcctaagatcgccagtgcagcaaatgccatcgtttgagcgctattggaatgtgtttacactaagtatgatcatctcaattgtgtgttgcaggcgttgt

SEQ ID NO: 105349 - DNA, 148 bp, Zea mays
  Clone ID: MRT4577_27579C.1
caggattcgagtttaacacggggggggattattgctcactgtaacacaattcacaacgatgcatacacttgtgtccacttgtcaccggccggcacgaaatttaacgtgtcaagcgtttcctgtgtacactaactcgcgcatcgggtgc

SEQ ID NO: 105350 - DNA, 477 bp, Zea mays
  unsure (1)..(477): unsure at all n locations
  Clone ID: MRT4577_2757C.1
actcctagtctcctaggcttccaatcactcgatagttcttcaacaatggcgttctcggcggatccgaccgcacagccctacgtcgtcgaggattgccgcggggtgctgcagcttctcagcgacggtacagtcgtgcgctctgcggccttgcccttccctgtcgacggcaacgtcgcatataacgaccacggccgcgtcgagtggaaggacgccgtgtacgacggcggcctcggnctcacaccccgcatggaccaaccgaccataaacggctgcgacctcaaacgtagaggctgcacaacaaaaaaatgagaatccccgtggcccctgttttttttttttccaccccccccgcgacgctcctatgctatatgtcctgaagaactgtattggagccattacatctagacacggtccctgaaggcggtatcaattctacatctgttacaggccccaaagcacttcagaagacgacttctg

SEQ ID NO: 105351 - DNA, 536 bp, Zea mays
  Clone ID: MRT4577_27580C.1
tcagaagattgacacccttctcagcaagaactctgggcagaaggccctgccgcgtgctgatgggctccttctccagacatgagtcaccagctcggccatgcgagatgggactgacacgaagatctagctgccggatgtgatgctggaccgattcgacgtgccgtagtacatcaccggagaggccagtgcattctatgggtgcgacccctttggcctcgcggactaacgaaacgacttgagcaagcagctgggctacgagctgatccatgccagatggggcatgctcggtgcggctggcgctgtcatcccagaggcctgtcaacagttcggcgctaactgtggacctgaggctgtctggttcaagaccggcgcgctgctcctggacggcaacaccctcaactacttcggcaacagcatccccatcaacctggtggtggacgtgatcgcggatggcatcctcgtcggcggcgccgagtactaccggatcaccaacggactggaccttgacgaaagctgcaccccggtgtgcccttcga

SEQ ID NO: 105352 - DNA, 472 bp, Zea mays
  Clone ID: MRT4577_27581C.1
tgtccgggcatatttctttcctcataaatacggcgacgtggcgcgctacctaccggatggctctcgcctccgctacggtctcctctccctcgcgaatcatccgctgcttctcttcttctacagactctcgccctcctctccctcttcccctcgcctcgcgcgcctgtagctggcaccggctagtggtgggccgggtgggcaggccgcgagcgctcctcgggggattctcggacgcgggcgccagtgagagcgacgacgaggaggagcacggcctgcgaggtgggaagcgggacggcgaggtcgacgacgccttggagctctccgcaccggccgtcgggccagagagatgggacgtgctgggcctcggtcaggcgatggttgactactcagggatggtggacgatgagttccttgagagattgagcatagagaaaggcgcgagaaatggcataaaccatgaggagaggggacg

SEQ ID NO: 105353 - DNA, 578 bp, Zea mays
  Clone ID: MRT4577_27582C.1
cctcgagtttttttttttttttttttttttttttttttttttttttttttttttgttggttttttttttttttttccgggtttcatagaaaaaaaggggaggcacaaaaacagggggggacacaagaggcggggggacgaaggagccaaagggggggggggggagcaaaccccaaagacaaggaggaaaagaacgaaaaaggcaaaagacgggggccgaaaggccctaaagcagccaaacagcccacccgcgcaaccctacccggggggggaacccggccccaccaccaagcgcaaagcaaaaggcacggaccctggcacagggggacagagaaccaacccgcccgggggaccaggacaccagggcccgccgcgcctgctcggaaaaggcgccggccgagcgcgaagaggactgggggggggccggggccggtgccgggagcctctctacggccgacgcacccgcaaacggggcgggcatccccggggaacccgggctccaccggcggtggcgccgggtaggagagggtcgaacgaggggtaaaggggttaagcttgccctcgggccgaattcctggg

SEQ ID NO: 105354 - DNA, 273 bp, Zea mays
  Clone ID: MRT4577_27583C.1
gcttcccgtgcacagcgtgacgacgagacctgttgccccttgtcagagctccgcccttcgctgctggtgctccttcctctgcttccctgcagcgccgtccgccgtcgagccaatctcgacgccgttcttcccctctcctgatcgacattgctgtgagaagccgactgtgtggtagaggattcgaatacgttcgaagacgaaccacaggatatgtttgagcaagagggtgatgctggaaactttgatggagattttgacaacgaggaattctaa

SEQ ID NO: 105355 - DNA, 268 bp, Zea mays
  Clone ID: MRT4577_27584C.1
gaaaaaccacccagattctttcggttctttcacggttccacccctcccctccctctcgtgctcgatccatcgccgctgcctactccccatggcctcagcgaacaacgacgaccgcgaggcggcgggcatcctgcggctgctgatggggatggcagcggcggcggcgcccgcctcggcattgcctcggggcggcggcggcggcctgatgatggtggggggggtcatcctcgtcgtcaacggggaactgttctcgggcggggtcggcggc

SEQ ID NO: 105356 - DNA, 410 bp, Zea mays
  Clone ID: MRT4577_27585C.1
tttcgcgtccgggggcggagaggtccccgcgctcagacagtcgtcagcccatttccatcccccaaagcctagaataggggtctttagcccgtgagtcactcgacgtgatggcccacaagcgacagctgagcggatcagggcgtcgaccgtgccagacccagctaactactttgcgagaagcaaaactacagacacgggtcattttacacgaccgggccggtaccggttcttgcgacgactggaaggaacatcggaagaagacggtggaagacccattatacgccgaactcagggcgacctgaggctaccaatatgtgtacggtgggaagcacacatcgccgccataggcacagaggcttggtgatcaccaccggggcatgtcgaatgatgcgtggggcgagtctcagggg

SEQ ID NO: 105357 - DNA, 592 bp, Zea mays
  unsure (1)..(592): unsure at all n locations
  Clone ID: MRT4577_27586C.1
aattcggcacgaggggaccattattgcccttcagtacgagttcatcatgaagggtcctcttcatcattttttggggattgttgttgtgcgtctcctagatggcctgtttcttcagcaacgccagtacatcctagatatcctagagtgcgctgacatgctgggttgcaagcgatgtgcgacaccggtggacacgcaggccaaggtctatggcgacaatgcccctgtcagtgaccacactacctaccacaaccttggcgatgctctttagtatctcaccttcacccaacctgacattgtgtatcatgtctagcaggtctgtctttacatgcatgatctctggaagtcgcacccgagcgcggtcaagtggatcctttggtaccttccaggtactgttgactactggctccatctttagtgctcctcacacatgaattggtcgtctacaccgacactgactggngctgtgtgccacgacacccgccagtctacctttggtttcgtgggtgtttttttggggcctacctcatatattgatcctctaaatgttagctcgtggcctnccgctcgagcactgaggatgggtatcgggctg

SEQ ID NO: 105358 - DNA, 395 bp, Zea mays
  Clone ID: MRT4577_27587C.1
ctcgcgggtcgatacacgaatctagcataaatcgatttactcctcatgtggagagcctccagagtcgcacatgtactcttacacgcaccgcaatggaaatttgaccgttctagtgaaacgtctggtgccccaacaccatttgcctggtgaatctgaaggaaaagtatggatgtggactaggtgctcaagatgtgatcatgaacatggggtatccaaaccaactccaagagtactaatatcagctgaagcgcgtaacctctcgtttgggaaattcctggaactcagtttttcgagccactctgcagcaagaaggttatctatatgtggacatctggtcaacagggattgcttgcgtttttttgggctgggctctaaagttgctatgtttcggtact

SEQ ID NO: 105359 - DNA, 239 bp, Zea mays
  Clone ID: MRT4577_27588C.1
gattcagcacgccggccgttgggaagggagcttggaggcggaccgccgcgtcccgtgggacgggcggtctgagagcaatggcacgggcccttgcggcgcaaacgcactaacgtgagtcgacgcaacctgtatgcaaaagcaccgggtgctagcttggattctgacttacaggcgctcacacataatacctgacacggttgcttaaggccactagggttttaaccaagcaggaggaccaa

SEQ ID NO: 105360 - DNA, 304 bp, Zea mays
  Clone ID: MRT4577_27589C.1
tcggactagttctagagatcatatcgcgcccaccggtcaagatatttatctacgatgggtgtagtcggcctaatacagctgcacagctgagactccactacttctaagatgacgactgcttgccagcaccaaatgatgaactctatgataagtggctcctgcaatttatcagcttcatgatcatccacaatcctggtcgactacgacatacatctactagttgaaaaccattagtgtactcatcatgtgtaattttgtgttacgactctgggaaaatcataacgacaacgtttataaaattaaa

SEQ ID NO: 105361 - DNA, 630 bp, Zea mays
  unsure (1)..(630): unsure at all n locations
  Clone ID: MRT4577_2758C.1
tgccgggcaaggaggctcttccagcacctggtcctttcctctactctactctactcactcactcatcactcccaggcggccaaacagctccccaggtgctaattccttatgccgaatgcctgcaggttctgcagaacagagggtacgacggctgaaatacacacaatttagttgaatttaagttatgcctagtgtgctatggccactagtttgaatttaagttagatttaaaggttacacacaatttactagttttattatctgaatggttgaattggtctcgtactactgtacataatgacagctgaaatacatcatgtctctaccactttagcctttcgttttttatacactaatactgatctacatggactgcaatagtattcacaccacagtgaatgttgagcgtttattcagtaacactaatataggcaagaggtatatgtatttcataggcaaaagtaacactgaagacataggcaagaagtataggcaacaataacactgatatacttagagggaaaagggtatatgtatttctagcccttttataacagtcatttctagcagttntagcaaatgactggtcagtgtgtattaatagcagttcagtttatagcagtttagtct

SEQ ID NO: 105362 - DNA, 293 bp, Zea mays
  Clone ID: MRT4577_27590C.1
tcgagggacaagcaacaaagaggatcatcagtgtccagctagtctctctctggggttcaaaccttgaatcaatgccctagtgagggggcactggccatgacccctcaacctttgctctgctcgtatcttgagtctgagtccttccctgtacatctgtgctcgtgttcatcagctagtgaactgaagtgcttccctccccgaggggggtcgtcccttgtgactgaccatgttgtcctaacaatgtcctgagcagaagggtccccaatgggaacctctcaggaggggggttgggg

SEQ ID NO: 105363 - DNA, 335 bp, Zea mays
  Clone ID: MRT4577_27591C.1
ccatcgagcaacatagaacgcacaattgtgtgccaacaacggccgacataatatcacgccttactatgctccttggtctttctgcaagtgctgctacagctaccagcgcaccaaattgctcgaatgctcctataggttcacttgctccacggtacattataccagcggtgctcttcaccatgtgctaaaccgagttttgaacactacaggatccaacagtctatgctagatcacgtattagctgtatgagtcttataacatccacaatcataagcgctacaacattagttgccacagttgactatactgacactagaaatgaagcagcaacaact

SEQ ID NO: 105364 - DNA, 224 bp, Zea mays
  Clone ID: MRT4577_27592C.1
ttctaccattatgggtttgggggccttttttttttttttgctcttcaaaaaaacaccaccagttgacaactaatcccaaacaaatcattgctctacacaccacaacccaaaaccttaaccggaatcaaacaaagaactcaatgaacaccgcaccaaaaactcccacagcaagaacccttacttctcgggcactcaaaacacagaacaccggtacaatatacctc

SEQ ID NO: 105365 - DNA, 542 bp, Zea mays
  Clone ID: MRT4577_27593C.1
aggcgccactatagaagagttatgacgcgtgcgcccccctacgtaagctcggaattcggctcgggggggagcgtcgaccgattcttcccggcctcccgtcccgccgctggcctcgcctgccccgatggcggcggtggcgatccaccagttcgccgagtgcatcacctgccacgcctggagcccggaccagtcgacatgatcagatggtttcggggatagactggagtaaatcatccaacaaaatcgtaacagtttcacatgatagaaattcatatgtttggacacaagaaggatctgattgggtacctaccctggttattctaaagttaaatcgtgcagctttatgtgttcagtggagcccaaaagaaaacaagtttgccgtgggaagcggtgccaaatctgtgtgtatttgttactatgaacaagaaaataactggtggattagcaaggttatcaggaaaaagcatgaatcttctgtcactagtcttgcatggcatccaaacaatatatatcttgcaacatcgtctacggatggtaaatgc

SEQ ID NO: 105366 - DNA, 1648 bp, Zea mays
  Clone ID: MRT4577_27594C.1
attgggtacctcgaggccggccgggatagtggatgtggagaccatttccttttgcctctctcctccactccacctctcctctcctgcgctacagcgagggggaaggggagcgtcgaccgattcgtcccggcctcccgtcccgccgctggcctcgcctgccccgatggcggcggtggcgatccaccagttcgccgagtgcatcacctgccacgcctggagcccggaccagtcgatgattgccttttgtccaaacaaccatgaagtacatatctataaattcttcacagacaagtgggagaaacttcatgttctgtcaaagcatgatcagatggtttcggggatagactggagtaaatcatccaacaaaatcgtaacagtttcacatgatagaaattcatatgtttggacacaagaaggatctgattgggtacctaccctggttattctaaagttaaatcgtgcagctttatgtgttcagtggagcccaaaagaaaacaagtttgccgtgggaagcggtgccaaatctgtgtgtatttgttactatgaacaagaaaataactggtggattagcaaggttatcaggaaaaagcatgaatcttctgtcactagtcttgcatggcatccaaacaatatatatcttgcaacatcgtctacggatggtaaatgcagagtgttctctacttttatcaagggtgtagacacaagaggatcaaaatcgagcacttcaaccgattcaaaattcggagagcaaatcgctcagcttgatctatcatctacctgggtatttggtgtaaggtggtcaccaagtgggaagacattggcctatgcagggcacaactccatgatttatttcatcgatgaagtcgaatcatctcctgtggcacaaaatttggcactgcgtgatctgcctctccgtgatgtgggttctttttgtctctgagcgcacattgattggtgtcggatttgactgcaatcctatgatctttgctgctgatgatactgggctttggactttcataagattcttggacgagaggaaagctgccccatcagcttcaaaagcctcgcagctctctgaagcccttggaaagctatacggccaatcaaagcaagggactagtagtgataccgttgaaccatcaaaacctcgtggtggggcccatgagaattgcataacgtgtattgtacccttgagaaaaggaagcgacggtagtatcaaacgattcagcacatcaggattggatggtaagatcgtggtatgggatttggagaatcacgtcagcattgcaaaatagctcgagggagactttattaccaatcaaatcgagggaactcctgtcattaccagccgtcctgcaggttttcaagatccagggccagccagatagattgtttttttttaatttttaaattttgttgtacctgtacacagaaacattgccttagcgtagggacagcttgcatctatcaagtagcttcatttttggcgagtaattttgccctttgaattgaatctatccaatattgtactataattttagttaggtcgtaggcagtttacgtgatcccgcgttttttcgctctttctttccggtgccctgtgtaaaataaccacacgtggaattttatttatccgggacttgtggtc

SEQ ID NO: 105367 - DNA, 337 bp, Zea mays
  Clone ID: MRT4577_27595C.1
agcagggggaaaggcattggcccccgcatttttaaaagtattccacaagctgatactaacatgagggcacaaggacatcgctcatcccaaccatgcatatttgccgccggcacacccacaaaaaaaaacagctctcggggaaccctaaatggtgcacaactctacaaaaaaaacacacaagttcagcctatacaccacttcccaaaaaaacgaaacaagaggccgatccttgcatcctcgctagctactgggcctctccatgctggggggccaaacattctttcgcattttctccacaaagggcctccctttcttttcggagggcccccttttctcc

SEQ ID NO: 105368 - DNA, 354 bp, Zea mays
  Clone ID: MRT4577_27596C.1
actagccctatcgccaacgactccgtgttcacccatcgctcaagctcctcacttcctgggagggcacaccgtaacgccaccatgaacttcaacatcacgaacccttccaccgtgtgccaaaagaagctggaaatcgatgactaccagaacctgcgtgccttttatgaccgaatgatatcccacgaagtcagtggcgatgctctgggtgaggagttcaagggctatgtcttcaaaatcatgggtggatgttacaagcaaggcttcccaatgaagcaaggaatcttgacttctggacgtgttcgacttctgctccatatggggactccctgcttacgtggttatggcaagcgtaat

SEQ ID NO: 105369 - DNA, 309 bp, Zea mays
  Clone ID: MRT4577_27597C.1
atggcaggtacaaggactcaatagcgaacagcacgcgccgggtaaaaggagaggtggttcgctgcagagcagcgccaagccgaatcttgcctcgaagatgatgatgcaggtcggagctgagatacgcaacactacacttttaaacaacaggcagccggagacacgatcggatgggagtgggacagctctgacgactgctcctgatacgaatccagctcactcccaatctgattcaaatgcaagcattcagggtgcggtagctgttgtacccactacacctacatccagtctgaagagcattgcacatgc

SEQ ID NO: 105370 - DNA, 420 bp, Zea mays
  Clone ID: MRT4577_27598C.1
ctatgggtcctctaggcggcggggaacacttcctgcttgccgcaagcactccgaggccagtctagggcttggtaatctgtaggaggggagaggggagcgcgctcagggtcagcgaggccaagatgaccgaggtgctgctgaacgaccgcctggggaagaaggagcgcgcgaagtgccacgaggacgtcaccatcggcgacctcaagaagctggtggcggggcagacggcgacgcgcccctataagtccgcatcctcaagtggtacggcatctacaaggaccacatcacgctcaaggagtacgatatgcacgacggaatggggctcgagctctactacaactaaggggcctgaccccaaccgtgtcctgatgttagtccggattccgaaggcatgggcgcgcttccagtcacagcgtcttt

SEQ ID NO: 105371 - DNA, 133 bp, Zea mays
  Clone ID: MRT4577_27599C.1
ctgaagtgtgagcaaatacagtagctgtatattggaaactgtgcaagtgaagatggctttagtattgcaaactgaggaagaaaattgtttttaattagcaccttcataagaactgctgattaatactgttttg

SEQ ID NO: 105372 - DNA, 223 bp, Zea mays
  Clone ID: MRT4577_2759C.1
atctatattcttacctgtggcccgttactggattcaacactgagattgatctgcatttccatgcgacaattccggagccgtacctataggcgtaattcatttcctcagatcgatgacgattatatcatttattaatcatgtacatctctacatggtgtgtaagatgattatcctgtccagatggcagtgatgatactaccctgctgtataaaatctaaactcc

SEQ ID NO: 105373 - DNA, 568 bp, Zea mays
  unsure (1)..(568): unsure at all n locations
  Clone ID: MRT4577_275C.1
ggaggtttgngaaatttctagcttgaaggattatgctgggcacttcgtatgagatgattgtggctacataaaactgatccagacaggccgtgggcaaaccttcctatacaggtttctaaaaaggcaaggtctttcttctctactgttttggtttcagaagtgggaaatggagcacacactctgttctggacagataaatggctcttggatcagaaaatgagcaatctggctcctagattattcgccatcattcctaaaattactgctaataagagaactgtccttgaggccccaaccaacagaaagtggatatctgatataaaagatgctttgtctgtcggggccttagtggactacctgaacttttgggggctcctattataaatagtgcttcagcccgaagtagaggataaacatgtattcagtattgctgcagatggcaaatattcggctaagtcgtcttatgaaggtctttttgctcgttcaatatcttttggtcattaccatatggcttggaaaacgtgggcacctcctacatatcaattttttctttggctggctacaaaca

SEQ ID NO: 105374 - DNA, 1274 bp, Zea mays
  unsure (1)..(1274): unsure at all n locations
  Clone ID: MRT4577_27600C.1
ccggccgggacccgccggggcaccgccacctttaccaccgagagaggaacgcgaacaaccaacgatcgcctcatcgccatggcacgctctgtccccatcgcgcctctgctcctgctccccctcctcctcctcctcgtctccactgcgtccgctgcacggaccgtgggcgacaccgtgcaggacgcgtgcagcaagacacaattccccaagatctgcgtggacagcctcaccgcaaagccagagagccagaaggcgaccccgcgccggctggcggagctgttcgtgaacatcgcggccgagaagggatccgggatggccacgttcgtgcacgggaagtacaacaacgccaaggacagcaccgtgttcaagtgctacgacagctgctcggacgacgtcgaggaggccgtcgcccacctcaacggcctcgtccgggagcccaccgacgccaagttcctggagctcaagtcgtggctctcctccacgctcggcggcacctccacctgcgaggacgcctgcaaggacctgcccaagaacggcgacaaggacgacgtcgtcaacttcagcctcgacttcgagaagctgcagcgcgtcacgctggacctcatcaccgaggcatccggatccatgtccgcaggcatcgccctgccaccctccaacgccggagcgcctcctacggggcgccggagggccctgccagcgccagcgggccatcagctggtgacgcgccggcgtatggcgccagcgccagcggcccgactgctgatgctccgnngcgcgcgncgncgccggcgtcgtccgggccctctagcgcacccgcgccatcgtcgtctgagtcctccggcgcaccagggccgtcgtcgtctgatgggtcctccagcgccccggcgccatcgtcgtctgatgggtcctccagcgccccggcgccatcgtccggcgacgacggatcagcttgagcgtgagcgatgacgcggagtttgggtcatttcgtgcctactcagagacgacgatctcttcttccaattacaaattggccgtccgtttactcctcacaatgtgtaatgataataacggatgctactacgtaccgtacggataatgggtacgtagctacatgaagctgtctacggataatgccgtccgtttactcctctcacatgttttaaattttagtttcgtttctttcgatttcgaacgctgttgcatatttcctgacccaataataaagaacccgacagacaatgcaacaacctaaaaaaaaaaaaaaaaaagcggcc

SEQ ID NO: 105375 - DNA, 229 bp, Zea mays
  Clone ID: MRT4577_27601C.1
ctgtattgttcgactccaaggcctgtgctcctgctcacggccatccatcgcgcgagcacctacctaccaacaattgattaaccgttctccatggctgtgctcctcctcacggccatcctgcttggctcatctttctcgcgtgcctcccagaggctggccttgctcgccatctcgcagctgctgcttccccgcccgccaccctctgcggtgccgcctgcttgctcgggac

SEQ ID NO: 105376 - DNA, 1256 bp, Zea mays
  Clone ID: MRT4577_27602C.1
cccacgcgtccgcccacgcgtccgcccacgcgtccgcccacgcgtccgcccacgcgtccggccacgcgtccgcgagagaggaacgcgaacaaccaacgatcgcctcatcgccatggctcgctctgtccccatcgccgtcgccgtcgcgcctctgctcctgctcctcctcgtctccactgcgtccgctgcacggaccgtgggcgacaccgtgcaggacgcgtgcagcaagacacaattccccaagatctgcgtggacagcctcgccgcaaagccagagagccagaaggcgaccccgcgccggctggcggagctgttcgtgaacatcgcggccgagaagggatccgggatggccacgttcgtgcacgggaagtacaacaacgccaaggacagcaccgtgttcaagtgctacgacagctgctcggacgacgtcgaggaggccgtcgcccacctcaacggcctcgtccgggagcccaccgacgccaagttcctggagctcaagtcgtggctctcctccacgctcggcggcacctccacctgcgaggacgcctgcaaggacctgcccaagaacggcgacaaggacgacgtcgtcaacttcagcctcgacttcgagaagctgcagcgcgtcacgctggacctcatcaccgaggcatccggatccatgtccgcaggcatcgccctgccaccctccaacgccggagcgccctcctacggggcggcggcgccgttcggaggtgccgcggacgcacccgccggcacctccgagggccctgccagcgccagcgggccatcagctggtgacgcgccggcgtatggcgccagcgccagcggcccgactgctgatgctccggcgacggcggcggcggcggcgtcgtccgggccctctagcgcacccgcgccatcgtcgtctgagtcctccggcgcaccagggccgtcgtcgtctgatgggtcctccggcgccccggcgccatcgtcgtctgatgggtcctccagcgccccggcgccatcgtccggcgacgacggatcagcttgagcgtgagcgatgacgcggagtttgggtcatttcgtgcctactcagagacgacgatctcttcttccaattacaaattggccgtccgtttactcctcacaatgtgtaatgataataacggatgctactacgtaccgtacggataatgggtacgtagctacatgaagctgtctacggataatgccgtccatttactcccctcaaaaaaaaaaaaaaaaaacccgcggcc

SEQ ID NO: 105377 - DNA, 179 bp, Zea mays
  Clone ID: MRT4577_27603C.1
agcctttacctaattattctctccgttttccttaaaaaaagtatagtgtttaggacgatctaatactttactttgaactattagcttgtcataaacgttgtaccttaactcttaactaaggggagaggcactagtgattccaagtactagtgatggtgtttgatcttggcataggtgga

SEQ ID NO: 105378 - DNA, 155 bp, Zea mays
  Clone ID: MRT4577_27604C.1
cttatatccctaaagaaaaaaccattgcaacacacactctcattcttctttcttgtgctcgatgccattagcatataaactgaccaacagcgacaccgactgtgctcaacacagcagattacaaccggtcttgacgaagaggcatgtccatgcct

SEQ ID NO: 105379 - DNA, 304 bp, Zea mays
  unsure (1)..(304): unsure at all n locations
  Clone ID: MRT4577_27605C.1
aaaaaaaacaaaaaaatgtaaaccgtaaaaaaaaacgtttttcgcccccccaancctctcaccccaaanntttaaaacccttaacaaaatcccttaaaagacaaagcgtaaaaacaaattttttattaaccggattcaacaaaaaaaaaagtaaagccccgtgttccaaaaaaaaaaaaaaaaaggagagcccccatggatccctcacataaaacgctcatatcttccggacaaaaacttgaccacccaactcaagctgaagggtgaacaccaccatccgcgcctgaacaaaaaacccccaaac

SEQ ID NO: 105380 - DNA, 913 bp, Zea mays
  Clone ID: MRT4577_27606C.1
cccacgcgtccggaggtggtgccggtgggcgtgctgctgctgctgctcgtggtggtggctgtgcaggtgcggagatcgtcgatcgatcgctgcggttcgtcggcggcggtgtcgagatgtcgatggacttcggtgccccggcggatgaccccaaggctttccgcaacatctgccgcgaccggatactgaaggacctgcttaagcctgacaaggataaggagaccaaaagctcatggaaggttcttataatggacaaattcacggtgaagatcatggcttatgcttgtaagatggcggaaattaccgatgcagggatttcgcttgtagaagatctgttcaagagaagggagccaatgccttcaatggatgcaatctactttcttcagccactgaaagaaaatgtcataatgcttctatctgacatgtctgggagatgcccactttacaggaaggcatacatcttcttcagctcaccgattcctaaagacttggttacttacataaagaatgacagtagtgtaataccacgcatcggtgcactaagagagatgaatttggaattcttcactattgacatgcagggctttgtaactgaccatgatactgccctgattgatttatacggtccaagtgaacaaaattccaaaaagttcaacgatactataagcacaatggctactcgcattgcgactacatttgcatcattgaaggaatttccatgtgtgcggtatcgggcgccaaaaggagatgcttccacaacaactaaattcgatatggttccaaagtggcttgctactgctgtttgggaaattgtgtcaaaatataaatcaactattcctgaatttccccagaaggagacatgtgaactgctaattgtcgacaggcccatagatcagatagcacctgttattca

SEQ ID NO: 105381 - DNA, 395 bp, Zea mays
  Clone ID: MRT4577_27607C.1
ccagagcgccccgggccgttacagcagcgtagcaagccgtcgttctctccgtctcactaatttgccgaccgaccgcatctacttcactcacagctcccactcccctaccccgtgtagccacctctccgcacatctactttagtctgcgctctgcttgctcagcagaaatgtcccggccagctgcagacagtccggtcacacggcaatgatgctaaatatgcagttctacaacacatcagtgctcccaagccagcaatcgcttcctgctgccttttctccattcatgtcagctacatctgccgcgcctagaggatcgtggacttgaaactgccactgtagcagatgtcttgcagcctacagggaagattgctgcatgcacttggatctggtgcacc

SEQ ID NO: 105382 - DNA, 634 bp, Zea mays
  unsure (1)..(634): unsure at all n locations
  Clone ID: MRT4577_27608C.1
gttgggcatcatattttgtccactttgaaacaagtactccatatttgggtggggatactgcaantatttttacagtttatttgcatggtctgcaggtgatgaggagtatcacagataacattaccgaggaaaagcttctcgaagagattgatgagataagtcttctcccgatgtatgctgataggatgcagcaggctcatacaaagatggcacaacaacagcggcggagattgccaccacagtgctagccagtgctggggcgctctcctaccgccctagccagctgctggcttccgtagctgtgtaattagtagaggtttcagtagccccatatgatgatggctggctgggtctggcctgccaactaattctttgcacctcatttgtgtcttctcgctgccctcccatccacctgtataggcagagtagtttccctgtaaattgtgtactctatgttctcccatattctcccctatggttttatttttcatgggtgtagaatagcgtttaacaagagggtggtcttctagtacattagtgtacgcgttactatctctcggtgttgcggttgccttgtgctagaataaatatggttgccatctgccatcaaaaaaaaaaaaaaaaaaaaaaaaaa

SEQ ID NO: 105383 - DNA, 389 bp, Zea mays
  Clone ID: MRT4577_27609C.1
ggcaaaccttgtactggagtgccacatggcctagagaagttgaagccttagcaagacaatttctacaaaatccttacaaggctcacctgaacttaaagctaatcattccatacaacaaattgttgaagttatttcagaccatgagaagtatccaagtgtacaagttatacaggtgccaaaggttcacacttagccaataaaaagaccaaatattgggttcaacaaaagagcaaagggacaaccgaaggcacctctggtctggcgcaccggactgtccggtgtgccaccggacatgttcggtgtacaccggaagactccaactcgaactcgtcaccttcgggaaattccagaggcaactccactataattcactggactgtccggtgtac

SEQ ID NO: 105384 - DNA, 142 bp, Zea mays
  Clone ID: MRT4577_2760C.1
ggggggagggggtttatttttgatcgtgaactgcaaaaacaataatgatgggtctaaaaccacaatgattaagcttgttgtaccggaccgaactcatctcgggtgatacgaagcttcaatggggcccattgaaacggggaga

SEQ ID NO: 105385 - DNA, 244 bp, Zea mays
  Clone ID: MRT4577_27610C.1
gaaaggcattggcgatgtcggctctccttgggtgtcgctttctgttggtatctctcgcttcggcgtacgagatcggcttgctggggagcacacttgtactacgctgccggtctctacgcgaacgatcaacaatactacttctccaacctacgctccgcaggcgtgaaagtacttcgcgtgtggcttgatggtgagagctccggttcctccaaggcaccaagattcgcacctatcccgacctcga

SEQ ID NO: 105386 - DNA, 2466 bp, Zea mays
  Clone ID: MRT4577_27611C.1
aagttcccgtgaaaaaagatactctcccaatcctcctcccaccaccaaaaccctagcgccgccgccgccagcaccaccgccgtacttgcaaaccgagcgacagctgcaatggccggcaagggcgagggtcccgccatcgggatcgatctcggcacgacctactcctgcgtcggcgtgtggcagcatgaccgagttgaaatcatcgccaacgaccagggcaaccgcaccaccccctcctacgtcgccttcaccgactccgagaggctcatcggcgatgcggccaagaaccaggtcgccatgaacccggtcaacacggtcttcgatgcaaagcgtcttattggcaggagagttagcgatccttctgtccagagtgacatgaagctgtggcccttcaaggtcattgctgggcctggagacaagcctatgattgttgttcagtacaagtgtgaggagaaggagtttgctgctgaagaaatctcctccatggtcctcatcaagatgcgtgagatagctgaagcgtatcttggcagcaccatcaagaatgctgtggtcactgtccctgcctacttcaatgactcccagaggcaggcaaccaaggatgctggagtgattgcaggcctaaatgttatgcgcatcatcaacgagccaacagcagctgcaattgcttatggtcttgacaagaaggctaccagtgtcggtgagaagaatgtgcttatctttgaccttggtggtggcacttttgatgtctctctccttaccattgaggagggtatttttgaggtgaaggccacggctggtgacactcaccttggtggggaggactttgacaaccgtatggtgaaccactttgtccaagagttcaagaggaagcacaagaaggatatcagtggaaaccccaggtctttgagaaggctcaggacttcttgtgagagggcgaagaggaccctttcttccactgcccaaaccaccattgagatcgattcactcttcgagggagttgatttctattccaccatcaccagggccaggtttgaggagctcaacatggacctcttcaggaagtgcatggagccagtggagaagtgcctgagggatgccaagatggacaagagcactatccatgatgttgtgcttgttggtggttccaccagaatccccagagttcagcagctgctgcaggacttcttcaacgggaaggagctctgcaagagcatcaaccctgatgaagctgttgcctacggtgctgccgtccaggctgcaatcctcagcggtgaggggaacgagaaggtgcaggaccttctcctccttgatgtcaccccactgtctcttggtcttgagactgctggaggagtcatgactgtgctcatcacccggaacaccaccatccccaccaagaaggagcaggtcttctccacctactccgacaaccagcctggtgtgctcatccaggtttttgagggtgagaggacaaggaccagggacaacaacctgcttggcaagtttgagctctccggcatcccgcctgcacccaggggtgttccccagatcactgtctgcttcgacattgatgccaacggtatcctgaatgtctctgccgaggacaagaccactggccagaagaacaagatcactatcaccaacgacaagggcaggctgagcaaggacgacattgagaagatggtccaggatgcagagaagtacaagtctgaggatgaggagcacaagaagaaggttgatgccaagaactccctggagaactacgcctacaacatgaggaacaccatccaggacgagaagattgcctccaagctgcctgctgacgacaagaagaagattgaggatgctgtcgacgccgcgatccagtggcttgacgccaaccagcttggtgaggttgacgagtttgaggacaagatgaaggagctggagggcctctgcaaccccatcatcgccaagatgtaccagggtgccggtgctgacatgggcggcccggaggcatggacgaggacgcgccggctgccagcggcggtgctggccccaagatcgaggaggtcgactaaacggtttgttgtcagttttaagtgtgctccagttgctggctggcccagttgctgccaaaagttatcgtcagttggtgcggtgtgtccccttaaactttatttgtggttggttggtacttttgtggtggttatttttttggacctcgtgatagtcggtcggttcaatgttatcgcggctactggcaaaccttaagtgaaaaaaaaaaaaaaaaaaaaaaaaaaaaaaaaaaaaaaaaaaaaaaaaaaaaaaaaaaaaaaaggccccaagaggccgcggacgctcggccacctagggccatcccccgcgtctaaaacgaattggataccccaggttagcaagaacgccaaccccaagggaggcggaccggtacccaatctcaggggaggacgggtacccaaaccccccgat

SEQ ID NO: 105387 - DNA, 988 bp, Zea mays
  Clone ID: MRT4577_27612C.1
gcggctgcgcctgcgacccacgcgtccgcctcggcggcggccggagggagggaggtgtgcgctcagcgcgcagcatcctccagccgatagcctctcactgcctcacttcagcctcggacctgaacagacctcaggaaaggggagacctggaacgaccgtcgagctagagcggctgcgcgctgcgccgagagctggggagtggggactggggaccgaattgaaggcaagaaagtagaaacgaaccaccacaggcggcgcggcaatggatgagcgcggggagaaggaggaggagcacggagtagtggaggaggagacggcggcggttgtgctcaaggaggtggaggtggagatggagatggtcggcggctctgaagaagcctcggcggcgccgctcctcctcgcgcacccgtgctcgctgctgcagctcctgctccgcgcctgcgccggctgcctggtgcgcctgctgcacggccactgcagcgacggcgccaacgacgacccaaaagctgctgccgacgacgacgacgctgcgcctgaagctgctgctgctgcggcggcggcggcgggcgatggcggcgacaaggcagccacctacttgtacatgcaggaggtgtgggcagtgaggaggaggccgacgacgcccggccgtccgagagaaggttccggtggcaatggagggaaccaccactagctagctagctctctagcgcgacgccgctgcaacgtacgtacggtgaccctagcttgttcgcttgcgcgtgatcagagtgcgtagcttcttgtaagttgtaacttacttggtactcgtactagatttcgaaagtaacgtcgttaattagtaagtagtactagtacgtgagtgtggtttatgttatatgttctgtagcttcaatgcaaagaagactgtgtgcatgtgtttgaggattaaaaaaaaaaaaaaaaaaaaaaaaaagcgaaaaaaaaaaaaaaaaagcggccgggaataaat

SEQ ID NO: 105388 - DNA, 305 bp, Zea mays
  Clone ID: MRT4577_27613C.1
cggccctggtaaactcaatctccccgtgcgaggtaaagcaacacggcaggccccgcacccgtcgacatagaatgttttcttatgaatacaaggcggggcaacattttggactaacaatgcatttgcctacataataggacgccctatgttacctttgccagaactggttaccaagggcattgaggatctaatgtggcactggggggtgttgacccatgaacttctgcatgtccaccttgcctggcagagagacttgttgtgttgccaatacccacacccttttttaaagacacactccgacggag

SEQ ID NO: 105389 - DNA, 121 bp, Zea mays
  Clone ID: MRT4577_27614C.1
tcgttctcgcgaactccatctcgaatggcagagtgatttaggcatacgcgtttcctccgtatagcattctcgcagccttatgggcgatatcaagagcgctatctatgtttccgacccgatc

SEQ ID NO: 105390 - DNA, 950 bp, Zea mays
  Clone ID: MRT4577_27615C.1
ccggccctgaacgccaggaagcccgcggcgtggcccgcgactgcaacgaggagcacgccgccgttgaacgacatgagcgccagcatgagcaggtacgccccacccacgcgcagggcatacaccgccgtgcgcgccgcccccgccgctgccgcgcgccggccggccgggacacacacacacatccatcaaataaacaagcgcacacgaacaaatacctcgccgccaataatggcctctagatcctccattgtgctcgccacggcgatgctagctacactattcgcggttggtttgtgcaccaccccgctcaccttccaggtcggtaagggatccaagcctggccacctgatcctcaccccgaacgttgccaccatatccgacgtggagatcaaagagcatggtggcgatgacttctcctttacgctgaaggagggcccgaccggcacctggacactcgacaccaaggccccgctcaagtaccccctttgcatccgctttgctgtcaagtctggtggctaccgcatcgccgacgacgtcatccccgccgatttcaaggctggcaccacttataagacgacactcagcatctaatcagcatctgaagatgaactatatttcaaaagagctcatctggcgcacgtgttagcaagacaatttttttctttggttattttatggcaccaaaccacccaagaaataagttatgctacatgtccatatgatgccttgttgtgttgggttgatatttttacataaaaaataaactaaatacattatttatttaagatctttggagaaatttgttgatctggtctagctttattattgagatggttgtacatttgattttccaatgttttaatacttatggaatgctttgtttgtgttgtttctatgcatggattaataaagttcgttttagcaaaaaaaaaaaaaaaaaatttgcggcc

SEQ ID NO: 105391 - DNA, 272 bp, Zea mays
  Clone ID: MRT4577_27616C.1
ggcacgaataaaatagggggtactatcttgccgacatcatccacccttcatgaccgatgttgatcaagggtatttgatgtgaccataccagcatcgccaatcttgccgaccattcctactggacctatcactcgaagccgagcaaaaaagatacaccaagaggtgcatgcgctactttatgaatttcaattaaacactaatgagaactttatgctacctacgtcgtgtatgttgatattgcttaggttcatcaaagaggaaggacaaaacat

SEQ ID NO: 105392 - DNA, 296 bp, Zea mays
  Clone ID: MRT4577_27617C.1
aaaaaaaaaaaaaaaaaaaaaaaaattaaaaaaaaaaaaaaaaaaaataaggcaaggatacaaaatactaaaaaatactaaaaaaaaaaaaaaaaaactaataactaaacataaattcactacatttgattactgtttaaaccttgtctatcaactgactcttaatcctacaaaccaccaaatttcaatctaccttaatattacattaatagcatctcaggctaacaccgttgcggacttgccaacccttgctcaccctgaattacatttgctacactccatttacctttgcatca

SEQ ID NO: 105393 - DNA, 423 bp, Zea mays
  Clone ID: MRT4577_27618C.1
ggttgccaagagtcaacactacggtaatttgaagaaaaaaaaaattttgctaattcaattcaacctcgacaaagaaaaatgaaatagtgattttataaaaatgaaatagcaaactctacaacagatggcgtaaaaaaaccaactgaatgttgaacttgacatatttagccaggagcaggctgtttttagatcaaactaatggacattgatccattcacaaaatctgtcttttaaccagacgcatttttccttgcaggatataccctataagctgccagcccaactacgaccaccggagcttcaactgaaacagccattagagatcgattaataagcctggggtactggttgcgggtttttccagcttcagtttctggaatgcttaaatgaggatgatcagcggccgtttcaattttacgaaaa

SEQ ID NO: 105394 - DNA, 638 bp, Zea mays
  unsure (1)..(638): unsure at all n locations
  Clone ID: MRT4577_27619C.1
gcgggatccatccccaataatccccacctcccgctgatcctccgcctccgccgcccgcgggtgggctgggggacctcgggctccacctcactcctcttcccgcagggctcctcatccaggagccgcgtgcgggtctccacctccctgggcttctccgcgcanccggggcgggtgcggagccgggcgggggcaggagggcancggcgcgggagcctgcggggggggcgcgcggggaggggaaagttcnagcgcgccaagccgcgcgtgaacatcggggccatcggggacgtggaccacgggaagaccaccctcaccgccgcgcgcaccgtggggctcgcctccggcggcgggagcgcgcccaanaagtgcggcgagatcgatgccggccccgaggggcgggcccgcgggatcaccatcaacaccgccaccggcgagtgcgagaccgagacccgccactacgcgcacgtggactgccccggccacgccgactatggcaagaacatgatcaccggcgctgcgcanatggacggggccatcctcgtgggctctggcgccgacgggcccatgcggganaccaaagagcacattctcctcgccaagggggggggggggcccaagatcggggtgttcctcaacaa

SEQ ID NO: 105395 - DNA, 295 bp, Zea mays
  Clone ID: MRT4577_2761C.1
cttattcgtcggatctgtcaacattacctgtaaactctcgattactggctgaagggtgcgatgtgctccatcgaatcctaccgctgcaaagactgattctgtggaccgtagtagatcatacataggaattcaacagctagtatgttggtgtgggatctatatgaggtatcaaaccttaactacaccctctacaaatcaatatttcttgattttagcatcataaaatgaatgtatttgccgtatttatacaccgacgtgactttgaaaaacatgtatgtacacaatttaaatgatt

SEQ ID NO: 105396 - DNA, 509 bp, Zea mays
  unsure (1)..(509): unsure at all n locations
  Clone ID: MRT4577_27620C.1
ccgtccgcattttcaaagctattcagaaacccacaccatagcgannagcgcactatgcaaccccacctaacaacgaagtggctacgcannagatattagccgctgccttgcgcctnntcttgcccttttagtcggagcgcaacacaatcgcgnnntcattattccaaacagtgctcaaacttgctcctcagtgccattcattccaaacagttcctcccacctagttaccttcaatgggggcttcgaacaaatccagccgtgccannagcctactaggctacaactagcgcnnttgcggcgagggcgtcttaaacaacaaccacattgcccacattggcaacaacannatccttggcacaaatctaaacctacnaaaccatcgcnaacgcaaccagcannacaacagtttctgccatcaaactgagccacctagccgtggtgaaaccctgtcgcctacttgcaacagcagctacttgcattcaaaccaacttgctctggcgaacgtagct

SEQ ID NO: 105397 - DNA, 382 bp, Zea mays
  Clone ID: MRT4577_27621C.1
gaagctcggaattcggctcgtggacttctacaggccggaccttggctccatggaggaggacgctcgccaaggtcgcctttttagaatggcagctgatagtgaccgaacctacaccatggtcgtcactggaggcggagtaggaaaggctgcaaagggacacagcagtgaccgtgtgggaattctacacccgatcagagggaggatcaatgctgggaggaaccaagcaccccataaaggcagcagctgtgcagaatggggagacctgttttccaccattgacagaggcccggaacggctacgggtgaaacaacacccctggaactccatcaccagtggagcattaaccggagcacccgagagtagcctcaaaggcccgctagcc

SEQ ID NO: 105398 - DNA, 366 bp, Zea mays
  Clone ID: MRT4577_27622C.1
ggcaagctggatgaggctgtcgaattattagagaaacatgagcaagtcacacctgtcaaagaaagtgacgtgaacacatatcaagaaaatttctcatcattgtcagcgattataagagaactactttcccttaagctgtctgtttttgcaatcgcgcagctgcgtatcaagcactcggtcaagttactgatgcaatagctgattgttcacttgccatggttcttgatacaaattaccccaaggcaatttcaagacgagccaccttatacgagatgataagggattatggacatgctgctaatgatttaaggaagctaatctcacttcttgaaaagaaagtcaatgtgtcttgaatatcaccaaaag

SEQ ID NO: 105399 - DNA, 2286 bp, Zea mays
  Clone ID: MRT4577_27623C.1
aattcggcacgaggggcttggcttgatttgggaggcatgtcgtcaaggatggctaggcagacgcggatcatctgttcaaaacaattggggagtcatataatgttctttctgacccggccaagcgtgaggagtacaaccttgaagaggttacaagacatgctagaacgggaacacttggttctcttaggaccctaaaatcatagtgaagagaactgctgcaacagagactttaatccaagtcatcgatagtcaatccgtgcatcacgttcacattggtacagcaattcatacggatgcaagaaaagacgtagttacatatgcaaagggattgtggagcgatgcaacttttgcaagtgtcgaggaaaaggactcatagaaattagatgtcatccgaagatatggggtatttaaggaactggtgctgacgtaccagcattcgcattctcggaagtcatgtctgttcactgtttatcttgtacagaaggattccagtctctttgagcaaacacacttctctggaaggtattggcggccctatctcttttgcaagtcttatttcctttcaggcaagctggatgaggctgtcgaattattaaagaaacatgagcaagtcacacctgtcaaagaaagtgacgtgaacacatatcaagaaaatttctcatcattgtcagcgattataagagaactactttcccttaaggctgctggaaatgaatcatttcaagctggtagatattcagatgctgtcaaacagtattcagcagctttggcatgtaatagtgaatcgcgcgcattttcagctgtctgtttttgcaatcgcgcagctgcgtatcaagcactcggtcaagttactgatgcaatagctgattgttcacttgccatggttcttgatacaaattaccccaaggcaatttcaagacgagccaccttatacgagatgataagggattatggacatgctgctaatgatttaaggaagctaatctcacttcttgaaaagaaagtcaatgtgtctggaatatcaccaaaagcttttaacaagcataaagatatcaagcaagcacatgcgaggctttcacacatacatgctgaagcaaaaaacgatacccccctgaatttgtatttaatcttgggagtggagccatcctgctcttcagcagatattaagaaggcataccggaaagctgcattgagacatcacccagacaaggctgctcaattattagtaaggaacgagaatgctgaagatggattttggagggatgttatcaaggaagtctatgcagatgcggatcatctgttcaaaacaattggggaggcatataatgttctttctgacccggacaagcgtcaagagtacgactttgaagagaatctaagaaatgctcggagagtatcgagctcaaggagcatgcgtaggtcacctgaacataactacagcgacagaggctttaatccacggcagtggcagtcaagcagagcatcacgttggtacagcaaatcagacgattactggtaaagaagccactacggcgtggtcatgtggtgagaagcaacttttgcaactatgtcatgtgtggagcaaatgcctccttgcaccaaagatgggatgggatgcacctgccttcccgggttgtttaggtgccggtgctaatgcaccagccttgcagtcagcagctttcctgtttgtttgctgcgtttctttttcagaggatggaaatattaggattgatcaattggggatctgggatgattgcttgacactggtagcgtcgtgacttgactagcacagcaaatatggaggattaggaagtggtatatcaaatagtcttttgttggcctggtgatgtctgaacactgactgcttgggagtggctggcatgatgttatccgctctgaagtcaaaacactgagaacaacatcaaaggttagaaatctgggtaaagatgccagtttgtccaataggtacaggcattcttttgctgaatgcagggcccgctgtcgtaagtttacagcagatcagctgaaagaaaaagagacaggctcttctgtttggcgcgtgcgcgtgcagttttgttctgttgtttccttattaccaaatgatgtagcgttggaaagagtgggtacatattgtgactgcccaatgttgaaatctcgtaacatttatttattctttattactagacttgttagcctaatgttggaagcattttgagataatcaaggttccttcaaagcaaaaaaaaaaaaaaaaaaaaaaaaaaaaaaaaaaatctcgaagagggg

SEQ ID NO: 105400 - DNA, 285 bp, Zea mays
  unsure (1)..(285): unsure at all n locations
  Clone ID: MRT4577_27624C.1
cccacgcatgcggatggaggcatcgtacttccaggatcaattgagactagaccacatgctggtgagattgttattgtctgcgaccggatatattttatacttaacctcatttacatcaatgattcggtttacacacaacttgtctactacacttatgctncgcacatacttgactttctatgacgcacgatcatgtcatttccaactaagatcacataattgctctttttgacagtgattatcttaacgatatgagctcactgcatgatctcattcttatcaaag

SEQ ID NO: 105401 - DNA, 569 bp, Zea mays
  Clone ID: MRT4577_27625C.1
gaataaaaaaaaagaatcccactcgcccgtgtcttccggtcttcctcttggcgacgagagacctcgccgagagtctcctccccggcggcggcggcggagcctccgcctcacatgacgaatacgaggagtgcgcgtactactccgaggacaagatctccatcgccgtcggcggattccgacggcgaaaacgacggcacgccggcgtcgggcccggccttctcgtgggggaagctctggcgcttgacggtcccggcctatctcatgtgcatcgggttcctgaacccggaaaatctggagggggacctacaggcggtggccgcggagccctaccagctgctgtggatgctcttgggggcaacgatcatggagcgcgctgatgcagctgctctccgcccgggtaagcgtgttcacggggaattgcctcgacgagttctgccgccaggagtaccctccctgagacactcgcgcgctctggaccgtgacggagctcgcgcctcatgggtgctcacttacaggaggagattggcaccgcagattgccatcaagatccgtctcgggagggccatacc

SEQ ID NO: 105402 - DNA, 840 bp, Zea mays
  unsure (1)..(840): unsure at all n locations
  Clone ID: MRT4577_27626C.1
acttcgttgtgcccgcgccgaagcaacaggagaacctcgccccaccataggcaaaccacgtagtcgttgctgccctgcgcccttgcgctattcctggcgtcgtcgattggtgggagctgtcatcgcgcctggaatcgcccactggagtgaaggcggttcccgcactcgcccctcatcgtggattgggggttccacgcatctaccaccggtgatgttcaactcctttgcctttatctccttcctccgaccgtgcaccgtcgaatcaggccccgttcacccacccagtagactagaatttcttgacggagttgtgtcgccgtcgatttactcttatctccgtagacgggaatctgtagttgttcgctcgcttatgagaagcttcgctcgattcaccatacaccgagctatgtttggatctgtcgagatatgtcgtggtcgtattttgggctgaatcgccgatctccggcgaggttcgccgtcgcgggacgctgtgccatcgtgtttggctttgggctgaggaagacagcagctcagccgttgatccacggaagaacgttcctgatctggcaagaaataccccttcgctgtcggggaatcccggccatcgatctggtaatgaacgatgtagagtagatcgcatttcattaaacatggacagttgattgtagatcccaatggccgcgactgcataccggttcacttcacccagaatctaatctacgccgatctgctctgatcggatgactcagaactgccgataccctttcgacgaaacactttgcagtcgggcccctactgtcttggtaaatncatccgcagtccaggaccgtattaaatcat

SEQ ID NO: 105403 - DNA, 486 bp, Zea mays
  Clone ID: MRT4577_27627C.1
acattgggtaatgtaaaaacgcggaggaagcacccaaaaaatagtacatcataataaacgtgacaaatttctcgcacactcgaaggcgaagcattaactatcgaaactatctttcgttcaacacctgggttcataagtaaattacacgacatgctcatgtatttccaacacattaaacatttacagcgatcacctgaaccgggctatccttgtcaacaacaaacaatctagctaccttgcctgaaggcctgtctacttccactgagtacgaaccatggtttcctatgcaacttaaactcttcttggcgatacgacactgttcactatatacaggcaagacattcttgttggacatcaaggaaccttctgccagccccaatgcttgttccatcattatcaatcagatagccagctctacaaacataaacattttccagaatccccagaggatgattccccccacagcaagatgccgcaaatgcttcc

SEQ ID NO: 105404 - DNA, 526 bp, Zea mays
  unsure (1)..(526): unsure at all n locations
  Clone ID: MRT4577_27628C.1
tctgttttttttttttttttgagggggggggggggggagcgatacagctggtgggggggcgctacatccaaatagcgtgtaccatgcctagcaagccaaacatattaccttacagcaagcattccattgccgcttcacacatctttgcttccttctatacataaacagcacagggatatgacngggggggttattatagtttctacaattatatgtgaattctcgacttatcaaccgtctgaccactagtctacgtccttctacggcgtggacgtgcgaacacggtcatagaccactggaatcgacgccagcacttggttgccaacgcttggaactccctgcctatcgttgtactataccgttctccccccaggtcttgccccactaggtcttgatgatccagtaaggcttgtccttcacgccaatggggccagatcctgaagcaccatctccaaccaggggacccccctgagtcaaagtggcctgccacagcatctattgggcatgaatacgcctccccatgtat

SEQ ID NO: 105405 - DNA, 1198 bp, Zea mays
  Clone ID: MRT4577_27629C.1
tgcactccttcatccgctggtgtatcggatgctggatcctcttacaagttacaacagattgtttgaaatgcacagcatggttttacacgctgttttaagtgaagactgtacggatggacaatggcctttacttatacagcaaagctgctgaagaaacaaatgttagcatgcacaagcacaactaccagaattccagaaaccaagctaatgcctctgtcaagctacctaattgtgaaaacctgtagcttttcggcacttaagcaaccaaggtacctctccccagttgaactttcagcataccttagatcaaggaccggttgcctgtggggcttgagatcggtgtaccgctgaaacgaaggcagccgccaagtccggactccgtacaacgattcatctccataggcaaatagatgctgattgtctctgcagggtattattgcagacttcgacattcgcaactcacttacgctaccactgcagatatggtccctggcaaaggatgtggcggtggttctcctaaggaatgtgtggcatcctagttttcctgaaccggtgggtgccggtgattgtggtgtagacgcttgagatgtggcgatagcgtctggcagctcaactcttgggcgatatgaagccaccaggacatcacttgatggagagctgcacgcaagagatatgcagaccccttggttttccatcccacttaccaaactcggctgttttcgctgcatcccaaacgcagggtcctatagaagaagcagaaaaaaccttcctggaaccactgccatctacagcgcagtgtattgtatgaactgggtgtgttgatagacccatgctagaatgcaaaggtgcagaagtttgacggatatcaaagactaatagcatgccgttctgtaacccagcataaatatgacttgaagtagtataatcccctgaacaggaccaaccaggagccggcagatcatattgaaggacaacattgttggtagccacactgaaaatagacaacttcctgcccagtgatgcaaaaacaacatggcccccaggcagtacacagatatccctaatagctttagtaccaggaggaaggtggattttctccattccatgtccatgaaacatgctaaccttaagtcattaagcaaaagcttctcttaagacttgtacctttgtaagtatgtgttcagcactaactccatgt

SEQ ID NO: 105406 - DNA, 366 bp, Zea mays
  unsure (1)..(366): unsure at all n locations
  Clone ID: MRT4577_2762C.1
atcaaggcncggccgggnaaaaaaatttttccaaaaaaaaaaaaaaaaaaaaaaaaaaaaaaaaaaaaacggcatacgcgccacccccaccacccccctcttcgcgccatcccccccttcatcggngtgccatgacgacgacgcgcctttggcccgccctgaccacgctcctgccactactattacccccctcccccgcgacgaccctggccaatgccgccggcagggaaaacgaagatggccgcggccagaaagcgaccacaaccgcgaacgggaacggggggacggggaaggatcctgcccagggcgacaactccaaggcgaaccacacgcccacccccgccaccgcgctcgggagggaggaaa

SEQ ID NO: 105407 - DNA, 773 bp, Zea mays
  Clone ID: MRT4577_27630C.1
ccggccgggaacctcatcaacctcaacataaaccacccaaaatgaatctcctagattataaatcccgtccaatcctctccctaacatccatcttcgccgcatggaaatccttcctcctcgcaatcgctctcggcgcgtccataggcccagactacgatacatcaacatctctcttcttcgccatcgtccacggcgcatcatcgccaagatccctagctactcgtctcacgagatgggacgcgctgtatttcatgcatgatgctgtcaaggggaaggtttatgagcaggagtgggcgtttggtattgctcttgtcgctattgttatttcgcacgtttcgcatctcgttgctgtgctggcgctttatcaacttactatcgtgctgtgcaatgatcgcaagttggcgtatttggcttcggttgttcatgtgctttcacctgctgggttgtttatatcagcgccttatgcggagagtccctttgcatgcatgtcgtttgttggcaatcttctctacgcaatcagtctcaaaagcagccctgattcactgaagcgcaatcttgctgtggttggagcagggttatcgtatgggatttcgtgcacgcttcgaagcgatggcttttttggcggtgttttatttgctgttgaaactgtcaagtgcttgttggctcttcgcaacggtttcccaatttccaagatcctgagactcgttgcacctctcattggcggtattctggttgctggtggaatcgtcgcgccgccagttttggcttggatg

SEQ ID NO: 105408 - DNA, 467 bp, Zea mays
  unsure (1)..(467): unsure at all n locations
  Clone ID: MRT4577_27631C.1
ccgccctccgcagaacaagcgacccccgggacgggggggaggaggggacnccgggaggaggaacanggcggnggcggaccccgcacacaagccggaagaggacancgacaccgacggcgncnncaaggagagccganccgagnccacacgaccccccgggccggggcaccggcggcagagagcaaggagaacgngcgcggcnacaagngggcngagaaccaagcggacancnacgacaaagngncgggcgacangcagaagcaaggcngcgacggggagnggcngggcggagggcgcancncccaccagagccaggacaagaagaagcacggggacggngagnccagggccaaggggccggcccagcacgccagcgcaacagagaaaaaaaaagccaaggaccccgacgacgaggnacagcgggggcgaacgacggggacgggagcacccaccagccccggggcccg

SEQ ID NO: 105409 - DNA, 226 bp, Zea mays
  Clone ID: MRT4577_27632C.1
ggccgccgtgtgctgggattcggccttgagctatctgcaggaagcggccttagcgagtaagacgaccacacgattcatcatgtgtgggatgaccaacatatatgcgatggtcttaataaagtattggtttgaatgaatatattgtccgattgatgtcaaaaaaaaaaaaaaaaagcttaaacaaactttggggggggggggggggttttttttttttttttaattt

SEQ ID NO: 105410 - DNA, 783 bp, Zea mays
  unsure (1)..(783): unsure at all n locations
  Clone ID: MRT4577_27633C.1
acgcctgcaggttccggtccggaattcccgggtcgacccacgcgtccgtagacacaattctcgcgagaagtagagcgaattccctcggagaggggcggttgcgcagaggtacaccacgtgtgcggtccctccggcgccgagtcagggtctctcgtcgagtctgggtctaggttagatttggaatcgtggagatgcggaaggacacccctcctccgctcgtgcccccggcggcccgcgagtggaacctgccccccaatgcgcccgcatgcatggaacgtcaattggaggctgcacggtaccggtctgatggttcccttctgctcggggtctccagcctgagtggtcgctgctgggtaggttctctgtggtttttcaaggatcctagtgcggcccccaacgaaggtttctgctctgctggcgtccagaccgaggctggagtagctgacctcacttgggtgggggacaaaggtatcctagtggcttctgattcaggtgctgttgaattgtgggagctagatgagaacgagacacttatagtcagcaagttctgcaagtatgagcatgatgacattgtgtctactgtcactgtcctgagctctggcacacaagctgtcagtggtagcaaagactgctgcatcaaaatttgggacctggctcagcaggtatcactgaattcataccgagctcacgctggacaggttacctgtgttgctgcctctccccacanagactctgtgtttctttcatgtagngaggacagtagaattttgctctgggataccc

SEQ ID NO: 105411 - DNA, 126 bp, Zea mays
  Clone ID: MRT4577_27634C.1
ctacgctaacatccatagccttcaccacgcactgatgtaggttataatcatccagttgacgcgagcactgacgctactaccatagtcactcataccacaatcgtatcactcctgtcgctccacttg

SEQ ID NO: 105412 - DNA, 294 bp, Zea mays
  Clone ID: MRT4577_27635C.1
agctttattttttttttttttgttttttaaacatttcctgtttgaattctcactttatatatactcattataaattttattcttacattataactattaatcacttattcaaatttgccttaaaaaaaaacccaacttttttattccacctgcacttattttcatgaatcacccaccaaaaaaaggagtgtaaccaaccttgatttaacactttatgaacagcagtttgtgacatacaaacatctttctaaattcatctaatctactagttgataagcataacttcaaccattt

SEQ ID NO: 105413 - DNA, 312 bp, Zea mays
  unsure (1)..(312): unsure at all n locations
  Clone ID: MRT4577_27636C.1
ttatgctcgtttttttttttcaaaagagncctgagctcaaaatccactggacccactgtcttattcaccagattacaccaactcccccaatccaattaaataaaaagtgtgcataaagaacttttgactacacaactccaccacccaccactacagggaaaataagggtacaggggaaaaaggtaacccctcggatacacaagttctattatggtttctcgactcaacgcaatttttagatcctagacagcataaaaaaaattaagtgctccagcttgttggctcatcacggctaccaaacacgaccatgcg

SEQ ID NO: 105414 - DNA, 818 bp, Zea mays
  Clone ID: MRT4577_27637C.1
ccccattctctcggagtcgcgctcccaaaccctagctccccaccgcagcggccaccgcctctcgacccccgccccctccctcccggatcgccgcccgcttccttctcccggatcagcgacccctctcccctgcccggccgctcgctgaatcatccgcgcgtttgatctgcaggtgcgcgcctgttgctgcagacgagaagcggctgaggcgaagaggaatcgaccatggcgacccgtatccagtttgagaacaactgtgaagttggtgttttctccaagctcacaaatgcctactgtctggttgcaattggaggatcagagaatttctacagtacatttgagtctgagcttgcagatgtcattcctgtggtcaagacctctatcggtggcactagaataattggtcgcctctgcgttggaaacaagaatggacttctcttgccacacacaaccactgatcaagagcttcagcatctgaggaactgcatacctgatcaagtggttgttcagcgcatcgatgagaggctgtctgcccttggcaattgcatatcctgcaatgaccatgttgcgctcacacaccctgaccttgacaaggcaactgaggagcttattgcagatgtgcttggggttgaggtgttccgtcagacgattgcaggaaatatccttgttggcagctactgtgcattctctaacaggggtggactggtccatcctcacacatccattgaagatcttgatgagctgtccacactcctccaagtccctcttgtcgctggaaccgtgaaaccgtggtagcgaggtcattgctgcgggcatga

SEQ ID NO: 105415 - DNA, 363 bp, Zea mays
  Clone ID: MRT4577_27639C.1
gcctttggattagaagggcgactccttttcttgtaaatagagttcgcatgtttaccattccaagcacttttacagcaaccacatgtgagttgaagaagaagtattcttgcaatattgcgggtccaaaatatcgagagattttgggacctaagggtcatcactgtcatgaactggctattgccgcttgtcctgctcaggctagtgttttaagccgatagcactgctgacaccagcctttcgtgtccttgacattctataccatccctactgcaccatctactttcatcacagaccgagactcctcatcgcgatcgacagcagctccaccagagtatgcatgtttttgccagctctgggaaggtg

SEQ ID NO: 105416 - DNA, 1290 bp, Zea mays
  Clone ID: MRT4577_2763C.1
gggcgattgggatcctcgaggccggccgggttgtatttaactatttcaagattttgaaatagcccccctgtcctaaattaggttgttttagatttgttctaaatcatatgcatgatgtattaaatgaaatcaattgatgttgtagatgttattagtgccattttctataattttggtcaaatttagagaagtccgacttatgacaaagctaaaatgaggtacatttcggagtgagggagtagattatagccgactgtattagtttctgtgattctgtcaccggagaagaaatgaatgaggaattttataaatatcccatctgtcgtaacatataaggctcatcagtattgtggaccggaatcctgtgcagtggtgataagatatgacttcagcttgacacagtcagcgactgaccaacaggttcagatagttaaaaatgtagggtcttttcttttgtcttttgtgcttattaagtgttaattaaactgatatgtactggaatgttttaaagaatttgtgatatgtgtgtacaatgttcaatgctcaaacatttaaatttattttttagggccgaagttattcaggtcatgctaattcaataccatatgacgtaatcatattcatgtttgtcttatttgtttggaatcacaaactgatactacctctattctcaaatatttgtcgcttgctagtttatttttaaaccaaaccgagacaaataaaaaagaattgaggagtatatcccttcggatttgttgccacttgccgtatttactgaagctcctctgtattttccccacattggcagatccgaagcttccaagcttgttaaagatgttgaaatggacccaaaatcaactggacgaaaaggcggcttatcctcgaatcagggacttttgtcctgccgcaaaaaaaaatccatcgatatgaatctgctgtgaaggaactgagggtatgcaccaagcctgcctggtgcctacacgtggttgccccggatctgtcaatagatcatcgtctgcagcgattgagttcaccccttgcactagtgtttaagatcaatgcaagcaattgatccgaaaacatcacctgtgttctacctgtacatgatgtagaagacatgtttgaaacctttttaagttagtgaaatgttggatttttttcatggacaaaaaaaaaaaaaaaaaagcggccattcgtttcaaacctgtgggacttgcaacacgcaaattgtttcagtcatgctttgggccttgaattcacggtcccactgtcagtttgatgcaactgtgc

SEQ ID NO: 105417 - DNA, 345 bp, Zea mays
  Clone ID: MRT4577_27640C.1
cggggcttctgaccgatccttcgcctacgatgaaattactccatcgtcatctccctaatcttctaaccaaatacacacaggaaggtctttgtggttttcacccaatttttaaaaacctccgccgtgttatttgtgctgtaatcacatttgatagctatgttgaaaccactcctgtaccaaaggaatttatgatgttggtctaagtactcaagtatcttaggaacacttctgacttggctgatgtggtgttcaaaaaaaaaaaaaaaaaaaaaaaaaaaaaaaaggaaaaaaaaaaaaaaaaaaaaagacctaaagatccaaattttgttccctttagggaagatt

SEQ ID NO: 105418 - DNA, 374 bp, Zea mays
  Clone ID: MRT4577_27641C.1
gtctcccttttctttttgtagtatagtgagagtgacgcgactagtggtatacaaagggaaatggtgaatggagcgcaaggtagcgattcttctgcttgtgggcgtctatgtttaggataacatggctgcgttgcttgttgcctagaacaccctcaagatcattcccttcaagcttccgtccgttggccctttatatgtcctctttctcatgaaatcaatttttatttgctgtatttattttcacttccttatggatattcgcatttttcacttctattttaatgagccctttgttattcttcactaattctccttcttttttcaagatattagcttcttttttaatcacctttttttatccaaccttttgttct

SEQ ID NO: 105419 - DNA, 248 bp, Zea mays
  Clone ID: MRT4577_27642C.1
tcagccgcgacgcgcctcgtctcgcggcgccagggagttcgtggagcgggaggtgatcgacttcgcccgacggaatccaggggtcgtaatatatgtaaactcgcgtccgtgctgcgtgaccagagtagtgatcggctgacttaacggggctgtgcgcgaggagagcatccactgcaagtcggtcgaggagatctcgacgctggtgcagaagctggccgaccagtcgggcttggacgtgatccgcatcc

SEQ ID NO: 105420 - DNA, 379 bp, Zea mays
  Clone ID: MRT4577_27643C.1
acaaaggggatgaacatataccaacaagcaaataataagtacagagtactcatactcatcacacatgcatggaacaataaaaataaatggaaccacttattctagaaatagcacagtgtggcgccgtatggggtgtcctccattatggggtctcctccatcaactgtcatatacaagtatcccatcaattgtgagccgtcggtggtttgcacttaggaggcggcttcggtttcggttcattaggcttgggctccggctttggttcgggtttcggcattggctcgggcttaagaagtggctttggtttggagcagggcttgggctttggttttggcataggcttgggcttgggcttttgtacgggttttggttacggctt

SEQ ID NO: 105421 - DNA, 326 bp, Zea mays
  unsure (1)..(326): unsure at all n locations
  Clone ID: MRT4577_27644C.1
atacaaatttttctacgactaatccatcacccactacgccttcncggcggattcttttaaaaggaggtgcgccccccctacctttctntnctcatntccaacatttctactctatccgatcctgaagaatacaccgagctcgcccaaaattattcttttttcgttgctgagacacataaaccatatctcaacctgtaagtcaacactgcctcctgtaaggacacaaatcgtatcaacatccattcataattccaaacagaactcgtccaataccaatattctaactatccatatatacattcatgtaagcaactctataacatcat

SEQ ID NO: 105422 - DNA, 654 bp, Zea mays
  unsure (1)..(654): unsure at all n locations
  Clone ID: MRT4577_27645C.1
ttttttttttttttttttttttttttttttttttttttttttggaaaaaaagggnccccactcaacattaaactcaaaccagaagttttataatagcactcacccccaaacaacatttttgaaatagaactaaaggggaataaacgtggcctcccagcacaacacttgacgagcctgagcccgttggccgttgccccaaactacaaaaatctgaaactttaatattttgttgaaaagcccacaatggtccccaatttctggaagcgtaccctattggatgggccttttggcgtgaagggtggtccctacatattagaagggtggaaggagacacaagaatgcgtgcaactaattgaacaacatgaatagtgcattcttctgtgtcgcccgttatacacaacagggcacagagcttgggagggctnccccaagtgaagaacctctccaatggggcacacgtggggcacagccttcctcgcaacttttttttattatcaggnctcagatcgccccagtggtttgcacatcccatagggcacgggggtatttaccattttttttttttttaaaaaaaggccttggcaggggcggcacgctcatcagctgccttcttgacctccaaaattncataaccaaaaagacaggggcatcatc

SEQ ID NO: 105423 - DNA, 1182 bp, Zea mays
  Clone ID: MRT4577_27646C.1
cattgggtacctcgaggccggccggggctggctcggccgcgccgcccgcacgcgcgcgcacgacgcacagatacctttcctctcttctcccgtcccctcttacgcggcaaccccggcgcggcatggcgagcccgtcctcctcctctttcccgtcccggaaggccctgagcaagatcgcctgcaggcgcctgcagaaggagctaacggagtggcaggtcaacccgcccgccggcttcgagcacagggtcaccgacaacctccagagttccttggcggcggcagctagctcacgtcccggcgaaccctcgtcggtggccaagggccgttacaggatgaaacaacaacaaaaaaggtgggtcgtcgatgtagccggggcaccaggcacgctctacaccggcgagacctacaaactgcaggtggatttctccgagcattatcccatggaggcacctcaggttatatttctgcatccagcaccgatgcatccacacatttacagtaatggacacatctgtttagatatattgtatgactcgtggtccccagcaatgactgtcagttctatctgtatcagcatattatctatgctgtccagctcaccagcaaagcaacgcccagccgataacgatcgctatgtcaggaactgtcgcaatgggaggtcaccaaaggagaccacgtggtggttccatgacgacactgtgtgatgggtgtttccggctgttgtcctgcccgcattttagttgccagactacatgggagatgatctaggcatatttcaagcgacccatttgaccagaaactaacacgctcttctggtttgtaaatgagtgtgcatcagcgtcaggtctctgtacttgttgatccttacaccgtctatagtatgtagaataatgtttgtatctttgtcaatttacggaacagacatgaaatgcaggtcactgttgacttgcaagatttctgaatccttctagttgaaagttgaaacgagggttatatatgcttggtagtctgctccagatgcagcagctttagctctagttccacttaactctagctcaaactatggcagagctcttttgggagtggctgtgtgatcgtgtaataatatatctgttgtgtgagtattgcaaaaaaaaaaaaaaaaaagcggcctgaccagaactaacatgctcttgtgggttg

SEQ ID NO: 105424 - DNA, 318 bp, Zea mays
  Clone ID: MRT4577_27647C.1
atacccaaaatctttttatattaacaaaacatgcccagcaatcgcttggatgcgatgcggtacttaggtacaaaggataaaacatcagatattaaattggcatgcttaaaaggtgtaaaggcagctcccgtcgtcactcctcgccgttgggtcgaagttcttggcagtctggtcggtgcatcctgccggtacaggcaaagtaccttgctgtgcccctttacctcctcctatgcaacaagagatggggggtgtgtattgagaatgttctaaccgtagaagggaccagtctttattgcattctgggtaggatcacccaaa

SEQ ID NO: 105425 - DNA, 346 bp, Zea mays
  Clone ID: MRT4577_27648C.1
ataacttgaccattcctttacaaaaataaacaaaaaatttaaaaccaacaaaaaacttcccaacaaaatcttttccaaattcaaacccttaaaaattccaaacctttttgttccacctggatccccaaaataaacccaaaaacaaaggtatcccccggataacaagttcaaaaaaactgcccccaaaccaaaacgaaacaaaaaacggtgaagcccacctcgaccctaattcccagcttacttcccctttattgccaaacaataactttccaaaatcccaccaaaatgaaattaatcgacacgttataaccacgcaatccccgggaaaaccccctctaaacccaaa

SEQ ID NO: 105426 - DNA, 662 bp, Zea mays
  unsure (1)..(662): unsure at all n locations
  Clone ID: MRT4577_27649C.1
tgatgaatccagttcaatttatgccaaccgcgtgccaggaccgacacgacagcttgttgatctcttcttcttatgtatgtatgactcagcgcagggcagggcagggcagagcaggacaaacacataccacaacaccagctcctcctcctactcatcggcagaatctgattgattgattgctgagaggcaccaaaagggatatggcatccttccaccggcccctctccgccatggcggtcgccgcctttgccgccgtctcctccatcgagctgcctgacaaactctcccaccacaacaggctccccgacgatgtcgtctctcttcccgccagcaaaccagaggccatcacagcaccttcagccctgccgctgtccggcctgcagttcatgccacggaacctccaggcttttgacccggcaaaggcgcccgtcgcgtccctgccggtcattcagacggtttaccagtacgcgaggctcgccaagacctcaccggaacaagaggtggcgttaccggccatcccttcctcctcgtcggatgctctgtaccgctggcatctgccggacccgagggcgtgccacggctcgcccgacaggtcccagacggttgtagttttgctcggctggctgngctcgaagcagaagcatctgaagagatatgccgat

SEQ ID NO: 105427 - DNA, 108 bp, Zea mays
  Clone ID: MRT4577_2764C.1
aatgcactctcttcccttcttcaacataaaccgcatccaccggcagtcactactgacgctacaaaagaaaaccgatgcctgactatatgaaggagctacgaatcatga

SEQ ID NO: 105428 - DNA, 196 bp, Zea mays
  Clone ID: MRT4577_27650C.1
ttgacagtcgtatggctttgcctgtggtgtgacgtatgactacatagtgagttgatacccgtcgtgtccgcaccaaaacctgatggacggattgtacacgcacaccaacgcggggggggggatcctgatgctacaggacgaccaggtgagctggctgaatttgattaagggcagtgacagtggggagtgggtggac

SEQ ID NO: 105429 - DNA, 380 bp, Zea mays
  Clone ID: MRT4577_27651C.1
gggggggaaaattttttttttttttctttgaccagatgaaagattccccctggggcccgggtccctcccctcttaaaatggggggccggggggaacatttttaaggcaaaggacccgcccccaaaaaaaattgtttccccccggggaattttaacccagggggggccccaacaacttttccaggtaaacaaggcccgggcccaggttttttttcccgggggccccgtgggatttaaagttggcccccttggcctggtttaccaaaaacaaccccctttagccggggtacccccctttgccgaacaccccgggccacgccgggggggcctccaggggggcgtgggccgacccctcttggaattaaaaccccttcccaaacg

SEQ ID NO: 105430 - DNA, 400 bp, Zea mays
  Clone ID: MRT4577_27652C.1
acccgatcttcacaccttacgcatggtgcattcagcccaaatggggggggggttgtcttacgttgcagggagagagctgaggatgtgggctcggtcgacccagacggtactgaggtccactacaggaaaggctatgtcaggcaacaattctccgaggctgcttggcacaaagcgtcagcgaccggacatgcgaaacagaccaaggcttcaggtaatacatcttcgagagctttgtagagggtagatatgcgcaagaaattgatgctggtgataacaagatctctgtacacaggttaggtgcgcgagatcgcgcttgaatcatgcagagacgttcttgcatcaaggccacccgggctgtggctatgacacgaggcacgagcctttgtgtactcgagcagca

SEQ ID NO: 105431 - DNA, 406 bp, Zea mays
  Clone ID: MRT4577_27653C.1
gcgggaggacaaggtgttcgtccgcgtggacgaggtcggcaccgagctcgcggccaacttgcgcgcgggggcggagcccgccgtcatcatcgtcattgccatgggcgtgttcctcttcttcaccaatatatgctaggcagtgccgccgcatcgtgtgctgctcacaattgcgcagccaagggtcgaccacgcctggcacacaacaagtattgaatattgatggagatgaagatctattttcttcttggagcctcgagccctcgaggtagcagtgtaggcgtgtagcacatgtttttggtttctgcacagatttgatgtccttggaacaacctgtgcagttcctttctccaaaacaagaatgtctattaaactttgtatgcgatatggttagttaaaaaaggggggg

SEQ ID NO: 105432 - DNA, 552 bp, Zea mays
  Clone ID: MRT4577_27654C.1
actcgccggccggattgggtacctcgaggccggcccgggactgcgtccagccgccccttcctcaatcgcgcccagcggctcccatggcgagctcgccgggatgccctgctccagccgacttccctccccgtcttctccctgcttctgctcggagctccagctcagctccctccgtgcgtccgcgacctttgccgtggggctccttcctgcgcgcgccggacgccgggttgtcttcaacctccagccgtggatttcctgccgtggagcttcgttttcccgtgcgcgcgtctcatctccatagcgctcggctctcctcctccctgtcctctgtgcgcgcgtgtgagaggtgaccaggcctagaataggtgtgaagtgtgtgtgcgtgctgggcgtgatgggtggagtgggccactgtaaccgggatacatatacactgtcttgtggagggggaaagggaatgcataatgggaattatcaatagaattcttctcgttcctttcaaaaaaaaaaaaaaaaaaagaaaaaaaatttgcggccgaacccctttaaaca

SEQ ID NO: 105433 - DNA, 218 bp, Zea mays
  Clone ID: MRT4577_27655C.1
atataaggagtctcaagattacacaatataaattattatccgaattatggaaatgacagtagctacaaaatcctttcttcaactactagagttccgactgtttaatataaacaaataatttgataaaagaaactggtgctgaattaattactatctgcatgttaaaaagagcatatatttataggggagactaggcgggacccgaaataaatctttta

SEQ ID NO: 105434 - DNA, 467 bp, Zea mays
  Clone ID: MRT4577_27656C.1
cgcccctaagcttctatacctgctagaccgcccgcccttttttttttttttttttttttttcctttttttattcttttggggtgggcttttttattttataactattcccccttcccttttccttattctccaaaaaagaaaaccccttttatatttaaatttcccaacccttaacttccttcctggacacccccaaacaaaacttcatccaacccaacttatttaccacccaaaaaaccaaaaaccatttcccgaaccctttcaaacttccaaccaagctcttcctttattaaacttctttgtggagggatagacccccaaaaaaaaagccgtggcccccaacttaaaccccccttttttcccccccaaatttttttaatcccaaggaccccccatcttgcccctttaacccctcaccaaaaaaacaccccccttgggccactcaccacccttagaatcttaaaaa

SEQ ID NO: 105435 - DNA, 109 bp, Zea mays
  Clone ID: MRT4577_27657C.1
gccatgatagctgcgaggcgtgctgggacgaggggaggtatagtatatagttggaggatttccccacgataaacttgaagaaattagtatatatactgttataataata

SEQ ID NO: 105436 - DNA, 454 bp, Zea mays
  unsure (1)..(454): unsure at all n locations
  Clone ID: MRT4577_27658C.1
gcttgcttgccatttnacgtaccagccgatcgctgcagactacacccgatcctgtcaacaccatggggcagtgcgtccagatccacatgcaggaactgatgatgcaggtgaccaactcaacatgcgtagtatactgcctaactcttgaaatgaacgtgcaatggccatgcactcagtaacgagatccaggggcactctgtgatatgttctaacaaacagactaagctaaacgggctgttacaaaccctagcctggtgctgagatggtcaccctatgcccaactcacatcgatgacgggaggactggctcctacctcaagttttttcactctagatagtggattcaaggacaaggggaacatctcaaacatgtctggcgccttcactgctccatctgcattgacatcaaactattaacactctatgccatgagaaatgtcgccgacaaatccaat

SEQ ID NO: 105437 - DNA, 344 bp, Zea mays
  Clone ID: MRT4577_27659C.1
gaggcggtggtgaagtgcccgcattgcctcagcgggttccttgacgagatggagaccgtgcgctgcacgcccgcggccgatgacggcgacggtgacggcgctgcggctcaagtgtaccccggctccgaccgtccgagctccatctgggcgcacgctattctcagcacggtcgacagctccgtccgacgccgtcgctaccggcggtagacggaggccggcggcgacgtctacgacgggaacgaccctgagttcgccctgcgccggcgttgcgtcaccgcgttcttgcggttcctgtacgagctccgggaccgacagctgcatcggctggaggctgctgccggggt

SEQ ID NO: 105438 - DNA, 331 bp, Zea mays
  Clone ID: MRT4577_2765C.1
acgtaagctcggaattcggctcgaggctagctagagtgcgaaagtcttgccagtaggtacggctcagagcatggtcgatgcgttgaccaggtgcagcgagctatctggcctcctggcgagctggaagaggtgtgactcgatcggcatcccagcactgaagcaagcaaaaaaaggatctctcggtggaatcaaagagagcttcgtgtggactgactccctcttgactgacatgccaatcactcatgctagcgatgctcttacatgattaacaggttactaaagagacgaaatatcgggctgccactgctaagtcttaaaggggccatgcact

SEQ ID NO: 105439 - DNA, 265 bp, Zea mays
  Clone ID: MRT4577_27660C.1
atcccacctctgggtgtgggactttggggcagccgtgtgtgcaggtgtcggcacaggctagctcctcctggtttggtgtgatgtttgccattgcagagtaagttgccacgaagacccctgggcatgattttgcttgtatttccggaagtggggttgctgggtcatagggcaggggtaattttttttgcttgaaatgtccacttcttgttctgggaggtggttccaagggtgtctgcttttggccaggcgcagtggctcacgcttg

SEQ ID NO: 105440 - DNA, 425 bp, Zea mays
  unsure (1)..(425): unsure at all n locations
  Clone ID: MRT4577_27661C.1
gaagacaagaatgaagaaacaaatgaccaaaagaagcacgttccatacaaaactgagtacacgttagtaccctacccgtaccctgtgtcgaacccctcgatgtgcccgagctggccgtggcagtgtccgtctcaacagcactgacagagctagcagaatgctgcgtctacagcgcccaagtcgtcactgaatccgccaccacgcacctgatcgagccacgccgnctgtgtatgcggcaagacaccgccggcggtctggacaccgatgccttcgacggtctggcctgtcccatggggcacctgactcttactaaacaggagagcccgtgcttcgtcatgtgacgcttcccgctatgctttgacatgtacatctagctgatggcctgatgctgagctgccatcagtactggacctcggngctacttg

SEQ ID NO: 105441 - DNA, 646 bp, Zea mays
  unsure (1)..(646): unsure at all n locations
  Clone ID: MRT4577_27662C.1
ccggccggagtcttctttcagtcaccgcatcagcatgcaacatcagaacagcatcagtcatatccccttgtcgacatagaaacaagacgttgctcactttaatatttctactttatcatcttttagaaatacagaaaccaccgaaaaaatggatacaactcaggatcactttcaggatgcagccctgcaatatctagtaaatcctctactggatgccagtcaaatatcagatggtatagatggttcaagccatgacaaccggccaccaattccaggtcaaagttgcgaaatctacaatttcctagatgaaacaatcgtcccttcaacaccaccaaaatctcacccatatctgcttgtcacatcggctcaggagtatccttctttcaggtctcagaaaacaaccaatgtcaacgtatctcgggctctncatttggaggttcagcactatgcggtctgcttctcctcctcaccagagcgcgcacctatgaggacatgcttgagcaagcagaaaagggcaataatgcaaacgtcgataaactcatcggagacatttacggaatggattacaacagaatcggcatgaaaatgacggtggntggcttcgaacgttttgccaaggtttttagccctggagcatagggcccga

SEQ ID NO: 105442 - DNA, 303 bp, Zea mays
  Clone ID: MRT4577_27664C.1
cccctggacaatgcagcagctttaaattgaagggccctggggataccgctttcatgggaatggggctttaaagggggccctttgtttaaaccggccaaattagccccaaataattcaaatttcaataaaccaaatgggggacaattgaagctggggctaaggaacaaccccccaacagggaatttgaaactccttgccgccaaaaaccattgccggttaaaactttaaaaatttttttctgatctccccgcccttttggagggaggcccggcaaatcttgcccttgtggaaacggctctttaa

SEQ ID NO: 105443 - DNA, 140 bp, Zea mays
  Clone ID: MRT4577_27665C.1
cggaagttcgggtcagacccacccgtccgcccacgcgtgcgcgaacgcgtacgcgttaacgtgcccctttttttcatatccgacgtctcccaacgctggcggggacagcttacacacaacaagcgcgataacctctgtga

SEQ ID NO: 105444 - DNA, 227 bp, Zea mays
  Clone ID: MRT4577_27666C.1
gggagaaatttatccaggagcattaattatttatttattgggggcgcaacaatttatttaggagtggcgttcgtacacatgctagaaacatacatgtaaatactggagtcgcactttgcgtgtacaacttttatttagggggtaacacgatcggaaacttgatcgatcgaccgaaggattattcccgcttttacggcaacggctggaactggtgttggaggactgcg

SEQ ID NO: 105445 - DNA, 261 bp, Zea mays
  Clone ID: MRT4577_27667C.1
ccccaacccgcgaaaggtgctgatcatcgggggcggagatggaggtgtcctgcgggaggtggtgaagcacccctccgtggagtccgtggtccagtgtgagatcgacgaggatgtcatccaagtctccaagaagttcctgccaggcatggccattggctactctagctcgaagctgaccctacatgtgggtgacggttttgagttcatgaaacagaatcaggatgccttcgacgtgatcatcactgactcctcagaccccat

SEQ ID NO: 105446 - DNA, 513 bp, Zea mays
  Clone ID: MRT4577_27668C.1
gttggcgcttggaggcaggctctacggaatgcgcagagccagttgcagcatcaaattataaggatagagaatctcgagcttatgctgaaatatggcgtagatgtttggaagctccagaacagacaaatggaatcagttctgtctaggatgcaaaagatggctgtagaatacaatgaaagggtagaaaatgtcaatcgcgagaggaagttccaccagcaaaatactggaggacagctgcatgccctgaaaatggaatggcaggagctgtgtcaaaaaaatatagctattcaggctgcttgtgttgacctgcagaatcatattgaccagcttaaacttgaagcaaaagaactgggaatgcccatggacgacaactcaggaagaatctaaattcgtgtattgttgtccgttgaagtgccctaacttgtggcaagagaaatgcagctgatgtatgcagactctccagttgacattgagttcttacctgaagcttctgtttgattttctgcttgtttc

SEQ ID NO: 105447 - DNA, 117 bp, Zea mays
  Clone ID: MRT4577_27669C.1
tcgcttacgaaattcaatagcacagcgaagaccgtttttgaagaagatgcgggcgcatctccatgtcggcgttctacagcgtgggccactgccggttctacgtgatcactgtggtct

SEQ ID NO: 105448 - DNA, 671 bp, Zea mays
  Clone ID: MRT4577_2766C.1
gtgccgtcttctccctcactcccgttccatttccccatctcccagatccaattcgcgagttctccctcctctgtcgccatggcgctctctgtggagaagacctcgtctggacgagagtacaaggtcgaggatctctcgcaggcggacttcggccgcctctgacatgatctgctcgaggaccaaatggccggtctcatggcgtaccttgccgagtccagccggtccaataccttcgccggatgtaggatctctgttgatctcctcgtgaacttcacaaacggagtggtcctcctcatgcttcaccttctgtgcggccacttcagcttgcgctattgcaggagcttctaatgcagatggaaaggcggaaccgacatggtatcagtctcgccactcgcgttccgcctaggatactgcacatgagcaatacaaatgttggagcgacttcggaccatatgtactaaacggacgccacattgctcaaggaaatggacatggacgcatataggttctctatctcttgtcccacaatactgccgaagggaacctaagaaggaggtattaacccggatggcatcaagtactacagaaacctcattaacttgttgctagaacacggcatagagccatatgtaacaattttccactggggagtacctcaagcactagaagag

SEQ ID NO: 105449 - DNA, 424 bp, Zea mays
  Clone ID: MRT4577_27670C.1
cgcgtgcgtgagcttggctcctattacacggccgcacctatttttttttttttttttttttttttgcgtttaggcccttggggtaagtatagtgttaggatataattaaatctattagatttcaaggttggatagtaaccaagaagccagtaacgtgagcatatatggatgacacgggaaactcatgtcaaagaggaaacaacagaagcaatttcaatagatgcaatgcatgatgaggaaagaaggttagggtttttagggactgggattagagagactacttaggattgttacacagggaacaaacatagcgaggatgagtagaatcatggggtaaggaaccaggaaaaatgtaacgaaatagaatggttttttggagagagacgagtaatgagagaaaagcaaggggccttttgtaaggggg

SEQ ID NO: 105450 - DNA, 1567 bp, Zea mays
  Clone ID: MRT4577_27671C.1
aaaagggggtttctcatcacgcatttaaaattgggaaggcccgggttttttcccagtacccggtgtaaaaaaaggggccattttttttatttttgggtccccaaaaaaaaaaaaaaactccccaacccccctttaatataaatttgccttaaaaaaaaacccccccctttttttttttttttttttttttttttttttttttatttttttttttttttttttttttttttttttttttttttttttttttttttttttttttttttttttttttttttttttttttttttttcttttttttttttttttttttttttttttttttttttttttgaaaatcaaacagaagcttcaggtaagaactcaatgtcaactggagagtctgcatacatcagctgcatttctcttgccacaagttagggcacttcaacggacaacaatacacgaatttagattcttcctctgcgaggtgctttcaggagcacaggtcatgggattgctaggcacactccacattgttttcaatatcaaacagactgtcccatatgacaattgcaggacaggtaatcacaatggctaatgaaacgtccagctcccagactcaaatgaagcgtagcttcttccttgccacctctgtatctcaaatcctcatgatgcttgtgggtcggttcctgagttgtcgtccatgggcattcccagttcttttgcttcaagtttaagctggtcaatatgattctgcaggtcaacacaagcagcctgaatagctatatttttttgacacagctcctgccattccattttcagggcatgcagctgtcctccagtattttgctggtggaacttcctctcgcgattgacattttctatcctttcattgtattctacagccatcttttgcatcctagacagaactgattccatttgtctgttctggagcttccaaacatctacgccatatttcagcataagctcgagattctctatccttataatttgatgctgcaactggctctgagcattccgtagagcctgcctccaagcgccaacatcattcctcttgttcattggaggtggctccaaaccatagcgagacatatctagcataaaaggaggtttgccagccctaacacgttcatattctttagcaagcataggatgattctcgaatccggcggtgggaacagggggcaggtcccggaggaagtctgcaggcttgcgcttccctcggcgcatctcctcctcgacgaggcgatcgacctcccgcttcaccgccgcatcgccgtagtcgccgtcgatgtagggcagcgcgtcaatggcctccgcgtccggcaccgcgcgccagggccccgcagcggggtcggacggcggaggcgcctcaagcatgagaacctctctcgtcgccgacgaggccatcgcgtcaggctgtagcggcgcagtcgagagtcgagactcgagagagagagggaagcagtcgcgtaggccggcgcggaggaggaagcggagggggggatggccggatggagatggaggccgcccggcgggcgtgggccgtttgccgttttggatt

SEQ ID NO: 105451 - DNA, 2829 bp, Zea mays
  Clone ID: MRT4577_27672C.1
acccagtgcccccacgcgtgcgcccacgcgtgcggcggcgctggaggatatcttgttatgcaacaccaagcgcgtgatcctggatctcaagcccggcgctcagttccgcgagaagctgttcctgaacatcagcaagccgttcatcacgttccggtcggaccccaagaagcccgccgtcgtggtctggaacgacactgcggccacgaacggcaaggacggcaagccggtgggcacggtggggagcgccacgctggcggtggagtcggactacttcacggcgtacggcgtggtgttccggaacgacgcgccgctggccaagcccggcgccaagggcggccaggcggtggcggtgcggctgttcgggaccaagacgcagatctacaactgcaccatcgacggcggacaggacacgctgtacgaccacaagggcctgcactacttcaagggctgcctcatccggggcagcgtcgacttcatcttcggcttcggccgcagcttctacgaggactgccgcatcgagtcggtggtcaaggaggtggcggtgctgacggcgcagcagcgttccaagtccatcgagggcgccatcgacaccggcttctcgttcaagaactgcagcatcggcggcgtcaagggcggccagatctacctgggccgcgcctggggggactcctcccgggtcgtctactcgtacacgaagatgggggaggaggtggtccccgtgggctgggacggctggcagatcgccaagccggagagcagcggcatctactacggcgagttcaagtgctttggccccggcgctgacgccaagaagaagaagagggtggggtgggcgctggacctcaccgaggcgcaggccaagccattcgtcggcacacactacgtcctcggcgacacgtggatccagccaccgcccaagtagcgacgcatgccacacgatatatctatttgagtacgaagcaaaagcgagagacacgaatctctaatctctttactgatgcgcaggtctacaactgcaccatcgacggcggacaggacacgctgtacgaccacaagggcctgcactacttcaagggctgcctcatccggggcagcgtcgacttcatcttcggcttcggccgcagcttctacgaggactgccgcatcgagtcggtggtcaaggaggtggcggtgctgacggcgcagcagcgttccaagtccatcgagggcgccatcgacaccggcttctcgttcaagaactgcagcatcggcggcgtcaagggcggacagatctacctgggccgcgcctggggggactcctcccgggtggtctactcgtacacgaagatgggggaggaggtggtccccgtgggctgggacggctggcagatcgccaagccggagagcagcggcatctactacggcgagttcaagtgctttggccccggcgctgacgccaagaagaagaagagggtggggtgggcgctggacctcaccgaggcgcaggccaagccattcgtcggcacacactacgtcctcggcgacacgtggatccagccaccgcccaagtaggcgacgcatgccacacgatatatctatttgagtacgaagcaaaagcgagagacacgaatctctaatctctttactgatgagatgttttgcttatatatatatataggaggcttaaaggtctaattaaaaaaatgtctctacaacctattaagggatatcttgaagcggctaatgaaagctcagggttttcatttgtaccgggacatcgcagccaggtatacctccaagcaggtacgtcagcatccgatcgtgtacggttttttacgaggactgccgcatcgagtcggtggtcaagaaggtggtggtgctgacggcgcaacagcgttcctagtccatcgagggcgccatcgtccccggcttctcgttcaatatctgcagcatcgtcggcgtcaagggcggccagatctatttgggccgcgcctggggggtctcctcccgggtcgtctactggtacgccaagattgggaaggaggtggtccccatgggttgtcacggttggcagcatcggcaagccggagatcacgtgtgtcgtcgtgcgtcgtagtatcaggcgtgtgagatccgcattggcgagcttgccgtcgtcgagcccggagtcgccgtgcccctttacgcggttcatgcgcggcagcttctcggagcgctgcgcctccaggaatatgatggtcttgctgagggcatccttgtagtcgaagccgcagccgccggccagcgccggttgcagggcgtcgccggccagcaccagcgccgcgaaggccagggcgacgtgggcgcgcatgctgccgtgcctcggtcctgcgggtgtcggaacggaacgacgcgacccggccggcgtcgcagatcacgtggccgatggacacgcctttgagaccgtctgtttcttggtggccagcatgttgatgatgacgacacgaggaccttgctatgatcctttcgtttccaatgtagatctgtttcccatccatcaccccgtagatgccctcgccatgatagatgcaggtctcggtcacgttctccggcttcggctgtacagatttggactgagcgtactcgacaagtgcagcggccattggatggcttgatttgctctcgatgctagatacccagtagagtagctggttcatttcaaccttgtccccaaccacatggaagtccttgatgctgaactcccctctggtgatggtgccggtcttgtcgaacgcggcgaccctgacttcgcccagcgactcgaggacgttgcctcccttgacgaggagccccatcctgcggacgcgtggg

SEQ ID NO: 105452 - DNA, 322 bp, Zea mays
  Clone ID: MRT4577_27673C.1
cattcactcatacttcaacatttattgtttatcaaataatctgtctatgcaataccatttgtcatccagttactataggaaagtttgccgccaaatagtaaattgattattgagaggcaaagctcatacatatttatacacaaggaaccagatcgggtttatagaaacagcaccaatcaagggatccttgcctattctgttgcaacacacaaagcaaggcatcaatcaagggacccttgcctattctgtacagcacacaaggcaaggcatcaatcaagggatccttccctattgtgttacagcgcacaaggcaaggcatcaa

SEQ ID NO: 105453 - DNA, 493 bp, Zea mays
  Clone ID: MRT4577_27674C.1
acaataagcagtaccgaagatgactaatacacttgtgacctaatacaatgaagcccacacttcagggacatatacgcatttggtataactagcggaggccgggcaggctaatacatgtacacaaatgtgagtgggcatacacaaacccgtcagaatttccaaacacttgctcactgagggcttaaaatgcagatcatgcgcctgctagaaccagcagtgccgctgtagcatccataacaagctatatgcacagtcgagcttggcactagtggcatagtcaacactctgggaatactcagagtgagacactaattcatgcgtggagaaaaaacgaattccaaaaccttacatacagaaaacccacacgcaagccaagccgattgatatttaaactgaataggacacgagccatcatgtttggcctccaaatcctcatcgtcataaccccactacttacagacttctgctactagaacccacaagttggcaagct

SEQ ID NO: 105454 - DNA, 271 bp, Zea mays
  Clone ID: MRT4577_27675C.1
ttctatataagcgaactattgtaagaattgatgggggttggtttgggtcttgggcaccagagaggatgttgtgggatcacattatttataaaccaatgcgggcaatgcttggaggacgtgtgacatttggtctttgtggtggtgcacctatgtaaagtgacacacagagatctatgaatatattgataggtgtcccaggcggacaaggctatggattgactgaaacttgtgctggagcagctttcactgaatgggatgatacaagtgtggg

SEQ ID NO: 105455 - DNA, 804 bp, Zea mays
  unsure (1)..(804): unsure at all n locations
  Clone ID: MRT4577_27676C.1
ggtaccctcggtgtcgccggnagtccgggctatgtttccatgctgttgggcggagcactttccttcaatctcatattcccatcgaatgagccagacatctggaggttaatgggaatgtggtccatttggatgttcactataccttcgcttcgggctcgtgactgctccaataaagattcggaagctctcaactacttatttctcctgattcctctgatcaacgttatgattccattcttcgtgaagtcctttgctgttgtttggtcagcagatacagttgctttcttcgtgatgtatgcatggaagcttggatggctgcaaaggttgaaatgaagatttttggtgtgctctcttggtgatgtgtgtatgaaagcttggatatttggtttgaaaaggtggagtcggtagcttttttgctgagagaaacatttgtcctcaaaattttcacatcttttggagggagctgcatgattagtttattccaagatttagttcatatagccttttatatcttgtgtatatgcagggagtacgaaaaaacagcctttcacatttaggccttgttcggttagcttccaatccacatggattgagtgggattgggtgggtttaaatcccaactaagtcaaactctttcttaattttttccaatctcatccaattcatgggtaacgggattaaccgaacaaggccttaagtgataaatatatgtacctgaagtctgaacatttttgttgactacgaactgaacagctctaaatggttcttgatttctcaaaaaaaaaaaaaaagacacaaaacaac

SEQ ID NO: 105456 - DNA, 823 bp, Zea mays
  unsure (1)..(823): unsure at all n locations
  Clone ID: MRT4577_27677C.1
cattgggtacctcgagtccggccggggtgccccgcgtacggtatccatacactcccggcatcccattcggccgcgagccgccgcgtccgtacatcggaccatgctctccacacccgccgcaggctggcgcttccgccggggaggtctgccctggaggcttcatacgtgctcctgcctggcgtcgccgctgtcttccagaggcggcgagcctgaaaaggcgaggcctttgctcgcggagaggtaccgggacggtgtcgtcaagagatatatttcggatggcagttctaagctgcaacttcgtttggagaagcatgaatctccagtgaacggtgtggaagatgagaatgcagattctttgatcccacaggctattttggactttgtgcttccagctgggtttccagggtctgtttcagcggactacctggactacatgctgttgcagttcccaacaaatgtgacaggttggatctgtcatgtattggttacatcaagtcttttgaagattggtacaggctgtaggtgttgggtcctttacaggaacttctgcagctgcatctgctgctgctatcagatgggtatcaaaggatggcattggggcctttggacgtcttctcattggtggacgctttggagcacttttcgatgatgacccggagaatgtgaggatgtatgcagggaactgcgggaagcatataagcacattgagcttagtactacattggctacaggntactttcctccacttgcatcattagggaaaccttgcaaaggccgtagcaagaagatttaaaagatcccttcattttcgccgttatccaaa

SEQ ID NO: 105457 - DNA, 1334 bp, Zea mays
  Clone ID: MRT4577_27678C.1
cattgggtacctcgaggccggccgggctcggaaggatggcggcggcggtttccagggccatctgcgtccagaaaccgggctccaaatgcagcagggacagggaagcgacctccttcgcccgccgaacggtcgcggcgccgaggcccccgcgcgccaaagccgccggcgtcatccgctccgactccggcgcgggacggggccagcagtgctcgccgctgagggccgtcgttgacgccgcgtcgatacagacgaccaaaaagagcaaatggcgcctcagtctcccgcgcgcaagctacaacggttcagggtccggtgctgcggcggctgagccgtctaccgtgggagacaccttggaacgggaggagggcggcggcacagaggcaggcgcttcggctgatgagtcatccaaccggaagcagccgccccctgttgaccccaagattgagaaggagctcaagaaggtagttcagaagactgcggcaacctttgcaccaagggcgtccacgaaaacaaagaaccctgctgtccctggaagtaccctgtacaccgtctttgaagtccagggctatgtttccatgctgttgggcggagcactttccttcaatctcatattcccatcgaatgagccagacatctggaggttaatgggaatgtggtccatttggatgttcactataccttcgcttcgggctcgtgactgctccaataaagagaaagaagctctcaactacttatttctcctgattcctctgatcaacgttatgattccattcttcgtgaagtcctttgctgttgtttggtcagcagatacagttgctttcttcgtgatgtatgcatggaagcttggatggctgcaaaggttgaaatgaagatttttggtgtgctctcttggtgatgtgtgtatgaaagcttggatatttggtttgaaaaggtggagtcggtagcttttttgctgagagaaacatttgtcctcaaaattttcacatcttttggagggagctgcatgattagtttattccaagatttagttcatatagccttttatatcttgtgtatatgcagggagtatgaaaaaacagcctttcacatttaagtgataaatatatgtacctgaagtctgaacatttttgttgactacgaactgaacagctctaaatggttcttgatttctcaatactttttgtcccagacaatatctatgttgactgctttttctgaaaatgaaacggggtaccagtggagtttggaaacatttgtatggttcatgtcatctctgagatttcgatatgcatccgtgaaagtaatatgttgcacaaaaaaaaaaaaaaaaaact

SEQ ID NO: 105458 - DNA, 571 bp, Zea mays
  unsure (1)..(571): unsure at all n locations
  Clone ID: MRT4577_27679C.1
ggtacacggccccccccctcggccaccccccccccccccccccccccccccccccccccccccccccccccccccccccccccccctcttccaaaaggggggaaacggatggattttaacaggaggggtaacgggttttacaaagggccctttccccagaaaagttaagtggttttttattttaacaagggttccaagggaattttaaaaacaaactaaacacccctttcgaaggggaaaaaagcacacagccttccacgccgaaagcttttaactgggggaagaagcccggaggaacaaaagttgggggggggggataaacaggccccccccaaaattttctccctttgcccggaatactggggaaaaaaaagggagggggcccccccacctcggggagggcgaaaaagggcacggacccccgggcgaggcccttgagcaggaaaatcgcgccctcaacaacccggatgccgtaaagctgaaggttggggnaaaacgaacaaaacagggcgcgcctgaacccgtccgccgcgggaacgttaccaggccaaggggtttgccggggaaccca

SEQ ID NO: 105459 - DNA, 1273 bp, Zea mays
  Clone ID: MRT4577_2767C.1
caaaatcaaaagatcgatccgtgctctcggttcagagcccgaataaagtcagccaccaactcgtgccggacaagctagatagaaaaaaaaaacattggaatcaataaagcttgccgccgcctcgacgacatctcgtgccgatcccaacagtcatgttccaattgctctcttggctgctgcttcctcttcttccctcttggtcttggcggcggcttctttttcccttcttcggcgaagaaaatggccaggcacccaggcgtcgactggtcgacgacggctctgttccaacaagtccgcgtcgtcggcgtccggccgggcgcgctgcagcggtcgtggatcatcctgtcggcgtgcgccgtggtgcagctccccgtgtacctgttcacggagccgctgctggtggcgctggggcaggacccggacatctcggcggtggcggggaccgtggcgctctggtacatccccgtgctcttctccttcgtctgggccttcccgctgcagatgtacctgcaggcgcagatcaagaacatgatcatcacgtacctcgccatgctcaacctcggcctccacctcgccctgtcctggctcgccgccgtccacctccgcctcggcctcgccggcgtcatgggctccatggtcgtcgccatgtggatccccgtgttcggccagctcgccttcgtcttcttcggcggatgccctctcacctggaccggattctcgtccgccgccttcgccgacctcggcgccatcgtcaggctctcgctctcttctggtgtcatgctctggtaagcaaagcaagccactgtggtctgtgggtgtggatggtatccatccgcatcgtagtctttttttctttcagcttggaattgtggtacaacaccatactggtgctcctcacaggatacatgaagaatgcggagatcgcacttgacgccctttcgatatggtaatattaaaggaaccctaatgataatgtccacagatcactctacactttcatcacttgctagctgctttactaaatgtgcagccttaacatcaatggttgggagatgatgatctccataggcttcctggcttaatcgaactggagtgtcgacgacgaacagggctactggatgacaggtagtgtagttacgaagctggtggggcgcggcgacgacggcctagctggaagtggcggcggtgagcaggcacgaaggatgagagcggaaccctaacgcgcgggggagtgaggccacgggtctgctcggccgcccggccggcctcgagg

SEQ ID NO: 105460 - DNA, 286 bp, Zea mays
  Clone ID: MRT4577_27680C.1
taagaattcaattcgagtcgagctctttccaccaatattataaaacatggggagggtgaatatgttgtttctcccgtatactacatcaaagacattggaaccttacacaacattgtcaaaaacgctatactttactgatcatactccaaattgtctctcctagacaaaatttgccacccagcctttattctttaagaatcagtggaacctaaacacacaggcaacactgcaatgcgcattagaatggttggagggccaaaaaactttttgattaaaaaatgcctac

SEQ ID NO: 105461 - DNA, 271 bp, Zea mays
  Clone ID: MRT4577_27681C.1
gtgtattgattatattttcatttgtttcgattgttgtttaatggattaagactgcttaatccatgggacaggcttagttacaagtggaaatgttatcattgcaaggaaaacgtaaactgatgacatgtaagggcactacgaacgcacacacatcaacaggacccaaggataaaatgccacaaagcaaggttcaccgccttggtggcgttgcctaactgaaccaactggccgtcgttcacaaaccgtactttgggaaaacataaccggaacg

SEQ ID NO: 105462 - DNA, 611 bp, Zea mays
  Clone ID: MRT4577_27682C.1
gcgcccgcgccttctccccccggcgccccccaccaacagcagcgctcgtgcctgcgcccgcgccttcttccccggaccgcacgacctctccgcggtgttcgtgccgcgcaggtcgccgcccagggccgccaccgccaagaaggtccgcctgcacctcgtgggctgacgaaagccaagccatgccaccggcggcacgacaggatgcatgccatgccaccacgcgccatgctttctttcttcgtcctccgattcatccgccagcgcatcacgcgcgcatcagttgcgccggcgcgccattggccatttgctgcgagtgcgatcgatggaggacaaattcttgggcttcctgacaagacagaggacacgacgaccaaaggcgggcgggcgggccggccggccagtacaatcgatcagatcagagtgtttctgcagtgattgcgctaccttctcaatctcagatcgatctcgagctgcctggatctgaataatcgaattgtaaataccacatcgtcgttggctgcgcatggttgtcgtcttcgcgtgtcgagggtgtataaaggccatagtcgttcctggaaaaaaaaaaaaaaaaaaaaaaaaaaaaactcgag

SEQ ID NO: 105463 - DNA, 390 bp, Zea mays
  Clone ID: MRT4577_27683C.1
cacaaaaagaatctcacacacactcacatatcaatattaaaatccatagtgtcatcagttacatcacagaaggctcatccatagtcataatcaggggaagatctacaccaaaagccacccgatctgtggcccggggggtggggccatgaaactctgtacaagtctctatacactagggggccaaatacttaaaacataacctaaagaagacaatctggtagattcggctggggaaatacaaaaatttgggtctgcccagggtcataataagacacaataattgccatttagcgccagcctatttaggaccatccttgctcgagggagctgatgacccagacacaaatgggtgcaggggcacagcgccactctcctcgaccacaataagga

SEQ ID NO: 105464 - DNA, 519 bp, Zea mays
  unsure (1)..(519): unsure at all n locations
  Clone ID: MRT4577_27684C.1
cccaggctgcaaccctcgttcgccagatgaggtagcccggaaagccaggcacgagatcactgtaacaccatatgcccttatccctactctgaccctgaactagcgcaccatcgacactacgcaaatagtacggaacgacccaaacgctggacgcaaactcgcttaacatggacgatgcaaggaaagatagctctgcactctagctctacctataaccataaatatcctctgaatatcctgttagactgtactgcttagaccagattgctaccccctgtctgtacatagttctggatgacaagataagtatccatccatagccctaggaaagttgttttctgggggagctcacatacggtcactttaaattgccatgctaaggacaaagattcatgagcactcagactgtatggaaaattctttttctgtacatcaataataacaggctttatacttgatatatactgaacaagntatagttacatttcactgtgtncatgatnactcgttgcccgtgcc

SEQ ID NO: 105465 - DNA, 462 bp, Zea mays
  Clone ID: MRT4577_27685C.1
caaaccttgttggcctctttattgtgatgtaaccgatataaaaaccttatttgtgggttcaataaacatatcatgtagttcaattattgtggagattaaagtttttggctaatgttcactattctttgttgcaatatgttgtgtgtttgcttatctacaaggaaaatatgataggcatattacatgcccataaatgcgtagttgaagactatgtgtttgctcattttcatgcaactagaatggttcatactcatgaggattctcatgcacgggatcacctcatatgcgacaattaaatagattattcagttagtaaattacacataatcttttgatatgttagtcatttttactaaattgtgaatagtgctattgctaatgccatttggtagtcattgtttctagtagttaggacaaaatgctagtgatatttacaagctactcccatccctaaaaaacatg

SEQ ID NO: 105466 - DNA, 158 bp, Zea mays
  Clone ID: MRT4577_27686C.1
tagatccttattatctttaatgacaacttttacttcatgccctatattatcatcatcggggcgtttctataaaagggcgggggcacttccattataaccttctattacattcattatttcctttactactccaactttacctgttatgtgattaatcc

SEQ ID NO: 105467 - DNA, 234 bp, Zea mays
  Clone ID: MRT4577_27687C.1
tttttatattttttttttttttttttttttttttaggagactcaggagaggactgaattttattaagatataaaattgactgaactactggaggagattggtgtcctagacgtgcatgccattgggctcgaataggaaaagacccactggtgaagggtttccttaaaggttggtgattttgaccggttgaggtggtagagaccttctttacaccgcccggccaagagaggtttc

SEQ ID NO: 105468 - DNA, 533 bp, Zea mays
  Clone ID: MRT4577_27688C.1
ccgctatcctcttcccctctgctctcgatcctcccctccctccctgcctccctcctcggcgctccgccggcttcgtgctccctgcgttcgccgcgcgcgcgagcgcgaccgatggcgtccggcgacggcaagccgaggagcgaggaggagtggcgtgccgtcctctcccccgagcagttccgcatcctccgcctcaagggcaccgagttaccgggaacaggcgagtacaacaagttctacggtgacggggcgtacaactgcgttggctgcggaacgcccctgtacaagtccaccaccaaattcgactccggctgtggctggccggccttcttcgaggggctccctggagccatacacaggacgcctgaccctgatggtaggagggtagagatcacatgcgcatcttgcggcgggcatttgggacatgtgttcaagggagaaggcttcaagacgcctaccgatgagcgccactgcgtcaacagcgtttccatcaagttcactcctgcctcctcctgaatccggccagttctcga

SEQ ID NO: 105469 - DNA, 543 bp, Zea mays
  Clone ID: MRT4577_27689C.1
aacttcaccgcgccgcctcccccacgagactccttcttgctctcgcttccgaggacgaccgccacttcctccccgacgagatgactatccgcaccaagaactcaggaatcgctggcaaatatgtgaccagacatggtgccagcttacctacacagatcaagaagatggaagtctcgcagcactccaaatacttctagagagttctgcggccagcttgtcgtgcacatcaaagcatctggtatctgcagatgctacgactgtgcataaggtaaaggcgtggggagactacacaatgtacactgctatggcggtcactgtgataaccacgatccttgcgcctgccatagcagatccaagcatgattgcgcgcaacttgaaaactagcacctggatttttgtcgatcagccaagagtctagaaccattttgcctttttagctatatgaacaagaaatgtttatctatctgtagtgaccacattgtactcatggagtgtcatgctcaattgatcggatgcactatgctatgtgactacttgcgcgag

SEQ ID NO: 105470 - DNA, 710 bp, Zea mays
  Clone ID: MRT4577_2768C.1
taggggcctttttttttttttttttcaactcttggccgcggcacaaacacgtgcttgtcgctctgttaattactattgctagatttcaacgacaaataaaaaagaacgcagggagtacttagcatctggaatcaacaacatcacttagcatattccaagtttccaacaaatgtaacaaaacgaaccgcactgcatgcagctgggcatggcgagcgcgctggagacgctgtgcgggcagtcgtacggggcgaagcagtaccacatgctgggcatctacctgcagcggtcgtggatcatcctgtcggcgtgcgccgtggtgcagctccccgtgtacctgttcacggagccgctgctggtggcgctggggcaggacccggacatctcggcggtggcggggaccgtggcgctctggtacatccccgtgctcttctccttcgtctgggccttcccgctgcagatgtaccttaatcgaactggagtgtcgacgacgaacagggcaactggatgacggttagtgtagttacgaagctggtggggcgcggcgacgacggcctagctggaagtggcggcggtgagcaggcacgaaggatgagagcggaaccctaacgcgccggggagtgaggccacgggtctgcccggcttctcgggcaagcggtactcaggccgcttttttccaatcgttcggacgggcagcccggaacccggccggc

SEQ ID NO: 105471 - DNA, 420 bp, Zea mays
  Clone ID: MRT4577_27690C.1
ggagctagaaattactgcattgcacattaatctccatgctactgatggaaacaagagcaaaacctatggccctggcgctcattctgatcttagagctctcgctcaatctggcattaaaataggacgtattgacgatgttactccagtcgcaacagacaacacacgcataagcgatatagaacagaaagatcttaatttcagtactgacttactgccctgtacagaagtagcagttacaagtctctatggatatcatatactgaattattatgcttattatcgattgaactattgactgaactcatgaatgattactaatactcattcttgacatggaatacaacataactgtacaattactagaaaagaccctggaacaacagctgcgccaactcctgacaacaatgggtgtgccaaaac

SEQ ID NO: 105472 - DNA, 445 bp, Zea mays
  unsure (1)..(445): unsure at all n locations
  Clone ID: MRT4577_27691C.1
cgaaaacccgggccgaccaacccttccggaaaaaaaaaataataaaatcaataccactgtgtttcctcctaaantttcaaattcaatccgggaaatttccaaggcaaaatgttttaaattctaaaaaaattttcaaaaaataatcaacttcttaatccacactccaaagaataattataatccaaatgattccatctatccattttaagttttccttcatcttaacctttttcattttaatcttttgtcccattttttttttaaataaatcactacattcctccaacttaccttttttttattttcaatttcccctttattaatccacaatccaattttaatattttatttaatttaatatcattatattttttattttctaattatttttaatttctttttttatcctcctttttatttatttctttattatttatcttttttt

SEQ ID NO: 105473 - DNA, 129 bp, Zea mays
  Clone ID: MRT4577_27692C.1
attcccggtcagacccacgaatcaaggctgatgcccggagcgaacttgaatccatcacactgcgctcaccttcatatgatgcaacatccgcgaatgcatctgtattgcaaaaatagacaaatgcttcgc

SEQ ID NO: 105474 - DNA, 220 bp, Zea mays
  Clone ID: MRT4577_27693C.1
ctgtcctataatattcattctttttgaaatgtcaaccccaagttagttcaatctggattcatatttaatttgaaggtagaatgttttcaaatgttctccagtcattatgttaatatttctgaggagcctgcaacatgccagccactgtgatagacgctggcggatcctagcagatggccaatgagatcattgtgaaggcatgcgaatgtatgtgcacatc

SEQ ID NO: 105475 - DNA, 431 bp, Zea mays
  Clone ID: MRT4577_27694C.1
ctatgacgtaagacgtgcacgcgtccgtagagctcggatcctgtatagcgggcgccctccacgcgttcgttgaactactcatgaactggactatacaccccatctaggcatgcgaacgttataacactcgggttcattatggcacgaaattcaggctcttgggatactacctaacgtggtcatctttgctgacataggaggattcagaacgggcttgctattggggtttcttcttttggccccgcctgagttcagataaatggagagtcatgaggtgacactcacctatccagatgttcggaacacaaagcatgccagggtatcttgggggttgtgggactccgttttgttgctttgaaaagcttgacaattgaatggacatgcccttctaacggaaaaacgagagccacggccgacataggtgccagtac

SEQ ID NO: 105476 - DNA, 402 bp, Zea mays
  Clone ID: MRT4577_27695C.1
atagatttggttttactcaagggccttctacgggagcacgagtaccagatctatcgtgtgaaatatccgtgttcgtgacaatttcacactctcctaacatggtatcacttgtttgaagtacatctaattattcactcttgtttgaagtacttcatttctttttattcggcatcttagattctgggtgattttggtttttatagggcagacctggtgcagtagtgagagctgtttcaccaagtcaccaagtcatgggttcgaagtaacctcttcacattttcgtgggaaaagcttgccttggtttatccctttccgagaccccactcatgtgggagcctccgacattgtgtctaccctttttataagcctacactcgtttcaaagcatgcatatactgctttc

SEQ ID NO: 105477 - DNA, 357 bp, Zea mays
  Clone ID: MRT4577_27696C.1
gtaatgtttatgcatccgccatcaatgtcaggaatgccatcattttttttgttgtgcatatcacatgacctcgtaaataaagaaatgtactgctgccctgtatctcacatttacttgctctgtgctccactggataaactcacaattgatcatagcctacaatatgtaaggtcaaaggtatttccttctaaaaaacgaaacaatgatgatccacaagtcacatctgtcaattacatcacctataaagaccaaagtactacaatttatcttctttcgacaaaacatgctcctcaaatgtatatccacaaatgcttgagaaataagactacaaacacttcatgcttacaataagctcct

SEQ ID NO: 105478 - DNA, 534 bp, Zea mays
  Clone ID: MRT4577_27697C.1
agcagctccgctcgtagatcagctctcggctgaccactcatctgcagagtgtgcctgccgaccaggtctcgccgccgccatcgccgcggtaaacaggggagggagagggggaaaaaactgggccaaatccagaggcacagctcgacgccctggtacgtctctttcccagcgtatgctcttggacgccctattctacccgtcatggtgttcaccgtgagtctcacccgtcgaagctccctgcgcacgcgcatgtccctactccagtccatactctggtccttgctctgccgaattctatctccgacctgaccatcacccttacgctcgctcttcttccctctgcggttttttgctcggctggccactcccttgttccatggttgcgtgcccatcttcctgcctatctgcttgcctctttcgcagctccctggggcgttttcttgcctattggtgtccgtacaggcgctccctcctctcttcccttggctcacctccctgaatttcccgcgccgttcatcgcgcccggctttagct

SEQ ID NO: 105479 - DNA, 2290 bp, Zea mays
  Clone ID: MRT4577_27698C.1
ttaagaattccctcccctagccgccgccgccgctcgtctccctgagaggtgccgggaccgaggaactggccgagttctaggtagagaatcggttttgcttgtctcagcccggggtctgctgcgtctggtggtggtgaaggggagaaattcgtgagatctgttccggatcaggcgtgcgagctcgggaatcaggggtttcacacatagcttcgtcgatttgaatttgatgtactaatggagtctaagggtggcaaaaagtctagcagtagtcgttccatgatgtatgaagctccccttggctacagcattgaggacgttcgacctgccggaggcgtgaagaagttccagtctgctgcttactccaactgcgcgaagaagccatcctgatatcccttttggcttcctcattctagtagtttaggatttcttttctgacactttgattctgaccaatctctctggcctgctgcttcctgataatcgaccagttccccagtcttgctccttgcactcctccctccatctccagcattgtgttctgattcacctgctccaatggctgttctttctgctgctgatgcttccccggtctcagctatcgggtttgagggctatgagaagcgccttgagatcacattctctgaggcacctgtctttgtggaccctcatgagcgtggtttgcgtgccctctccagggcccagattgactctgttctggatcttgcacggtgtacaatcgtgtccgagctctccaacaaggatttcgactcatatgtcctttctgagtcaagcttgtttatctatcctctgaagattgtcatcaagacctgtggcactaccaagctcctgctcaccattccaagaatccttgagcttgctgaagagctgtctatgccacttgctgcttcctgataatcgaccagttccccagtcttgctccttgcactcctccctccatctccagcattgtgttctgattcacctgctccaatggctgttctttctgctgctgatgcttccccggtctcagctatcgggtttgagggctatgagaagcgccttgagatcacattctctgaggcacctgtctttgtggaccctcatgggcgtggtttgcgtgccctctccagggcccagattgactctgttctggatcttgcacggtgcacaatcgtgtccgagctctccaacaaggatttcgactcatatgtcctctctgagtcaagcttgtttatctatcctctgaagattgtcatcaagacctgtggcactaccaagctcctgctcaccattccaagacctggacagaagtggcacgtcttctacgccactgagtacccagagcaaccaatggttaaccttgaaatgtgcatgactggtctggacaagaagaaagcttctgtctttttcaagactaatgctgatgggaacacaacatgtgccaaggaaatgacaaagctctctggcatctctgaaatcatccccgagatggagatctgcgattttgactttgaaccctgtggctactccatgaatgcgatccatggctctgcattctccacaatccatgtgacgcccgaggacggtttcagctatgccagttacgaggttatgggcttggatgccactgctctgtcttatggtgaccttgtcaagagggtcctccggtgctttggcccctcggagttttccgttgccgtgaccatctttggtgggcgtggccatgccgggacatggggaaaggcacttggtgcagaggtctatgactgcaacaacatggtggagcaggagctgcctggaggcgggctcctcgtgtaccagagcttctgtgctgctgaagacgctgttgctacctcgcccaaatctgttttccactgctttgacggcgagaacgtggagagtgctcctcctcctatgaagaaggactacaaactggctaatcttctctgctgggaggaggaagcggatgccatggaggagaagggcgggagtgcttgatgagaaagacgggcttctggggtcgatttgcttctgagttgtttattttatatcgtcgcaatttcgtggttgtcgtttggttattctgtgaagcagccaagccaggctattgttatgaaaatttgtcgtctgtaagcatgtgaacttccgatgttgccacatgctggatcagtctgaataagtaagtatgcagctctaggtggtcagctgcgtctaccacaatgagcatgtacgtatggagaaatatctgtgaacccattttgtttatgaataagatttgttttttcgagtt

SEQ ID NO: 105480 - DNA, 320 bp, Zea mays
  Clone ID: MRT4577_27699C.1
gctaatcaaggggtcaggcctataacataaataccgaggccgctaccgattacctagttaggagggaggcagcctgacaaggccactattggcatagcgagagtggcagcaccatgagggctggtgattgtctacgtgggagggctcacctacggagcgacagatagtggtggcggctatcgtggctaccctggcggcagccgtggctccagggccagggagagcattggatactgcagggaacgagaccacgcctgctcaggcgtgtcccttgttgcagactagtctcatataacatacggcggtgcttaggctatcat

SEQ ID NO: 105481 - DNA, 121 bp, Zea mays
  Clone ID: MRT4577_2769C.1
ccatcaaacaaagctatcaactgattctaatgagccatgtcgcaggttccacagcttccgaattagcatcatacattgcacgatgcataggcatctaatctattgaggacaacgcactact

SEQ ID NO: 105482 - DNA, 519 bp, Zea mays
  unsure (1)..(519): unsure at all n locations
  Clone ID: MRT4577_276C.1
catgncgttcgccgcctccagttctgtggtcgtgttttctgccatcagccagcccgtctgccgtcgtgagatctcatggcaacgagtgcatctactgatgctagcagcagcgaaggaagttttccagtcgcaaataacactgccatcgcaaaacaagtcttggctgctgcttgtatggtgatgatgagaaaaaaccattggggaggtatgccgagatacttgaaagaactggaaagggtttgggagggcaacaagaggattaggtgtagactctgtaaccatgtttataatggaagatattctagagttaaagcacatatgttgaaaattcctggttttgggtgaagttttgtcgagtggtgacagtacatgttcttgaacaattgaaagctgaagttgctgcagccagagttgttgctgatagaaccatgcctagagatacccgacttccagttgagggcaatgagaagaggaaaaggaggggtgtttcagctattgaatcaagcttcaatttgggtg

SEQ ID NO: 105483 - DNA, 372 bp, Zea mays
  Clone ID: MRT4577_27702C.1
attttaagcccgtttcccccttttcccgggtttttttttttttttttttttttttttttttttttttttttcggggggggtatccaagagggttgtaacccccgcttttgggggggccaacaccactttttggggaccacccttgggggcccgggcccttttgaaaacggggcaaacagtattcttttaacaggggttaaaaccacaaattctttaccctgggacacaccggggggtttccccaaaaaaaacgcccaaacggggcccctttttgtcccccttttggggggccccccctttggggaaatccccccttttgtgaccgcccttttttttaaacccccctggggtctgggccccccgccgggtttt

SEQ ID NO: 105484 - DNA, 315 bp, Zea mays
  Clone ID: MRT4577_27703C.1
ggggggccgggcggacgggcactttcttgtgttgattcttttcctgtgagagagagactggttcgtgcacatgaagcagtaccggctacgcatgaagaactcaaggtttggagatactagcggagttgtcttctttccgctcggcgaaaagtgctttcgagacattatgttgggggatgggtatgtctgaaacgatgttgtgtgtgtcctagaggatggctgagcattagtggctcctatcttggggggtttatgtgtagttgtggatgtttttgtggagtgagttggctgtctcgcgggtggtgtgtgggcact

SEQ ID NO: 105485 - DNA, 135 bp, Zea mays
  Clone ID: MRT4577_27704C.1
ccaactacttctaaaacgcaagtcttctctctacaatacccaaacttacggacgcgtgcatacaacatgtgggtgtatctatacctacacctaaattcaaatcatctaccttatactaatattcacaccccctaa

SEQ ID NO: 105486 - DNA, 445 bp, Zea mays
  unsure (1)..(445): unsure at all n locations
  Clone ID: MRT4577_27705C.1
aagcagnggtaacaacgcagagtacgcgggataagngaatgnggtcaaaaaaaaaaaaaaaaaaaaaaaaaaaaaaaaaaaggaaaaaaaaaaaaaaaaaaaaaaaaaaaaaaagnacccggcgnngnaaccacggnnaaagggcgaanncnggaaaaangcagcacagnggcggcggcccgaggacgganccaaagggcgcaanncccccgacaggggggggnaacacaagggagggggcgcggnnncacaacgcacggaaggggaaaacccnggcgnnacccaaccgaaacgaccggcaagaaaagcccccnccccaggcgggcgnaaaagcgaaaaggcccggaccgaccgccccncccaacagnggggaaccaggaaaggcgaaagcaccagcccagcagccgcccacaaagcgcggcgggnggggagggaacgcccaggg

SEQ ID NO: 105487 - DNA, 332 bp, Zea mays
  Clone ID: MRT4577_27706C.1
ataaaaggagctgttggagttcgtattaaggctaatcaaagaaagttttacctagccggtggagcttccttggtcatcctggcgaaccttgcgtcagctgacagaatcagctccacctctgatcgatccccatatccaccccatatccactgagatctcttctccagtcccaagccttgctgcgatcaccactccgcagtcctagacgcccacgacatatcacatctctactttggacacctactcattacggattcagatcactgatcctgcgtctgcgtggcgctgtacattgcatgctctgcctctgcctaaccttagttgccttccag

SEQ ID NO: 105488 - DNA, 800 bp, Zea mays
  Clone ID: MRT4577_27707C.1
aatataccataatagattctcgtacaattctgcgggactccactcgaccggaccaaaactggctacgaaattcggagattcggatggatttctcgcttctccgcagtttggacgccctcaaatcttcccaccacttcctccccctcctcctcccaacagtcaccacgtcacactaccgagccatgtcctccgctaccaacctccgtttattgtcgtggaactgcgccgaggacccgctggatttcggtgcgttcgccgacaccgcgtttctcctgctccagcggcgcgcggcgacgcggaaacgcgcggtgtcgtcggaggccgttcaggtgcgcgccgttgacaagctgggtgttggcgcggcggagggagatgagaagtcacgcgccgccaagaaagggaattcaaataatcattcggataataagactgtcaaaataatgacatacaatgtatggttccgagaggaattggaactgattagaaggatgaatgctattggagatcttatccagcatcacagcccagatctcatatgcttccaggagatcactccaaacatttacctgctttttgagaaatcagattggtggcaagcatacaaatgctccttgccgcataatatggccatggaaagaccatactactgcatgcagatgagcaggttgccggtgaagtcgtttgaccgcaaaccattcttgaactcaaagatgggacgggagctgtgcgtagccgatgtgaccgttggaggttcgatcaagctggtgctggctacagccacctggagagcccatgccctg

SEQ ID NO: 105489 - DNA, 898 bp, Zea mays
  unsure (1)..(898): unsure at all n locations
  Clone ID: MRT4577_27708C.1
ccatgtcctccgctaccaacctccgtttattgtcgtggaactgcgccgaggacccgctggatttcggtgcgttcgccgacaccgcgtttctcctgctccagcggcgcgcggcgacgcggaaacgcgcggtgtcgccggagggcgttcaggtgcgcgccgttgacaagctgggtgttggcgcggcggaggaagatgagaaggcgcgcgccgccaagaaaggtttttaggggtttcccattccttttttttgcagattaaatatttgatttttttccggttaacgttggtggtggatgcgccaagaatgcttcctcgtggcattataatactcgggaacatattctacgctctccagccttcggcgagcactttaaatctggaaattcaaataatcattcggataataagactgtcaaaataatgacatacaatgtatggttccgagaggaattggaactgattagaaggatgaatgctattggagatcttatccagcatcacagcccagatctcatatgcttccaggaggtcactccaaacatttacctgcttttcgagaaatcagactggtggcaagcatacaaatgctccttgccgcataagatggccatggaaagatcatactactgcatgcagatgagcaggttgccggtgaagtcgtttgaccgcaaaccattcttgaactcaaagatgggacgggagctgtgcgtagccgatgtgaccgttggaggttcgatcaagctggtgctggctacaagccacctggagagcccatgccccggaccctcgacgtgngaccagatgttcagcaaggaaagagtagctcaggcaagcgagtctttgaacactctgagagctttccgcaacgncatattgtgcggngacatgaactgggatg

SEQ ID NO: 105490 - DNA, 322 bp, Zea mays
  Clone ID: MRT4577_27709C.1
gtggctgtgctttcgcaaggaattttgtacggacaagagaaccgggttaaaataggcaccgggactgatggttggggcactgaaaacccctggctaagaggcaagctgcaggagccttcatgaacattacaagccgtgctagcccaatggatcagtgcgcagggagcccacacactaggaatgtggtgaacaaaggcaatgccctgcgaggctggcatgttgggaccaaacacacagcttgagccgacttccccgctgacatacccgagcaggcgaagttaacaaacttatatgctgaaaaccagacacataacacggtccg

SEQ ID NO: 105491 - DNA, 395 bp, Zea mays
  Clone ID: MRT4577_2770C.1
aaagggaagttttttaaaactacattgttgacggagagccggagattatttaccaaatttacttatttaaagaaacaggcttttaagtaatgacaccctgaagcttttctggaatgttcattatagaatttaaaaacaaaaagatgttacttaacttccctgagttttccaacccatcaataatcacgagtacaagtgctaaaccttccatttgtaaaatggatcaagcatctcctttgttactgtgagacccgtggccggagtagcgccaactccgacgttatactaagattactcctcccggtaaaccttttgctttttaagccttccaattgctcctttgcagatctaatgttcctgacatgtcccccccccccctaaaaagttgattgccc

SEQ ID NO: 105492 - DNA, 383 bp, Zea mays
  Clone ID: MRT4577_27710C.1
ccggccgggagtgctgtcatcgccgccgccgccccggtttccttcgtaagcccgtcgtcctccgtccgcgactctgcgcgagaagcgagaggtgatgggaaggaccggctccaggggtcaggttacccaggtcagagtgaagttcttggatgaccagaaccgtctcatcatgaggaacgtcaagggaccggttcgcgagggagacatcctcacactgctcgagtctgagagggaggctaggaggctgcgttgaggcggaatagtgtattggtagttttcgtatggagttggatgtcatctaattgtgctatgtttgtcaaactttggtatgaccttcaaaacacctgccttgtatgaaaaaaaaaaaaaaaaaatttgcggcc

SEQ ID NO: 105493 - DNA, 183 bp, Zea mays
  Clone ID: MRT4577_27711C.1
ttcgtccaaattctctttccgatcctcgtcatctttgccgtggccggcgagaccttcgacaccgtcagcttcatggagatgcgtgacaaaccctttgaggaggttgacaagttgatctcggtcttcgacgagtctggctggcgacatctccgctctcgccgctgggccttgcgcgacaggtag

SEQ ID NO: 105494 - DNA, 155 bp, Zea mays
  unsure (1)..(155): unsure at all n locations
  Clone ID: MRT4577_27712C.1
gcggttcccccttttatcctagctttggcaagctcggtnactgtctggataatctgttttccctgggggtagttgttttttccgtacccctccttcttnnnggggcggccgctcttgcgggtccctgcttcccttccctttcgtggggggggggg

SEQ ID NO: 105495 - DNA, 666 bp, Zea mays
  Clone ID: MRT4577_27713C.1
ctcgaggccggccgggcccgggcagtgctgtcatcgccgccgccgccgccccggtttccttcgtaagcccgccgtcctccgtccgcgactctgcgcgagaagcgagagtatggacacccaagtgaagcttgctgttgtggtgaaggtgatgggaaggaccggctccaggggtcaggttacccaggtcagagtgaagttcttggatgaccagaaccgtctcatcatgaggaacgtcaagggaccggttcgcgagggagacatcctcacactgctcgagtctgagagggaggctaggaggctgcgttgaggcgggatactgtcttggtagttttcgtatggagttggatgtcatctaattgtgctatgtttgtcaaactttggtatgacctttaaaacacctgccttgtatgattatttgtgagcctggtggtaagattgcagtttggtttttatgatccggttgagggtatgtttggcaacaatatttatcaaaatcatgtttttacaatactatactttgtaattgtcatgacaataccgtagttttggctagctctaaaaatacattggttttgagaaatattgtttggtattgtacaaaagctagcaatgcaatgaatcgggtctgattgggcaaaaaaaaaaaaaaaaaaggcccctagggcc

SEQ ID NO: 105496 - DNA, 632 bp, Zea mays
  Clone ID: MRT4577_27714C.1
gggcgattgggttcctcgaggccggccgggagtgctgtcatcgccgccgccaccccggtttccttcgtaagcccgtcgtcctccgtccgcgactctgcgcgagaagcgagagtatggacacccaagtgaagcttgctgttgtggtgaaggtgatgggaaggaccggctccaggggtcaggttacccaggtcagagtgaagttcttggatgaccagaaccgtctcatcatgaggaacgtcaagggaccggttcgcgagggagacatcctcacactgctcgagtccgagagggaggctaggaggctgcgttgaggcggaatggtgtcttgctagttttcgtatggagttggatgtcatctaattgtgctatgtttttcaaacattggaatgacctttaaaacacctgccttgtatgattatttgtgagcctggtgataagattgcagtttggtttttatgatccggttgagggtatgtttggcaacaatatttatcaaaatcatggttttacaatactataatgtgtaattgtcatggctctctaaaaataccttggttttgagaaatattgtttggtattgtacaaaagctagcaatgcaataaatctggtgtgattggttgggttgcggctg

SEQ ID NO: 105497 - DNA, 852 bp, Zea mays
  unsure (1)..(852): unsure at all n locations
  Clone ID: MRT4577_27716C.1
tctttcctttttgtgcgcttctttttattactcaaataaatctgtaatttagacaggctaacataaatatctcaagctttttgtgtgttcagagatttatttagagatgataaaataaagatcttgatgtatcgacggtttgtggtcttgggctgttctgttacagttcaagatactcaatttcctcctgctggtatcatcgtctccctgtaatgtgatgtagcacagtactatgcacttcagcactaagcccagaacctagctagcttacttaagggtcggctccggattttgtcgatcttgtttgtgtataatttgtgaggggctgtagagagtcaatcaaccagtcaattaatatgaacctgtttttctcaacggtcctctgaacatactcgctataagaacactaattacaagaatatgaggatgctaggtgtttaagatatttgaatttcccttcggagtggacctgggatagttctaacagagtatggactagaagcagaggaaacaaaaattaggcggtcgaattggttgtatctaccatgtacgtctggtgagcttttttcccatcggatgttactcacggtagtcacaggtaaccttgctttgaggatgtgagatgttataatggtgtcctttatggcacaagcccgaggcttagtcagggatgataatgaatggttcaagattttcgaagtagctattgtatgggttactccttttcagttacggcatctctttatgacaattttgttgcactatgaaattacaaggtattggcccagcaaggcagaatatatatcttcctcattttacnacacatatctttcctaatatanttttaaatac

SEQ ID NO: 105498 - DNA, 365 bp, Zea mays
  Clone ID: MRT4577_27717C.1
actggattggaaacttcattttccaagggattgcgatttttactaggaaaaaggaactgggcttcccaaactagcccatgatgcatttcccatcctgtgtatcgggccaaaaaaaaaaaaaaaaaaaaaaaaaaaaaaaaaaaaaaaaaaaaaaaaaaaaaaaaaaaaaaaaaaaaaaaaggaggaaaaaaaatacgccatgatcccccccgtgaacgaaaaaaaagaggctgagctgctacaaaagaacaagtatggtcctataggataggaacttatacaactttttaaggagcgccaaaaaaaaaaaaaacccgcgcgcttttataaaattcaacaaccggaaaaacccaggggtacacaaa

SEQ ID NO: 105499 - DNA, 219 bp, Zea mays
  Clone ID: MRT4577_27718C.1
gaaaacctttccccatccaaaaacactctacattttcatccaatcacccaatcaccgactcttttatcaagaaaccacccctataaatttacttacaacaccaccccccgaaacataattttccgcgtcaaacactactccacaaacttcttgccctcaaacaaaatccaaacattcaaaccttcgaccccaccctttaaactttgacccccctacccc

SEQ ID NO: 105500 - DNA, 258 bp, Zea mays
  Clone ID: MRT4577_27719C.1
ctttggctgatttagtgcttgaaaaaaaaaaaaaaacaaaaaaaaaaacccaaaccaaaaaaaaacacataagacataaggagaatgccttaacgggcgtgttcccacaggccttacgcccctgcatttccgtcacgtcatgacacaatctcgtcccagggctcttcaaacgtaaaaattcggttgcagcctaatactgctgcgatcgggaaaacttcggccccgttaaacccagctgctccgtagaatactttatcc

SEQ ID NO: 105501 - DNA, 1418 bp, Zea mays
  Clone ID: MRT4577_2771C.1
tttttttttttttttttttttttttttccccaaaaaagtacagcccatgttgtggatctatatacggacatgcacgcatgcatgattcaaattcaaagatgcatgcaagtatagtgatcacgagcaacacgctgcacaacacgatcggggaccattttgtagtcgatgtcgtcttgcccttcgttcgtcgagctccaggcggcccgcccccgccagcagcattcgattcaaaagatcgatccgtgctctcggttcagagcccgaataaagtcagccaccaactcgtgccggacaagctagatagaaaaaaaaaacattggaatcaataaagcttgccgccgcctcgacgacatctcgtgccgatcccaacagtcatgttccaattgctctcttggctgctgcttcctcttcttccctcttggtcttggcggcggcttctttttcccttcttcggcgaagaaaatggccaggcacccaggcgtcgactggtcgacgacggctctgttccaacaagtccgcgtcgtcggcgtccggccgggcgcgatatgcatctgcatgcagctgggcatggcgagcgcgctggagacgctgtgcgggcagtcgtacggggcgaagcagtaccacatgctgggcatctacctgcagcggtcgtggatcatcctgtcggcgtgcgccgtggtgcagctccccgtgtacctgttcacggagccgctgctggtggcgctggggcaggacccggacatctcggcggtggcggggaccgtggcgctctggtacatccccgtgctcttctccttcgtctgggccttcccgctgcagatgtacctgcaggcgcagatcaagaacatgatcatcacgtacctcgccatgctcaacctcggcctccacctcgccctgtcctggctcgccgccgtccacctccgcctcggcctcgccggcgtcatgggctccatggtcgtcgccatgtggatccccgtgttcggccagctcgccttcgtcttcttcggcggatgccctctcacctggaccggattctcgtccgccgccttcgccgacctcggcgccatcgtcaggctctcgctctcttctggtgtcatgctctgcttggaattgtggtacaacaccatactggtgctcctcacaggatacatgaagaatgcagagatcgcacttgacgccctttcgatatgccttaacatcaatggttgggagatgatgatctccatcggcttcctggctgcaacaggagtgcgagtggcgaacgagctgggagctgggagcgcgaggagggccaagttcgcgatctacaacgtggtcgtcacctccttcgccatcgggctcgtgctgttcgtgctcttcctcttcttccgcgggagcctcgcctacatattcaccgagagccaggcggtggccggagc

SEQ ID NO: 105502 - DNA, 340 bp, Zea mays
  Clone ID: MRT4577_27720C.1
aaaacccacggcaaaacagggctaattatttaattaatagggaccaaagggccctaaaaggatcttttatgacccagcccaaaaggaaaacaccaaactccccatttccagggggggaggctccataggatccccataccagaggggggggggcctacaaaaaaagataaaccccgggaaaccatcccccaaataaaaccataccccccttgaccaaacagggggggggggctggcggaatttaaaaccaggggctggggggatttaaaataagaacacagcccggccatccccatccagaatcatatcctggaaagccccccccctggggatcataggc

SEQ ID NO: 105503 - DNA, 294 bp, Zea mays
  Clone ID: MRT4577_27721C.1
ggggaaaaaaagccctgcgtcatgaacaggggtctttgggttcatttggtatcgatcggcctctcaatcaaacaattattctaaatgggggtccctcgtttggaccgaagcttggggtttcagcatttcctgctccagttcccccaaaaagattggggggggggtgaaaaaccttagcccaatcactggcccctttcgcttttccatcccaagctgcaactgctggcgtggtccatgctcgagacaatggcgttgccgtccaatggtgaatggtccaacccgcacgtgccagtt

SEQ ID NO: 105504 - DNA, 148 bp, Zea mays
  Clone ID: MRT4577_27722C.1
aggtacccctttctgtttggataacccggatcgacaagatagtatttacctgcacaaactcaaaatacaaatgtcacgtacatgtgacataaaatagtactgtattctacaaatgtacaaaatatttatataccttctggtggagggg

SEQ ID NO: 105505 - DNA, 374 bp, Zea mays
  Clone ID: MRT4577_27723C.1
ggaagtacacatcccaatcacccgtgtcaggattcactctcaggagctgggtggcaggaaagtcaatagcccctgtggcaattgcaggaccagctggagcagggttgcggtgtctccacggtgctctcgccctgcccatggccaccccagactctgatctccaggaaccccatagcccctctccacctcaccccatgttgatgcccaaggtcactcttgctacccgctgggcccccaaacccccactgcctctcttacttacccccatccatcacctggttttgactaatgctgcttccctctctgggcctggctgccaggatcttgtgtccctaagtccctctctttaaagaacttctgcgggtcagactctg

SEQ ID NO: 105506 - DNA, 507 bp, Zea mays
  Clone ID: MRT4577_27724C.1
cacatgctataaggaatgtagaaaaagaaagtctatcaaaagaacaatcaaaatggacatcattatgggaccaaaagattcctggaactcaagagtccgttatgagatctagtgaagacaagtcacagaagcatagtggtaatatgagagtcaccaagtgttcactgcaagaaaacaatggatcaggattttgttatcagaaaacaaatggatgataaaaaattggctgtacattaatgataaacatctggggctttctaaaggcttggttaaaccaggtgatgatggcttcttttgtcacaatgaagacagaattgaatatgactgtggagcagaatctttgtaaggaaactaataaagcttcaactgaccaagagttgtttcagaattcaaaggtgaggacatgtaataaaaagagtgccagcgaaaacagcaagaaaaatgatgtttctccaccggcagttcctggtcagcagaagttgatacaaaagtcaaaagcaccaaggg

SEQ ID NO: 105507 - DNA, 380 bp, Zea mays
  unsure (1)..(380): unsure at all n locations
  Clone ID: MRT4577_27725C.1
agtcaatcagattaagtgtgattcctttcctctggtctattgaactcaccctatgggatctgtgtcaaggaatcttacagaggtccatttcattctagttaaggaagccatggaacacatgcatgctgagtgccaggcccctgaaggacccatactatgcatcaataactgaggttccttggncagcgcggacaccatncacatgtgctccaagagcctcatggtgatgatatgcantcatgatcaggccacncncnctgtctctgctaacgacaggataccaaacggtatatgactccggactcaagcccgttgttgatggcagcaacccacatggatacgttgcccatgattagttgcaggcactgatccttctgaac

SEQ ID NO: 105508 - DNA, 972 bp, Zea mays
  Clone ID: MRT4577_27726C.1
actccttagggcgattggtacccacgcgtccggccgggaggcgaatgccgcatgatgcgtcgccgagccatgacgatgacaatagccgccgtgctctgcctgctcctcttctctggccgtctcgccgcggcggagaagactttccgcggaggcggaggcggaggctacggcgggttggaggccggtggcggaggcggcggcggcggctactccaccccgagcgaggcagcgccatccacgcctgccgctggggagacgacgaccccttcgtcaggcggcggttactccacccctagcgaggcagcgccatccacgcctgccgctgaggagacgacgacgactccttcgtcaggcggcgggggttacggcggtgcaaccggcaaggcttcctcaggcggcggcgggctggaccccgacggcgacccagaggttgggctgaacgggaaggcgatcgaggagatcgtgaacgagcacaacgtgttccgcgccaaggagcacgtgcctccgctggtgtggaacgcgacgctggccaggttctcgcagcagtacgcggagacgctcaagggcaactgccagcagatccactcgtcgtcgccgtacggggagaacctgatggagggcaccccggggctgacctggaagatcaccgtggacggctggagcgaggagaagaagaactaccactacaactcagacacctgcgaccccggcaagatgtgcggccactacaaggccgtcgtctggaagaccaccaccagcgtcggctgcggacgcatcaagtgcaacagcggcgacaccatcatcatgtgcagctactggccgccggggaactacgacggcgttaagccatactaaaatatatatcgacccattgcatatatatgttgcagagctttttattttggcaacatatctagtgcatatggactgctggtatacatcatgcacatattaaatcctatcctttaattt

SEQ ID NO: 105509 - DNA, 525 bp, Zea mays
  Clone ID: MRT4577_27727C.1
ggtatgtatagaatctttttctgtccaatagatttgcattccgtatgcatagaattctttttttcccgtccattcaccagctcctcttcagtgtccaccgaagagacgggcgcagtgtatatgtatcgcgcctgccgtgccagttttttcttttcctttctgtatctaacaccaatgatgcatgctttaaaccagcctttaatttgagccacagtgccaaccgatcttgcatgtagactcgtcgcgcatcatatcgtccgaagcaaccaagtttaagcaatggcccgccgcctgatcgttctttgctttgctgctcccattcccatcatctcctacccgcaggcgattttaaagcgtcagacagctcagcatccatgcatgcttgagatgcccaagcttggaagaaacgaaacccggcaggtccgttccgactcgacgaaaccctgtgcacgatgtcagtagtcaccacctgcccacagcatatacacttacctgtacactccgtctgctgtgcatctgcatttg

SEQ ID NO: 105510 - DNA, 281 bp, Zea mays
  Clone ID: MRT4577_27728C.1
cccacgcgtccggcgaaaaaccttctttttcaaacaaaacctcgataaaagcggagaccatctaacgagaccggcaggccttcttaacagaaccctcaaacccaacaaacttcggacctaacaatgtcatacaccccaaacacccccgcaacaccaacacctgaagccaaaacgaagagccgaaccccactagatacccacacaatacctaaaaccacggtaaacgtagcggctacatcattacccaccgaagctcccactcaacctacacccatcacaac

SEQ ID NO: 105511 - DNA, 541 bp, Zea mays
  Clone ID: MRT4577_27729C.1
aaagtaaatatcttttttagggccggtttttaccttttttttaactccaaaaaatccggcctcacaacacttgttgaaaggggaaattcattccttgagggccacaaccttgcaaaagttggaagtaatttccgagtagaggcccaacgtccaaggttttctttttttggagcccacaacggtcctttttgaaaccccggccgggtccacaaaaggggcttgtgttttcaggaaacctttgcccccagggatcttggcctcttttgttttgtggacccccttcctcacctggttggcaagctttatgaccaaatctttttcggggttaaggctggttaaggccttctcctttgaaaacaggtattcctttttttacccagtaggccctttggttgaagaattttgccttgccttatcctgcaaaggagcaggcccaaaatagtccttgttgccaattggatctggagggaaaacaaccattaaaacccctgtcacagttggtttcaaggaatctccttccttgaaaaaaaaagggatattt

SEQ ID NO: 105512 - DNA, 1252 bp, Zea mays
  Clone ID: MRT4577_2772C.1
agcatctggaatcaacaacatcacttagcatattccaagtttccaacaaatgtaacaaaacgaaccgcactgcggacccatgtcagctcctcattgcttattgtggcatccaacgcccgtgtgctactgccctactgctacctcctcttgattcctaagcagacagagacagagccccggcgacggcgagatggaagaggagcagagcagcggcggatggggcgaggaggcgacgaacaaggcgccgctgctggagccacgggcggcgtcggaccaccagcaccgcaacggaacatcagcaggagacggggctggcgccggcaaggcggaggcggagtggtcggcgctgccgctgcggcggcgcgtgtgggaggagaacaagaggctgtgggtggtggcggggccgtccatcttcacgcgcttctcctccttcggcgtcaccgtcatcagccaggccttcatcggccacatcggcgccacggagctggccgcctacgcgctcgtctccaccgtgctcatgaggttcagcaacggcatcctgctgggcatggcgagcgcgctggagacgctgtgcgggcagtcgtacggggcgaagcagtaccacatgctgggcatctacctgcagcggtcgtggatcatcctgtcggcgtgcgccgtggtgcagctccccgtgtacctgttcacggagccgctgctggtggcgctggggcaggacccggacatctcggcggtggcggggaccgtggcgctctggtacatccccgtgctcttctccttcgtctgggccttcccgctgcagatgtacctgcaggcgcagatcaagaacatgatcatcacgtacctcgccatgctcaacctcggcctccacctcgccctgtcctggctcgcggccgtccacctccgcctcggcctcgccggggtcatgggatccatggtcgtcgccatgtggatccccgtgttcggccagctcgccttcgtcttcttcggcggatgccctctcacctggaccggattctcgtccgccgccttcgccgacctcggcgccatcgtcaggctctcgctctcttctggtgtcatgctctgcttggaattgtggtacaacaccatactggtgctcctcacaggatacatgaagaatgcagagatcgcacttgacgccctttcgatatgccttaacatcaatggtttgggagatgatgatctccatcggcttcctggctgcaacaggagtgcgagtggcgaacgagctggg

SEQ ID NO: 105513 - DNA, 786 bp, Zea mays
  unsure (1)..(786): unsure at all n locations
  Clone ID: MRT4577_27730C.1
ggtacccccgggttcggccgggaatcttcttccgcggcagatttttcccaggcgccgcgggggatatttcctggaggccgcacccttcttcttcacagcgaccaagctgcatctccggcgctcctccagctcggtgcccagtcgctcagctcgcagcgttctctctgcccggccgtcgtcaagctccctgcgcgcgccccatctcgccgcgctcagctccagctcgccagccacggcatctcctagctccctgtgcgagcgcctgcttcctggccgcgtcctctgctccgtcgtccccagcgccggccaagtccctccatcgcggcgcccctgctcggttttctccatggcgccggatcccctgcaagctcgctcaagtcgccgcgctcggtgcttcctgcgcacgccggtcctagcttggccgaccgcgcaggcttcctactccctggccgccgcgccactcagctgcctgctctgctcgccgcgcgcgctcctctctgctgccgcatctccggcccagctcggactccagctcccacgttcgtcgccggtcttccctgcgcctggccttcagctcgcctaaggcggcttcctgtgccggccgtgcgttcacccagacccgcgccgtccctgttcctcgcctctgcacccagccgcgccctgcgcacttctctgtttggccatgtcgctcctccctgctagtcgcaagctgtcgagctcctatctnctgtgcgcgcctctgttcctggccgtgctcggatccagcccagctcgcccttgtgctgg

SEQ ID NO: 105514 - DNA, 1301 bp, Zea mays
  Clone ID: MRT4577_27731C.1
cactcgcacgtgcctccgtcttcgctccctcggtcccggggaaattgcagatctcaccttacttgccgcctccgtcttcgctccctccgcagcgtcagatcgaccgtcgctcgcggagccctagcgccgccgttctcagcccgagccggagtaccacgagagccttgcggatatgagtcgcgccgcggcagcaagaacgatggatgaggaagccgagtacctggagacggctcgggccgaccgctccgtgtggctcatgaagtgccccccggtcgtttcccgcgcctggcaggccgcctccgcctcttcctccgatgctgccaacgccaaccccgtcgttgccaaggtcgtcctttcccttgacctgttgcgccaagaagaacgcccggaagagcctacgctccagttcaagatggaattggctcaaactaacaccgggaatacacctaagagctactctttgaatatgttcaaagatttcgttcctatgtgtgttttctccgaatctaaccaagggaaactttcatgtgaaggaaaagtcgagcataaatttgacatggaacctcacagcgataatttggcgaactatggaaagttatgccgtgaaagaacacaaaaatacatggttaaatctagacaagtgcaggtacttgacaatgaccatggaatgagcatgaggccaatgcctggcattgttggtctcatatcttctagttcaaaggaaaagaagaagcaagcaccagcgaaaccatctgatgccaaaagaactcgtagggatcgcacggagatggaaaacgttatattcaagctttttgaaaggcagcccaattgggccctaaaggcactcgtgcaagaaactgaccagccagagcaatttctgaaggagatattgaacgatctgtgtgtgtataataaacgaggaccaaaccagggaacgcatgagctcaagcctgagtacaagaaatccacaggggacactgatactgcttgaagatgatagacgacttggtagaatcgatagttctctgttggtaactcaggccacacaaacacaattgtgatccagtttcatgtgtatgctttcagaggcgttcttttctgtaacaatataagctggatacacgttttttagggaaaggaaaaaagttttgaaacaattgcctgataaatgtgcttcatgggtataaaatatatatttagtcagttggaagtggagaaaaaaaaaaaaacctgaaaaaaaaaaaaaaaaaagcacgaattttaccgtgagttaaaaaaaaaaaaaaaaaactcgagggggg

SEQ ID NO: 105515 - DNA, 1336 bp, Zea mays
  Clone ID: MRT4577_27732C.1
cccacgcgtccggtcagtctcccctgacctgccccctccgaaccgtcctgcactggatccctctcccttatgccggaatatttgtaattttgtaagcgaagctcctggtgaagttgcctcctccgtcttcgctccctccgcagcgtcagatcggccgtcgctcgccgagccctagcgccgccgatctcagtccgtaccagtcttgcaaatcggggtcgcgccgcggcggcaagaacgatggccgaggaggccaagtatctggagacggcgcgggccgaccgctccgtgtggctcatgaagtgccccccggtcgtctcccgcgcctggcaggccgcctccgcctccgcctcttcctccgacgccgctaacgccaaccccgttgtcgccaaggtcgtcctttccctcgacctgctccgcccagaagaacgccccgaagagcgcccggaagagcccacgctccagttcaagatggaattggcacaaactaacactgggaatacacctaagagctactctttgaatatgttcaaagatttcgtgcctatgtgtgttttctccgaatctaaccaagggaaactttcatgcgaaggaaaagtcgagcataaatttgacatggaacctcacagtgataatttggcgaactatggaaagttatgtcgtgaaagaacacaaaaatatatggttaaatctagacaagtgcaggtacttgacaatgaccacggtatgagcatgagaccaatgcctgggcttggttggtctcataccttctggttcaaaggaaaagaagaaacaagcaccagcgaaaccatccgatgtcaaaagaactcgtagggatcgtacggagatggaaaacattatattcaagctttttgaaaggcaacccaattgggcactaaaggcgctggtgcaagaaactgaccagccagagcaatttctgaaggagatattgaacgatctctgtgtgtataataaacgaggaccaaaccagggaactcatgagcttaagccagagtacaagaaatccacaggggacactgatgctgcttaaagatgatagacgacttggttgtttatgtgcagaatcgctagttctctgtcggtaactcgggcacacaaacacaagcgtgatctagttttatttgtatgctttaagaggtgttatttgtaagctggatacacatttgtttagagaggaaaaggggaaagataattgaaacaaaatgtaagagtctaaattgttggaccaatgttctttatcgggtattaaatttagtcagttggaagtggagtgaataggtgaaacctgaaaaaaaaaaaaaaaaaaaacagaatttta

SEQ ID NO: 105516 - DNA, 699 bp, Zea mays
  Clone ID: MRT4577_27733C.1
cagataaaagacaatcaaaaactgcaaccaccggatcataaccatctagcaaactggccaaaagacagtaacatctggaagttccagacagctagcgttagctatacttgcaaaatgatcttcccgtgctcctacatctaatgatcacatagcacatggtaagtcacatcaccatattcctaagtctaaacggagaggttgcctctcatttacaaacaaaaaaaaagccaacaaggcaacggggcgggagtacgttctaaagacggacccagtgatgacgacttccacatgagtgaggttctagagaagaaataacagagtcagcctttatctctacatttttgcagaaaggttgtgttaaacccaagacctttggctcagtagaaggcttctcaccaccgcgccaggcctatccacagcagcagtatgttctatggttctatattcctatacgcagttcagcataacacgggttgggttgacttgttagtagtcgctgagctgccctagttcagtaagcgacacttgatatcactcagcgagtttactggtgctgcagcagctccttcatgtttcttgacagtagctgcgccagggtcgagctcagaattgttagtgtacccatgccactttgcaagatgatagagaatataccaccgccccaagtcctgtagctctgctcgagccgaattccgggct

SEQ ID NO: 105517 - DNA, 272 bp, Zea mays
  Clone ID: MRT4577_27734C.1
atactcctgacatcagaaaaagatgaaagaaaaaaatgtctctagtgactgctgagatcatagccaaagctgaggcgcatcactggagatgaactctgccaagagaagtcaaaggtgctgctaaaggagggagggctacctaatgggcttttgccattgaaggacattgaggaatgtggggatgagagggatagtgggtttgtgtggctgaagcagaagaagagcacataccacaagtttgagaagattgggaatgctggttcctatgctcc

SEQ ID NO: 105518 - DNA, 381 bp, Zea mays
  Clone ID: MRT4577_27735C.1
ttttttttttttttttttatttttctttcttgggggaaggttttacttttttttttaaaattttcccaccattccctcgcttttactatttttaacttattttctttcctcttttaccattacattatttgaataccccacccctcattcaaaaaaaacctattgtttgcgggaagacaagaactttcctcaaaaacgccaaaggggcccccccgcaaaacccccccactgggaaggtccccaaggctccccttccttatatgggggggaacccccccctctgggggcattttttggtactaaaaaaaacccccccccccccggcccccctcaaattttaaaagggggcatgggctttaaaaattttcaaccagccccatc

SEQ ID NO: 105519 - DNA, 102 bp, Zea mays
  Clone ID: MRT4577_27736C.1
atggcgctgccgcacttccgcctatcaccgtggctggatgtctcagctacttcaccgccggatttgggttctaggtctctgggcgtgctcctcgccgggtga

SEQ ID NO: 105520 - DNA, 517 bp, Zea mays
  Clone ID: MRT4577_27737C.1
ccccaaaagggatttggtttccttatacattggagtcaggacaagatttcccccccttcatccaaatttgtttttgatttgaaacggtttgagggaagtccccaacacataaaatccccctttactggggagctttatggaaaatttaaacccaagctttaaaaccatagggggatttaaaatggaaaggtttggcccctaaaaaaaaggggaaaggccttttattttaaaaaaaaaaaacccccggggaaaggggccttcatcccctttggggaggggcagcaaattttttttcttttgacccagttgggaatcacccccccctggcagcggggcagggaaagggaccccccctcccatgtttttaaagaaggtcccttgaaacaagacccggagggattaagggcttggccggttacctctaaatttttggggattgaaaagaatgggaggggtttgaaccccaaacaagcaaaactttttaattttttccaatcccacccaatttatgggtttg

SEQ ID NO: 105521 - DNA, 487 bp, Zea mays
  Clone ID: MRT4577_27738C.1
aaagttcagcgtaccctttttgtggacgcctcgtcagcttaatttctgcaaagcctttacattcacatgcagacgctttgctggtaagccaaacggaaccctgtcacacaatacacttttgctgtccagatgagggagtctgactgtggtaaagcacggtcaagctcaatgaactatgctattgaacccatctaacagacccgcatcctcaacctacctttggttgttatgaacgtacttgcccataacagatgacaacagactgacagcgccccactccctatgagggacaagacataactgcgctgccgtggttggccctttgtgtcagctatacccttcttattatcggtgaatgtttggggatcagcacctagcactgagacgaattgggcacaccatccaacacacagtgaggataaacagacacgaccggtgccgaccttgatcccgccctgatattcgggcggaacgctcctatccttcc

SEQ ID NO: 105522 - DNA, 150 bp, Zea mays
  Clone ID: MRT4577_27739C.1
gacgaggcatatgaattttacagcatgtatgcggggaaattgggttcagcgtgcgcagggctagcatgacggtgaataatgagaatgttataaccagaagaatgtttgtttgttcaaaagaaggattccgtgagaagaaaagtggagcat

SEQ ID NO: 105523 - DNA, 369 bp, Zea mays
  Clone ID: MRT4577_2773C.1
aaaaaaagaaagttttcgaaagattggatgggacacaaatatgtcttactacacacctcgaaacacatatctagtgtggtgcaggaccagagtacacatattatttaaacgacatcaggagctctatcggcccatccccaacctatttgtctgtaaagtgtgtgccacattaacactcgacaggggggccactaacccgacaccggatctggtacacagacacattatttatttgaccacaacacataaagacgctcctacccctccttactagggggggccccccgccccaccatgacaacacgtgaacccgaaacacaaaagcaggggtgtttctatcgacctatgccggcgccatgccgtgctttt

SEQ ID NO: 105524 - DNA, 496 bp, Zea mays
  Clone ID: MRT4577_27740C.1
gtacaagctttttttttttttttttttttttttttttttcttttttttttttttttttttttttttattttttttttttttttttttttttattttttttaaactgcccgggcggtcttttttaaaggggaattccaacccaccggggggcggttctaagggggcaaagcccggaaccagggggggggaaaaaaggggcaaaactgttgccccaaagaaaggggaaaccggggaaaaatccacaccccgggggaaaccggaagcccaaagagaaaacccccgggagcccaaggggggagcaaaatcaaaaaaactgggggggccaaaaggggcgcttaccaaaaaaaaaaccggggggcccaccggcctttataaaaggggaaaaacccggggggagggggttttaaaaaaaggcccccttcccgggaaagggcacttacttattgggcccttttcctctttttcgggaaagggaatcaggtcactcaaaggcggg

SEQ ID NO: 105525 - DNA, 178 bp, Zea mays
  Clone ID: MRT4577_27741C.1
agcaagcgaagcccaacaagaataccttatgccccacctcgccgccactgccccgacttcctccgacggggtcagccccaccaaaggccgcatcattttcccgcgcccatggaacacgccacatacggaagcactgagactgcgcctccttctgcgctctctgagcgtccggcgttag

SEQ ID NO: 105526 - DNA, 240 bp, Zea mays
  Clone ID: MRT4577_27742C.1
gggtggggggattctttatggtgttgttttttaaaaccgggacttaggcaaaacggcaagcaaaacatgggcttttttgggagggtttctggttacaagggcaattttgtaaacggatttccttttttttttaccgactcgtggatcggcccccatatttctatccggaaacttgatgggtaccccggttggataaccggaatcggtttaaaactttcaaaaaatatggaaaattttgtt

SEQ ID NO: 105527 - DNA, 623 bp, Zea mays
  unsure (1)..(623): unsure at all n locations
  Clone ID: MRT4577_27743C.1
cgtagtaggtttagccgtttagccaatgcagtaatacagcagcctcatatgtagagttaaaacacaggttttgaaatgtgagcactacaaatcgaancaaaactggaaacatgagcgagaatgacaactcagtccaaggatcttttcattgccaagtgtgtacaaattcctcaagcagaccgaccngctgcttatccagagcaacatcannnnnnnnnnnnnnnnnnnnnnnaggatctgagcctgctctacatgcgccatggccaaccagcaacatctaacatctgaaccaagaaactgaaccggttggtcatcaaacagcctctgattcgtttgttctttatctacattttgatgctaaagtagtcagaatcaaaatgatgcagccttacatatccatcttcaccaccacttgaaaagctccgcccatcaggattaaatgccaaagcattaattggcccaaaatgccctttaacaccaccaatttcctcttgcaaaatcttgcggtagaatttagcctcaaatttaccagcacggcgggcagccatagtcacattcattgcatcctgaccacctnctaaaaccacagtattatgagtgggagagatgtccacagcattaac

SEQ ID NO: 105528 - DNA, 1857 bp, Zea mays
  Clone ID: MRT4577_27744C.1
gccgggatcccgctgacttgcgacgaggccttggggtaccgctagggttttccatcaccgccgccgccgacgcatccaaacccaaatcaagccaccaccctctcctcctcctcagcggcgagcaccaccagcaacagcgagacacgatgaggccgatcttgatgaagggccacgagcgcccgctcacgttcctgcgctacaaccgcgacggggacctcctcttctcctgcgccaaggaccacacccccacggtctggtacgccgacaacggcgaccgcctcggcacctaccgcggccacaacggcgctgtctggacctgcgacgtctcccgcgactcggcgcgtctcatcaccggatccgccgaccagaccgccaagctctgggatgtcagcacggggaaggagctcttcagcttccgcttcgacgcgcccgccaggtccgtcgagttcgccatcggggacgcgctcgccgtcgtcaccaccgacaacttcatggaccacgtccccaccgtccaggtcaagcgcatcgccgaggacatcgacgaccagacggaggagtctgcactcgtcatcaccggcatcaagggaaggatcaacagggccgtttgggggccgctcaacaggaccatcatcactgccggagaggatgccaccgttcgcatttgggattcagagactggacaacttctgaaagagtctgacaaggaatccggacatcagaagaccatttcatcattgtcaaaatccctagattggtcacattttattactggctccttggataaatctgccaagctatgggatacaagaacgctgaccctgatcaagacatatgtcacagagagacctgttaatgctgttgacatctctcccactcatgatactgtggttctaggaggtggtcaggatgcaatgaatgtgactatgactgaccgccgtgctggtaaatttgaggctaaattctaccacaagattttgcaagaggaaattggtggtgttaaagggcattttgggccaattaatgctttggcatttaatcctgatgggcggagcttttcaagtggtggtgaagatggatatgtaaggctgcatcattttgattctgactactttagcatcaaaatgtagataaagaacagacgaatcagaggctgtttgattaccaaccggttcagtttcttggttcagatgttagatgttgctggttggccatggcgcatgtagagcaggctcagatcctaggtttttggtctgcttgtttgatgatgttgctctggataagcagctttttggtctgcttgaggaatttgtacacacttggcaatgaaaagatccttggactgagttgtcattctcgctcatgttctcagttttgttttgatttgtttctgcatgaggaatttgcgcacacatggcaatgaaaagatccttgaaccgctgtcttgagctgtcgttctcgctccatggtttccaatctagtttcgatttgtattctctgttcatctattgttccaatcggtagtagccatttcaaaacccgtgttttttggtgccccctttcaacacgaatagtgctcccatttcaaaacctgtgttttaactctacatatgaggctgctgtattactgaattggctaaacggctaaacctactacgttccccccttaaatgactgaacgatcaaggccgagaggttcgcccgcccttcatgtgggcttcagcctatttggataatcctgagagctctcaccggcctatgtaatatcttgttggtgcctaattttagttgggttttgcctgtgattgtagcccctagtgggtatattgaataagtgtaaataaatactcccttcctttt

SEQ ID NO: 105529 - DNA, 1592 bp, Zea mays
  Clone ID: MRT4577_27745C.1
agcgaccccaggtcagtcgggactacccgctgagtttaagcatataaataagcggaggagaagaaacttacgaggattcccctagcaacagcgagacacgatgaggccgatcttgatgaagggccacgagcgcccgctcacgttcctgcgctacaaccgcgacggggacctcctcttctcctgcgccaaggaccacacccccacggtctggtacgccgacaacggcgaccgcctcggcacctaccgcggccacaacggcgctgtctggacctgcgacgtctcccgcgactcggcgcgcctcatcaccggatccgccgaccagaccgccaagctctgggatgtcagcacggggaaggagctcttcagcttccgcttcgacgcgcccgccaggtccgtcgagttcgccatcggggacgcgctcgccgtcgtcaccaccgacaacttcatggaccacgtccccaccgtccaggtcaagcgcatcgccgaggacatcgacgaccagacggaggagtctgcactcgaacgcggtgggggaaggatcaacagggccgtttggggcccgctgaacaggaccattatcactgccggggaggatgccaccattcgcatctgggactcagagactggacagctgctgaatgagtctgataaagaatctggacatcagaagaccatttcatcgttgtcaaaatccttggactggtcacattttattactggctccttggataaatctgcaaagctatgggatacaagaacgctaaccctgatcaagacgtatgtcacagagagacctgttaatgctgttgacatctctcccactcatgataccgtggttctaggaggtggtcaggatgcaatgaatgtgactatgacagatcgccgtgctggtaaattcgaggctaaattctatcacaagattttgcaagaggaaattggtggtgttaaaggacattttgggccaattaatgctttggcatttaatcctgatgggcggagtttttcaagtggtggtgaagatggatatgtaaggctgcatcattttgattccgactacttcagcatcaagatgtagataaagaacaccagactaatccgaggctgtttgaggcccaactggtccagtttcttggttcaggtgctgcttcagttttttttttggttcaggtgctgctggttggccatgacgcacgcagagcaggctcagctcctctaggggtagtggcagtctgttgcttgttttaagacgatgttgctccggacaagcagctttgtcttctgcatgaggaatttgtgcacacatggcaatgaaaagatccttgaactgctgtcttgagctgtcgttctcgctccatggtttccaatctagttttgatttgtattctctgttcatctaattgttccaatacggtagtagacacatttcaaaacccgtgtttttttgttttttgtttgcttaaaaggcaaaatttacttaagtatccatgcatacacgtggccaatgcgtatgcttgtgtactaacaaaaggagcttatctttatatatatagacacgatgaatgtggtttcaacaaaaaaaaaaaccaaccccc

SEQ ID NO: 105530 - DNA, 365 bp, Zea mays
  Clone ID: MRT4577_27746C.1
ccaggccactggtgggaaggtgttattgggtccgaatttgggcccaattttgggggattcatggtcataactgtttttggggaaaaattggtattcgtttacaatttcaaaaaaaataataacccgtaaaaatataaagaaaaacccgggggggcaaaagaagggggaaacccaggtttatttagtgggggtcactgccccctttaaaggggggaaaccttttggcccattttcattaaaaaaacccccaacccccggggaaaggaggattgggtaatgggcccttttaaggttttttgataattgggcccttttcctctttctttcgaattgggcgagggggtttaggttatttaaagggggga

SEQ ID NO: 105531 - DNA, 424 bp, Zea mays
  unsure (1)..(424): unsure at all n locations
  Clone ID: MRT4577_27747C.1
actagttctagatcgcgagcgatctagaactagtaaagaacaccagactaatccgaggctgtttgaggcccaactggtccagtttcttggttcaggtgctgctggttggccatgacgcacgcagagcaggctcagctcctctggggggtagtggcagtctgttgcttgttttaagacgatgttgctccggacaagcagctttgtcttctgcacgaggaatttgtgcacacatggcaatgaaaagatccttgaactgctgtcttgagctgtcgttctcgctccatggtttccaatctagttttgatttgtattctctgttcatctaattgttccaatacggtagtagacacatttcaaaacccgtgtttttttgttttttgtttgcttaaaaggcaaaatttacttaagtctncatgcatacacg

SEQ ID NO: 105532 - DNA, 855 bp, Zea mays
  Clone ID: MRT4577_27748C.1
aggtgaactactccactgatgagcgaccgcatggatctttctccagataaatccttctcgtcaataaaaaatccagcatcagaaaggcatttaactgaaacttcatgaggaaatcgtccatggaaattatcacagtgcagtagcgcagctagagaaccagcagaacagcctgtaagcaaggcctgtttagcagcgtccattccttttcccatgagttcatctacaactgctttccagatacgtaatcctctgaagaaaagtttggttccatccagatctcccccctctgcatccccagcaaatgatgctccgtcgcagtaccttatgacaactgtattccagttgtagaaatcaggattttctgtgtgatcattgctgagtatcccagtgaagtttactgctcccatatacttagatgaaccgaagttggtcattttgcgctcggagcagctctgcgtggtgttgcaccaacctcctccctcaaggaagacgagccagttgtgagctccggaaccgaatcctctccgaaggtggtaaccaggcggggtcccatccaagcacaccgctcccttcccccgagcgccggcgaggagtgtcaggtcaacgagcctcgaagagctgaccggtgccgccaccggtgagcgggagaaggcgacagcggccaggaggagcgcgagcaggggcgcggccacgacgacggcgagagcgcgtcgacgctgcgggtgcgggatgagcggcgacagcagctcggtggccatggccgtcgcgcgcgggaggagctagtagctagaggaaaagtgtggaagccatgcgtgaagcccgaacccacctaccccggccctgccagttttcgag

SEQ ID NO: 105533 - DNA, 818 bp, Zea mays
  unsure (1)..(818): unsure at all n locations
  Clone ID: MRT4577_27749C.1
actctctacttggcttcctctcctccagccgcccccgccgccaccactccaaaccacaccgcaaaagagagagacgcaactccaagccgaggactccccgccaccgccgcagccaccaccccgccgccgccgcccgcccgccgaagcttggtccgagccgtacccgaggggacaggaagcgcggccaagatgccgacggtcacctgcaacgcctgcaacgcggcgttcgaggaggaggaggagcagcgcctccactaccgctccgagtggcaccgctacaacctcaagcgcaaggtggctggagttcctggagttaccgaggctctgtttattgctagacaaattgttttagcagagggaagcaactctaccgttgctcctccgatgtcttacagctgtgctctttgtggaaaaggctacaggagtgcaaaagctcatgcccaacatctcaccacgcgatcgcatctcttgagagcttctcaggagcccaatgcctccactgctgcagtagtcaagccacttcctgagcgagttccccgtagagccccctctgcaatggaagaagatgaagatgaagatgaggatgaggatgaggaggaagagtgggttgaagtggacccaagtgagctggagtctacctcaaacatgcaagttgatgaggactctaaatcagatgatgagatggctgatcttngaatgttggatccctcggtctgcttcatgtgtgatctcaagcatgacaacatagaggactgcatgatccatatgcacaaaaagcatgggttcttcatacctgacagtgaatacttgaaagatcc

SEQ ID NO: 105534 - DNA, 415 bp, Zea mays
  Clone ID: MRT4577_2774C.1
tttttatgcgataacttcattgattggaagcatgactatttcttgcagcagagatgtcctaaagattgatctcgggtataaagcttgagcatttaagacgtctgtccacccttctttccagcctcgacggggtcgaccttgccgtgagcgaactcgcccttggcactgccgccggatcctgaagagccagtggaggagtcggtgcttccggtgccggatgtagcaccaccctgctttccagcctcatgggggtcgaccttgccctgagcaaactcgccagtaccgacgcgcttgtctggggtgccgtcctgcttgaggcctccgtgctcagtgggcttgtactgctggtccgccatgttgatgatgtatgcatgattgaagtggggagtggttggttgaaattgtagttgttgat

SEQ ID NO: 105535 - DNA, 1267 bp, Zea mays
  Clone ID: MRT4577_27750C.1
cattgggtacctcgaggccggccggctggcggcgtctcgcctcgaccaggcggcggcgggcgccgagctgcagacgagcgcaagcgctcgaccagtcccgcgagccgccggcgcgtccctgttctctctgtcgccgtccctgtcgttcacggctctacctatacgctaatcttccagcaccgtcatcggtcctctaaatctgcgctgctctggtgtgctaattttaaggcactgcctttcacccctatatacttttcctggatccgccaccgcccgcccttccatcgttttgcccttccgtttcacttactggagcacactgcctcgaatgaggaggttatttctggcgtgctgccgctacctgcagctcacatctgtccctgatgctaccagagctacttcacctgtcaacaatgtctacgggccatggaggaggtatatcttcacaagcaccggtaaggttctaccatgggaggcgccatcccgtgaaactctgttgaggaagataaactgtgctatgaaggatgggaatgttgaagaggcgctgcaatctttgagcaattacaagaagcttcacggtcttcctgagccgcgggtactgaatagtataattgtgtcgctgtcctacatgtctagtaggaggtggcttcagagggcatttgacatggttctctcagtttatcaaattaatagaaatcttctcaattgtggctcactgatgaggctagcattggcgcttgcgagagatcagatgcctatcccggcctccacagtcctgaggataatactagagagtagaaagcttcctgatgttgatatgctgagcatgtcgtttctgcatatgttgaagtcacaggtaggctcctaccttgccactgatgttctgattgagacttgcgagagctttttggaccaagttacagataggcgggagatgaaaaaactggacccaataaaaagcaatgccaccttgttcaatatggttttggagtcatgtgtgacctttaaatgcattatcaaggcccagaaaataatggaactgatgtcattgatcggagttgtggccgatgtaaatacagtggtgatggctagccatgtctttgagatggttgggcaacgggatgagttgatacaaatgaaaagaagcatcgattcttttacatctttgacatttcttcagtactacctgcatttttatgacagtctattgagcctccatttcaaatataatgacatggatgctgctgcaaagtttttaatcgatctg

SEQ ID NO: 105536 - DNA, 1064 bp, Zea mays
  Clone ID: MRT4577_27751C.1
tgggacctcgagccggcggccggaccgggtaaaggcctacctgcaataacatacgtactgcgaagtaaccctaacgcctggtgccagccgccgcgctctcgctcgctctaacgccgacgcctggtgccgactgccgaggccttcgctggttactagcaccgccccagctccttctcccttttccggcggaggtgaacaccgccaccactagagcgccacgatgaggccgatcctgatgaagggccacgagcgcccgctgacgttcctgcgctacaaccgcgacggggacctcctgttctcctgcgccaaggaccacacccccacggtctggtacgccgacaacggcgatcgcctcggcacctaccgcggccacaacggcgccgtctggacctgcgacgtctcccacgactcggcgcgcctcattaccggatccgccgaccagaccgccaagctatgggaggtcagcacggggaaggagctcttcagctttcgtttcgacgcgcccgccaggtccgtcgagttcgccatcggggacgcgctcgccgtcgtcaccaccgacaacttcatggaccacgttcccaccgttcaggtcaagcgcatcgccgaggacatcaacgacggagacggaggagtctgcactcgtcatcaccggcatcaagggaaggatcaacagggccgtttggagcccgctaaacaggaccattatcactggccggggaggatgccaccattcccatatgggactcagagactggacagctgctgaatgagtctgataaagaatctggacatcagaagaccatttcatcgttgtcaaaatccttggactggtcgcattttatcactggctccttggataatctgcaagctatgggatacagaacgctaaccctgatccgttaggatatcatgctgttagaataactctagttctccaatcatgtgttttggttgtgggacagcaggagacagacacattccgtcgtccccaatcgtccgtccaattttgacatatagctaggacaacactgagatgtgatgatcttatctcaatcctgactcta

SEQ ID NO: 105537 - DNA, 868 bp, Zea mays
  Clone ID: MRT4577_27752C.1
cggacgcgtgggttggcaggtggcttgtgggctggtcaaggcctattggtgtgcgagtgagcccaggcccagggtttcgctgtcaccgcacacctcagcgagtctggtgccggcggctgtgacgaggacagcagcaatgcaatggcgagaggaactggaggacgggtaagcgagggcacgtgaagccgttggacgcagggtggaggctatacataacagcttgatacaattggaagagagcattcggtcacctcaaggaagacgagccagttgtgagctccggaaccgaatcctctccgaaggtggtaaccaggcggggtcccatccaagcacactgcaacgcgatgaagcaggccacggcgatcagtatccggctccagacgtgccgccgatcggaaagaaaaaggaggctacggttagtttgaccgaatacccgctcccttcccccgagcgccggcgaggagtgtcaagtcaacgagcctcgatgagctggccggtgccgccaccggtgagcgggagaaggcgacagcggccaggaggagcgcgtgcaggggcgcggccacgacgacggcgagagcgcgtcgacgctgctggtgcgggatgagcggcgacagtagctcggtggccatgaccgtcgcgcgcgggaggagctagtagctagaggaaaagtgtggaagccatgcttgaaagcccgaacccacctactaccatgccatgccatgccagtttgcgagaagtatcaggctggaagaggtcaaactgatgcgcagtttctccagaaaaaaaaaacagatggttgagtggttccaaactactatatgcagtatagaaatcgttggtgtgccaatcgagagtgacgaattacgac

SEQ ID NO: 105538 - DNA, 623 bp, Zea mays
  Clone ID: MRT4577_27753C.1
gcagttcaaggatcttttcattgccatgtgtgcacaaattcctcatgcagaagacaaagctgcttgtccggggcaacatcgccttaaaacaggcaacagactgccactacccctaaaggagctgagcctgctctgcgtgcgtcatggccaaccagcagcagccagcacctgaaccaaaaaaacctgaagcagcacctgaaccaagaaactggaccagttgggcctcaaacagcaaatagctggcagctgaagtatcgcctcggattagtctggtgttctttatctacatcttgatgctgaagtagtcggaatcaaaatgatgcagccttacatatccatcttcaccgccacttgaaaaactccgcccatcaggattaaatgccaaagcattaattggcccaaaatgtcctttaacaccaccaatttcctcttgcaaaatcttgtgatagaatttagcctcgaatttaccagcacgggggatctggcatagtcacattcattgcatcctgaccacctcctaaaaccacggtatcatgagtgggagagatgtcaacagcattaacaggtctctctgtgacatatgtcttgatcagggttagcgttcttgtatcccatagctttgc

SEQ ID NO: 105539 - DNA, 269 bp, Zea mays
  Clone ID: MRT4577_27754C.1
aattaatttttttttttttttttttttttttgggttttttttttttttttttggggttttcccgcgaacaaaaaccttgctcaatctccccccgtctcgtttcatagcgggggcaaccaaagggaaccaccggggccccaacccctaatccaaagggataacgggcccttacacggggcccaaacccaacggtaaccccattcttcaaataggttaaaaaaccaccccctagccaggaagggcccccccataaattcctaaatccctca

SEQ ID NO: 105540 - DNA, 347 bp, Zea mays
  Clone ID: MRT4577_27755C.1
cgggcacaagctataaaaaaaataaatattcaaaccaattatttttttttttataaacaaacacataagcttaattaaatcaaaggagacaagcaatcctttacttgctgcgcaaaatgggcccatttttccgcctcaacacctgacctaaaaacatgtccaggagtccaagaccacgggaccaccttttaagaatcaccccttgcaccaaattcccaccccttgtatccttgcccgctagtcccggaaaaactggggccacaaggctagaaaggattggccaaccttttaataggagttaatacaaccttgagatgccgcttggggcaacgcccatgtttcgggga

SEQ ID NO: 105541 - DNA, 927 bp, Zea mays
  Clone ID: MRT4577_27756C.1
gagtgtggtccttgtcgtttcccgtcccgtcccgagagcgagagggcggcactggtgacgtcattcacctctcggtcgcgtgtgcttcacgcagcggctcagtcctcacaccgcacaccaggcatctgattctgatcgcaccgccgtcggcccaccgcttcagttggcagttgcgacttgcgagtggctccaacaaggcaacacaatccaccggcaccaacccagcgcggcgccaccggcgacccgtacccccttccccggagagcgatggcgacggagctgacggcggcgcagctgcgcgcgtacgacggcaccgacccgtccaagcccatctacgtctccgtccggggcaaggtctacgacgtcacctccggccgcggcttctacggccccggcggcgcctacgccgtcttcgcgggccgcgaggccagccgcgccctcggcaagatgtccaaggacgaggccgacgtctccggggacctctccgggctcaccgacaaggagctcggcgtcctcgccgactgggagaccaagttccaggccaagtaccccgtcgtcgcccgactcgccgccgacgcctgaactcggcagtctcggtgtaaatttactctgtcctgcctcttgcggtgttcagtgttgtgcttgcttgcttgttgctagttgctttgctacccaataatctgaatggaaggacgtatgtgatgtgcctgctgaatagctcgagctcctagtccttgcatacactgctgtgctaccacatgacatgatgtactcgtgtgtgctttggttgttgtgtaattccatgaccatgatcagtaatctgaataaaaaatattggagatgtgcttgcttcctacataatgggaataaactctaccatattcttaatgagaaaaaaaaaaaaaaaaaagcggccctcgagctcca

SEQ ID NO: 105542 - DNA, 236 bp, Zea mays
  Clone ID: MRT4577_27757C.1
cgatatcctaaagtgttttgttttcttatcatcaccatgtctttactttcaggccgcatcaaactcaatctctcagaacccacataaaagatcattgctgagtacatatgggttggtggatctggtatggacctcagaagcaaagccaggactctacctgggccattgagtgaccctgcaaaactttcgaagtggaactatgatgggtctagctatttatcaagctctaatggatg

SEQ ID NO: 105543 - DNA, 298 bp, Zea mays
  Clone ID: MRT4577_27758C.1
caagctagcaccaagtagtagttgctggctctccaacagcagcagcagcaggcagtagaagctgcagagacaagatagatcgaggaagaaggccgcatttcgagctagcttagctatagagagcgggcgcagctagcaatggcgaacagcagcaggaggtgtcttcgtgttcatgaactttgaccccgtgtacgagcgcctcagagctgagcggtcgtccaaggaggggtcggccacgctggacgcgtacctgagccacaagcacgacaagctgctcgccaagctgctccagcctgac

SEQ ID NO: 105544 - DNA, 1675 bp, Zea mays
  Clone ID: MRT4577_27759C.1
cctcgagggccgtgccggaaaaaaaaaaaaaaaaaaaaaaaaaaaaaaaaaaaaaaaaaaaaaaaaaaaaaaaaaaaaaaaaaaaaaaaaaggaattgggccttcggccggcggggagtgggcctccgggctggcctggcccgtcccgtcccgtcccccgagagcgagagggcggcactggtgacgtcattcacctctcggtcgcgtgcgcttcacgcagcggctcagtcagtcctcacaccacgcatctgattctgatcgcaccgccgtcggcccaccgcttcagttggcagttgcgagtggctccaacaatccaccggcaccaacccagcgcggcgccaccggcgacccgtaccccctcccccggagagcgatggcgacggagctgacggcggcgcagctgcgcgcgtacgacggcaccgacccgtccaagcccatctacgtctccgtccggggcaaggtctacgacgtcacctccggccgcggcttctacggccccggcggcgcctacgccgtcttcgcgggccgcgaggccagccgcgccctcggcaagatgtccaaggacgaggccgacgtctccggggacctctccgggctcaccgacaaggagctcggcgtcctcgccgactgggagatcaagttccaggccaagtaccccgtcgtcgcccgactcgccgccgacgcctgaactcgtcagtctcggtctaaatttactctgtcctgcctcttgcggtgttcagtgctgtgcttgcttgcttgttgctagttgctttgctacccaataatctgaatggaaggacgtatgtgatgtgcctgctgaatagttcctagtccttgcatacactgctgtgctaccacatgacatgatgtactcgtgtgtgtgctttggttgttgtgtaattccatgaccatgatcagtaatctgaataaaaaatattggagaaaaaaaaaaaaaaaaaagccggcagggtagaagggggcagttgcgagtggctccaacaatccaccggcaccaacccagcgcggcgccaccggcgacccgtaccccctcccccggagagcgatggcgacggagctgacggcggcgcagctgcgcgcgtacgacggcaccgacccgtccaagcccatctacgtctccgtccggggcaaggtctacgacgtcacctccggccgcggcttctacggccccggcggcgcctacgccgtcttcgcgggccgcgaggccagccgcgccctcggcaagatgtccaaggacgaggccgacgtctccggggacctctccgggctcaccgacaaggagctcggcgtcctcgccgactgggagatcaagttccaggccaagtaccccgtcgtcgcccgactcgccgccgacgcctgaactcgtcagtctcggtctaaatttactctgtcctgcctcttgcggtgttcagtgctgtgcttgcttgcttgttgctagttgctttgctacccaataatctgaatggaaggacgtatgtgatgtgcctgctgaatagttcctagtccttgcatacactgctgtgctaccacatgacatgatgtactcgtgtgtgtgctttggttgttgtgtaattccatgaccatgatcagtaatctgaataaaaaatattggagatgtgcttgcttcccgaaaaaaaaaaaaaaaaaagcggccgcc

SEQ ID NO: 105545 - DNA, 255 bp, Zea mays
  Clone ID: MRT4577_2775C.1
cccacgcgtccgagtatttttaatcttggatggatacccattccggggggggtggctagtttgtgggaccggaataaccaagggcatttgaactctctaaatttagcctgcattagctgcgcacttcaggtccacgaaaagccaaaccgttaatcagtaagacactctatgtgacttccaacgataaaaacaaacttactgaacatagtggaaaaaaaaaaaataaaggctgaccttctaaaagattccatctta

SEQ ID NO: 105546 - DNA, 289 bp, Zea mays
  Clone ID: MRT4577_27760C.1
gaagatgatcagctagagcatgatgataagactcatttgaaagttgtgggtcagctgaccaggtagaagattcaagactcaatgtggaaaaaatattttaaactactgattgaatgataatggtcaatgctagcacaatattcctatgctgcaatacattaaaataactaagcaagtatattgatctctatcggacagatgtttgtgtttcgagatacttcgttttcattaatggtcttaaaaaggcattatcctttgatctcacgaatacgtagtatcttgcagtatt

SEQ ID NO: 105547 - DNA, 2542 bp, Zea mays
  Clone ID: MRT4577_27761C.1
tgggaccctcgaggccggccgggaaaggaggctttcccgcggggccgaaacagcacttctcctgcaatcgccgacgtcgccggaggcttcgccggccggagcagcgccgacggttgttttgcccctccctcgtccggcccagcagcccaggcgagcatgccttcgatgcgccaccgtcttcctccgtcgctgccctcacccgccaaccggtgcaattcttcaaagggtgcagtgtatccaaggagacaaagggaccggtccgcagtttcttcactgcaaattcaaagagcaccaaggtgaaatcagcgggcttgaaagtagcatcatccttcaaaaatgatggtggttatccagctggcggtgtctcttggaaggacgacactctattgccaaaaagcacaaccattcgtggccaggaccatccggttgctgaccctgtactcccaatggattccatgattacgccagaaatcctctctgctaatgtggaacgtgttatagacatgtttgcagatgatgacactgatactgaacttgatttggatagcccgacagaccgaggattccatgttgctgaccctgtactcccaatggattccatgttgtttcttgtcatgaatatctacattgctctttcattactcttctgttcagatgatcttatcgcaacaatagctttcttttgaattgaattctaaagtgagctacgtttctgtcctttttatgtttagacttactaagttaactatgcttataaatgtctatgtcaatgatttagggaactatttatccaacttaccttaatttatgaattggtccctatgaaacttctccgatgtttttttgtctgctactgacctatatctatatattttttgcttttcaggatgcaaaagagggcacaactactggggtatctgccaaggacagggcaaaaacggtcatgactcttgcatctcctgactctaagcctgaggacctcaaccgccctggtcatattttccctttgaaatacagagaagggggtgttctgaaacgagctggacacaccgaggcatctgttgaccttgccatgttggctggattacctcctgttgctgtcctttgtgaaattgtggatgatgcagatggttctatggctcgcctaccaaagttacgtgtctttgctgaaaaggagaacttaaagattatatctattgctgacttgattaggtgacttgaattcgcaaagcttcagcttctggtacctgacatgttgctactaagacagtagtcagcatctagctagcatttcaattaccattgaacagttttctcttcgattatttcataattatgctgaaacagtgtttgctggtaaaaagaaagaaaaaagaagctgaaagtgttttcaggcagatgcctacatttttctctctatcctagttgtaacatatgattgaaagtgatgtacttaatatggttgcaagaatcatattaatacctatggctggttatgtacacgcctcttcggtgttcttatgtgctgttgctggtgatccttgagatattgattgccatgctagcaaattttatctgttgcaggtataggaggaaaagagacaggctaattgaacgcgcttctgttgcacgcttgcctttgaaatggggcaatgtccatgcctattgctacaaatctgttattgatggcattgagcatattgccatggtgaaaggtgatattggtgacggccaagacattttggtgagggtgcactctgagtgcctcacaggcgacatttttggatccgcaagatgtgattgtggcgaccagcttgcgatggcaatggagatgattgagaagactaatacaccccttccagccttctccgtggacatgaaggaaggggtattggtctgggccacaagcttcgtgcttataacttacaggatgatgggcgtgatactgtggaagctaacgaggaacttggtcttcctgtggactcacgggaatatgggattggcgcacagatattgcgggatctaggagtccgttcaatgaagctgatgactaataaccctgcgaaatatagtggtctcaagggctatggattgagcattgcgggcagggtgcccttgattacgccaattaccagtgagaaccgtaggtacctggagactaaaagaacaaagatgggacatgtatatgggttggccaatgcgcaggccaaccaagcaaatggcagccagagcacagaagagaatcattaggcccccaagcatgtttccattattattccagcaatccagcttggtgtggtggcacaaaagagtgatatgattcttcgtttggggagttcctgaaatcttctcccccgatatttccgtagattctttcgcaaaaaagccgatatttcggtagatcgatttgttcttcaattgtaactgtaggtttcaaggtggctaatgaacggtaggtttcaagatggcccgtaatgatatacacggagtttgtcgtcaaaaaaaaaaaaaaaaaaaaaaaaaaaaaaaaaaaaaaaaaaaa

SEQ ID NO: 105548 - DNA, 264 bp, Zea mays
  Clone ID: MRT4577_27762C.1
agttgacaagcattgccagccaggttcatgagagcacgacgagaaccagtatcgactctctttctccgtcagcacttaattttgagccattccgaaaggacatagatgactttaacaacaggattgctgcctggggagactattggcatgctgccttcgatacgtttcccaacccagagcctttccaaacacctctggtctgtctcttgagagattacatccgtctgtactccaactcggtatttctacatcgaatgatcgtct

SEQ ID NO: 105549 - DNA, 633 bp, Zea mays
  Clone ID: MRT4577_27763C.1
ggaggcagaatcaacaggggggggcccataatttgaatacataacccatttttacaaaccaccattagtacaaattaaaaaaactagcgagatgaaaaaagtttaaataaataaacaaaaaaaaaaaagggcaggggaacccggccattgacattttcaaacaaaaatggaaatggaaaaaggcccccttgcccggcctgggtcatggatttttaattttaaactagtttggcgcccgcccgtccgtccttaaaaacaacgcacggtttcattttcacaacaggcacccaaggacggggggaaggccggaaaatttccacccaacggccttggccccgggggcccccgttggcgcggggtcttcggacccggcccacccggagggagcgtccaaggaccccccttttttgggcttcccctggaacccggggggcccggggggggcccccttgcccccaaacagttccaggggcaggacccccttgtcaacggattaaacggggaggggcttgacggccctaaccgctttgttgatggtgacctcggcaacccccgaggaaactttaacctgtttgttggcgggggcggtaatgttaagcgtgtagggcccgtcgcggccggaggcctgggtgc

SEQ ID NO: 105550 - DNA, 516 bp, Zea mays
  Clone ID: MRT4577_27764C.1
gccgtcatctgtcctgaaatgaccaagcaatatgcgcgtgtgtgatcgccaaaccaaaggctttcaatagcccgtattcccacacgactgtgatattcggagaggctgagatcgtggaccaaacctcccagttgctgaccaagactgaagacctgatcacggcttctgacttgatccagatgatctttagttgcagagacagctgttcccgggacaggacgacaatgttaaggaggtcgactaaactagagttgaggccaaggacattgagctggtaatgacccagtcatactttttaacgcccaaagctgtctaggcactgaaggatagtaatggggaccatgttactgacatcataggtctgccaacctaaagcgatatgaatgtacgtgccactgctgtaacaaagtgctactgcaacttgagtgccatatgggtacctatgcttggatgatgttacatgattgtgttgttggtgtcaaggtaattcaaacaacgtgtcattgtagatggctt

SEQ ID NO: 105551 - DNA, 420 bp, Zea mays
  unsure (1)..(420): unsure at all n locations
  Clone ID: MRT4577_27765C.1
gtgcggcgctcaggcggcgggctcggcttgaataatgtggaggacgttgctgggactttcaagtatcagaagcccctgctagagcctgcagccagagcccagaaggacgatggctgttccaaggggggattgaatgtctttggaaaggcaatgaagtgattcagttcgttgtaaatctattatattatgttgccccagactaaaccagcttgtgtggtttaggccatgttcgtttctgccggattggtgggtcggaataattcctgaccggattgcttctctaatttatataaattttgattagctggaccaaaaaaaaaaaaaaaaaaaaaaaaaaaaaaaaaaaaaaaaaaaaaaaaaaaaaaaaaaaaaaaaaaaaaaaaaaaaaannggaaaaaaaaaaaaaaaaaaaggccccta

SEQ ID NO: 105552 - DNA, 281 bp, Zea mays
  Clone ID: MRT4577_27766C.1
attctttgtagtgaagaatcatgctcatctgctgcagatcagataaagaacgagaatgatgagtttctgtaagatcgaacaagctggatatactccaaacatggaggcacatctcaacgggacggcactatttaacaacccagaaagttttttttattgaaaggtaaccggaaaagtttgctaaaactgaaagatacctgagaaccctgttcttgaaaatgaagttcacatgcattagccggttcaagctcagactgttattggtacgagcatttctttcg

SEQ ID NO: 105553 - DNA, 584 bp, Zea mays
  Clone ID: MRT4577_27767C.1
ctgtgcggcgctcgagccggcggtccgggaatagatagagagatagaccatctcttcctctgttcgacggcaccgcccacagcgactgcctacctcactgtgtgcgtctgcatgtctgaaagcccgatagatgctcttgcccgaccgatacaccgcgcggaccctaagtccaatgactgcctcgccgtacctcaccccaacaacgctatctaccacgctgtgatacacaggaaagacgtggataaacacccctagtgtcactcctgtttgctcctgcaaatatagagagcctccatggtacatcttaatgactgcccgcattttctggaccttccacatgaccacaactcttacaatatatgtcttccaccctacgacgacgcgccctgcctctctggaccccctgtccacgagatgcttgcctgaaccgatccatgatatgctccacacagataatgagtaatgtactctggaagcctaaccgcacctaagctagggtggacatagatcaacgcctcctgtccatgcaatacaaggacaacataggtgcccttggcgccgaagctctgcaaacacgctaccct

SEQ ID NO: 105554 - DNA, 539 bp, Zea mays
  Clone ID: MRT4577_27768C.1
cacactagactaacgaactgtaggattacaactcgagctgggtcctgctcccgatggcccgccgtcctggacagcacgaagacgctcgacgcctccgtggtcgtgctggatgcgatggtgctcttgtctaagtccggtgcgggggcgaacacctaggtccagtgctccatctgcctgtggcagtacatgcagggcgagatgctgagggtgatgccacaccgcacgcacaggtgccacctcacgtacatccacaccaggctgcgtcggaccacgtcgggcccccagtggcggtggcgctgcatcaaaaccctcgtcaacacgccgatcagtaccaaactgtgcacccttgtcaccatgcccgagaatggcggcgactccggccgatacacgttagggtgatcaatgactgatgcaaaatcaaattgtttacgctagaactaccttatactagctacaaaaacgttcacttgacaccccgacatctttgcgaaccaataagaaacacatgcaaaagtacatacatatgtagcttgtgttgc

SEQ ID NO: 105555 - DNA, 386 bp, Zea mays
  Clone ID: MRT4577_27769C.1
ttatatttttccttttttttttttcttttttggctggggttatttaaatgtgggtgggggtccttcaaagggacaacaaacattttattccttactcaaagccctgggtggttaccccccaaaattaaggggaaaattacaacgggggggtctcccttggtctccgggggagggcgaatagggcacaattttttacttaggcttggggaagacttttttgggcccccagctttttgttttatggggcaatctcaaacggggaaatggtcaaaaaattcttttccttttacttaattggggcacaaaccaaaacccttttgtttgtaaaagggcccgggtccaacccctcccccttgatgatcccaaaacctcctaaattgtttttt

SEQ ID NO: 105556 - DNA, 396 bp, Zea mays
  Clone ID: MRT4577_2776C.1
gacccacgcgtccgcccacgcgtccgatctagtttcgcttcactttgccgccgcattttaatttataccgaaagtatctaccttcacctcacaaatatgtgtgtctaccactttctgggtctggagatagtatggtacacacacttctatttgacatggtgttagagtgttaaagcaaccataagagacataagagactagacaaatcattttgtaaaggtaaatttggttattatcagaaaaaaacatctccaaccgactttgtaatagctcttcaaatttagtagctctctatctcttcaccttcacctttactttctaatctacttcacttgctgctattcagtttgttggtttacagagtctcggttagattagtctactttttttttttga

SEQ ID NO: 105557 - DNA, 1054 bp, Zea mays
  Clone ID: MRT4577_27771C.1
cattgggaccctcgaggccggccgggactttccttttccccccaagaagatgggcgagacgagggccaaggagggggtgtcgcttagactagcgaatccatccgccaagattccgtgcacctcgaccgccgccgccgctatctgtttgtccccgcccccgcgaccgcggcagcctagcaggaggggaggatccatgtctagtttctagagcagctgcttgcgtcccttgcaaatcacatcgaccgatggggatacccagcgacgacgtggtgcaaatccgccacgccgacgccgctggcgagcccaccgtcgtcaccgtcagctgccccgacaagacgggcctcggctgcgacctctgccgggtcgtcctcctcttccgcctcagcgtcgtcaagggagacatgagcacggacgggcggtggtgctacatcgtgctctgggttctgccacgcggggggcggccggtgcccgtgccatgggacctactcaaggacaggttgcttcagctctgccccgtcgcgccgccgttcggattcgacaacgcgtacctcgcagcggctggcctacaggaccttgcgcctcccccaccaaagctcttcttgctcaagctatgctgcttcgaccggatgggactcttgcatgatgtgacacgtgttctgtgcgagctagagctcacgattcggagggtgaaggtctctaccacgcctgatgggagtgtgctggaccttttcttcatcacagatgccagggagcttctgcacacaaagagcagaagagaagaaacccaggacaaactggaggctgtcttaggcgactccttgacatgctgtgaaatagatcctgctggtgaagacatgttgtcttgcctccaatcctgggcctcgctgacgcctgctatcacggaacagatgtttaacacagaggagcaaccgatcagcacaaggggtggcaccatctccgtgacgatggacaactcacttagctctgtcccactcttattcggatttcagtgcggtgacataagggcctcctctatgatatcatgaggacagtc

SEQ ID NO: 105558 - DNA, 1152 bp, Zea mays
  Clone ID: MRT4577_27772C.1
attgggtacctcgaggccggccgggcatgtcacatgtcgttcaagaggaggttctcgcagagatctccgatcggctctgcaacagccagtgcacccagtccactggtgaaggctgcttccactgctccatcaccactgagcagaaactccctctttggctgtgttgattctggcagcacttgtggtgatgaaaaatcatcaagtgccaaagaagacttctgcaagtccggtgtttcagaaaacacccctgcaaagtttgcctccacaccagcgaggctaatggcgcctacgccaggcctcaagacgccaaagagaccaatctctgccacaggttatgataccccgcctctgagaacggcgaagagatcagctcgcgcgaagctgtttaccactccaacaaagaataacagtacgggtggagagagccaaagcgcaagcgtatctggcgctagcgccgacgacgacttgctcagcttccttccacagtccctccttcagtcggtgaaggagaaggaagacagggctttggtagagaaagaatccggtttcgccgatcaggtcagaaggcagaagctgatcgcctccctgcccagcaccttcgacgtcgtgttcctcatctaccagtcgaggcagcggtcagtgatgacaaagcaggagctagtccacaagatcatcgcgagcagtcctaagatagctgacagaagtgaagttgaggggcatctgacgctgttgaaggagctcgttccagactggttctccgagaaaaccgcacgcagcggggatgctctgtgctgcgtcgatgccactttgagccagtcggagattcggcagagactgtacgctgctgctgctgctgctgagtaggaccggatgcgaagaggacgagcagcggaaaagagcactcagccaagggccgtcagtttctagtgttgttgtgatagaagccttagcttagatgaaaatggatgacttatgtatagtgaagccattctgacaactgatggttcctcactctgaaacacccactgaaattaagacgagtccatttgtctactgaatgatgactggctggcctctttgtaaacccctctcctgcctgaagtagcaataaagtgacaaaaatgtctggtctgcgaaaaaaaaaaaaaaaaa

SEQ ID NO: 105559 - DNA, 643 bp, Zea mays
  Clone ID: MRT4577_27773C.1
tccgccccgcgtccgccaccgtgcgctatccgcgcgacggttccaccggctgccgcgaggaaacttccgcctcctcctactcactcacccgttgccatcgccggacgcggagcatggcggaggagcagatcgaagaggcgtccatggccgcggcggtagcggtccccacccactcactcacccgttgcctccaaactcatttctcccgagcgccgccgcgagcctccgttccagcttcgtccatggcttccctcaccagatccgctctctcctttgcgaggcccatcaagataaaaatggcataatggaatccagagaaggatctgcttgctatggttactgatgactccaaggttcttctccatcgcttcaattggcaaaggctttggacaatctctccagggaagtgcatcacatcaatttgttggagccctgatggtaaaataatagcacttggcacagaagctggtttgattcttttgcatgatgtggaggtgtgtatctggatgatgataaaaaatgtcggtgtctattgtatctttgtatgaacattcgtttgtacttcatagacacctgatccagtgcctatcttctcttaatttttttctttttaataattttataatatttttatttattaatt

SEQ ID NO: 105560 - DNA, 268 bp, Zea mays
  unsure (1)..(268): unsure at all n locations
  Clone ID: MRT4577_27774C.1
ctcgcaaaggccacgggggctgagcaccttcgtagctagagattcgctttctctgagtggacgtagtcttgcgacgaccgcctcctcgtcatcgatcttcctcatggncgagcgccgataccctgggtccacttggaatccatacttgtatctgcttccgagcaccatccggagctccgtctgatgtactgagaaagagcttgccgaactggaaggaaccatctgtggcgagctacgttcttctgaggaagtcattgcaatcgttctt

SEQ ID NO: 105561 - DNA, 406 bp, Zea mays
  Clone ID: MRT4577_27775C.1
gtcactcagggtaagagctcacaaggatccaaagccatcctatctacttgatatcactataagaagttacaaccgagtgcgaggaatgattctgcagccatgtgcgtggccataaaaagggcgcgagcttgtatcatgatggcaaacaccagatcgggtatcacaatgaaatatgagtgcatgctccaaacatattagcttgactctaacatgctgtaaatactgataactaataggattgactacaagacaaaggatattgttgcggactatacacgagctagagctaccagctaccattaattatcagacagacttccttagaatggcaagggattcccaatctatgagtacaactttgttactgtagacgatgtccagaagagcacgatcttctatatactat

SEQ ID NO: 105562 - DNA, 392 bp, Zea mays
  Clone ID: MRT4577_27776C.1
gataaattaaagagatactataagaacagaaaaaaggttaaaaaaaaaaaacaaaataacaacaacaacaaatagtagtacttagaacaactagatttgacagacccagcgggctgctaccaacaacacaaacaatggtggtgccctccttcccagggcgtcttatgtaaaggcgaattttgaagatttctgtaccatgggggggggcagacaggtgtttttagggggccaatttctcctttaagggggacttttaaatatggtggggcaccggtttaaaactttggaaacgggaaaaacctcggggacaccaccttgattctcttaggagaacttccccttttcctatcgggggttattcgataagagccccctttgtttggctcttccaa

SEQ ID NO: 105563 - DNA, 371 bp, Zea mays
  Clone ID: MRT4577_27777C.1
cgtaatcatcattcatcttaatgctttcggcaccagatcaaatatgtatcatcactgatgtaactacagcgacgaagattctagtgctcgtggcactagctatgatagctggaaccataaacgcatgcatgccacactcaatcatgcaacactggcttgacaactagatcgattatccgtacctgattctacaacaactgcatgcattaccgcttcagcctataccagcaatactgcatcacatgatgacgcataccatcatgcaaccgttgacgttccaccacatgatcataacaatcatcttgacgatcatgatcatcaacaacgacgacgacacaatgaccatgagacacagcatcagcagattatgc

SEQ ID NO: 105564 - DNA, 308 bp, Zea mays
  Clone ID: MRT4577_27778C.1
tcccccttgcacacctacatatgcttgtatcctctagagaaagaccactccctgccgcgaacgcttgaggacttgttccgattagcgctcctgggcagatttcggtcttgaagtgtcgggagggggtaggcgaggggcgacgcgatgtgcccggtgcttcttgtggatatagcgacataggcgcacgcggcgatgcctacaccggagaagagaagctggccctgtggtggctatataaagcgcgaggaggagggctgggcgattcggggctccatatcctccattttatactggtgggctggccgatg

SEQ ID NO: 105565 - DNA, 348 bp, Zea mays
  Clone ID: MRT4577_27779C.1
gcgtcgacccacgcgacaggccaaagcgcaatgactcctccatgcttacctacgtacctctgcagctacccgccatagcaagctaggccggagcaaaggatcaaacacatcggggaacggaagagacgattaatggccaaagtccatcccaacgccgcggggtccgtcgttgccacagcagcagcactaggccgggccacgacggaggccgatgaagagccgtcgactgtgctgacggtgtggcgcaagtcgctgctcttcacctgcaacagcttcactgtcaacgacgcgagcagcgacctgtccttcagcgtgcactgctacgccggatccactcggagctggcgc

SEQ ID NO: 105566 - DNA, 644 bp, Zea mays
  Clone ID: MRT4577_2777C.1
cccccatgctccccctctctccctccctccgcacaccacatctgccccttactctctcctccgtggcgcactccgcatccacaaccgtcgtcggtgctctctctaagtgtggcgccactgcgtactccgagcacatcacctgtgtgccgctgccggcgacgaagaaggagccccgctcccgcccgccggtgtgccgccactccacatccgttcacagcgccggtgttccacggacatagccggtgcagcgccacagggcggcggaaaaggccggggctctgcggaaaagagcgtcgtcgcccccgctaggaagcccgtggacacagattagtttatttgtggcttagtttactccaataatcaagcaaggcaaagatgaggtgcctttgtgattggtatcgcagttccagcttcatcatagtggaggcactacatggagattttgactaaatatttatttagctgccatgcttttttgccccttattttcatacgagctgttgggtaccattgcaattgtgcagcagggtgctggaagaagtttctggttgggagaatccggttgaggttgccatttcccaatttcttccagcgattcggctaggaagcgaattttctatctgagaattattgacgtcttctgg

SEQ ID NO: 105567 - DNA, 524 bp, Zea mays
  Clone ID: MRT4577_27780C.1
ccccccgggcgtaggctcgaaattcggttcggggttcattatcctcttctgtgcaaatgtcacattgagggagatgattggggtgaattaaccattggggccagtgtaaaccggccctcccaaatatcaaaaggagctgatgtcatattcctaccaaatggtcacggccctctgctactgggttaagtggcccgtcaatcatcttcattgccacgccttctgattctacctttgatagccaagctattcactgtttcaacgtgatactgttactgctattggtgattcataccttatgagcatattcgatgaggaaatcacacatcatacagatctgcttaaaaccctcagtgccctagaggtcctatatgagcttgcttgaacaccactcatagcatcattgtccacgctcagaccaacttgctggaactcataagtgatatcatcaatgattcctcagctgattctcgtatacagtcaaggtcagtattagttactgggaagcttcttttttcacctgatgc

SEQ ID NO: 105568 - DNA, 487 bp, Zea mays
  unsure (1)..(487): unsure at all n locations
  Clone ID: MRT4577_27781C.1
tcgctcgaggcgccgggtcctgaccactcccaatgaccgactcatcagtgctacgataacgctcagcccaagtgtcaacgnacaaaacgagtcgacatggctcgcacgcaatctgacgaacgcgccctacgcgaagcgcctctccctgctggtggcacgattcattaatgcctaggttgccattcatcacctgaaggcaaatgagcatctctacatcgacaccatgcctatggtacaaacacctttctcggtatggcatgctaccgcccgtaatatagtcaacgtcatggaagctgaatgtgaaacccagaaccgcctacgatgtcgcacagcagcggatgtgctcttataacaccgattcccgcgtgatgaaccatgacacccacgattctgccaaaatgccttacaaatgggaagcgcccgatggcctacctgaactacattcccaaccactggtcacaacaaatgccgacccaacactccttgc

SEQ ID NO: 105569 - DNA, 1969 bp, Zea mays
  Clone ID: MRT4577_27782C.1
aattcggcacgaggctttcattttcacctcgctccggggccaagtcgccagttcaccaccttcacttcacttcgcaccggaccaccggccgtattcattcctcctccctccctcctcgccatacggctgcagcatcttcccctcaccctcctcattaccccgcgtctctccctcaaaactactcattgctctcaccgttccattgcccccgcggccccgccgtacgctcattcccggctagctcctcctccgcacggccatgatcttgagttcttggcattgatgacgttctagtaccgagcgagccagcccctctttaacccaccttaacaataaacacagcctgcccccaccggccacctcttcttcccccgtgcagctcgagctgattcggcgggctctgccccaacatccacccaccttcgtccaatcccgatccaagaccgtgccgtgatccggcagcagcttccgcgcggccatgggcacgggcgcggtggcggtggcggcgccggaccgggccaagcagcggcgggccggcggccacctgtggaagaaggcactgctccacttctccctctgcttcgtcatgggcttcttcacgggcttcgcgccttcctcctcctcctcctggaagtccgccgccgccaccccccagcaccacccgccgcaccgtcccggggaccgcctcgccgcctcccgcgtggccgtcgacgcgcgcgccaccctgtcgccgcccgcggaggccgccgatgcgctctccgccggcgccacggtggacttgggcgacgacgaggaggacgccgcccagcgtccgcctcctgatcgtggtcaccaccacgcgctccggccccggggagcgccgccgccgccggggcgagctgctgcgcctcgcccacacgctgcgcctcgtgcgcccgcccgtcgtctggggtcgtcgtcgagcccggcggcgacgcgcccgccaccgctgaggtgctccgcggcaccggcgtcatgtacaggcacctcgccttcaagcccgaggacaacttcaccaccgccgacgccgaggctcacgtgcagcggaacgccgcgctcgcgcatgtcgagaagcaccgactcgccggcgtcctgcacttcgccgacgccgccggcgtctacgacgtcggcttcttcgaacagatccgccagatcgaggcgtttggtacatggcctgtggcaacaatgtcggcgggcgagaagaaagtggtagtggagggtccactgtgcagtgcctcaaaggtcgtcggttggttctcaagggacttcaacgacgggaccacccgttcagtgacgtataacacggaagctgacctgaatcctgctggtgccgctggtacacgagcccacacgatcgacgtctcaggttttgcgttcaatagctctattttgtgggatcctgagcggtggggacggccaacgtcattaccagacacttcacaggactcgatcaagttcgtgcaagaagtgctacttgaagaccgagctaagctgaaggggatcccctccgactgctcccagatcatggtgtggcagtacagcgtgcccagctcgcgatagagggcagccgagaggacgcacaagaggcgtcgcaacctcgcaggcaggggaagaactgcagggggttggatcggagtcgctgtaaatgtggtgggcgatggtaacggcaaggaaagcaagaaggctgattactaagggttctttttctctctctctcctttttgtgttccctttttctttcccctcagttttagttttcaggtttgggaggggggccatgaatgatgaactgtccgtgggagcaaaagaattgcgatagtatttattcagattcatttgtgattctttagcctggtcggttggtcctgttgtgtttgggttaaaaaaaatggcagtggcgtgaggaatggagaaagtttttattgtgttatggcatgaaaaaaaagcggcc

SEQ ID NO: 105570 - DNA, 1376 bp, Zea mays
  Clone ID: MRT4577_27783C.1
gtcgccatcacccgcgcctaccaccgcgcgctcgaggcctccgtggcgcgcagcttcccggacaacggctgcatctcctgcatgtgccacaactccgacatgctgtacagcgccaggcagaccgccgtcgtgcgcgcctccgacgacttctacccgcgcgacccggcatcgcacaccgtccacgtcgcctccgtcgcgtacaacaccgtcttcctcggcgagttcatgcagcccgattgggacatgttccatgtgagtagacactcttgttgtttgcgttgtgtcccctgtttcttttcgtttcaccgtcgtgtcgaggcatccattgatcgatatatgtcatcgccagagcttgcatccggcggcggagtaccacggcgcggcgagggccatcggtggctgcccgatatacgtcagcgacaagccggggaaccacaacttcgagctgctcaggaagctcgtgctccccgacggctccgtgctacgcgcgcagcttcccggccggcccacacgcgactgcctcttctccgacccggcgcgcgacggcgagagtttgctcaagatctggaacctgaacaagtgcggtggcgtggtgggtgtgttcaactgccagggagccgggtggtgccgcgtgaccaagcggacgcgcgtgcacgacgcgtcgccgggcacgctgaccggcaccgtgcgtgccgacgacgtcgacgccatagcgcgcatagctggtgacggcggcgggtgggacggcgagaccgtggtgtatgcgcaccgcacgcgggagctagtgcgactgccgcggggcgtcgcgctgcccgtgacgctaggtccgctccagtatgaggtgttccatgtgtgcccgctccgcgccgtcgtgccgggggtctcgttcgcgcccgtcgggctgctcgacatgttcaacgccgggggcgccgttgaggagtgcgacgtgatcaccgatgacggcggcaaggccatggctctcagggttcgcgggtgtggtcggttcggcgcttactgctcgcgggagccggcgaggtgcctattggactcagcggaagtggagttcagctactatgccgacaccggtctcgtgtccgtcgacctgcccgtgccggagcaggagctataccggtggacgctgaagattatggtctaggccgtgacgctgtgcgccgacgccaacgcttgccttcgcgtctgagccattctgagccggacgacattgtcatttgctatgtgcacgagagatacatgtattgtggtgttgtataattggtatgaagagagtatgcttttgttatgtctgtatctatatcctgcgtgctttgaatgttatataatacttgttaacgaaaaaaaaaaaaaaaaaagcggcc

SEQ ID NO: 105571 - DNA, 273 bp, Zea mays
  unsure (1)..(273): unsure at all n locations
  Clone ID: MRT4577_27784C.1
cccacgcgttcgctgacacgtgggcatttactgncgacgctgcagcaggaagccaaataggagagggtccatcgagtcgaccaccgaacacggttagggccgctgggctcgccgtggccacagcttatgaattcaattccccactccttaccggcgcccgctggattataaatagattccctcgtcactgtcgctgtctcggctggatcggattcaactcacctaccccaccctctcgatatcttcccagctttggctactttctacgccacc

SEQ ID NO: 105572 - DNA, 347 bp, Zea mays
  unsure (1)..(347): unsure at all n locations
  Clone ID: MRT4577_27785C.1
ttttatgctcgcccttcgcttttacctacagacttaactcacgaggaagcttttttaaaatggtgccggccacacccacctttccttaacttcctcaactactaccttctactccttttcttttaaaaaattacaatgcttaaattcaaaccattttttctttatacatttncaatcttaattaattttttagattccagtcctattgtttttgccttctatatcccaatatataattaatatttacattccttttcattcttattttcatattcacaaatcaaattctttgatttatgaaagacgaacaacttctaaaacattttccaaagatgttttcattaatc

SEQ ID NO: 105573 - DNA, 571 bp, Zea mays
  Clone ID: MRT4577_27786C.1
gggcggtggcgatggaggtgggtgacctgcacaaggtgtgggaggtccgtgcgctcaagatcaagcccgacgcgaccgccgcgcgggcaaccctcgaccgcgttgccaggcaggtccagcccatcatgcgccgccacaaatggcgcgtcaaggtcctctccgagttttcgccgcggaacccgaggctgctggggctcaatgtcggcgcgggcgtcgaagtcaagctgcggctacggcgcgccggccgcgaccatgacttcatcccgtacgaggaggtgctcgataccatgctacacgagctctgccacaacgagcgcgggccccacgatgcgcagttttacaagctctgggacgagctccgcaaggaatgcgaagaacttgtttcaaagggtatcactggaacaggacaagggtttgatggcacgggaaggcgagttggtggatttactgtacatccaccaccaccatctctgcggcaagctacgttagctgctgcacagaagcgggcaaggaatggagctctattgcccgacagcaacaaagttgggtggaaacagtgaaattatgagtg

SEQ ID NO: 105574 - DNA, 440 bp, Zea mays
  Clone ID: MRT4577_27787C.1
gtcgacctcagcgttcgtatgtttacgcatatatactcacatgtcctagtcatgctttgcgcgacctgaaacaacgcccgtgtggtttaacgtgtcgcaaggataataatagcttttgatgttttatgcttataaaaaaaaacacatgggccgaccctgtaatagatccaaccttcctgcgcgtgcatcagatttccttattctagtatagttaaagttaattcaattcattggcactaggttttacatcggtgaaactgggaaaaccttacagttacccacatatatcaccttgcagcataaaccgctttggccaggtggcctaatagagaagatgactcacattattggccttgccatcactgcccgatctgcaatgggaatacacgcgccctgttgcattacataaatcgccaacgctctgggagatacgcgcagcg

SEQ ID NO: 105575 - DNA, 113 bp, Zea mays
  Clone ID: MRT4577_27788C.1
gtgtttctgtatttactgatgtgcgcacagttgggggtgtatgaatttgtggggatctatatcaagtttacaatagcaacgatgtcaattgagaaaatcttattcttatacct

SEQ ID NO: 105576 - DNA, 258 bp, Zea mays
  Clone ID: MRT4577_27789C.1
tagcaggttctatgacgtgctattcatggtagatgccattgactagggttctatgggacacctaaatgagtttcatggctagaagctcgtctctgccaccaaggagggcctgaatctggacaatagtgatgatgaaaaaaagcgcaaggaggatctcatggagaagttttatggcctctgcaaggtcatcaaagatgtgcttggcgacaaggtggataaagtggtggtctacgaccgcgtggtagactcccccatgct

SEQ ID NO: 105577 - DNA, 482 bp, Zea mays
  unsure (1)..(482): unsure at all n locations
  Clone ID: MRT4577_2778C.1
ggacctttgggctgatttatgtgcttggcgatggcggagcatgcgaatgagcggtggccttacggcgtttgcttgtgcgtatattgcgtgctactcttatttagtatgatgagattgctattaatgatgagactgttgttgattctaaggagtatgctactaagtttgcgactttcgagaagcattctgatgagaagattactccgtattctaatttgcttgggtgtcctgctactggtgggttttatggtgatgttggttctattggttgtaagactactactgatatccatggtggtcgccgagtttatggtggcggtgttcctcatggtaaggattttattaaggcggattgtagtggtgttcatgcggttaggtaagttgntaagagtactgcggttagtggatctgtttgctgtcgttctgcgtaggcgctgcatgttactggtgcgttggagttttcgcttgcgcctgctgatctg

SEQ ID NO: 105578 - DNA, 1229 bp, Zea mays
  Clone ID: MRT4577_27790C.1
ggcagcagccacgtcgtcgtctcctccgcccgccttttgcgccgttcacgctccctccgcgcaccgcttgcccaatcgccgccgccgcctcgcccgtgacccgccgcggggtcgcggtcgccgccgtgtcgagccccgttgtgtccgccgccgcggggaaggatgccaaacaggctcctaaggatttccttcaaatcattgattttgacaaggatacaataatgaagattcttaatcgagccattaatgaggacccgtgtttcatttgagacgggattctttttacttggtgggcatgctatttatttgggtccagatgatatccagatgggcaaacgtgaggagactcgtgatgttgctagagtactttctggctataatgacatcattatggctagggtctttgctcaccaagatattctggacttggcaaaatatgcatctgtacctgtcataaatggtctcactgactataaccatccatgccagatcatggctgatgcacttactatgcttgagcagattggtcgtattgaaaacactaaggttgtctatgttggagatgggaacaacattgtgcactcatggctgctattggcttcggctgggcttttgtatgtgcttgtcccaagggatttgagcctgacgcaaacacagtggagatcgccaggagtgctggaatcagtaagattgaaataacaaacagtcccagggaagcagttaagggagcagacattgtgtacacagatgtttgggccagtatgggacaaaaggaagaagctgattatagaaaacagaagttccagggattcacggtggatgaggccctgatggagattgctggcccacaggcctaccttatgcactgtttgcctgcagagagaggagtggaggtgactgacggcgccattgaggctcccaactcaatcgtgttcccccaggctgagaacagaatgcacgctcagaacgccatcatgcttcacgtgctcggtgcttaactctcctattgcacaccagtgacacgctcctcttagattattgggcattgctgtcttgctgaagcattgaggctgttttggctttagggcatatatgagagcttagttcagacgaactgtttagtaaggtgataacggttcttcagggtgggaatttgttgtgctgtaaaggtttggtaacctgaataaaaaataaacttatgtgcgaaaaaaaaaaaaaaaaaagcggcc

SEQ ID NO: 105579 - DNA, 1478 bp, Zea mays
  Clone ID: MRT4577_27791C.1
cattgggtacctcgagtccggccaggtgtgggcgcggagcaacaccgtccagtccatcactgccctttgttctctcctccacagtcgcagacaaagctggtccgtctcgcggagaggggaaggtggataggcggcacccacccatcacccatggctgggttgcaaagatcggcgaccacgttcagacggtccggctcgtcgggcctggtctgggacgagcgtttcctgaccgaggccgaggccgacgccgacgccgaggcgaaggccggcgccgcggaggatgccgagcagccggagctccggcactcgaggagcgtcggcatgctgcgccgtgcgggcggcggtggagacagccgcagcaagaagggcaaggagagtaggcagaagcaggcggagtcggcgcggcgcagcaaccagcaggtgttccggaccaaggacgtggccccggacatggatcccccctcgccgagggtgtccggctgcgccttctgcgccgtcttccgcgggggctctggcggtactggccgcagggcacaggcacgccgccggtccaagcccaggaagaagtgacggcgtagcaacacgtacgtacgtgcggtacgttgttgtttgtgccatctgtaaagtccgggccatggttgttcgtgcgtgtacatgtttactatactaaatactagggtcatatatagatgagcttgctactcggtaatcggtatacgtacgccattatttagttcaggatagttcctccttttttgggtcggtcggttggtttcttgatccagatccatgcttttgaggtttgggcgacggttagatgttacttgtctactatatatgcagcagctatttatgagatctggggctgttgttcttgttctttactagcttggtgcaactttttcgcttgggttctgccgctggtcctttcgggaagcgcatgtggttttggttttgaaactgggagggaagcagggtggagcgacgatgaattggtccgtgatgcggctgaactgggagggcaggcaggccggtggtggtggcagatgggatgagcggcgataattcagagtgctaattactagcaagttggtgagcgacatgattgcgctgtggaggtggatggacatagtgacggccatccacgccgacgtcgacgtgggatatatgtgaatgtatatcgattcagtcatgctttcacacggccggggacgacgcccgtctcgtgccgtcgacctgtcgacgacgacgatacggtcggcggcagcgtcacgcatctgcctctgcgtgcgtataataatggaggactggtggccgtctctttctccggcaccttcaccttattactacgtctctgttgggaccgctgcacagacgagacgactcgtcaattgatgattggtaacgtgtcttatgcagaaacaaaaaaaaatgttggaggttataccctcctctcctatagcgaatgatctttgtcc

SEQ ID NO: 105580 - DNA, 1755 bp, Zea mays
  Clone ID: MRT4577_27792C.1
aatcccgacctttctcgcagccacgagccgccgcactcaggccgccgccctagccgccgcgccgtccgtccccgccggattccagtggcaaccagcctccggcacccccttcttccaccctccgtcgccgacagtcactgaagcatctccttgcgatggctgcagcggcgatttccggcggtcacctcgtcctctccacccctacctccacccggcgcccacggtcgctccccctccgtccgccctcagcgcgaccaatcgacgcatcctccgcctccgcagcccgccgcggggtcgcggccgccgcagtgtccagccctgccgcggtcccctccactgggaaagatgcaaaacagcttcctaaggattttcttcatatcaatgattttgacaaagatacaatcatgaagatccttaaccgagcaattgaggttaaggcaatgataaagtcaggagacaggagcttccaaccgttcaaaggaaagtcgatggcaatggtcttcgccaagccgtcaatgaggacccgtgtttcgtttgaaacaggattcttcttgcttggtgggcatgctgtttatttaggtcccgatgatatccagatgggcaagcgtgaggagacccgtgatgttgctcgtgtactttctggatataatgacatcattatgggccagggtttttgctcacaaggatattttggacttggcaaaatatgcacctgtacctgtcataaatggccttacagactacaaccatccgtgccagataatggctgatgcgctcactatgcttgaacatgttggtcgtatgaaaccactaaggtgtctatgtcggagatggcaacatattgtgcattcatggcttctattggctgctgtacttccttttcactttgtatgtgcttgtcccaagggatttgagcccgatgcaaagacagtggagatcgccaggagtgctggaatcagtaagattgaaataacaaacgatcccagggaagcagttaagggagcagatgttgtgtatacagatgtttgggccagcatgggccaaaaggaagaagctgagtatggaaaacagaagttccagggattcacggtggatgaagccctgatggagattgctggcccacaggcctaccttatgcactgtttgcccgcagagagaggagtggaggtgaccgacggtgccatcgaggctccaaattcaatcgtgttcccccaggctgagaacagaatgcacgctcagaacgccatcatgcttcacgttctcggtgcttaaccctcctattgcacaccagtgtttaacttttcttgaatttgcttagggattgaggcagttttggctttagggcatatgtgagagcttaattcagcgaactgttcagtaacgtggtaactgttcttcagggtgggagtttgttgtactggaaaagtttggcaacctgaataaaaaataatcttttgtgctggttttactgagcagcagggattacattttcgttttgttgtgtgacccgtgcgttgcaacgggagtacgctaggaatgagtatcgacacatatctgatcagatctttatatttccttggaggtctggaaaaagtttgctcggaagccaaacatgttaatacctgaacatgtgttacccttgtgcctcatcagtacactgtttcgcgcatgtatgagtcttgttaatttgcatgccttgtgtatagtctataagtagctatgggctataaaataaaccattcctgtgacaaacaa

SEQ ID NO: 105581 - DNA, 994 bp, Zea mays
  Clone ID: MRT4577_27793C.1
cccacgcgtccgcccacgcgtccgcggacgcgtggcgcactcgcgcacccgtccatcgcatcgcatctgtcctcccatccacctcagcgccacgccgccaccgcaccccaatcacacgcgcgccacccgcgatgacgccggcggcggcgatctccggctccagcagccacgtcgtcgtctcctccgcccgcctcaggcagccgttcacgctccctccgcgcaccgcttgcccaatcgccgccgccgcctcgcccgtgacccgccgcggggtcgcggtcgccgccgtgtcgagccccgttgtgtccgccgccgcggggaaggatgccaaacaggctcctaaggatttccttcaaatcattgattttgacaaggatacaataatgaagattcttaatcgagccatcgaggttaaggcattgataaagtctggagacaagagcttccaaccgttcaaagggaaatcaatggcgatgatttttgccaagccatcaatgaggacccgtgtttcatttgaggcgggattcttcttacttggtgggcatgctatttatttgggtccagatgatatccagatgggcaagcgtgaggagactcgtgatgttgctcgagtactttctggctataatgatatcattatggccagggtctttgctcatcaggatattctggacttggcaaaatatgcagctgtacctgtcataaatggtctcaccgactataaccatccatgccagataatggctgatgcacttactatgctccttgctctttctacatgtgttgctaacgcgacaattttccctcaatgctcacaagctcctatagcttcccttcttcccccataccttccatcaattatagcttcagtatgtgaaaacccagctcttcaaccatataggcttcaacaagcaatcgcagcaagcaacatacctttatcgcccttgttgtttcaacaatcaccagccctatctttggtgcagtcattggtacaaac

SEQ ID NO: 105582 - DNA, 395 bp, Zea mays
  Clone ID: MRT4577_27794C.1
gtacactctgtgttttttgttgactgctttgtgctatggcacgcggccttcaatgttgcttttttcctaaaatcgttgatacatttatccttgcaaatctctgttactactatgagaagagtgtttttggcggccaactggtgctgcggttcacaccccgagcggcgtgaacactgcagcacgacccaagaagcataccccccattccttctgcgttaaatcatacaaagcaccagtcatgctcctagcgcccaaacattctgactctcttaaagaggattagcagagccccgttaatcattattacttgtaaactgattacgaggatactgatccaactaccgccaacgaacgccgcccatctgactttttcatccaggctaaagctgaagctt

SEQ ID NO: 105583 - DNA, 1485 bp, Zea mays
  Clone ID: MRT4577_27795C.1
atcaatccgtatcccgactccggcgaaggcactatccgagtttacttcacactcgtgcacccatccgggtcactggctcactgccaccgcgccccaatcacgcgcgcgccacccgcgatgatggcggcggcggcgatctccggctccagcggccacctcgtcgtctcctccccccgcttcaggcagccgctcacgctcccttctcgcagcggtcgcccaatcgccgccgccgcctcgcccgtggcccgcggcggggtctcggtcgccgccgtgtccagccccgctgtgtcggccgtcgcggggaaggatgccaaacaggctcctaaggatttccttcatatcaatgattttgacaaggatacaataatgaatatccttaatcgagcgatcaaggttaaggcagcgataaagtctggagacaggagcttccaaccattcaatgggaaatcaatggcgatgatttttgccaagccatcaatgaggacccgtgtttcatttgaggcgggattcttcttgcttggtgggcatgctatttatttgggtccagatgatatccagatgggcaagcgtgaggagactcgtgatgttgctcgagtactttctggctataatgatatcattatggccagggtctttgctcatcaggatattctggacttggcaaaatatgcagctgtacctgtcataaatggtctcaccgactataaccatccatgccagataatggctgatgcacttactatgctttgagcacgttggtcgcatgagaaacactaaagttgtctaatgtttggagatgggaacaacattgtgcactcgtggcttctattggctgctgtacttccttttcactttgtatgtgcttgtcccaagggatttgagcccgatgcaaagacagtggaggtcgccaggagtgctggaatcagtaagattgaaataacaaacgatcccagggaagcagttaagggagcagatgttgtgtatacagatgtttgggccagcatgggccagaaggaagaagctgattatagaaaacagaagttccagggattcacggtggatgaagccctgatggagattgctggcccacaggcctaccttatgcactgtttgcccgcagagagaggagtggaggtgacagacggtgccatcgaggctccaaattcaatcgtgttcccccaggctgagaacagaatgcacgctcagaacgccatcatgcttcatgttctcggtgcttaactctcctattgcacaccagtgtttaacttttcttgaatttgcttagggattgaggcagttttggctttagggcatatatgagagcttaattcagcgaactgttcagtaagcgtactgttcagtaacgtggtaactgttcttcagggtgggagtttgttgtactggaaaagtttggcaacctgaataaaaaaaataatcttttgtgctggtttttccagtgataaaaaaaaaaaaaaaaaagcggcc

SEQ ID NO: 105584 - DNA, 348 bp, Zea mays
  Clone ID: MRT4577_27796C.1
cttgctttgtggctgtctgttttgtttttgggggttttttggaacagaaaaaccctaaagtccacacattggccatgggaatgaagatcttacgaccctcccacggctttttttcctttcattcttgaatactaaaatgccccatatttttacggctttccttctgcttgtgcacacgtacaacgccggagaaaaggacagctaacacaatggcagggaggaaacttaactttgaacgacccgggtttgctctataatgaggcggccctaaaaacttttttttccaaaaacctaggggctccggtgaaaaataactgtgcacattgtaagcaatgcaatgcagggatc

SEQ ID NO: 105585 - DNA, 1795 bp, Zea mays
  Clone ID: MRT4577_27797C.1
ctggcccgtccatcccgaccttactcgcagccacgagccgccgcactcaggccgccgccctagccgccgcgccgtccgtccccgccggattccagtggcaaccagcctccggcacccccttcttccaccctccgtcgccgacagtcactgaagcatctccttgcgatggctgcagcggcgatttccggcggtcacctcgtcctctccacccctacctccacccggcgcccacggggcgcctaaccctcgtaacctgattctggcccctaggccctagcaacaaatccgtatcccgagtccggcgacggcagtatccgagctcgcactcgcgcacccgtccatcgcatcgcatctgtcctcccatcccctcagcgccaccgcaccccaatcacacgcgcgccacccgcgatgacgccggcggcggcgatctccggctccagcagccacgtcgtcgtctcctccgcccgcctcaggcagccgttcacgctccctccgcgcaccgcttgcccaatcgccgccgccgcctcgcccgtgacccgccgcggggtcgcggtcgccgccgtgtcgagccccgttgtgtccgccgccgcggggaaggatgccaaacaggctcctaaggatttccttcaaatcattgattttgacaaggatacaataatgaagattcttaatcgagccatcgaggttaaggcattgataaagtctggagacaagagcttccaaccgttcaaagggaaaacaatggccatgatttttgccaagccatcaatgaggacccgtgtttcatttgagacgggattctttttacttggtgggcatgctatttatttgggtccagatgatatccagatgggcaaacgtgaggagactcgtgatgttgctagagtactttctggctataatgacatcattatggctagggtctttgctcaccaagatattctggacttggcaaaatatgcatctgtacctgtcataaatggtctcactgactataaccatccatgccagataatggctgatgcacttactatgcttgagcagattggtcgtattgaaaacactaaggttgtctatgttggagatgggaacaacattgtgcactcatggctgctattggctgctgtgcttccttttcactttgtatgtgcttgtcccaagggatttgagcctgacgcaaacacagtggagatcgccaggagtgctggaatcagtaagattgaaataacaaacagtcccagggaagcagttaagggagcagacgttgtgtacacagatgtttgggccagtatgggacaaaaggaagaagctgattatagaaaacagaagttccagggattcacggtggatgaggccctgatggagattgctggcccacaggcctaccttatgcactgtttgcctgcagagagaggagtggaggtgactgacggcgccattgaggctcccaactcaatcgtgttcccccaggctgagaacagaatgcacgctcagaacgccatcatgcttcacgtgctcggtgcttaactctcctattgcacaccagtgacacgctcctcttagattattgggcattgctgtcttgctgaagcattgaggctgttttggctttagggcatatatgagagcttagttcagacgaactgtttagtaaggtgataacggttcttcagggtgggaatttgttgtgctgtaaaggtttggtaacctgaataaaaaataaacttatgtgctagtttcattcgcgaatcatgacagctttaacattgaaaaaaaaaaaaaaacgcggccctgg

SEQ ID NO: 105586 - DNA, 1571 bp, Zea mays
  Clone ID: MRT4577_27798C.1
cattgggtacctcgaggccggccgggcctctttctctctctctctcgcctgctcgcgctctctccatctctcagacacacgcgcgcgggcggagagatagcgcgcggcaagcgaggaccgacggagatggagtcgccggaggcgtgctcgtcgggggatgcgtcccccgtctcgccggcggcgccggcggcggagcgcccgtccgaggcggcggcgctgcgggcgctcgtcgaccgggtgcgcgccggcgaggtggacgccgcccgcgaggtgcgccgcctcacccgggcgtccgcgaggcaccgccgcaagctcgccgccgccgtcgacccgctcgtcgccatgctccgctccgccgcgcccgaggccggggaggccgcgctcctcgcgctgctcaacctcgccgtccgggacgagagaaataaaaccaagatagtggatgctggtgcacttgagcccctgcttggttatttgcgatcaagcgatccaaatttgcaggagtacgcgactgctgctctccttacactttcagcctcatccaccactaagtctgtcataagtgcctcaggagcaatccctctactcgtggaagtcctcaaagaagggaatcatcaaggcaagaatgatgccgtgatggctctgtacaacctctccacaatcacagacaaccttcaagctatcctttctgttcagccgattccccctttaataaagctactgaagggtagcaagaagtcctccaaaacagcagacaaatgctgtgctcttctcgagtcactgcttgcttttaatcaatgtccgctggccttgacatctgaggaaggcggagtgctcgccatcgtagaggtacttgaggaaggctcccttcagggcagagaacatgccgtgggagcgctcctgacgatgtgcgagagtgaccgcagcaagtacagagacctcattctgaatgaaggggcgattcctggccttctcgagctcacagtccatggcacacccaagtcccgaatgaaggctcatgttcttctcgacctgttgcgggactcaccgtactcgagaccgaagctgcaggcagacacgctcgagaacatcgtgaccaacattgcgtcccaaatagatggcgaagaccgtggcggcaaggcgaagaagatgcttgccgagatggtgaaggtcagcatggagcagagcctgaggcatttgcagcgtcgggcttccttcgcctgaaacacctgcctcaggtgacagccccctctcattttgcaatggaaatagaagatagatcaaaataatgagattcctggtgatgccggtccaggccttgacaaggaccgagtgaccggtctaagccctcatacactcaagctgttgacgtagagatccattttccctttcacatgccaatcttgtgtctcgtactctcgttgtgaagaaaagaggcctgctttttcttctcgttgtaagttttcccttcccaaggttttgtgcatggaatggactgtatataataaagcaaaggatcccattcctcatgtctgaaaaaaattctctctgttggtttcatgcccccctttttt

SEQ ID NO: 105587 - DNA, 438 bp, Zea mays
  Clone ID: MRT4577_27799C.1
cccacgcgtccgcccacgcgtccgcccacgcgtccgcccacgcgtccgagcacctggcggtcctatcatggtgcgggcgctggagagcatcggcccccggccaggcacaggcgcgaggccccggcagtgcgagggcgcgcggccctggcggcacgcctgcccgatgcaggcaaggctcccccggcgcgcgtgggcgcgaggcgcggcggccaggccccgtcggcccctgcgtgggtgcggcagcgcggccccggcgctgacggcgtgggcgcggctgcacggcggctcggtgcaggccggctgcccggcctacgagggcggcatggcggtgcggcggccatggccccagccacgacgttggtgctgcggatccagccccgaccccggtgcgggagcgggcgtggcggcccggcccctgcgcacggcgcaactcgggcg

SEQ ID NO: 105588 - DNA, 685 bp, Zea mays
  Clone ID: MRT4577_277C.1
tccgattttttttttttttttttttttttttggaggatatttagacgttaatattgatatagaagtaatcggagaatattttatcaaagttctcgaagagagaaaacagctgcatagctaggtttatcaccttccaaagccaaaccagcctctcttctgagcaggtttctcagcctcggcagcaggagcagcttgctcattgcccacctgaacctccttttgaggatattgaatgtaattccaggcaacatctaggaaaatgggcttgacgggcatcacctccagcctcggagaaaaaaaagaaaaaaaaagaaaaaaaaaaaaaaaaaaaaaaaaaaaaaaaaaaaaaaaaaaaaaaaaaaaaaaaaaaaagaaaaaaaaaaaaagtataaggaaaaaactgaaaaaatcaaaaaaacactaaaaaaaaaaaaaaaggggggccccggggggcccccccgggatttcaggcccggccccctggggggccacctttttttcttagggggggccaaaataaggggggggagaacaggggaataaatttttccctggggaaaatttttttcccttcccaattcccaaaaaaattaacgcggggaaaaaaaaggggaaaaccgggggggccccaaaggggggcccccctccaattattgggggggcccctaccccccccttttcgggg

SEQ ID NO: 105589 - DNA, 971 bp, Zea mays
  unsure (1)..(971): unsure at all n locations
  Clone ID: MRT4577_27800C.1
ngatgacatccctgaagagatggttcctatggttgtggtgaagagttgaagaagatttaaatgatgatactgaacactcttctggcattaggattgataatgcagatgataaggttaataacaataaatcaagcactacatgtgatgacaatgataaagttgttcagcctcctgctgcaagggccatgagaatagaacatggtgtgcccatggatgacagtaatcaaatttcttctctttcaaaagtggatgatacctctaaaatgcagagcaacagttcattcacagatcatatacaaaaaccaaatgctgattcatcatatttgagtgcaaagtttacagagaaaactggcggctcaacttatgaaagcaaaaggaactcatgggggcgtacttcagcaagaaaaggcttgtcaacagaggaggctggctgttgcagtgataatgacgaggctcatattgcgaagcttgaaaacaagaagacccatctccaatctaaacttacggaggaggtaaaagaaaacacagtcctccaggcaaatttagaaaggcgaaaagcagcactacatgagcgtcgtgtagcacttgaaaaagaagtggaaaatttacgagaccagctgcagaaggagagaaatttgagggcttcattggagtctgggttaatgaatatgcgaagaggacaagtgtccttcccatcaacgatagacaccaagactaaagctgatcttgaggaagttgctgctgctgaagctgatattatgaacttgaagcaaaaggtttctgatcttcgggggcaactcaactaccaagtccagttgagttccacctcgttatgtgaatcatgcaacaagcgggcaataaatgcagacaagcttgtcgaaggtgaacaaaatgctggcctttctccacagattggcttctcagtcgaagcacccccaattcaagggtctaatctgtagttcctgacatgt

SEQ ID NO: 105590 - DNA, 267 bp, Zea mays
  Clone ID: MRT4577_27801C.1
ggttggtgtgttttttttttttggttttttttttttttcctaaaaatactcttgtttttttttcatttgatggaattaccttaaaaacccgatgcaggcgcttgttttcgttaaaaaaggccaccgacaaacgtactttattataagagcgtatcggaaccccaccaaccccacaacctctttgccggtgtgaattccaaacaccccaaaaacaacggggattattaacactccgggaaaacaaaaggtttttttagaaaccccccc

SEQ ID NO: 105591 - DNA, 601 bp, Zea mays
  Clone ID: MRT4577_27802C.1
cattgggtacctcgaggccggccgggaactgataaccgatagacaggcgtcttcgtactcgtctatctccgcgacccaaagtagtccccccttctcacattcttctctcatttctcaccaccgacgacgataccccctttctacaacaccgtgaggtagtgcatctcgatccacatctgtcagcccgatatccatgtcaataaacgcgtgctgggagctggactgcctcgagcatgggattcatgctgatggtcatatgccccgtgaccagaccattgggggaggggatgatgctttcaacacacttcttctatgagactgatgctggaaagcacgtcacacgtgttcgttattgttgacctctgcagaccactgacatcatatgaggcgacgtagctgatacctagtcagccagatctgtccatcctagatcatatcatcagcgtgcaaggatgatcgcagacaacaacttctgtcgtgtccactacactattgtgaacgcagattgctgacctgagacatagaccgcatcatgaagcttgcacataattggactgtgctccagaggttcctcgccttcaacggttctgacgcaataaca

SEQ ID NO: 105592 - DNA, 511 bp, Zea mays
  Clone ID: MRT4577_27803C.1
gggtcgccgagttcggcttcccggtgcccgacgacgagaaccgccgagttcgcgctcgacctgatccgcgagttcgagtcctcgcccacgggtaccaagccgctcgtcgacttccaccgcacatggcagcacatgcacgcgcggagccatggccaaggctcggcgggcgctgctggtcagtcgttggcggcaacggcaccaacgatgccgctcaaggaggccatcagcgcgagcatttcgcgcgggaagctggtgctgggctcggacggcgtggccggggaggccgcgtccgtgcgcacccgcacctacgccaacccgttctgggtggagatgaaggtgctgacgaagcggtcagcgatcaacacgcgtcgcatgcccgagctgttcctcatccgtctcggagccgtggtggtcacgggcgcgatcctcgccaccgttttcttccggctggaccagtcccccaagggggccgcaggagcgactggatcttattcgggatcgccatgtggca

SEQ ID NO: 105593 - DNA, 386 bp, Zea mays
  Clone ID: MRT4577_27804C.1
ggtggtaatatataatgttctctctggtttttttcaatggaccagaagacgtaaagtgagcaacatgaacgaaggaaacggcccggaccccaggccggattcaaaggccaaaaaagagaaggaaaaaccaagcaacgaaaagaggggggaagaaccaaaaagaagaaaaaaaggcacgggggggggccaggaaaacgaaaaaaacaaccccaacggcgggcaacgaggaggacacaaaggcacccttcccgccgcccagggaacggacaagaacgggaggaacaccaacccgccggccagataggcggccaccccgaacacgaagggaccaacctggcccagcaaagcagccctaagaggcacccccgggggggagggcacccccc

SEQ ID NO: 105594 - DNA, 360 bp, Zea mays
  Clone ID: MRT4577_27805C.1
atctatctttttttcttttgctttttgtaccaaacataacatttgggtaaatttttaagtgggcaaataattccattcgccacctcttttgaccgggcttcccacgggaaatccggcctgttaagggaacagacttggaaaacctgtttcaaactgtccaaaccctaatgttgtgaaaaatcaccctacgaaaggagggggagcatataaaaattcctttaaactaccgctaccacaaccctgccagtatgtggccaagtttggtggcttgaacggctataccgaaaacaaacggttcattgtggaagcagtggctccctaggggaacttaacgggagaggagacacacctgggggaacc

SEQ ID NO: 105595 - DNA, 170 bp, Zea mays
  Clone ID: MRT4577_27806C.1
cccagcgtccgaccaatggacttttttttatgaactaaacaaacggcatccggggctgtgatacaagctttcgagcgctgcatgcacctgttcaagttaatgaccttcacttaaactcaatcatcctgccagggatttacaacgagggacacttctaaaaacccaacatt

SEQ ID NO: 105596 - DNA, 294 bp, Zea mays
  Clone ID: MRT4577_27807C.1
cccgttcgagcgcccaccgggcgtcgcgcatgggccacccgcacccaggcgctggcacaggggagtgaggtgtggaggtcgagcaatggcgggcagccttcgccggcccgtggatctgtaggcgcgcgcgggagggtgttggctggtgcgcgatgggatctgggagcagcaaggccaccacctcctcctcctcgcccacggcggcggaggagcctgctgccactgccgagctcctcctgcttccgtggctccacgacgccgtgcgaaggcgacgctgccgcagcagcggtggac

SEQ ID NO: 105597 - DNA, 216 bp, Zea mays
  Clone ID: MRT4577_27808C.1
gaaacatagaatctaacaacagggaagttacagcacaagattaacaagaaacaggcataacacaaacaagatacagactttcatgaaaaaatcaggatgtgagaagccagttgcatgtatataatcttacccgtcgcctacccccaggttgcccccgagatcgagctccccaccctcgacggcaagacccacaagatgtaccgcggtgggaagatc

SEQ ID NO: 105598 - DNA, 625 bp, Zea mays
  Clone ID: MRT4577_27809C.1
ctttaatgcaagaagcgaatgagctgtcgcggcgaacgagccgataacacactcatcaactcatcgtaggagtagcctgaaactccacaaggcagtagtactagtctagtactagaggacgccattattatcggacgaggagtaaccatccaatcagacaacacttcatcgacgcaaggacgcatgacatcgggcaattttaccgaaccatctctctcttgtcttcctcccttgcttttagccaagctacgctagcgtctgaagacgaaggaagctacagcggccgaggtccccgtttctgcgcccaccgaggcgtcgcgcatgcggccacccgcacccaggcgctggcacgggggagtgaggtgtggaggtcgagcaatggcgggcagccttcgccggcccgtggatctgtaggcgcggcgcgggggggtgttggctggtgcgcgatgggatctgggagcagcaaggccaccacctcctcctcctcgcccacggcggcggaggcgggcggcgaggttaagaggccgaatgggagcgggaaggggaggagggggaggaccctgctgccactgccgagctcctcctgcttccgtggctccacgacgccgcgcgaaggcgacgctgc

SEQ ID NO: 105599 - DNA, 334 bp, Zea mays
  Clone ID: MRT4577_2780C.1
attataaccagggaacagaatagatgaatgggaatatttgggctttctatatttttgggtctcatgtgtttgggagttaaggggcctttggactacattcggtagcaaatggttcttaagaataaccagggacaccaggtgttgatttccaattctcttgggcttcaaaaccaaaagatgaagatgttgcgaaggtcgcgacgcacggggtcgccgttcctgagccttgccatgggcattttctcgatcttgatgggcccactccttggagacgacgcggtacatgccttcggtttcctccaacgacctggcgagcgccgagcgtggccaccaa

SEQ ID NO: 105600 - DNA, 292 bp, Zea mays
  Clone ID: MRT4577_27810C.1
gcgatgcgtaacgccatctgaggcatgaacagcaaggagcgggacagccgcaacattttcgttaacgaaacccaaacccgcggcagccgtggaggcggaatccacgactacgcccgtggccgtaaaggcagcggctacagcggtggcgacctccataatagcagatgtagactacttgcacaagcgacactcgatacagtgactgagaatgctacaatggaaggacagcccgatacagcgatagcaaccatgacagctgatactgtaactacgacagaaacacgaagaactg

SEQ ID NO: 105601 - DNA, 2143 bp, Zea mays
  Clone ID: MRT4577_27811C.1
gccggccgggttcaaaaaagtgtttatctctatcggccgctcgggccggcacctcgtgtgtctgtttctccggcctgggctctgggctcgggcgtagtccagttgccaccaaccgagccagagagagaacaaagaacgggtgaaagaaatctcggaaaggttccagatttcctcgaggtggaggcctccttttcctcggccgaatcgctcgttcgctttctctctctctttcctcccatcgagcatgcattcttttctgctgctgcgaccgtaggatcggcgtccagcagcctcgccgcgtcggtatggttttcccttggcccacacatcctagctcttccgcattcttgaatttcgtggtcgaggattagggggtttctcgtgcgctggtccaatttcgcgctaatcgtcctgttcctgcctcggattactcgccttctcgtggtccccatctgttcttggcgttcgcacgcttgccgtgcggcgggcagggctgcagcagcagccggcagcgcgtgcatcttgcgaccccctttccaagaaccagctgcaagctttggccttttccgcctgccgtacccgaaatcccgcaagaaactccacccaagaaaaaagcggcgcccttttggctggctggctgccattcctcacgccccacgagtttggtgaggctttgaaacgagcacagttcacaagacagtgaggctgcggtgggtgtttcctcgtcggagatggagggaaatttgccgccgcaaaccatggtcccaggcggaggccccttcgatctggggcagccgttccacttcgccgtccaaccccaggcgctccaggtttaccaggatgtcttcgctgcccccgccgcgagccagatgccggagctcggcaatgtggtgaaggcctcgctgagcgacgaggaggagggcggcgacggccacctcgaccgcggcaaggcggcagccgcctcccagtggcaccgggtcaagtggaccagcggcatggtcaagctgctggtgtcggccgtgtcctacatcgacgaggacgtggacgcggaccacgggaccagcagcgggaggaggaagcacgccgtgctcaagaggatgggcaagtggaagctggtctcctcggccatgaccgagaggggtttcgctgtgtcgccgcagcagtgcgaggacaagttcaacgacctcaacaagaggtacaagaggctcactgagatcctcggccggggaagggcttgccagatcgtcgagaagccagagctccttgaacagttgagcctatctgggaagctcagggaggaggccaagaagcatctcaactccaagcatctgcactacgaggagatgtgctcctaccacaacaggaaccgctactgcctgcttgatgatcctgtccttcagaggtccctgcggatggcgcttagggctccagctgaacagggaaagcaatgcttgtttggctatgatgacgaggatgatcagatgttgctttctgatgatgatgatgattatgatgatgacgagttgaatgacgatctggaggccggtgctgaggatcatggtcctcacagagttcatgccaccgagaaactgaaacatgatcatgagggacattgtgggtctcatctgtcagaagttgcagccattgacatgaacagaatgaacttcgaaggatctggtggtccatcctctgagaagaatttaagttatatgcgtgttcaaatcgagaggcagcgtctgaaaataaaatctcagatgctgagaattgagcagaggcatttcaagtggctgaagttcagcaaggagaaggacagggagctgcagaaaatgaagctggagaatgaaaggatggcgctggaaaatgagcgattggagctggagctgaagcttaaggaaattgagataggcatcaaaccaaagaggatttagagattgcaggatgcaagtggtagagctagggaacttttagagtttctggtaaccattttatctattgtagtaccttacaaattaggatatgttacatagtttcatcttcgctaactgcatatcagttaagttaataactctgttggtttcaagcatttgcaataagtacagtttaccacctgaaaatggtgcttaatgttatcattgccttatcc

SEQ ID NO: 105602 - DNA, 201 bp, Zea mays
  Clone ID: MRT4577_27812C.1
gcggtgtgctcgtgtcggttaacgggcgaagagagaaagaaacagagcgagagagggggaggacgaagccctccgcgtcgtctcctgctgttccatcccacatctattctgcctcggttgcaccttcacctctgaagctgacctcaatgaaagggctggaagcgttccttgcgcaggaaggaggaaatctcggtcattttc

SEQ ID NO: 105603 - DNA, 449 bp, Zea mays
  Clone ID: MRT4577_27813C.1
aagatattagccctccttgcgctccttttcctttcagtgagcgcaacaactgcattcattattccacaatgctcacttgctcctaatgccattattccacagttcctcccatcagttacatcaatgggcatcgaacaccctattgtgcaagcctataggctacaacaagcgcttgctgcgagcgttttacaacatccgtttgcccaattactacatcaattcttgtctacatttaaccatacttacctttttttctcatcttgtagctactgtttttctcctatttttgccatctatctctttggtacatctgtttttttcttttttatcttttgttttttttttatccttttttttttgctttttatttttatttttttttttttattttatttttttatttttttctttatttcttgttttctttattttctttttatttttttttt

SEQ ID NO: 105604 - DNA, 457 bp, Zea mays
  Clone ID: MRT4577_27814C.1
ggggggaccaaaacccaaacccgggggggccttactttggggggcccaaccaaaaataaagtcttaaaacccccccggtttcaacgaagggaataatccttttggaccgggcaaacatggccataaaaaattactgggcccccccacaccgggagggggggcaacaaaacgaaattttttaagctcccccgggggacccaacaggcaggcccagccccccccaaaaaaatctttttttttggggagaagccttcgaaacctgggccccaggggggccctttttccccacccttttgaggaccccaacagcccccgttggcctcttgtcccggcccgaaaatcgcccaaaagggggatcctgaaaaaaggtccccacccccaggggcttagggggaaccattttcaccaaaccaaaataaccggttttgaaaaattggggctctttttccagctcctt

SEQ ID NO: 105605 - DNA, 1360 bp, Zea mays
  Clone ID: MRT4577_27815C.1
aaaacagcgagtgtcatccagtgctgcaagctcccagtcccagggtagtagaggactagaggcaggctagagcaaagcacgcggattgcgtggctagcgcaataatggcgatggccacggccaagctcgtccttctcatggtcctcgtggccggccgctgctgggctccgcgggggacctgggccggcgcgccggcgtgccgtgcgacagctggcgcctggccgtggagacgtacaacaagcgcgactggacgacggtgccggccagctgcgagcgctacgtcggccactacatgctcggcggccactaccgccgggactcccgcgtcgtcatcgacgaggccatcgcctacgccgagggcctcaagctgggcggcaacggcaaggaggtctgggtcttcgatatcgacgagacgtccctctccaatctcccctactatgccacccacggcttcggcactaagctatacaacgcgacgagcttcaacgagtacgtgctggaggggagcgcgccggtgctcccggagacgcagcggctgttcaagaagctcgtctcgctgggcatcaagccggtgttcctgacgggccgcaccgaggaccagagggccatcaccgtcaccaacctccgccgccaggggtactccggctggatgacgctgctgctcaagcccgtcggcctcaaggccaccgccatcgcctacaagtccggcgagcgccagaagctccaggacgccgggtacgtcatcgtcggcaacatcggcgaccagtggagcgacatcctcggcgcgccggagggcgcgcgcaccttcaagctgcctgaccccctctactacattggctaagcagcgatgccaacggcgcggcgcggctctccatcagcccatccatcaacccgtcacccggctccagtgcctgtgctcaactactctttgtttgttacccctcacttcttatcatcattaattcctaaggttaattccctgagctgagtggaaataaggccgactcggtggagagctgtcgacttctcaataaataattgctcatgaaaaccacgatggtttatgttattcaaagtcttatatatatataatggattagtaccgggaaaaaaaaaaaaaaaaaaaaaaaaaaaaaaaaaaaaaaaaaaaaaaaaaaaaaaaaaaaaaaaaaaaaaaaaaacaaaaaaaaaaaaaaaaaaaaaaaaaaaaaaaaaaaagggggggcccgttttagaaggacccaactttccttccccttgtttgccaactttaattttttttttggggccccctaaatcaaatccactgcccgttctttacacaccttcgttcttggaaaaacccttcctttccccattt

SEQ ID NO: 105606 - DNA, 318 bp, Zea mays
  Clone ID: MRT4577_27816C.1
tcgatcttacactctgccaataccacaaaaccaaagggggtgcttttaatccatcttgcagcttccaccaccacaactagcgtcgatttatcctaccaagagcatatattccttcactatatttagatctgacaagtttatccttcctcgtttatacgtcatcacagactgtcacagctgtcgatgggcatattaatgctatactcaaccagaaattttagtatgaaaaataaacgacctgactctttgggtaagcacattgcctacctacctcatactgaaaccctgccacagagttatatattcaacgttaaccaa

SEQ ID NO: 105607 - DNA, 789 bp, Zea mays
  Clone ID: MRT4577_27817C.1
gtacctcgaggccggccgggccgggggaaaacagcgagtgtcatccagtgctgcaagctcccagtcccagggtagtagaggactagaggcaggctagagcaaagcacgcggattgcgtggctagcgcaataatggcgatggccacggccaagctcgtccttctcatggtcctcgtggccggcagctccagcggcggcagcgcgtgggggccgctgatgagccgtctccggatgccgacggcgcggtcgtccgtcgtcgagatggcggcggagcgcctccaggaggactacgtcgtatcggcggcggcgccgctgatccacgcgctgcggccgctgctgggctccgcgggggacctgggccggcgcgccggcgtgccgtgcgacagctggcgcctggccgtggagacgtacaacaagcgcgactggacgacggtgccggccagctgcgagcgctacgtcggccactacatgctcggcggccactaccgccgggactcccgcgtcgtcatcgacgaggccatcgcctacgccgagggcctcaagctgggcggcaacggcaaggaggtctgggtcttcgatatcgacgagacgtccctctccaatctcccctactatgccacccacggcttcggcactaagctatacaacgcgacgagcttcaacgagtacctgctggaggggagcgcgccgttgctcccctcatcgcagcggttgttcaagaagctcgtctcgctgggaatcaagccggtgttcctgacgggccgcaccgaggacagaggggcatcaccgt

SEQ ID NO: 105608 - DNA, 540 bp, Zea mays
  Clone ID: MRT4577_27818C.1
ccagcccccgtgatgcccgtcggtggtttgctgtttttgcgcagccccgccgccgtcgccgttcaccccggtgagacgacgatgatctttatttgattccacatcggcattgttctccggtgattaaattgtgtatatgtgctgttttgttttattttgtggaggcgaggaaccccgtgttttgcgtggagaaggcaagtcgttcaacgctcgtcggatgctcggagcgatgcacaaatcggaatcgccatcgtccttacaaacatcgattgggtttatttatggtgagccgatgtatgtcgctctcggtcgactcgattaattattttgaatggatgtgtgtaaaatgtttcggttatgcgcattggtaggatcgcgtttgctattggagaacaagagattatttgatgtgtgcgaattgtagtgagtctaattaggttttgatcgatgaagtgcacgtgtgattatgtgtgtgaaaaaaaaaaaaacataatacatcgcaatgaaatgagctacaggacatgaaaaaaaaaagggcgg

SEQ ID NO: 105609 - DNA, 1992 bp, Zea mays
  Clone ID: MRT4577_27819C.1
ccagcctgcgtgtcgcttcctctcctttttttctgttcattcacacatgaaaaggttggaccttgaaaaagggagaaaaaaatcaatccgccacctgttctaacacgcgaggagaagaacatggcgactgctgtttcgttaccgtccgcgtgctctgacccctagcgagcccacggcgtcgccctatatataattggggtcccaaccgaaacctctcctcgccgcaacgaattcccggtctccaaccagccgggcagccaccgcagacgatccctagttccgcgtccccgacccgaaccctcgagttcgcacgggctccggccagattcgcgcggtctaagcttcgaatcggcgcatggaggcagcagtagccgccgcactcaagtcgcccaccgccgcacgtccctcgtggcggcccgcggccccgggcgccacctcgctcccctttgaccggaggcgcagctttgccttcggctccatcaagggtctcgggcggcagcagctcacctctaggactaggaggcgaagcagtgtggtcagggcctcctggtccccctcggagtctctgccaccgtcctcgtcgatggcgccgctcaggatggaatcgcccgcggggcagctactctcccagattcttcacacgcacccgcacctgctgcctgccgccgccgagcagcagctcgagctgctccagaccgaccgcgaggcagagaagaataaggataaggagagcgatgctggcgacaagctggctccgacaggtgtcgacctcgtgctgtacaggcggattgctcaagtaaaggagaaggaacggaggaggactttggaggagatactctatgctctggttgttgagaagtttgttgaagccggcgtttccttggttccggcactctcacgctccatcgactcttctggaagagttgatcagtgggcagaaactgtggaaggaaggctccagcgtttgcactcgcctgaggcctatgaaatgatcgagaaccatctcgccctcattctggggcagcgtcagagtgatgccactattgcagccataagtaagctccgtgttggccaggtctatgccgcatctgtgatgtatggctatttcctgaagagagttgatcagaggtttcagctcgagaagacaatgaagagcctcccttggggatcagaagaggaagacggcgctttgtatcaagttatgacgaccgactcgatgccttcagctcagtcttctagctctcacccagagatgggctcctggaccgccgcgcctgacttcaacgcaggaggtcctagcgaatctatcaagccttgtcgccttaggtcgtatgtcatgtcattcgatccagatacgcttcagaggtatgcaacggtcaggtcaaaggaggcctttggtatcatcgagaaacacacagaagcgctatttgggaaagcagagattgtagtcacacctggaggcacggttggttcatccaaggatgagcacattaggataagctttgccgggctgagaaggctggtcctggaggctgttactttcggatcattcctctgggacgttgagagctttgtggattccagctaccattttgtgaccagctaagattgtcatcctaagtaaagaaaggttcgtggtttacgtgtctggtctgaatgtctatgggcttcggaaagacttgtacaatgatgctaggctgttaccacaccccttactgatgcgatggtatcaatgatttgcgcagttttatggcatcgcattatttgtaaagaccaactgccattatcctgatattgagccgttatgttctattaacatctgtgctgcccggggggcgtagcgatgtattttatggctatcccctctgcaaattgtaagaggaattctaggctcatagccaattctttagcgaagctattattctcgttttacagattgccgttatgatgatttgagtctttctttttgagagcacagccatttcgtgctac

SEQ ID NO: 105610 - DNA, 596 bp, Zea mays
  Clone ID: MRT4577_2781C.1
gaatgagaatatttggtctttctatatttttgtgtctcatgtgtttgtgagttaaggagcctttggactacattcggtagcaaatggttcttaagaataaccagtgacaccagttgttgatttccaattctcttgtgcttcaaaaccaaaagatgaagatgtcgcgaaggtcgcgacgcacggcgtcgtcgtccctgagccttgccatggtcatcttctcgatcttcatggtcccactccttggagacgacgcggtacatgcctccgttctcctccagcgacctgccgagcgccgagcgtggccaccaagatggtcttcagtggacccagtcttcagtgggctggctaccttcaccagccagcaacacaggtcacgaaagtagattgcttctgccagcatgggtaacctttgtagccacacaaaatagattcctgtgagacttaaaaaatgttaattgtagctaggtttttcgtttggtactaaagaagatgttggtgtatcatgcatacaatgtagtagatttaagaaaaaaatacgtgatgataaaagcagtattgaagagtgtcgagtaaatcaatgcagtaactatatgttt

SEQ ID NO: 105611 - DNA, 141 bp, Zea mays
  Clone ID: MRT4577_27820C.1
gttatgcttcctctcaactacatgaacaagttcggctcaggtgtcggttcctacgggttgatgaacaaggatggtaagccttaccttgtgaaattccattggaagccttacttgtggtttgaaatgcttgctcgtcattga

SEQ ID NO: 105612 - DNA, 1044 bp, Zea mays
  Clone ID: MRT4577_27821C.1
agcagtggtaacaacgcagagtcgcggggtataatatattttaatttagatatttaaggaggtatttataaacatatcactcatataaggatcttttatataatctcttattaaaacatttatttaagatacaggataaattttcctaaattgtccaaaataggatttgggacgttacacatgaagagtttgctagtttgctacgcatagcactggtttgttgtgctataaacggtcacggttgcacgatggagcagtcaatggccggatatggattagcctcccgcgagcgcacgctgccgcagattgcgcggggcccatgatctccgtcctttgcaggcgttagcgtgggacacaactccgttaacaagtaaaacatctcgttcccaaccaaatttccgtttggctgcgcttttcatctgcggagctcgctatcgttgtttccatccatggtacagacaaagtgtttccttctttatcatgcagacatccttctttatttgcaaaaatgtaaaaggctagacgtttgccacagtacagaggcagcgtatcatacagttgtatttgcaagtgcactcgggttcacaagttttatttatgagggctatgtcgtctcctacagaaaaggcatattttgtcctctcgtacagccatcagctctcaactaagaacaagacactgaaatactaaacaaaaggcaatagtctgaatcaaaaaatatatacgaacatctttagaactagagaataccattagtatcaatatagtgaagcatcttcagaacacataaccaatattttgcagcaacctgaataaaaaattacatgagcacctcctaaaacaccgaaccaacagaccgacattttcagtatcatcgtcatcaaaatctacactggcctcttctgataaatattgtgcattatcctcttctatgttagtcttgccttttacattcttcagctacaaattaaaaacaagtagtaagtaacccaaaaaaaaaaaaaaaaaaaaaaaaaaaaagtactctgcgttgttaccactgct

SEQ ID NO: 105613 - DNA, 592 bp, Zea mays
  Clone ID: MRT4577_27822C.1
ctgacgtggtgtgctgtgcggtgcgatgtgctgtagcgaaattggttgcttctcttgttcactccagtttggaatttgcgttttcaatccggtattgaaggtataataattaactgctaaaaaaaaaaaaaaaaaaaaaaaaaaaaaaaaaaaaaaaaaaaaaaaaaaaaaaaaaaaaaaaaaaaaaaaaaaaaaaaaaaaaaaaaaaaaaaaaaaaaaaaaaaaaaaaaaaaaaaaaaaaaaaaaaaaaaaaaaaaaaaagggggggcccccttttaaaaaaaacaaaattttactccccggggaggaaaaaaaaaatttttttttttgggcccccaaaattaaattcccgggcccgtttttaaaaacggggggacgggaaaaacccgggggaacccaaaataaaagcctttgaaaaaaaacccctttttccaaagggggaaaaaaaaaaaaaggccccccccattcccccttccaaaaaattccccaccctaaaggggaaaggggcccccccctttacgggccaattaaacccggggggtgtgggggttcccccaaggggaccccttaattttgcaaagcccttaacccc

SEQ ID NO: 105614 - DNA, 1200 bp, Zea mays
  Clone ID: MRT4577_27823C.1
ggatttcacgccgtaagtacttttttttacccggcccctattctccatcggataactatttcccgcatcataatctcgctgccccttcccctccgggacccctcgtctgcccctgccctgttacctcgcgcggttagctgcgccagcgaggctcgtatcgccctcctcctcgcgccgcttacttctattctattttgcccggtcccataaattcgaatccaaacgcgcgaccgtcgccgctgcggccgtgggaaaggaaacacagaaaaaggacaacgccgtcgtctcttcctcgcaccagcttcccgctagggtttcccctcttctcggtggaggcgccgcgcctccgggacctggatcctatcaggtccacgctgatgccagcgaggtgcagccgtctttgattcccctcctgcaactgcatcctcatgccgaccatcacgcactacgtgctggatcccttcctcgagacagggtcgcctgcgcaggccgagaaagccacgcccaagccgccgccctcgcctccagacaaggccacacctgtaccggtggctcctattagggcacagacgtcgccggcatcactctatgccacgcctgagagcaccaccttgcccgactcaccttcctcgttccccgggacctggtcgccgtacattatcaaccataagaggcggggggcctcccttgccaagaccgttcctcagggtgatgttggaagtcagggcagccagccaaagctcccagtgatactgcctgctctgcctaaagggggtgaacccactgcagtggaggagcctgagtttgcgtttcagcaatcagggaatgaccaagctgaaggtgacagtggtgtggacgaggcccccatcaatggaaaaaatgaaatgctgctgaagggcaagggatctgtgacggccaaaaatgagcacgagcagcctgagtttgagtttcaccgtggaaatcttgaagcactagtgaggcctgttaatgttggaaggcctttgattggcggagcacccaaaaatgatgagagtgacaccttccttgaacttcaggattccatgagtgtggctagcaatactgaaactgatgatgctggtacccaagagtggtggtggaaaccgagttcccctcttgggatctctgttggcacaccctgtgctgaattctatgatgcatttgaagaaatatcaagtgatg

SEQ ID NO: 105615 - DNA, 361 bp, Zea mays
  Clone ID: MRT4577_27824C.1
gtgacgcgtgcgcggacgcctggggccaggggcgctttttagggagcagacggggccaaccgaagaagacatggatgagggtgacatagaccacagacagagaaaactgggacagaggaagcttccccaaggctctcaatagtaccaggctggtgggatagctgcggacacatatgatgaagatgacgactctgacgatgacaaccagactgaatatggaatggtaattgatgagcaaggtcactcagaccaaagtagttctggactcggatgtagatgcagggagttacttaaccgagaagttttaaggagaaactataggggatactgagatggaatatgaagaaacattgacgaaaga

SEQ ID NO: 105616 - DNA, 780 bp, Zea mays
  Clone ID: MRT4577_27825C.1
ctcgaggccggccgagagtatcttctcgacttcgtgtcggaacctctcgccttctatccaccaaggatttaggatcggaggcgatggcggagaggctgtcacagctgcgcgctcaggcgttgcaggtgttggagttcgcctcgaagacggcgtgctcctactacgaggagctcatggagaagaactacgcatgtacgtcgtagcatacccccaccatcgataaatgacatggatgctctcacaagcagctcttctacacccgcctcgcaagactaccaggacggtatgagtctttctggacaggagcattgatggcgtcaagtctgatggaagatcaggaaggacctccagggtgaggaccttgagattgcgactttatttgcagtcgagctttatcgcatgtgtctgcacaagtcatattgatgacataggtgtcgacttagccggactataaggatctagttgagttgctgtgattgaagatctgctttataaatacacactttatgtgatgcttgtgaagaccacgatgatacctgccttccttctcattgtgattcttgtatgagtctacctagagctgaatggcaacttagacttgcacatggttgcaacattgcctccataatttggccgcgcaattcttgagtttgatgcatgcagttctgtgcctcccgcatgtgctgcagcccctgcgtgcagactcatttcgtgtcttgcgtgctgcccccagaagaaattcgttctgacaaaaaaaaaatgaaaagtggccctccagct

SEQ ID NO: 105617 - DNA, 421 bp, Zea mays
  Clone ID: MRT4577_27826C.1
tgtgaaggccaagatccatgacaaggagtttattcccccagaccagcagcttctgggctttggggccaagcagctggaggatgggcgcactctctcggactacaacatccataaggagagcacccttcaccttgttctccgcctcataggtggtatgcagatctttgtaaagaccctgactggaaaaaccataaccctggaggttgtgagctcgcacaccatctacaatgttaaggctaaaatccaggacaaggagggcatccccccggaccatcaacgtctgatctttgccttcaaacagctgtaggatggccgtaccctagcagactacaacatccaaaaggagagcacccttcaccttgtgctccgtctttcatttggtcatcaagtcatgggacgtttaaactgcctatgttcctgc

SEQ ID NO: 105618 - DNA, 235 bp, Zea mays
  Clone ID: MRT4577_27827C.1
aaatagacggccaagggtccctaataaggcggagcccatcagaacgacactatgctgttctgctactgcctaggtttcctgcatccaccacaccatatcacccactattgctgctgctcgccaaactcaaggccatgatcaaggaggtagctggctggaagctctccccccttgccgcctgcaaagaaaacttccagcacaagctcacggttgaagcccattccctcaagccggt

SEQ ID NO: 105619 - DNA, 889 bp, Zea mays
  Clone ID: MRT4577_27828C.1
aattgcaactggaattaactgaagtctggtgaaatgtcaaaggactacaacagatgatatgatgctaaaagaccaaaacaattgatttttcatctccaattttatgaatccaacttcgcaatcccatactatgataaactgcaaaattacaaatgtcacgccatttattgaacaaaacctctgacaaactatgaatcggccacgtcatccaacagcagattgaagatgaaggttgcatcaaagttcgactctgaccctaaaccgacagagggcattccgaagcggaaaacggactcacaaatcagctctagccgagcttccagcggctaagggccctggcgacgggcggcgtgagcgcgatagtgatggggatcctcacgggcaacagtgccttgttgcagaggagcgcgagcccgagcgggcctccactcaacgccacgagctccatcgtcctgttgcggggctgccgctgctccgactcttcttgcagtacctcactaggacagggcggtagggaggcgtgttgcaggtgctcatcgcgggagacaggggcgggtgagggtgaggcctccccgtcgacggcaacgccgggggagatgccaaatctccggaagacggcttcgacgtcgacgttgttgttgatggcagcgtagaggccgaagatggaggcaaaggagacggatagatggacgcccgcggccaccttgccgtacttcttcacgagctgcttgatcctgccggagaacgccatggccgccagtgaggttacggggtgacggctagggttttggtctctttgcgggggtgcggttcccggccggggtcactctaggtggctgctcttcggaatacccggccggggcagtcccgccggctcgaggtaccaatg

SEQ ID NO: 105620 - DNA, 366 bp, Zea mays
  Clone ID: MRT4577_27829C.1
cccacgcgtgcggtagcagtccgtacgcgcagcgcaggcccagctgatcgcgccatggaagatcataatcatgatacagcagctgattgctcacacgtggctggcggcgatggcgatcagcgtgctccctatcctctccgccctgattctggctgccgccaagcatatgggatgaaccgtattgaccccttccaagcgcctagagccgccggtggcggatggcgctactcttctcgagggctgcctgccatactcaccaggagctggcccggcgtgatctgcgaccagcacattgacgctcggcgagagagttcacgctgagctccttggaagtgaatgtgacgctactggtgggccccgatgtga

SEQ ID NO: 105621 - DNA, 454 bp, Zea mays
  Clone ID: MRT4577_2782C.1
ctcaccttcccgcgccagtgtgtgtttgtgtgtgtgtgtgtgtgtgcgcgcgcgcgcgcgtaggtggtggcgctgtgccaggctccgttcctcctcgacgatccccacgtcggcctcatgttcccggcggacgccatcgctagggccaagcactatctcgccatggcgcccggcggtctaggtgcgtacagtgactcccgcggcattccgggaatcaggaaggaagttgccgacttcatccacaagcgtgatggatatcccagtgatccggaactcatctacctcacagacggtgccagcaaaggtgtgatgcagatcctgaacaccatcattagaaacgagatggatgggatcttggtccctgttccgcagtacccactttattccgccaccatttccctctatggtggttctctggtcccgtactacttggaagaagaggctaactggagcc

SEQ ID NO: 105622 - DNA, 125 bp, Zea mays
  unsure (1)..(125): unsure at all n locations
  Clone ID: MRT4577_27830C.1
gggtacctcgaggcggncgggaagataggggaatagggtggaannattaagnatttgangtnnnagttgnagnaggaagncaaagaggagagaatccatcgagtcgaccaccgagnacggntagg

SEQ ID NO: 105623 - DNA, 908 bp, Zea mays
  Clone ID: MRT4577_27831C.1
atcgcgagcgccgctctttaatgttctagatcgcgtttttccgcgcttttttgcaggtccagagaaagcatctcaaacggccatcatgcgaactttttatctcgttttgaatggtcctccgtgaaccccagtcaaccacagacaatcgacagacaacgcaccacgctcaccaaccgaaaaccccaagaaaaagaatacagtactccgcacaacagccccatggatctctcaaaatcaaaaggcgatgccttccaggtcgaccgcgagcactccggctagcgcctcgagccccacgccttcaccgccgtcccctccgccagcgacgcggatcatggcgcggacctcctcgtccgccgcgggcatcccggcccagtcgaggtaggccttgaggtcctcgaagccgaccataccgtccccgtcccggtccatgagccggaaggcgccctccatggcggagcggcgcccagcgcctcccgcggcggcggccgccgcggcgcggccggccagcaggcgctcgaactcgtcgtactgcacgaagccgtcgcggtcggcgtcggcggccgcgatcatggccgcgaggtcgtcgtcgtcgaaccggtcgccggcggcgggccccgcggcggcgtagaaggacttgaggtcgtcccggctgatgcggccgtcccggtccgcgtcaagcacgtcgaacgccggcctcaggtcgccgccagcgccggagaggtcgagccccaggtaccttccagtggggcacatgttcgcggttcgcctgcttcgccgggactcgcgaggagaggacacagtgggaaaactcggggaacagtctggacctctggatcggaaacgtgagccgattctgcggagggtcgcggctaattgcggcgcgtcccgaattttcgaggccggccggc

SEQ ID NO: 105624 - DNA, 641 bp, Zea mays
  Clone ID: MRT4577_27832C.1
aattcgacgggtgcattcttctttctgatcaatggcccagaaattatgtccaagttagcaggagaaagtgagagcaatctcaggaaggcatttgaagaagcagagaagaatgcaccatcaatcatcttcattgatgagattgattcaatagccccaaagagagagaagaccaatggagaagttgaaaggcgtattgtgtctcagctgttgacccttatggatgggcttaagtcccgtgcgcatgttattgttatgggtgctacaaaccgcccaaacagtattgatcctgctctcagaagatttggtaggtttgatcgtgagattgacattggagtccctgatgaagttggccgccttgaagttctcaggattcacaccaaaaacatgaagttagctgaagatgttgttgaagttcccaatgtctcttgggaagatattggtggtctggagaatgtcaagcgggagttgcaggagactgtccaataccctgtggagcatccagagaaattcgagaagtttggcatgtctccttccaaaggtgttcttttctatggccctcctggctgtggtaaaaccttgttggccaaggcaattgcaaatgagtgccaggcgaacttcatcagtatcaagggacctgagct

SEQ ID NO: 105625 - DNA, 602 bp, Zea mays
  Clone ID: MRT4577_27833C.1
attgaaacaatcatgtttactatcctttgatcacctttcgctggcaaaatttgatctgaagcatgtccaaaggccactagtctctttcggccctaatgcatctacaaagcttagaacatgttctgcagatgtctgtaagaatctaaggttaggttcccgcgtgttgactgactttggagcagatgttctatctacttcaaatgataatggtagttttagcacttcttggcttaggaatctatccgccacttctgattcatggcgtagcagttcaaagaacaccaaaaaaaatacatattaatgacttcgacaatttccattatcatgcacaaccaagtccagtacctgcatcaatattgcaattagctggctcagcatatttgctgagagctaccgcttgggagcactatgggagtgctccaatggtacgaatgaatgttctagtttatgcaacctgctttgcggatgctgcaagttcatcagagttatcactagcatatgttaagctaattcaacaactggcggtgttcaaaggatattcagctgcattctgtgctctaaagcttgctgaaaagaagttcccatcctcaacaagtttacac

SEQ ID NO: 105626 - DNA, 214 bp, Zea mays
  Clone ID: MRT4577_27834C.1
ctagcacttggattgtcatgtgtgtacattctgtgatcaggactgaacagagagaactcaccatggagtttgggctgagctggcttcttcttgtggctatttcaaaaggtgtccagtgtgaggtgcagctgttggagtctggggtaggcttggtacagcctggggggtcactgagactctctgtgcatcctctggactcacctttagtaactat

SEQ ID NO: 105627 - DNA, 269 bp, Zea mays
  Clone ID: MRT4577_27835C.1
catagctcctcccgcctcaccacgcctcgggctccctcccattcccagcgctgtccatgagcaccaccaacatggctatcgcagacatgagttctttgctgacctccctagcggaagaaagcaaattccttgcagttatgcaataggctttaggaaaaaaagactgcaaccaacggaaatcaataggagttgaagagattaaactgactttgttttggctgattttgtagttctgtatgtattttagaatctcatctcacctaactgag

SEQ ID NO: 105628 - DNA, 264 bp, Zea mays
  unsure (1)..(264): unsure at all n locations
  Clone ID: MRT4577_27836C.1
cttcgtgaccgtgggaaatttacaacatcttggcatgagtgcgccatgggcagaagagcgacagggtctgctaaccaaaaggtgcgtgtgtggatcactggcctaagggtcagggaaaagacgctcgctgcgcgctgagccggagctgacggcagagcaccttacgtcgttctcgacggnacaacctaagcacgggctgacagggacctcagctttggagcgaggaccgcgccgagaacattcccatagtatgggaagtagcga

SEQ ID NO: 105629 - DNA, 373 bp, Zea mays
  Clone ID: MRT4577_27837C.1
atacccccgggcgcgtgctcgtatcctctctagcgcgcgccctctttttttttttttgacggcgtaacagaattctccatgggctcatttataaaaccaggggattttaaacctacagcaccttgcagcataaattaaactcagtaccttaacactttaatgagatcaaataactttacaacacactttactctgaaacccaatcaaaactaacaattttattaggaaatacaagcttctttttctacactcacttcctttttccacaaaacaggcctacaagggtacaactttttcaaaaccaaaaaaacacctggtaacctctgtgaccccccgcccccatgttccccaacaaaattcaaagtttcccaaa

SEQ ID NO: 105630 - DNA, 371 bp, Zea mays
  unsure (1)..(371): unsure at all n locations
  Clone ID: MRT4577_27838C.1
cgnacaacacctccagnagctcaacaacagctacaanaggcgggnaactcaagctacaattccagatgccaagccatcatatcctcaatgccgccgccgccattcctcacgagctagagcccccatccttccattctcttttggtctcaccagaccatcatcaagctgctaaagcgcaccaccgtgctgttcagctcatggacgagcatgcagccgaccaggtcactgattggagagttctaccacagatggcccaggggttacatgagagaattggaagggccagatagcgacatcacttgaagggcaatgcttcctgaaccgtgcttaagagtcaatcagaagcaagctgcaatagctagagcggaggt

SEQ ID NO: 105631 - DNA, 358 bp, Zea mays
  Clone ID: MRT4577_27839C.1
gggtgttcgcaagttaaatttgaattcaaacttgaattcaaatttctatggctcatcacttcaacttatatttgggaaattagggatatcaattctgaatatatttatttatatatatttaatttatatatttttttatatcccttctctttttcttatttccaaactctaatttccatttagggttttacccaacctttagaattattatctcattgttattatccttattattttatttaatgggccaacatataaaactccaacatgaagcatattatttttaccattggttttaattcatctccaactttcatgtatgctcttttcatgatgcaaatatggcacataagataag

SEQ ID NO: 105632 - DNA, 637 bp, Zea mays
  Clone ID: MRT4577_2783C.1
gttgaatggtggttcatataaacaaagtcagtgaaacatatcagatgcaaaccaacctattagtacaaaccgtgcaaaaccaacacctggatggaggtgggaggacctttttgaaaatatcatgttttcaaaacaaccctctcacctcccctggatatttttaaaaaggtcctcccgtctcaatccttgtgttggtttgcacggtttacaccaataggtttggtttgcatttgatatgttcccacaaagttattcgctagcttgtagaattaaaatatttgcttttgtggccccataatgcatgtgtttctttgatgttcctagaatttgagtgcagaccatcacacagaaccaccaacatttaatatgctctgcttccgttctctaaggcattttgagtgtttacaccaataagtttggtttgcatttgatatgttcccacaaagttattcactagcttgtagaattaaaatatttgcttttgtgcccccataatgcatgtgtttctttgatgttcctagaatttgagtgtagaccatcacacagaaccaccaacatttaagatgctctgcttccgttctctaagccattttgagtgtttcacatcttgcttctacttgtgatcctttgtgcttaa

SEQ ID NO: 105633 - DNA, 334 bp, Zea mays
  Clone ID: MRT4577_27840C.1
tcccacacatactaaaaaattataaataattaaaaaaaaaaaaataaaaaaaagaaaaatttgttaatataaaaaaggataaagtacaaaaaaataaaaactaatatacaccaatataaacataattatcttcaattctctgttcactctattataaccttctgactttgaaaaacttacttttttctacttaatccaactttaaacatagtccgtttaattcaattctttttaactgaacaattctgtacctttcccactttataacattttgtcagacttcctgtttaatggaattcatcttttatcggcacattcatctctacattctttt

SEQ ID NO: 105634 - DNA, 314 bp, Zea mays
  Clone ID: MRT4577_27841C.1
gttgaaaacggttccatttcaccgcattgttctcgtgggcataaaaaaaaagaaaaaaaataaataaaaaaaaaaaaaaaaaaaaaaataaaatgtgcgggcgttctttatgttccatgctttcttacgcttgcttgcgtcgtatttgcttttttttattttcacctaaattcatttctttggccgtctttttacatcttactgacttgtatatccctgtctttacccatcttaatcactttgcaatacattcatcttttttcagctggttttttatctaatttgtcggcatttttcgccctttcctacttttt

SEQ ID NO: 105635 - DNA, 875 bp, Zea mays
  Clone ID: MRT4577_27842C.1
cattgggtacctcgaggccggccgggatctatccgtcgccagttccttaatcctcatccagcgtgggattctttccggggccgacccagcctgtcttccacctccgtcgctccctggtggccatggcgagctcccctgcgatgcgcctccacgtcccaggccagctcggcctcctccctagcaccgtcccttcccctccctgctgcagctcgcccatctccctgaacccctccaccgcgcccctctccctggcttccgagcttcaaccatggtgtacggcgagatggggctcgggtacatgtaccactgcatcaccatggggagatcaccagggcctccggtgccgtcggtctcttctacggcgcacaccctgtcttcttcctccagacccgtcactccaccggccgtgcttgtctgcagtgcccatggccggtccgcgctcgcgcccacacgaagcatcaggagttcaggtgcgccgaacggggggaagaagcagccaaccacactcgctactcaccagtcatcttcctcgccttgtcgccgctcgccgtcgcttgtcttcagcttgatccccgctcgtcatggcttgtcttcagctcgttcatcttcatgctcggccctgactctacagcgctcccctcgtcgagcttgtggtcgtgcttctattcctcgctccctctgtgttcgatgaaatgtcgagctaggaatcaatgacctcgcctcgtcctcgcaattgtggttggcttgtgtcgttgcctgccccaccgtggtgctcaccaaaacacctgaacccgagttcgtcgccgtccgtgcgaatatcatggctggttcgatcttggtaagcaaaagtagtattcatggtatttaattgatga

SEQ ID NO: 105636 - DNA, 299 bp, Zea mays
  Clone ID: MRT4577_27843C.1
gttgttttttttctgcttttgtttttcttgttatttttgtgcctttctgttttagtttttgtctgtccttttcctgttctatacaagcaaaaaagttcttcaatttttaccgcgaaaaatactctgcttataaaaaacttacggcgcgtttagggaaaaaaataagaactcgcctgttaagcatgagcaccgtctttataaatgttacccttggcagcaagttcatacctcaaaacactacgtggttgaacctagacatgtacatataggacattcagatagggaagcactggaactac

SEQ ID NO: 105637 - DNA, 707 bp, Zea mays
  unsure (1)..(707): unsure at all n locations
  Clone ID: MRT4577_27844C.1
cggggttattaaacaggatcttaagtgtcgtgaaagactacaagaaggcggctttaaattattgtccgctggtgtcatgtcacgagccccagcccgcaggaccggaggagtcgtcggtatccggcccggcccggcctggggtcagacatcgggacatcggaggaaatgaacaaatccacgcgtgcgcgcgcccttggagaacggagagcatacggccggcaacccggcaggtcggctgcacgcggggcccgggccagaccgcgagcgaggtgtcccagtcggcaagccaggccgccacctttggctgtggcagtgtggtggaacccccggaggacaacttcgtggcagttgcatggcttcttcccgaacaaaagacgagacgaaaaacgtcgcgacaggagctcagctcagctaccgggggcggacggtggtcactgttcctccctcgatcgcttggcccagggcgcgcgagaaagccgccaaagagcgcgagggcacgggatcggacgatgcatgctgcaacgcgcgcgcgccacgacaggggagctagagcgatggttccggcgggaccgggccgggccggctcacgcaccgcgcgctagcggcagccaggacgacacgtncttgtccccgaaaagcgggagggcccggccggactcgnactgntgcgcttgcgctgcggagncgacgtgtcgtgtgtaccggac

SEQ ID NO: 105638 - DNA, 374 bp, Zea mays
  Clone ID: MRT4577_27845C.1
aggaaggaattaagcaacagagatccgcgattaacacgacaacactcgctacatacccggacaaaaaaaaaaaaaaacactaatacacaccgccgcaccctaggagcgtatttttacaggggggggggaggcccacataaaaccctaacctaccacgggagatctcacactaacctgggcgggcctgcgtcacatctcacacgccaagcattaaattcacaactaactacccccctagaaaacacacagagacacctatgaaattccctctgtgaacgtcatcattacctacaactactaaattggtctgccaaaacagaaccaactccaaaatcaatgatcgagcatcaccccctcactaacaaacaatacaa

SEQ ID NO: 105639 - DNA, 428 bp, Zea mays
  Clone ID: MRT4577_27846C.1
accgagcaagggacccggggcggagaaaaaaagaaaaaacgtttttttcttttgggggtcccggttcccaaacctttggttggttgcctgcctgcctgcaaaagggagttggtattggggtttaagcccttcttaaaggagctgagggacctgcaaaaggaccccccaacataatgcagggcaggtcctgttgggggggccatgtttaatgggcaggcaccatttttgggaccacctgccagcccttatgctgggggggtttttttagggaacattaatttccggccagattaccctttaaaacttccaagggtttttttaaggacaaaggttttccatcttaattataccagcattggagagttttgcctggccattttaaaagagcaggggagccttgttttgacaatttttaaggtcctgttttc

SEQ ID NO: 105640 - DNA, 395 bp, Zea mays
  Clone ID: MRT4577_27847C.1
acgggccggaatccgggcggaccacacccttcctgaccccttggggcttgcgaggacaccttggttggaggaggagagagaggacgtttttttcttttgggggtcccggttcccaaacctttggtttgttgcctgcttgcctgaaaaagggagttggcaatggggtttaagcgcttcctaagggagttgagggacctgcaaaaggaccccccaacataatgcagggcaggtcctgttggggaggccatgtttaatgggcaggcaccatttttgggaccacttgccagtccttatgttgggggggtttttttagggaccattaatttcccgccagataaccctttaaaacttccaagggtttttttaaggacaaaggttttccatcctaatttcaa

SEQ ID NO: 105641 - DNA, 842 bp, Zea mays
  Clone ID: MRT4577_27848C.1
actcctatgggcgattgggtacctcgaggccggccgctgcaccgtcacggtgatgccgcacatgaagaggctcacgttcgacatcatctccctgctgctcttcggcctcgagcggagcccgctccaggacgccctcgcgggcgacttcgcccgcgtcatggatggcatatgggccgtcccggtgaacctgccgttcacggcgttcagccggagcctcagggccagcgccagggctcgccggctgatcgcggggatcgcgcgggagaccagggccaagctggaaaggggcgaggcctcccgtagcagcgacctcatcgcgtgcctgctcagtctgaccgaccacagcggcgcgcggctgctgagcgaggaggagatcgtggacaactccatggtggccctcgtcgccggtcacgacacgtcgtcaattctcatgacgttcatggtccgccacctcgccaacgacccggacaccctcgccgccatggtccaagagcacgacgagatcgcaaagaacaagggcgacggccagaccctggactgggaggacctggcgaagatgaagtacacgtggcgcgtcgcgctggagacccttcgcttggtgcctcccatcttcggcaacttccggcgagcgatgcaggacatcgagttcgacggctacctcatcccaaaaggatggcaggtgttctgggcggcgagcgtgacgcacatggacacgggcatcttccacgagccggcaaagtcgacccgtcccggttcgagaaccagtcggcggcatcggcgccggcgtgctcgttcgtcgcgttcggcgggggtccgaggatctgcgtcgcatggagttcgcc

SEQ ID NO: 105642 - DNA, 1059 bp, Zea mays
  Clone ID: MRT4577_27849C.1
gggtacccccgggttcgccggctcgctggtcgctactccgcttcactttcctctcccctcgctcgtacccgatcaccaaaccctcgcttcgccgccgccgggccggagcccgaaatccggccccgcaccatggccgcgcggcagccgccggcgctgatggaggagctcgtggaggagatcctcctgcgcgtcccgccagacgaacccgagcggctcatgcgcgccgccgtcgtgtgcaagccctggtgccgcctcgtctgcggaccgggcttccgccgcaggttccgcgagcggcacggggcgccccccttgctgggcatcatctcgaaccgcatgaacgaagccggcgccaagctcgcctgcttcgtccccaccggctccttccgccctccccgcgccgagcgcatcaactggctggcgatcgactcccgcccgggccgcgtgctcttacgcaactcgttttcgaacgcggcggtctacgtcgctgtctgggatcccatcacggacgagcttctggcactgcccaagacgccatggatgatgccgtcgtccgacaccatgtacaactacaaaggagcggtgctttgcgctgcagatggctgcgaccacctggactgccatggcggacccttcctcgtggtcttcgtgggcgtgggcgctcatgacaacaccatgtcctcctacgtctactcgtctgaagctaatgcgtggagtgaacaagctcatcatcagtacttaggtcatctttgggagtcggtaagcagcactcttgtggagaatgcactatacttcgtggtcaataaatctccaggcatcctcaagtacaacctgggcacccgggaaaccactgccattagctgcccgactatgacgaatcctcacgttgcactcatggtggcagagggtggtgggctgggatgcgccaccattaggtcatccaagctctgcctgtggtcacaagaggttggtcctggtggtggccatagcggatgggcactagccagaaccattgagttaagcacgctcgtccctgctggtcattccatacgtgaatttgat

SEQ ID NO: 105643 - DNA, 105 bp, Zea mays
  Clone ID: MRT4577_2784C.1
acaacgggacgcgcactgtacccacccattaagcgcgcatgttgtcgtggatacgctcagagcgaccgatacacttgacagcgtgctatcactgagtcatttagc

SEQ ID NO: 105644 - DNA, 1582 bp, Zea mays
  Clone ID: MRT4577_27850C.1
ccggccgggagatcaaaccactctcaacctcctctgcttcttgttccttgacttccttacactccttctagaaccctctagaagcaatcgcaaaaatgccgctccatcaccctaagcaccgccaccatgacgaagatctcctcccctaccgccgctccgatgacgaggccaagccgcgccggccgtacacccccaccttcccctcctcccccgcctctaccaaccgcctcctcctcttcttcgccgtcgcctgcctcgtcctcgccgctgcctccttcgccttcgccgtttccaccagccgcaaccgtcagtccctgccgcagcctccgcctactgtcgccttccgctgtggccgcgccgaggattcgctccgttccttcctagcggcctcctcgcacggcaacttctctgccggcgacagggagaaggtgctcgctgtcgttggcgtacacacggagcatgggaatttctccgctgcccgacgcgctgcgctccgcgctacctggttcccgctcaaccccgaaggcatcgtaagtttagaacatggaactggattatcatttaggtttgtcgctagacggccaaaggacaaagataaaatggaagatcttcagaaagaggcggatacttatcatgactttttgtttattgatgctgatgaggccacaaagcccccacagacgatgttagcatttttcaaagcagcttaccacatgttcaatgcagaattctatgtcaaagctagtgatgatatctacctgcgcccagatagacttgctgctcttcttgcaaaagaaagacctcagcacaagacatacatcggttgcatgaaaaaaggaccagttgtcaatgatccaaatttgaaatggtacgaaagttcttgggaactgttgggtaacgagtacttcatgcatgcatctggttcactatatgctctttcttctgaggtggttgaagctctagctactgcaaagagtgatagcttaaggatgtttgattatgaagatgttacaatcggcgcatggatgcttgctatgaatgtaaagcatgaagacaaccgagcaatgtgtgattcagtatgtacccctacctccatcgctgtatgggacagtaagaaatgctcaggtacttgtaacgtcgctgacaaaataaagcagctccataacaccactgtgtgctcaaagagcccaacgttgccacctgaggtggaggaggaagaatagaaaccgaaacagttttggcccttgaaaaagctatggcggtgatactccaattagagcactggttttgtcgtcgactgcatttccatactgctgtatcattagtgacctttcaacaccagcgatggagagttcttggagaatcgacaccatcacattacatgtagtatttcgagtctacccaatatgggttcagatgacgtgttgtacttgtaccttttactaatcggtggaaccaatgagggcacagagacattcttggctgtatgatgtagtataaattgtacacagagtgacctatgtggtttcattcttcgctgaccagaaacggtgggcattccatggtttgttttctgagactc

SEQ ID NO: 105645 - DNA, 773 bp, Zea mays
  Clone ID: MRT4577_27851C.1
gcactcgaatccatccatccatcgatcgccttcctctctttttatatcgcacccccccgcttccgctcgctcgatcgtcggagtaggcgggcggcatgctgcaggccagctcggagaggccggcgggcctgctgtgggtgcccgggacgagcccgtggccgacgatggacgcggggccgtcggcgagggcgcaggagatcgcgcggcggcgggaggagatgctggggatgctgcgcgacctcccggagtccgagtacgagctctcgctcaccgacctcgtcgagaaggccggggccgaagccgaagccgaagccgaagccgcgcccgcgaccgcccccaccaaggcagaggacgggaaggacccgggcgccgcgcggtcggcggcagctgcggggaggcacgagcggagggcgtcggcgcggcagcggggcagcggcgggagcagcttccgcagcagcagcgacggcgtcctgctcaacttctacatgccgcgctcgctcacccgcagcttcaccgcgccgcgacccgcccggacgccgtcgttcgcctccggctgccggagccccagcgtcgcatccgactgcaacaagagggagagggacccggacgccgagaccgtcaagtgctggtcgttgctgtgggatcggcggtggcgaaagtccagccggcgggacccgcgcgcgccgcccagcgagggcgagtccgccatccgcgccgcgtcggcagccatcctcaaggcggccaagcactcccctccgccgcccaatacatga

SEQ ID NO: 105646 - DNA, 870 bp, Zea mays
  unsure (1)..(870): unsure at all n locations
  Clone ID: MRT4577_27852C.1
gtttatatcttatatatataattaaagcagcgaagcgaaatgcccccaaaaaagttcggaaagaagactaaggtcaccaaggcatccaaggtcaagagaaaccccctcttcgaaaagagacccagaaacttcagaattggtggtgatatccaacccgtcagagatttgaccagattcgtcagatggcccaaatacattatcctccaaagacaaaagagagtcctcctccaaagactcaaggttcctcccgcattgaaccaattccaatccaccatcgacagaaaccaagccaccactctcttgaagctcctcagaaactacgctcctgaaacccccgaaaagagaagagaaagaagattggaagctgctaagctcaaggctgaaaacaaggcccccgctgacaccaaggcccctattgcccttaagtacggtttgaataacgtcactggcctcatcgaagacaagaaagctagactcgtcatcatcgccaacgatgttgaccccattgaaactattgtctggcttccccaactttgcagaaagcaagacgttcccttctgcttcatcagaggtaaggcaagactcggtaaattggttggccttaagaacgccagttgcgttgccctcaccggtatcagaaaggaagaccaagctactttcgataacttagttaagactttcaaggcccaattcaacgaaaacgtctccctcagaaaagaatggnggtgggtggtcttttgngacacaaatccagacaagctcaagaagccaagcaaagagctattgaagctgaancactcaagaaggctgctnctttaatagtgggataanaatatataagctgtgctaatctagntttatgggcgctac

SEQ ID NO: 105647 - DNA, 321 bp, Zea mays
  Clone ID: MRT4577_27853C.1
caccccgaatgtaaaatgggggatggcattggagggccaatccttgggcgaaatgaaacagggccaaaaaacatccaaaaggttaggtggggtataagggggtaaaaagaacatttggtccaatcaaaaaaaaaactttttttggggcgggggaagaaatttaacagggtggaactggaaatttggcctaagttttcatgatacacccggggcttctaaataggtcacatttgttttttaagggtggcctcaagcctttgtttcaatttttgtggaaaagcaagccagggcctcatacagacccttggaggttggggaaaa

SEQ ID NO: 105648 - DNA, 235 bp, Zea mays
  Clone ID: MRT4577_27854C.1
tttaggaaaggttgtacccctggcaggaccgggcccgaatttccggggtcaaccaacccttccgggaacccttggccggacccttggcccagaacttgttgtcaacccccggggccccaacggggccaatggtcggacgggtcggcccccacccaaaaggagtttttaagaacttttcccaggtccttgggcaaaatgggaaaaatccagggcttgacgggaagccagggggaaa

SEQ ID NO: 105649 - DNA, 517 bp, Zea mays
  unsure (1)..(517): unsure at all n locations
  Clone ID: MRT4577_27855C.1
tttttacaggagagggggcgacgagaggcgcttagtcctagcgcgagcgcacggaaacccatctccaccgcgagcaccagcgtagcagatcgagctagcttagctagcgcccagtagccagccccagcagttccccttcagcgtcccagccagacaaccagaacagccgcgcacggggggaggttgttttttttatttgtttgacacacacagcgtccagcagcccacnncgcaggggcgcgtgggggctgaggagcttccagagaagagagacagaggcaagcgtgaggcactagggcagaggaaccgaaggaagaagagacctgagcccacacattcagactagaagagcagcctgagaggcccatacagcacagtcagcccgccagtcagtaagccaggcaagcgcgcaaaccctcccatcagcgcaatcatgcagacagaaccgagccagccctagattcaccatagggagaatcgggaaaccaaacggcgaggcacagcatcagaggcaacc

SEQ ID NO: 105650 - DNA, 391 bp, Zea mays
  unsure (1)..(391): unsure at all n locations
  Clone ID: MRT4577_27856C.1
ccggccgggcgacttctacaaatatacaaaatggagacaattaccaacaaactccagaacgtcatgggtactgccactgggccgtacagcggaaagactgcccttttgctcggcgccggttttgtcacacgcccaaccgtagatgttctcgcaaagtctggcgtcaaagtcacagtggcatgccgtaccttggaaaaggctcaaggcctagctaagggcattcctaacaccaacgccattagccttgacgtaaataacgccgaagcgctcgacgccgaagtcgccaaggttgacgttgncatctctctcattccctacacatttcacgccactgtgatcaagtcagcgatccggacgaagaagaatgtgcgcccaacatgatatgcctccc

SEQ ID NO: 105651 - DNA, 1210 bp, Zea mays
  Clone ID: MRT4577_27857C.1
attccggcgaacgatgaggctagcgggaacgaggtcatcgccgacgcacacgttctccctgcccacgcgtccgcctacactgatggagttacgcttttggcctacctgaaagctacaaggttggcatccggctacatcaccgtcccgtacaccgcgctggacgcgaagcctgcgccgttcatggccgccttctcgtcgcagggccccaacaccgtcacgcctgagatcctcaagcctgatatcaccgcgccaggggtcagtatcctggcggcgttcaccggggaggcgggaccgaccgggctcgccttcgacgaccgccgtgtcctctttaacgccgagtccggcacctccatgtcgtgcccgcacgtcgccggcatcgccggactcctcaaggccgtccatcctgactggagccctgccgcgatcaagtcggcgatcatgacaaccgccagggtgcaggacaacatgaggaagccgatgagcaactcgtccttcctccgcgcgacgccgttcggctacggcgcggggcacgtgcagcccaaccgcgccgccgacccgggccttgtctacgacgccaacaccacggactacctcagcttcctctgcgcgctgggctacaactcctcggtgatcgccacgttcatggccggcgccggcgacggccacgaggtccacgcctgcccagcccgcctgaggccggaggacctcaactacccgtcagtcgcagtgccgcacctgtcccccaccggcggcgcgcacaccgtgacgaggagggtgaggaacgtcggccccggtggcgccacgtacgacgcgaaggtccacgagccgcgaggcgtggcggtggacgtgcggccaaggcggctcgagttcgccgcggcgggggaggagaagcagttcaccgtcacgttcagggccagggaagggttcttcctgccgggggagtacgtgtttggccggctggtgtggtcggacggacgcggcaggcaccgcgtgaggagccccttggtggcgagggtcgtgaacaccaagaagaagcacatttccatagcttgacgaactcgcttaggatctcatgcatggtgatgagctgagcagtgaagcctggccaaagaaggtttggcttcatgaacaatataacgatatactgacaaagtgacaacggaaacggatctgcagtggtctaaaagttcagagatttggttcattttct

SEQ ID NO: 105652 - DNA, 391 bp, Zea mays
  Clone ID: MRT4577_27858C.1
atttttttttttttataatattttaattttttgattatttttttttttgagccattctttttaacttttgaacttaaaaaaaaagaaaattaaacgggtttttttataaaattttcgtgtaagggtcaaaaagattttaatttattaggatagataaatgttttaaactttacaaataagaataaacgccctgcgtgttgtggagcaataaacctcttcaaaaaaaaggggtgctgttttttttgaaaactaaaagaatcaatgttttttttataaaattcggattaaaatgacattgccaaaaaaataaaaaggggtttttttacaaaaaggtggaacaagaccattttgggcaaattaatagcaatcctaaggaaaagttttttttttt

SEQ ID NO: 105653 - DNA, 251 bp, Zea mays
  Clone ID: MRT4577_27859C.1
taatgctgacaatcgaggggactttctttaccacacagacatcttgattatcccaccagatatcttgtcacattcaatgacctgctcaaccaacttatttgagcttcagttgttactgggacaaccccttattaaaatcaaagcttggagctccgtcttaaagtggggagctccacattgaattaaccaagagctcattatgtactgcgtaagaagcacctatgtatgcttatcttggaagggacacccaa

SEQ ID NO: 105654 - DNA, 381 bp, Zea mays
  Clone ID: MRT4577_2785C.1
tgatgctgaacgtccacgcgaggaccaacgggctgcattacttggctttgctgaactcctacccgtgtgttcaaagatacctgcaacctcattaacgagatgagactactgtactaggtgcagcagggaaggctagacatgatatggcacctccagatgctgttgaaccactgacgaagcggacagtgaattactacgggcatgagcgatctcgcacagaggctatggctgttggctcaaatgctgtgagagagagaccaatcagaatacgctggaagaggaatgaggatctccccaacacctcgggcatacaaaaagtcccatgagaaagcagttttgattgaagctcgttcgctgatcacactgcgcagagagatccgt

SEQ ID NO: 105655 - DNA, 301 bp, Zea mays
  Clone ID: MRT4577_27860C.1
tgatcttctccccttctctgccccgaggtcggttctaggacacgggcacccggataccgaagcgcgccccctcggtcccagccaaaagcatcgcagtttctaatcagtgtggagagcacacaacaatgtccttcgtgcagctatctggtgctagagtccctgcagtggccttcacgaacaacagcctagtctctgggcacgcaacgctacggagctgatcgtcgaggcgctccataccgagcctgggcggtaggctgcaactgtcgttaccccaaagtacactataatgaagcctctggga

SEQ ID NO: 105656 - DNA, 636 bp, Zea mays
  Clone ID: MRT4577_27861C.1
attttttttcttttctctgatacccaccgcgccccttttgctcccgtttttacaaagctaaagctggtctgcaagccaaacacttcaaaagctatgcaactttaaagatgagctaatttactttgaagttcgtgaaggtgaagctaagttagtttttgtgaatcagagcagtgccaaaccccactcctttttctgagtgtatttcaatgtgaaaccatatgatagtcatggtaagtctcttgtgaacatcgttaacaggagcacccggaatgggagattaagaacggtgctgtcttcttccagaaggcgaaggagtcacagccctgcaaggagatcccatccttgcagcttatcaaccagacgctcagctacgccagggagctggagcgtattgtatgatttaaaccaatccctggtggttctttttccccctgtgaccgcttggcatggcttgtactgtcctttgcatttgggatcttctttgatcgcagctctcatctgactgaaacatcatgtgaatctctgaagggctcagtttctccggcattattctgttaacttcatttgtatttcaccacattaactgcattgcttgaaaaatgcccggcattcactgctgctgtgaacttttgattg

SEQ ID NO: 105657 - DNA, 1205 bp, Zea mays
  Clone ID: MRT4577_27862C.1
aagcccatcaaaagttcacagcagcagtgaatgccgggcatttttcaagcaatgcagataatgtggtgaaatacaaatggggttaacagaccaatgccggagagactgagcccttcagagattcacatgatgtttcagtcagatgagagctgatcccaaatgcaaaggacagtacaagccatgccaagcggccacagggggggaaaaagaaccaccagggattggtttaaatcatacaatacgctccagctccctggcgtagctgagggtctggttgataagctgcaaggatgggatctccttgcagggctgtgactccttcgccttctggaagaagacagcaccgttcttaatctcccattccgggtgctcctcagggcttgcgtggcagaccggggaacccatcgcctccccacgccattcttatctcctcgccaccgcttgctatccgtcgcctcgccgcgcgcgcgtacgttcggttctcggccactgctcagctctcgctgcagcgatggccctgcaggccccgtcactcatgcgcgcgccggcggcacagcggtccgcgccgccacggccctccttctccgccccgtggtcgctgcggctgccggcgcctgcgcggcgccgggtggccactgccgcgcggatcaccatgcgggtcgcgtccaagcaggcctacatctgccgtgactgcgggtacatctacaacgacaggacgccgttcgacaagctggctgacaactacttctgccctggtgagaacgaattccaaccgattaatgtccttctcttcttcttgtctggtcgtctgggtgattttgaacctttttgcaaatactcctagcgttgtatacggttttggatgacagcagcttcgaaagtgttgaaaacatccacttgcaacgcgtggtaaaacgttaacaagggcatacaaagtggagtatttgatgaagcttgttgtaactgaactggaatacagatactacttgattttgagttttcagacaccttacaaaatttaatagcaagtgccaagaggactattttgagagcaccatttccgattacctatgaacagcacagcaagaagacgctccttccaaaaaattaaaaaaaaaataaaaaaatcatctgttcttccaacatttctgatgcagtttgtggagctccgaagagaaagttcagaccctacgagccggcagtct

SEQ ID NO: 105658 - DNA, 398 bp, Zea mays
  Clone ID: MRT4577_27863C.1
ccggccgggctttcctgctaagcccgggctagctaggaagtaacacactctagtagcatcccccatcatccagcctcgcggtcgctacagttagcttcgctttcctccagcccatccttctatacacgattgacctgagctgagccgcctccgacccgtctcgagagggagggagagggagagggagagcgagagctagcgcgcgcgatcgcaaagagagcggtgaaagatgaaggtgcagtgcgacgtgtgcgcggccgaggcggcgtctgtgttctgctgcgccgatgaggccgcgctgtgcgaggcgtgcgaccgccgcgtgcaccgcgccaacaagctcgccggcaagcaccgccggctctcgctgctcggcccggtggcgccgtcctcattgt

SEQ ID NO: 105659 - DNA, 867 bp, Zea mays
  Clone ID: MRT4577_27864C.1
gtactctcccttcgcgatgccgacgatttcctcgcgttgcctcccttcgcgccgccgcctccctcgcgtcggccgtcgcctccccccacatcggccgtcacccctcaccggacatgaaccaattagagagctcaagtgttactcggggaagagggaaaaacaaaaggatctggacttattatgaggatgaggagttaattaaagcactatatgagatatctttagatccaaagtggaaaagtgagggaggttttaagaatgggtattgttctgttctagaaaatgaactcaaagcaaggctaccagggtgtggtctcagtgctattccacacattgagtctagagtgaggcattttaggaccaagtatggttctattgaggtcatgcttgctaagagtggttttaatcagatgacgatgcttttcgcgcttcctgagactcttaggagagaattcatcctgaacatgattgcagatgaagctcaaaggaagtgacttgtcaaattatcaatgaagaatgtcaggagcatttggtgaagagtgatcggcatatcaacttctggaagttgaattttgaagacgtttgaagtcctaagacatttctagaacatgaaaattatgaattcctaaggctagctttttttgactgactgtgttgttgactttgtgtgaaaataacccgttgtttgaaacctattatatttgctagctttatttgctattcagcaagacatataaagttgctagctttattggttgtctgtgttttcaactgtttgtgaaaataaccagtataaagttgttgtttagaacatgttatttgtgctagcgcaaagctgaaaataaaatcagtattttgtgcgccatc

SEQ ID NO: 105660 - DNA, 347 bp, Zea mays
  Clone ID: MRT4577_27865C.1
cacccgtgcgtaagctcggaattcggctcgagcgcagttccacttttttctatcgaagaatcggccgcggtggctgggggggctagtgtatgccctcgtcaggacccaccccaccctagatcaaagcctcgtctctgaagaggcgagatggctggcatgacctatttgcctatgaggccggcactttcgtactgaccctttcttcacgggtgtcctccggcgttggacttccttcgcccatgaccactttaccgtgagaagacctgacattggatggtcaaggctttcacaaggggtgctggtcaccaccaaattgaagagtttctctgcgagagggaaagaaccaa

SEQ ID NO: 105661 - DNA, 308 bp, Zea mays
  Clone ID: MRT4577_27866C.1
accttcagaacggagtattatactatgattgtatctgtctggagccggagaccggtaaatctgcctacgaataagaccgctcatgctgactgtgatatgatgctgcgtcataagcatagagcaattgactgtgattggcaatatggcgctcacactgataatctgcaattgttgtccgtatttacgattcttccactgttaccatatgtattgatggatattacattggtttcaattccaaacaagttatttttttttacttaattttttatcctattcaatccatgcgtaatattaataaccgaatg

SEQ ID NO: 105662 - DNA, 1616 bp, Zea mays
  Clone ID: MRT4577_27867C.1
cctcgaggccggccgggaaacatatcactcggtccgcgacgctttcctctcccttcgcgacgccgacgatttactcgcgttgcctcccttcgcgtcgccgcctccctcgcgtcggccgtcgcctccccccacatcggctgtcacccctcaccggttgctattatcttgttgatgctggttacacaaatgcaaatggtttcttagcaccatatcgaggacagaggtatcatctaggaggtttcactactcaaaacccaccacatagtgctgaggagtacttcaacttgtgccatgctagagctaggaatattgttgagagggcatttggaaggctcaagggtcggtggggaattttaaggtctccatcgttttttccagtcaagactcaaagtcgaattataatggcatgtgccctcttgcacaacttaattttgcaaaatatgtctagagacccatttgaaaatgatgaggagccagctatggatgcatcatttgaagttatggatggagaaatcagtgaaccagaatttatcacaggtgtctcaacatctaatgaatggactgatttccgcaataatcttgctcaggggatgtataatagatatagagctaggtctaataactaaggacatgaaccaatcaaagagctcaagtgttactcggggaagagggaaaaacaaaaggatctggacttattatgaggatgaggagttaattaaagcactatatgagatatctttagatccaaagtggaaaagcgagggaggttttaagaaatgggtattggtctgttctagaaaatgaactcaaagcaaggctacccagggtgtggtctcagtgctattccacacattgagtctagagtgaggcattttaggaccaagtatggtgctattgaggtcatgcttgctaagagtggttttaattgggatgacaacagaaaaatggtgcaatgtgagaaacaacaatattaagcccattgtaaggataatcctgatgcaaagggactttatggtattgcatttccacattttgataccttggctgctatatatggcaaggacatagctactggagaaggggccgaggggcttggtgaggctgtaattaacatggagaaagaaatagctatgggagaagattgtccagtagtggaagaggatatggtttctatggatacaccacaatggtctatggataataggaactcagatcattcaacttcatcgagcagcaaaagaaggaagaaacacaaagataatatgtcaagtgacccattcttggatctagcaagtggaattcgtggtgatcttaacaaaacctcacaacactttggaaggatggcagaagtgatggagatggaagcaaaaaaggatcaaatgcaagagttacaagagaagtttgttgttgagttgactagacttggttttggtgaagctcaaaggaagtgacttgttaaattatcaatgaagaatgtcatgagcatttggtgaagagtgatcggcatataaactcctgaaagttgcttagatctacttgagcaagtagatatgtttaccggtgaaacatatgtttacctgaagaccaagaactctgcggtctataagttgcttgct

SEQ ID NO: 105663 - DNA, 321 bp, Zea mays
  Clone ID: MRT4577_27868C.1
tagacgtacgcatcagtataagcttcctaaagctcgtgctcgctaacatacatagtcaaactgtatgaggtggcggggacaattgtatgctaggtgggcttcatggacattaactataaataaatgaataaatgtttgatgtatgaagatcagctctagtatgctatgtatgactccatattcgtcgtattatgacatggtgtgctcatgaagtcaagtgtgactagtgtatatattgtggaacgataacaattgcataattaaagggctgtgcagtggcattagaaaatactagcttaacgatgttgtcaatatgatcag

SEQ ID NO: 105664 - DNA, 304 bp, Zea mays
  Clone ID: MRT4577_27869C.1
ctctgaatccggctcgaggggcaggctctccccggaggctcagccccctctgctccccatcgacgcgaggcacaacctgcacctgtgtctggcccaccacccacctctggtctgtgccactttgatcctgctgctccttggcctctctggcctgggccttggcagcttcctcctcatccacaggactggcctgcgcaccctgacatcccccaggactgggtctcttttttgagatcttttggccagctgatcctgtgtcccaggaatgggacagtcacagggaagtggcgagggtctcacgtct

SEQ ID NO: 105665 - DNA, 344 bp, Zea mays
  unsure (1)..(344): unsure at all n locations
  Clone ID: MRT4577_2786C.1
aaatanggtggtggccgcggccgagaccgtaattgttctgatatgaagtgctatgagggcggtcaacnaggccacttaggacctgaatgacgctcacggatagaaaccggagggctgggaagcggaaggcgacaaagccccagtcctagatatgcccaccgcagccaaacttgcacccggagcccaagacatcctcagagcccacgctatgggaaaaagagctccaaacaacgagatcaatatcctaggaacctacaataccgacatgtccacacgcgcagctcctgcccacccggtcaatcaggatttcctcactggcaccaccccttacgaacaacttcatc

SEQ ID NO: 105666 - DNA, 834 bp, Zea mays
  Clone ID: MRT4577_27870C.1
gtcctgttgcgaggccccgccgcatctggccccgcaaaacctatctcgactgccttcctccccgatctcgcccctcctcgcctggcgaccagatccgcttctccgatatccagatcttcggagcacgccccgctcgccccggccaagtcgtgagttgagtaagggaggcagcagcagcagccatggcggcggcggaggagaacagctcgctcttcctgatattcatcctgaccatgatcgcgctgcccctggtgccgtacacgatcacgcggctgtgccacgcggcgacgaagaaggccaagaccatccactgccgctgctccgggtgccaccgctccggaaagtaccggaagtcgatctacaagaagatatccaacttctcgacgtggagcaaccttaccattttgcttctctggatcgttgtgatcttcctgatttactacatcaaactcagcagccgcgaggtccaagtttttgagccatacagcattcttggactagaaccaggggcatcagaatctgaaatcaagaagtcatacaggagactctctattcagtaccatcctgataaaaatcccgatcctgaggcccatacgtactttgttgaatctatctccaaggcgtatcaggcgttaactgatcctatatctcgtgaaaattatgagaagtatggtcatccagatgggcgccaggggttccaaatgggcatcgctttgcccaagttcttgctgaatatggatggtgcatctggcgggatatgcttctaggaattgtggggctttgcatactcttccctttgatgatagcagttatttatttatcaaggtcatcaaa

SEQ ID NO: 105667 - DNA, 2379 bp, Zea mays
  Clone ID: MRT4577_27871C.1
atgagacaatcgggcttagttgtgacagagggaaccgttgaaaaaggtacttctagtgccgaagctgagcaggttgatattgaagaagaaaatgctaatgaagaagaagaatattatagcattttgatcccatcaaaacccagtcacttggattttgagaaatctactgtgtctgaagtcgacatgcccatgatgatgaaactgggatacttcggagaagctgaaaagaagcttgttcgttttgccggagaaaaaaccactccaacgccgaaggatgatgaagtagtggttttcaaaagctttttcagggcaggattacggtttcccctgaacgagaggattggagaagtattgaagaacttcgaaatttatcttcatcagctgacccctaacgctatcgttaggctaagtatctacatctgggcccttcgaagccaagggatgaacccagatgccgaagcattttgccgagtgcacgagctacactaccaaacgaaggccagagcagatgggttgcatgaaaattttggttgttataacttcgcgtaccgcaaggatacgaaggctccagtcctcagctatcacaccaagtggccaaccagctggaagagcaaatggttttatattaaggtcgatgagaagaaaagagagaaactgatgacgacggtgatgagcccgctggccttgagcttcggaatgaccagacctttgtgcaacatcaagccagggtcagcatgccaactgtctgtatcagagtttagggtggtggctgaacagatcagcactagagatctggttcaagaatacttggccaacaggacgtctccgacgttaagtgaatttagcatgccgaagctaaaggggacgaagaaaacacttgagcttaagcagttcaagaagccttgtcaagagtggctggagatgattgagactatgtgcaatgaagttttgggcaattataccaaaaaagaagatcaattaaagactgcagccttcggcacccgaccgaaacgaagattgaactgggtaatggacgctttaaactttgaataccctgattatgaacgactcagcaagggtgtcaaagggacaaagagaaaaagggttgttagtgttctgagcagacagactgctagaatggtgaaagaggatgaaaaaactctgaagaagagaaaatctgcgacttcaaagaagagaagagctgcaactccagagccgaaggtggctgagatggaagaggaaactccttcaacgccttctgctgccgaagtagaagaaattttaaaggtaatgactgaatccttacctatcaagatgctaagtcctctggggccgcaagtgacgaagcttttacagaagaaggacgagccttcggcagcaaaaaaggtggctaggcctaaaaagcagagaattatcaccgttatgcaagcaattgaggaaacgccaccgccagcctcagcatcaaagatgacaccagctaccaaagcagatactactgccgaagctgcggccgccgaagctaccaatctagagagtacgatgtctgctattgataaagtgctcttggatatagccacagaggagaccgccgcagctacggaagaaatcatggtcgtagcgcctgagaaagagaagagaattaccgaagatgcttcggaagaagaaaacttcaaccttcggaacttaattggtgaagaattatccgaggctgagaaaaaagagctacaggagtatgctacatcctgtggctaccagccaggggccttgtttttcagtggcgtcgatgaagaagccttagggtgcatccgagaccgtaccggggcaaagattatcagcactctgtcgaagtgtgttggttttccgaagcttgaagctaacatcagcagctaccggcgccagcatatcggcggcagcctattctattctaattttaagagtatgctgctgagcaaagcattgaggatgcagcaggatattgaagataagatgaacgaggttataatcgatgacttggaaaagaaagttaaagatcacaaagcttctttggagaaaaggacttccttcttcagacaatggagggtcttcaactcagtgggagccaactctgaaaaatttgaacctttggttgaagacctgccaggcacctttgagcatattgagaacgaagttgaggtgcttgacaaagtaatagctgggcacgacgacttctgtgccctgctagcttctcacggcacagttgtggcttttatgaaggtcaatagtccgaagcttgttccagagattgctgaagttgctgaaccagagattgctgaagctactgaaccagagatttctgaagttgctgaacagaacttagaaatgtttgaattatctttgtaa

SEQ ID NO: 105668 - DNA, 408 bp, Zea mays
  Clone ID: MRT4577_27872C.1
ttttagagaaatgcttttgatatagtgtttggttccggagtatggtgggacagctcctaattttttgttgtttggattggttccatgtagtatagagttttccaaaaaaggaaaattatgctcaaatgtcggaccatcccgctctgcaaaatctctcggacggagccgctccctggaatgtagcctttctatccaattggctccggaaccaatcactactgttagttggttggtatccgctgctcttcgtgagaattatgaaaacgttatatgcctgtatttggcatagcctgatgcaatttatttgaattggcaaagtagcgtggcgttgtccgcatctagcgtttattaatacctacttttaagatcaatggatgactaagtgccctagcttttgcagtgccagga

SEQ ID NO: 105669 - DNA, 282 bp, Zea mays
  Clone ID: MRT4577_27873C.1
atcagagagttcatacgggagagagaccttacgtatgtaaagaatgtggcaaatcttttactaagtgttcaactcttcaaacacatcaaaaaattcatactggagcgaaaccttacaaatgtagggaatgcaacaaatcctttacccaggactcacatcttagaacacatcagagagttcatactggagagagaccttacatatgtaaggaatgtggcaaatcttttactaggtgttcatatcttagagcacatcagaaaaatcatactggaagagaacgta

SEQ ID NO: 105670 - DNA, 210 bp, Zea mays
  Clone ID: MRT4577_27874C.1
agggcaaagttcacatgacattgatagagcgcgggatatttttcaagcttccaggcaagttttcttaaagttgaaacccaaaacaagatcaacaatttttagccgatcaaagggtcaggcacaccaaagttgcccctaccgattttttttttttaacttgggacccggacccagcccccttctttaagggaggggggacttaaccggggg

SEQ ID NO: 105671 - DNA, 377 bp, Zea mays
  Clone ID: MRT4577_27875C.1
acaatcgacctcagtggtctaatgctttttattaactttccttgttgatactttgggccaaaaagggtgtcaaatggtttaagctgagttgaatgggcacacaactgcgcatatatgatgcatcatcagaaggggggggggggcagattctgtgccactaccatcatgacagggaagcataagcaccctagttctttgggccccaaattagttaaacaccctagttcttctttgggggttctcttgccccaaatatggttggcccaactcttacattggggcttgccatttcaatcggtggggcaaaatcaggcggcatgcccctgggcagttggcgctggtcttgggggattccaagctccttggacacctgttgc

SEQ ID NO: 105672 - DNA, 270 bp, Zea mays
  Clone ID: MRT4577_27876C.1
ctatattattttttttcctcccccatatagggggggcattttagtattaggagactaacttacaaggaaattgattcgcaagatgttcttaaacacaacaacagtttttgaccttaaaaaacgctggccgtcaacaaggtttgcatgcccgttggccgggggcatggcacatttccccaaaaaaagaatgagctttctgcccacacgctctgcccacattacggattgattaattcaccctaaaccttaactccttatcgggatcgtttg

SEQ ID NO: 105673 - DNA, 882 bp, Zea mays
  unsure (1)..(882): unsure at all n locations
  Clone ID: MRT4577_27877C.1
ttgggtacctcgaggccggccgggagcaaagcgcgcaccatcctctgaagctgacccccttgcacacctgcaacgatgatgtgctccactgcagtgctgctagttcgcacatgcgttgtgcttgtgtgtttggccgccttggcgcgagcgccggccaaggtccatgctgccgccggcacgggggatgggctccttgttatccctaccaccgcctccctgtcgcactgcccctctcgctgcggggatgtccaaatctcgtacccgttcgggatagggccgggctgcttccgtcaaggcttcgaggtcacctgcgatcacacagctccttctcccaggctcttcttcgtgtcggggaacagctcgatccaggtgacttctctatatgtcggcgtcaatatggtttgggcttcagctgttgggttcaacgtcaccatgagcgcagacgtggacacctacacccagtcttgggaggcccctactggtgccatttttgatggaaataataatctgtacactaattggctgtgggtgtcgacgtctacatatttggtgataatatgacagatatcattggttcttgcatgaatatttgcacagatgacagagagatcatggagacggcaaataatgggttctggtgcctggggaaaggggttaggttgctgcgcgattttggatttgcagtaggtggccgccaagacttcactgtcaaacttgtccgccgcaatagtgccttncccacgttcggtgagcggctctccggtgtcaagattatcttatcggaatactatgacttcgnttaccgatgatggtttatggcaangttgggtgaatacaaagcaatgttcacggcatgctacttgacattgcaatcacggacca

SEQ ID NO: 105674 - DNA, 410 bp, Zea mays
  Clone ID: MRT4577_27878C.1
tgtcgcgctgctgctgctagttgctgtcttcctcttcctctgcaggaggaacagacaaccgcacaagcatgtgcaggttgcaagcagcgtacacgaagatgaagaggacatgagaagctctgagtctctcctctacgatctgagcactctgcgagctgccacggacaacttttcagaagaaaacaagctcggcgagggagggtttggcccagtttacaaaggcacgctgcagggcgggcaggacattgcggtgaagaggctgtcagcaacttcgcagcaggggcaggtggagatgaagaacgaggtggtcctgttggcgaagctccagcacaggaacctggtacgcctgctcggctgctgcaccgaggagcacgagcggctcctcgtctacgagttcctcaccaacaaca

SEQ ID NO: 105675 - DNA, 322 bp, Zea mays
  Clone ID: MRT4577_27879C.1
gcttcattgttatgtttggtgtctgttgttttcttgggggcccatgcatcaacaagaccctatctagtgaagttgtaattgtacatttgcattccgaacattaaccgaacacctggatagcactgccaacagacagagtctcaattacattcaagaggggatatgctaactggaccggtgaccacgcaccggttgaggaagactgggagccatgaatcagatcgcccgctcgggcttgaactcactgtcagcgtacgatttgcatatccctacactggtccttgggccagtactccttgtattggacccaattcttgcgaaa

SEQ ID NO: 105676 - DNA, 295 bp, Zea mays
  Clone ID: MRT4577_2787C.1
gacctgaaactatcatttttttacaagcgaattgtcttggacgataaacaacttaattcacgcaagaaccggcaaatattcctgcgttccaaacgaagcaactcaggtatgtaccttctctcgtttagagagcgaagcaaagcactgaaacaagaccgaaagagaagagtttatgtttgttcagtatttgacagcacgcggaacaccaagcgatccgtatcaacgacgcaggacgggcttcgacgggtccttgggatccccggcggcggcggggctgcaagagaacacgttcacc

SEQ ID NO: 105677 - DNA, 615 bp, Zea mays
  Clone ID: MRT4577_27880C.1
cattgggtacctcgaggccggccgttatatctcgccctctatatgaaagatctgagatcattccacctccacataatcttctgatgcatgacggaggatctaagaaatgcactgttatacttcttaccacgctgtcgaaggaattcaataaacatgacaggaaaccatcgaagtatgttatacactgcgacgaggcatctaaaccaaaacatctgttgccgaaatacacatcgcgacattgtgatatcaaacggatcctgacttcagagatcttcttcaacccaaagatgtataacaatgacttcaccactcccttgaaagttgatatccacagaatattgtcttgtctgagaggatcaacgtatgtttaaagatttccataagacgctacggcgaggacctcaaaaatgatatgggatgcacggtcccctgcatctaatatttcggattcttagagcacatgctaggggccagcctatagaagacgactgtggtcagatctaccctatatcaagatatgcgtgtatgagatcgaagtatctgagcttgattctactgccgaattctacgaccattgccgcacaagagcacagcatgaataatacagtgctagca

SEQ ID NO: 105678 - DNA, 1208 bp, Zea mays
  Clone ID: MRT4577_27881C.1
cggggaacaccttatgttagaaaaggttggctggtccgtcaagttattctatacttgatatttactggtctccaaggattcattattgagcaatacataaatcctattgttgtgaactctcaacatccattgatgggaggattactgaatgctgtagagactgttttgaagctctcattaccaaatgtctacctgtggctttgcatgttttattgccttttccatctgtggttaaacatacttgctgagattcttcgatttggtgaccgagaattctacaaagactggtggaatgcaaagacaattgatgagtactggagaaaatggaacatgcctgtgcataaatggattgttcgtcatatatattttccttgcatgcgaaatggtatatcaaaggaagttgctgtttttatatcgttctttgtttctgctgtacttcatgagttatgtgttgctgttccctgccacatactcaagttctgggcttttttaggaatcatgcttcagattcccctcatcatattgacatcatacctcaaaaataaattcagtgacacaatggttggcaatatgatcttttggttttttttctgcatatacgggcagccaatgtgtgttctattatattaccatgatgtgatgaaccggactgagaaggcaaaataaccatctgtagatcgtttttggtgtttcatttcttccatcatggaaactgaaagcaataatccgtgcacactcagtaaaacagcatcgtgtcttccagtttttttgttggaatctatcctagatctttattatgtgtatggtggataacctcatgtcaccatcgtatctgtatataataagcctaaatcagctgacgttctgtatgtaaattagtaaatgtaatgactaattggtgcccccctttctgcactaccagatctacttcttttctcgtaatatttagtattaaaacaatcacaccacacattctacttctgcctggtgatgatgttatataacatttggtagctatcacgagcggaatctaagcatgtctgtaatctgatatgtagatctgtgatgccctctcacttcgtttgattttgaatataaggattcgtttggatgcaattttgagttttatgagagtactattcttttgtaaaatacattggttttggagcatcatgaattgtttggatggaataaacgttatagttttg

SEQ ID NO: 105679 - DNA, 216 bp, Zea mays
  Clone ID: MRT4577_27882C.1
tggaggtatgcaagcgacttggatctcaaaatagaagaaatttcggatctgagcacaaatctgagttgaaaaaactggaactcaaaatcatcaaaaaaataagaagaaagaaacgaatatattcgctcctcttctcagccgaacccaaaggaattgaatccaaaccctgggtaggcagacagtgagatatggaggagagcaggaggcgaacaagag

SEQ ID NO: 105680 - DNA, 278 bp, Zea mays
  Clone ID: MRT4577_27883C.1
ctcgtgcgaatcagcccactctgataacccaccaacgccatgacaccttgacagacgaatcccatcaccaacgcccacgtgccttagcccgtaagcataactcaaaatcatccataaacaaaccataatcgattataccatgacccaacatgacatcctctcgcactcagactaagtcatggacatacgcgctcccatcattatcgtgaatgcagctcctgacaggcacatagttatagacttatcaatcaacactgtaggtaacatcatcaagcata

SEQ ID NO: 105681 - DNA, 666 bp, Zea mays
  Clone ID: MRT4577_27884C.1
agttctctattttaaatgtgtcctttcgagtttcgacatgcttttgttcaaacttaccagctgcagattacttggatgaagtgctctatataaaattaaatatttcataatccagtccctttcgagaaaattatgatacattttgtttgcaattgtacaccagttatgtgttgctgttccctgccacatactcaagttctgggctttcttaggaatcatgcttcaggtaaatataatacaacgccagatgctgtggatcaatatccaacatttatgtttttctttactcattttttcctctattagttcttttttcattcgctatagtctgaggtcttatgagcaccagaaggcaacagtcatctaatatggttccatgtatttatgttgtctcctaaacagaaaactgttctgacaccatatttcttttcctctttttaccagattcccctcatcatattgacatcatacctcaaaaataaattcagtgacacaatggttggcaatatgatcttttggttttttttttctgcatatacgggcagccaatgtgtgttctattgtattaccatgatgtgatgaaccggactgagaaggcaaaataaccatctgtagatctttttttggtgtttcatttctttcatcatggaaactgaaagcaataat

SEQ ID NO: 105682 - DNA, 451 bp, Zea mays
  Clone ID: MRT4577_27885C.1
gggaaaaagttggcctgggcccggtttttaccgggggaccatttcaaacggccaacccgatttttacccttggttgggggggaggaccagaaaaaccccccccaattggccctcaccccacaacaagtttcaatcaaagggcttgggggggcctaccatcaccccataaggggaccagattttccccgaggttaaaatccttaagcaaaacttaaggggccccccccccaggggcccagccaaaatgggccaaccaaaagccccccctcctggggaaaaaacaccggccagttaagggccccaaaaccccccaggggtgggtggcaccccccacgggacaatgggggttcccattcccaggcgggccaaaaccgaaaaaccttaggggggggccatggggccaaaacaaagcggcggccccttaaattaaggggagaacccacccgggggg

SEQ ID NO: 105683 - DNA, 2063 bp, Zea mays
  Clone ID: MRT4577_27886C.1
gttgcgccgccggctgagatccggcgctgcggtggcggcacgcgccagctttgccgcagactccggggacgagtctggccccggcgagccctcttcgtctcgccgccgcgacaacagcgggggcgcctcgtccgccgccggcggccgggccggggcaggggacttctccgcgttcaccttccgcgccgcggcgcctgtccaccggaaagccaaggagagccctctgagctccgacgccatcttcaagcagagtcatgcaggccttttcaacctatgtattgttgttctggttgcggtgaatagcaggctcattattgagaacctgatgaagtatggcttattaataagatctggcttttggtttaatgctacatcattgcgagactggccactgctaatgtgttgccttagtctacccatatttccccttggtgcatttgcagtcgaaaagttggcattcaacaatctcattagtgatcctgctactacctgttttcacatcctttttacaacatttgaaattgtatatccagtgctcgtgattcttaagtgtgattctgcagttttatcaggctttgtgttgatgtttattgcctgcattgtttggctgaagcttgtatcttttgcacatacaaaccatgatataagaaaactgatcacaagcggcaagaaggttgataatgaactgaccgcggctggcatagataatttacaagctccaactcttgggagtctaacatacttcatgatggctccgacactctgttatcagccaagttatcctcgaacaccttatgttagaaaaggttggctggtccgtcaagttattctatacttgatatttactggtctccaaggattcattattgagcaatacataaatcctattgttgtgaactctcaacatccattgatgggaggattactgaatgctgtagagactgttttgaagctctcattaccaaatgtctacctgtggctttgcatgttttattgccttttccatctgtggttaaacatacttgctgagattcttcgatttggtgaccgagaattctacaaagactggtggaatgcaaagacaattgatgagtactggagaaaatggaacatgcctgtgcataaatggattgttcgtcatatatattttccttgcatgcgaaatggtatatcaaaggaagttgctgtttttatatcgttctttgtttctgctgtacttcatgaggtaacttatttactttttcactcttcatctgcatatattaattatatagttctctattttcaaatgtgtcctttcgagtttcgacatgcttttgttcaaacttaccagctgtagattacttggatgaagtgctctatataaaattcaatatttcacaatccagtccctttcgagaaaattatgatacattttgtttgcatttgtacaccagttatgcgttgcagttccctgccacatactcaagttctgggctttcttaggaatcatgcttcagattcccctcatcatattgacatcatacctcaaaaataaattcagtgacacaatggttggcaatatgatcttttggttttttttctgcatcatacctcaaaaataaattcagtgacacaatgccaatgtgtgttctattatattaccatgatgtgatgaaccggactgagaaggcaaaataaccatctgtagatcttttttggtgtttcatttcttccatcatggaaactgaaagcaataatccgtgcacactcagtaaaacagcatcgtgtcttccagtttttttgttggaatctatcctagatctttattatgtgtatggtggataacctcatgtcaccatcgtatctgtatataataagcctaaatcagctgacgttctgtatgtaaattagtaaatgtaatgactaattggtgcccccctttctgcaaaaaaaaaaaaaaaaaaaaaaaaaaaaaaaaaaaaaaaaaaaaaaaaaaaaaaaaaaaaaaaaaaaaaaaaagggcggccgccgactagtgagctcgtcgacccgggaattaattccggaccggtacctgcagg

SEQ ID NO: 105684 - DNA, 713 bp, Zea mays
  Clone ID: MRT4577_27887C.1
ccggccgggaagacgcggaagcggatcgcggtgggcgccgcgcgcgggctgctgtacctgcacgagcagtgcgacccaaagatcatccaccgcgacgtcaaggccgccaacgtgctgctggacgagcaccacgaggccgtcgtgggcgacctgggcctggccaagctgctggaccacggcgactcgcacgtcaccacggcggtgcgcggcaccgtgggccacatcgcgcccgagtacctctccacggggcagtcgtcggagaagacggacgtcttcggcttcgggatcctgctgctggagctcgtcacgggccagcgcgcgctccagctcggcaaggcctccggcgccctgcacagccagaagggcgtcatgctggactgggtgaggaaggtgcatcaagagaagatgcttgacctgctggtggaccaggacctgggcccacactacgacaggatcgaggtggccgagatggtgcaggtggcgctcctctgcacgcagttccagccgtcgcaccggcccaagatgtccgaggtggtccggatgctggagggcgacggcctggccgagaaatgggaggccacgaaccggcccggcgtggccgtggccgcgggggcgccgtgccacgacgcgctcggctacgaccaccggaacgactccaacggctccgtcttctttaacgactttcacgacaacgacagcagcctcaacagcga

SEQ ID NO: 105685 - DNA, 223 bp, Zea mays
  Clone ID: MRT4577_27888C.1
caaactaaactcaaccatgggttcaattcaactaaagccgttgagatttttaaaaatcgttcgtcacaatgaacatttttaacccatttaaaccatcatgggggcacatgattttaacaaaacaccgttaaaagttagttttgcaaaaccaggaaggcgaacttgggggaacatacacgccctgggtgtacccaaggattaggagtggaccccatgaaaagtt

SEQ ID NO: 105686 - DNA, 704 bp, Zea mays
  Clone ID: MRT4577_27889C.1
gccgatttagaaatccaatgtcgcgcaaccgacgatttagactcaaaatctctttatgtgcgtagagactggcaattaagcacgacgatgtcacgccgtgaccttgccgtcactcctccatccattctctcttccagcgagatctgtcttctaggagggagaaaccctagtcgccgcctcttcaatggagcgggtttctccggttgaagctgtagccgatgcgtacgacgccgccagagcagctgtcgttgctgcagcagaagcccattcggccgccatcattgtcgagaaggaggcaatcgctgttgtgaagtatgcaggaattgctcgcgaaaagtttgaaggagttgttgattcagtgaagaactcaacctttgtctatgctaatgccagtgatgaggctttgataatatttctccacactatttattttctagagatcgaccttttgtttctccataatttattcatccctgcatagattattgtatgcatgtagtgtaaccgtgtactccattgcttttatcctctctctcttgttcattttattaattaccctgggtacgtgtgatgtactagtattgttgtacctgcatagattattgttgtccctgcctcctttttactaatcaacattgtccctgcatagattattgttgtcccttgcccggaataaaccagcctgttcggtttttttttagcat

SEQ ID NO: 105687 - DNA, 258 bp, Zea mays
  Clone ID: MRT4577_2788C.1
caccaactggtgatggaaggttacaagtggcacttcaatgagacggtgctcactgacacaactactgctaccgctgtgggaatgtggcagccatcttggagctggacgagcatctccagaaagatttcatcatctttgaggctgctccccaagagacacggggcatccctcgaatgaagccgtggccgactacttcctggtgaccccgccggcccctgccccctcaaacccttctgggcctcgcaccactgtgatctg

SEQ ID NO: 105688 - DNA, 221 bp, Zea mays
  Clone ID: MRT4577_27890C.1
gcacgaggaatcactcagtgattagcgtaggtgctttgcgaagtgcttagttgtaacaccctgaatttggggatataaaattccttctctaatatccaccaaattcgggtgttaccttctcttgcctctttcttttcgttctccctttcaaagcgataagagttatctagaggtcatctaaattcctaagtgaatggttgttgttgcatcatgctgaaata

SEQ ID NO: 105689 - DNA, 766 bp, Zea mays
  unsure (1)..(766): unsure at all n locations
  Clone ID: MRT4577_27891C.1
tcctgccagtnnagtcattatgccttnnngtctcataatattatagtccatgccatttgtgcatagttatgaaccctatattcgaacctgtgnatatactgcgnatatggcnnntcattatatatcatgttatttatgtttgttnnntgatggtaccgtnngctactcggnannnaaccgtagtatatttctagaagtctaanntacgtgcaacataatccccgtacttgcgcgggaggggggcgcatttattatgataataagtgctgnnacgcgggctctnngcccgccgatcccgatnngattcatgatannacttgacnnggatcgcatcggnnccttcgtnngccggcgatcgcattcattcataatnnttctgccctattcaannctttcgatnnggtaggattatggggcctacnncatggtggnnngacgggtgaacggatgatattatgggttcgnnattccggagagtggatgcctgatgaaacggcttaccatcatccaagtgaaggcatgcatggcgcgccataattatcccatatcctgacnnacggggaatggtagtgaccaatataatatacatatannccgggcnngcgttagntnngtctggnntaattgnngaatgatgtacccaatctatannatcccttatacgaggnnatccnnattggatgggcaagntnnctggtgccatgcagcncnngcggtaatttccatgcttccannatagcgtatattttaaagttgtnntgcagtt

SEQ ID NO: 105690 - DNA, 262 bp, Zea mays
  Clone ID: MRT4577_27892C.1
gccgtggcgctgctccccgccggtgggccgaccggcgcctacttcgaggagcgccagcagcaggcggcgttcgtgtgacacatactctgcttcgttcaccacccaccggtgtataggttgccgagaaatttgtgacatagctatgcccctcgcggtttcttcgagttgatgacacacgttgaatccttcggtgcttttatccatgtaagattttttttctttaaatttgacatctaatgcatccagttgattgctatgcacc

SEQ ID NO: 105691 - DNA, 552 bp, Zea mays
  Clone ID: MRT4577_27893C.1
atggctcttctccctcccctctctcccttctccttccttctgttgattttagcaggcgctttgagtttctattgccagtgcacccatgtccaattgtccaagttcaacaggatcttcgggaagcccaaggagcagcccaactccaatgccttgatcactctagacaagttaaatgagtgtgcctcatgttgcccagttgagtatggggatgacagatgcatcccattctcttgtccagctcttctggctctgaaagaacttggagctattttgaaggggctgcttggaagatcttgcaatcagctccaccatccctcacttcccttccacctctgtcatgtagttttcagcaatcatgccctaacaagggaggtttctagagagagtatcgaactcagagagagagagatgatactggagccacctatccacaagtcgctattccgcaagatcgtcgtggccctatcgagaacggagatgctcttagcgaagcaggaggacatggtggacgtgaacatgaagctaaagctgacttccagccaatccaactag

SEQ ID NO: 105692 - DNA, 837 bp, Zea mays
  Clone ID: MRT4577_27894C.1
gatccgtccctgtcccgtctcccgtcgcagtcgccccttcgtctgcggtctcagtcccgcgcacacgcgcagtttctcgtcggtgcggcgcgtgggctgagggcctgaggccaaccactccgcttccgcctattcgagcattcaactccctcaggtcccgggccgtctccggcggccgctccgacggatcctctatcgcccaatcgcccgacggcccgagtactagacgttgcgggattgatttagtgattgttgctctgcggcgggggttgagatggaggacttgctgaacacggagatcgggaagaacgactatgactggcttctgacaccccctggaaccccccgtgttcctgcattagatgctgccgagaaagctccatcctcaactgtgactaaacatactattaccagaccatcctcgacaactagagcatctaggttttccacttctgagacagagaatgggtattcgacgtttcccactaggcctgcacggagtatatctgtctcccgccgggcagttcaatctacaccagtgtctagcaacagcaggtcatcagtcctcaatgcaaacatttcctctgttagttcaagacctacaaccccaagcaagcggactgccactcttactgcatcgaagtcatctgttccattgtcacgtccagtgccaacacgctcatctacacccgtcaaagcccgtctgtctacaacaactaatacttgtccatatactccagtgaaaaatcgtccctcctgtgtctactctacgcacaactctggttgttcccaagatcccgtcagcacaaagctccagatcatcaactccaacctctc

SEQ ID NO: 105693 - DNA, 429 bp, Zea mays
  unsure (1)..(429): unsure at all n locations
  Clone ID: MRT4577_27895C.1
gcagggcccgctgctgcattcgccggaggagcaggcgctggtggagatggccatcgcccggaaggcctcgctgcggcgcttcctcgccaagcgcaaggaccggtggtcctccgccagctctacggcctatgacgaccgccgccaggacgacgacgacgacgaggcggaggaggaggaggagccgccggcgcccaagaaaggcaagatggcggcggcggcgcgcgaggacccttcttcctcttcctggctcgcgctcggcagcatgtgctccatgcacggccgctgatgagggagccagcggtggttattagtagtgcagacaagagctcgggcgcccgcccggccatgggatgggatgggaggcgttgcagcagcaatttatgtgctacctacgtactagtatttattataattgntattactaacaac

SEQ ID NO: 105694 - DNA, 399 bp, Zea mays
  unsure (1)..(399): unsure at all n locations
  Clone ID: MRT4577_27896C.1
cccacgcgtccgcggacgcgcggggtgccggcgggacacgcaacaaacccaaacccagcacggcagcaccgaaaagcnngcggaggcncggcacagaagacggggagccgcgcgcggacgacgaggggagccgcagcgaggcggacccgaagacacaaggcacgccacagggcaacaaccaggcgaccacacggggacgancgacgccgggcagggacgagcccaccacaaggagaacagaagacaggagagcgggaagccgacagggcgcaccagacaggcccagaacgaaacacacgggaggaggggcaccagacacagcagaaggaaacagaggcngaccagagcgcagccaccgcgacagccggggcaaaagaagcgacagagcacaagaacgcc

SEQ ID NO: 105695 - DNA, 1044 bp, Zea mays
  Clone ID: MRT4577_27897C.1
cggactcgtgcgtgcgagcgaacgtacgcagcccagggacaccaaccgccgccgccgcccgcagctcctcctcctcctccgaccctctcatcaaccgcacgtacacgtcctcgctccatggcgggcatgcccacggaaagcgcgacgaccggcggtcctccgccagctctacggcctatgacgaccgccgccaggacgacgacgacgacgacgagtcacacgagtcacggcgcctgcgtgcgtgcgtacgtacgcagccggacgcggaggagccgccggcgcccaagaaaggcaagatggcggcggcggcgcgcgaggacccttcttcctcttcctggctcgcgctcggcagcatgtgctccatgcacggccgctgatgagggagccagcggtggttattagtagtgcagacaagagctcgggcgcccgcccggccatgggatgggatgggaggcgttgcagcagcaatttatgtgctacctacgtactagtatttattataattgttattactaacaacaacgactggtagtatcgatcagagaccgacgctattcgatcgttggttcgtttcattgtcctttccttccttgctagctggtggtgtatcgaccatctaaatctaacaggacacgtggacctggacggcaagagatgtccagtccagcagtgtggaacgtttgttgctttgtctatcattaattgctataagtttgtttcatatatacatatatactactgtaccattggaggcgttgtaggcttgtactgtagcagcaatttacttatgcttaaaaaaaaaaaaaaaggcccttttttttttttttttttgagaataatttgctcagccagtacgtccggacgaccggcgcgcccgcgatgacgccgccgccgccgttcctgaagccaccagccgccgcccaggagacgacggtcgcgccgcgcacgcagcagctgaccatcttctacggcgggagggaggtggtgctgaacgaaaagcccccccgacaaggcggacgagctgatccgcaacaaagcctcggc

SEQ ID NO: 105696 - DNA, 232 bp, Zea mays
  Clone ID: MRT4577_27898C.1
gtgttggggtaaacccaaagggacacgagaagcacatttttggttcttgggaatccggacaaagcaaatcaaatggcaaattaaaaaaactggtaaataataaaaaaaaaccatctaaatttgggtagggctaaaggatactatggcaaatgttttagcataaacgacatacattcatgtgcagacatagcacaacagcacaaaaacaattacttatacactataaaatttt

SEQ ID NO: 105697 - DNA, 347 bp, Zea mays
  Clone ID: MRT4577_27899C.1
ggtctttcaagcggcagaaagtggtttctcacttcagtgctgaagctgaatatcgagctgttgctaggcttccttttgtgtgaggtttgattgtctatttgtttcctcctgcgtgaggacaagtatagcaactagatgctccctcgtatgtagataggatctgctatctctgtataggaagtaggatcctattcatggtaggcaagcactgattgcaaccaggctgccacactccttcctagtgcgtcaccctgtggctgctatatattgtaatgcttctgtcagtcaatactatcaaatcatgttccccattactcctctaataattaagagcatcttttctgagc

SEQ ID NO: 105698 - DNA, 798 bp, Zea mays
  unsure (1)..(798): unsure at all n locations
  Clone ID: MRT4577_2789C.1
gatggctggctgggcagcgccctcctgctgcctgcccttttcctgtaccttcatggactttctcctaaggtctcatttttgggcggcgcgggcctgcttggcctcacatgtccgcgtggtccgctggacctcacagctccgggttgcgtgcttgtgccctctccttgcgcccatgtctccgctctgcctgtctgtccttccctggtccccagtgcaatcatcgtctggttttcccacccatttagtttaaagcatagtataccaaatcatgtatttttgctaaaggctgataaaattttggagatctgtatggtgccccagcttggctccagcttgtacctccgactagaactttaggatcaagccgcagtggcttttaatggaaggccaagtattttatccctatgtggaatcttgtgcctcattcgctttacttacactacactttgcattcatccataatgctttgaatttctgttctcctacttggattcatttggctatcttaagaaagcagaattgctggtaaaactatacctacattgaagcaggaggcatattcatattataaaaaaagtgtcggcattagcaaacttttgaccacacaacactgggttgcatacaaattctctcacctagcaccaaattctcctttctgtcaatcagtccaacctaagagcacaatgcaatcaatttatgtttttatcaacaccctaaccaattagaattagtgctacattttctaaaagatcaattgctcatttactnagctaaataagtaggaattagcactacatt

SEQ ID NO: 105699 - DNA, 486 bp, Zea mays
  Clone ID: MRT4577_278C.1
ccctcgggctgccggctctttatccctagtctccgtcccaatgcggtcgcgcccacgccctcctagtcctccaccaacgacaaagcgtgcatccagatctagtgtccccgttctgttgtccccatccccgttcttctttgtttctttatctccacgatctagtaggtcatctatcctccaagatccgctccagtgttagcagtgagagatcttggtggaagcaatgaatactttgagaagaaaaatgtagctgcagtgcctatgtgataagcttatggattgtagttttgttctctctcaaacactatttttcttccctatatgtgtggatggagatgactatcttttattatctgtaaaaaatcgttttactttttattagcttggttggacatttggtgcctaaactttttattagtttggttggacatttggtgcctattgtgacaagcttatgcagtgcctatgtgacagttgttgttttct

SEQ ID NO: 105700 - DNA, 511 bp, Zea mays
  Clone ID: MRT4577_27900C.1
gaagtcaaatagattactttattaagtaaatttcaattcctccaaaataaataatagacccaaagggcccatatttaagagaactcaagggaacgtaaccatgcccccaacaaatacttgatgagtttgggtgtaaaatggaagtgcgagagctaagttacactttcaacacaccgggatctttcttcccctcttatacctctttttttcaaaaaagagaaaaaaactctttcacccccatgaaaaagttcttaaaggggagctaaacaagtcacgaagacgggctactcgatcgaaggggtctttatgggtggggttgcatccttgtccaaacgcacatgtaaacaatcagaggggtctttcgctttcaccctccacacatactagctaggccgcagcagcaaacagtcgaactcgaaaagaacatttaagtgtgtgcaccagggctattataataaagttgtaggccagacagctgctagtagaaagcgagcccttgatcctgcaggaa

SEQ ID NO: 105701 - DNA, 686 bp, Zea mays
  Clone ID: MRT4577_27901C.1
ggatttcatgaagcgccccaagggataggaaagtctacggaattcatgcagttctcttttcgctgctgaggagtttattttgtatctgggagctgggagtggctgggaccttgggttaagctctagtgctagatcgttcgttttggtctgcactctgcacagtgcacagacccttcccccgtgttcccgaatcccgaatcgcgacccaaacagagaggccaggagcggaggactatggccgtagccagacatggcggtgcatccacgagggcccggacaccatcgaggagctgctggaccggcacctcgtgaagaagcccgcggcgggcccggacgaggagtcggcggaggcgcggcggcggctgacgagctcccggcgggaggcgctggccctgtaccgggacatcctccgggcggcgcggctcttcgcgtggaccgacgaccgcggggtgccgtggcgggaggtgctgcgcgccaacgccaggcgcgagttcgaggatgcccgcggggagcgcgacccggaggtggtggcgcgcctcctcatccggcggccgcgacgccgtgcaacaggcgcttcgaccgccttgccgacgccttcacgccgcgcgatcgagaccgaggaggccaggcgccgtggcggaagcattaagaattggagtcgggcatcgtgccgaatttcttgcaag

SEQ ID NO: 105702 - DNA, 549 bp, Zea mays
  unsure (1)..(549): unsure at all n locations
  Clone ID: MRT4577_27902C.1
gtgtgtgggttttttttttttttttttttttttttttttttgtttttttttttttttttttttttttttttttttttttttttttttttttttttttttttttttttttttttttttttttttgccttttcaacaattttcttttacccctgaggggagcgggcccggggaactggggggaaaaaaaacaaaacaaaagtcccaattggtttttccgaaaaaaaaacacgggcaacttggccaaaaaacccccaaaccaattaaaaaaaaggtcccccgggggggcgggttcaaaaaaacttgaaacctaaccacaaacgggccaaaaaaaaaccggggncacagggggggacccctgtttattggaaaaaaattggaaaaaacgaccccccccccggnacccaaaaaggcaaaaaagggggctaaattggcccttgtaaacctggggcaaatgaacttaaaaagggaaaccatgtgggccagggggggcttgacccccctgaactttggggttttgaggcccaaaggggggttaacccaaagaaaatt

SEQ ID NO: 105703 - DNA, 415 bp, Zea mays
  Clone ID: MRT4577_27903C.1
ttgttctctcagaccaccccccattatggcggacttttttaaatacttgtccgcctacaacaatcatcactcacaactaaatcaccattcatataaagtatctgactcccaaacccttccatcttactataatcttttttctaaataatcctgaatcaacccattaatatatcccttttaacatcttttctatttattttctgtttcagtttattactaataattcctcactcactaattaaaaaatatacttacactttcccaattcaaaacaattatatttttcttctctactttttttctttttttttttcaattcaatttttacttttacctatccaaactattttatttttttaatcttttaatcaaattcctatcctatactttttttttcattttaaaaattttttta

SEQ ID NO: 105704 - DNA, 367 bp, Zea mays
  Clone ID: MRT4577_27904C.1
ggggggttttttgctggcgtgtcgtgtgggtgtttgctcttcggttgcgggttgtgtgtgtctggctgtgccggtctggcttcggggcgctgtgctctttttcccggcgcggtctcggtctgcctctggggggggggggggctgtggcgtcgcgggccctgggggtggttcggggcttgctttttgctctcttctgtgccgcgtggtccgctggtgccggctgggtgtctggtggcctggggctcctgtgctgccgtgtctttggggcggggctgctgtgtccggtgtctgcgggctggtgtgccgctccccccggttgtgggctggttgtggctggctgtgctcttcgtggtttggcgggttttgt

SEQ ID NO: 105705 - DNA, 905 bp, Zea mays
  Clone ID: MRT4577_27905C.1
atacgatgttaaaagagctatgtacaatgctgtcaatcaagacaacccatatcaaacacatcaagtgcatgtgtcgtgcaattcaaactgttgcggtacaaatatgtagtgttgcaagaaaaatgctgcggaccttttaaaagatggaaccaaacacatcaaaatcacaggggcacactaatcacctatccttccgccaaacatgtttacgttaatcaaaacttgggggcatctctggcattgaaacacctgaaaattaagagctacgcagcaacgtatacatgtggggctacatgtggacccgcgacagcaaaaagaagtgcattaccaaatcgacgatgattaggaacctagaattttaccccagaacagcacaacactacctagcaatagtagtaaaaaaagcctttcccaaacaaggcgacgtttttgggcgaccgaaccccacaaatcccccgcatcgaggcatggaccggccaaaaaaggcgtcaacaggcggcaggggtatcacagatccgagcgcgaacctggcgatcgaggtcgaagggcaggcgatcagcgtagcgagcgagggcgtccacgaggcgcctcaccagatcggcgagctcgtcatcattcccggccactgcccctgccaccggggccgacgccgacgccatcgccgctgacgagaggagaacagggtgggcggcgggggcagcggaaaccctaggaaagcgcgcacaccggtgagcgggaggacagggggtggggtgcgagatgccccgcaccacgacgagggtcgaggaagaagaggagagagtttttgctttgcggccgcttttttttcagagttcaagggtagaggaggcgcgcaacttgcagtagagggcctcaggacagcgagtatgatcccggcccggccg

SEQ ID NO: 105706 - DNA, 603 bp, Zea mays
  unsure (1)..(603): unsure at all n locations
  Clone ID: MRT4577_27906C.1
gtttcttaggccaagctcatatcttggtcctccaagcgttaggctgtggtctcctgcttcagtgctgaggctaagtaccgggctgtcgctagtgtggtgtctgagacgagctagttgcgccatctccttcaggagtttcatagccctcaccaggagcatgcttgtctattgcgacaacgtcagcaccgtctacctcttcgtcaacctcgcccaacaccagcatacaaagcatgttgagatttatcttcacttcatccatgagcatgttgctgtcggagacgtccacgttcatcacatcccgatgagttcgtagtttgtcttatttgatctttcctccttgttgctctcgaaatttctgtccagtttcaatatatgtcatggctagagtttcgactgcggngatgttaaattatttcatttctgtcgaagtgctatgggcctagagcccccccgcccatgtaatatataatattgagctcactttttactccttccaacaatagcccactttttactccttggaacaatgatattttgcatgttctcttatttgatttagtacttctgtcccttttgttgatgcagcacacgttattgagccct

SEQ ID NO: 105707 - DNA, 364 bp, Zea mays
  Clone ID: MRT4577_27907C.1
atcctcctatcaaatccttctcaatttcttaccatttattttttcgatagcacccatcgcgtactgtggggtgctgaatcagaatcccgcctaggccaaccccctgactgacaagctcgtgactgctctcacgctgactaatcccaaggccttatagctcctcccattggaccactccccccttatctacacccgcatggccatcatggtgaactccatatctactacatccctggagacctacaagatcttcatcttcaatgtgctgaaccatttagcaccccgtcattgttatttcgatcaatgtcacttccatcatgaactcatttatctacgtcgttttcctcatactaaccgccgagtc

SEQ ID NO: 105708 - DNA, 257 bp, Zea mays
  Clone ID: MRT4577_27908C.1
cggacgcgtgggcgagggggtggtggagagcaagcccgccttcgtcgtcgtcgcctcgtccgcggcgacgcagtccagggcgcgccaggaagcaccggacccggcgccggcggcccgaccagaaccaatccaggggcgtccgcggccgcccgtggggcaggtgggccgccaggatccgggacccggtcaagggcgtccgcgtttggttgggaactttcccttcggccgaggccgcgcggcgcgcttacaaccacgcg

SEQ ID NO: 105709 - DNA, 671 bp, Zea mays
  Clone ID: MRT4577_27909C.1
aaaagggggttttattttcctcccgtccccccccgaaaaaaattgggggggggggttttatttttaattccggggggtttcccgaaaaaattttttttttttgacccctttgccccccggggggcccctccaagggcctttctcctccatccaagtccactaaaaaaggggggcctgggttgggtttttttgaaaattttgttttttttaaaaagaaaggaaccctcccttgattgatttgacaagcccgggtgttacccccctttttgggggcccctgccaaaattttgccgccatttatttttggccaaggaaggggtcaagctagggaaccctttttgccttttgacttttttgccttggaaaaaaaaaacttttgggaggaaacaaattaaccaaactccttttaaaaccgtttttttttgttgggggggggggaagggttttcttttttagggacggaaaaaaaaattttttttttgaggcccggtttgttttttgaaacaccttttttttggttgacaaaaagttaatgaattgcagttagcccaccctccgttaaaaaagcggggaaatcccccccattaattcttttggaaaaaaaacaaactttttaaagactggatttccttgccaaagaaacccccctaaaaggcccctttaaaattttt

SEQ ID NO: 105710 - DNA, 645 bp, Zea mays
  unsure (1)..(645): unsure at all n locations
  Clone ID: MRT4577_2790C.1
ccggccgggataaatcccgtcccatcgcaagcacagcgaccgccgtgacgatcgcccgatctttttttttcttcccaaaccatccgccctcgcggaacccgtgagctccccctcccgcctccggacacgcacggcagcggcaggtgtttccggcgatcggttgcctcccgggcgggcgcccacacgtaaacgagctgcgctgcctgccaggatccggcgccggcggcagggcaggatgccaatgtcatgggcgctgaccgtgtccgtcgtcgacacggtgttcgcggcgtcgcgnggncgtggggtgtcggcgtgcctctccgccgccaccgccgtcacccgctccccccggaccggcgtgatgggccgctttgccttcctgctgtctgcatgagctcctcgtccgtctctactatctagctagcgaccggtgcctctatatgtctcctggtttctcgctctgcccccgtatccccaaataacaccgtctagtagtctactgttcctccactaggctccggctggaatgcagctgcatattttttgtgtattattttagacagtttaaatggctacatattaaagagccaatattactctcacgtattttgtattagtaaaaaaaaaaaaaaaaaatttgcggcc

SEQ ID NO: 105711 - DNA, 453 bp, Zea mays
  Clone ID: MRT4577_27910C.1
agaagctgatcacaagatcccatcaacagaagtaaaacttgcctcagagtactacttctacatggaaacacagacagcactagcagttccagatgaagataacactttggtagtctacagttcgtcacagtaccctgaacttgcacaaagtgtcatagcaaggtgcttaggtattccattcagcaacgtgcgtgtcattacaagaagggttggaggaggcttcggtggaaaggcattcagatcattccaagttgcaacggcagctgcactttgtgcgtacaagttacggcgtcctgttcgaatgtaccttaatcgcaacaccgatatggtcatggttggtggtaggcacccagtgaaagctcattatactgtcggattcaagaacgatgggaacgttacggccttgcatctagatttattgattaacgctggcgacagcaacgatgcgagccc

SEQ ID NO: 105712 - DNA, 1689 bp, Zea mays
  unsure (1)..(1689): unsure at all n locations
  Clone ID: MRT4577_27911C.1
tttttttttgttcccaaactggcgatagataaccggccacaagtatgctgatgaaatgaataagtgttgtcaaactgtaataacagatacacgcattttaactaaatcgacagtgacaactgaattgccatgttgccatggcacttaccataacacaacaactcgaactttattccaagctaattcgtcaaagaggttattcatcaacttcgaccaagcaaaacacaactgaccacgacagagttctaacgaccaagtcacgaagcgtacaccaaggttttccacacgaccagacaagcatcgcgattctgcttcggcggcagacaaacacaaatgaaaacacacagcagttacttcgctctaagctcagtcttgcacaagtttcagattgccttgtccgaaccaccatgcaatcaagcccgctcgaccatgtattccacgagaggtttctgcagtctcccctccgtgccctctataatggtgagcctccgtgctactttcatgaagtcattgaacggctcttcaccagtatgcctgacagcaccagcagcatcacggtagcaaaggtgcctcattatttccgccttctcaattccaaacatgtccgctaactggccgtacagctcttcgtacgaaccaaagacagataggtcaatggtgcggccaacatcctctgattccataaacaccttgcagtgcccgtcttctagcccaagctcagaagccttgcggtcttgggataggccttccctcgatcctccagaatccatctgctgctcagtaaggataggctttccgaacagcattatgtggggtctctttatgtcatcagatttctctgtggcctgtggtgtgccgattgtcagcaagcaagagacactctcactggctggtgcgctgctgatcacaaaacccttggatatacggggcgtcggagtcatagcaccaagccggttgaaaccgaggtgcagctggttaagctggtagtctgttaggggtaaaccaaattgagcatgcctggctccctgtatgcctgcaggagcgatgtccgagaaacagcgaagtgggctgttgcttggaccaagtgggttgccatggaaaattggattcaacagctgaccctcaaatggaaagtctggatgttgggccacccgcaacttctttctaggtggagaaaatgtccctaggtgaatcggtggaatgcttgatacaatctccacaagccatggattgacacatttcacattctgcagcaagtctggttcatcccatgacacctgaagaagcctccacggtgaatttggccatctgattgggtcagcaacctgagcagaagctatcgtccccataaaccagctgatccttgacgaatcctctgtctcaaatgccatcttgaacctcatcccagggcaccactggttcctcatcgcgttctgtaccgatgcagccttcacaacaaactctggagtgctagctctcgggtagtacaccacctcaaatggctgcccgctcgcggctaagcttgcggcctcaacaacgtccgtgatctccaccttccccctgccactcatgtacccaccaggacccttagtgatcttaccggcctcgtccttcaagaacgccgacaaggccccgtacaccggggcgttccagccagagatgcacnccggacgctgggcggacgctggg

SEQ ID NO: 105713 - DNA, 408 bp, Zea mays
  unsure (1)..(408): unsure at all n locations
  Clone ID: MRT4577_27912C.1
gtgtttgggttttttttttttttttttttttttttttgcaaagcgatgcgcgattgctgtgacaaatcgagtcgatcgatgaataagagacgggtctttttcacggccactgaacgaatcacaaatgcaccaccaccaccgatgaaacaagggagacgaactccgctgcgattcctacgcgcacaaacggtgccgaagctagcgccggatcacgcggggaagccagggacgacggccggggggacaaaaaagccggcgacaagacgggcaggggagccacgcgtcgacgcggcgggaccgggcacggacgacggggggggcgtcntcttaaaccccgggggcggggccgtttgccccgggggggtcaccacaggcgctcccccgggggggggggggggggggcccttg

SEQ ID NO: 105714 - DNA, 440 bp, Zea mays
  Clone ID: MRT4577_27913C.1
gcgtccggaaatacgccggtcttagtcttaagcagcctatcactatcgatcaaagcgacaaccctggagggaaacttccattttcttgaacacgggtaaatgccattctatctcaactatggcgcatttgaccgaggttttcgtctcaagtccactcctgaagccctgccgattgaagcagaaaggctcttcttattctttttagggtatggtatcggactcgaaaccttcaaagtcgctgctacgtgctctgtggtgcgtctcagagccctattccatgtgggggttggaagacatttatttgatcccagagggaggaataattagaccctcctctgggttgaggatacgtagcagtggaagatgccggtcattatacgtctactcacttctaagcaaaaatcacgggcaaactttctttcttttcgaaaactggattc

SEQ ID NO: 105715 - DNA, 588 bp, Zea mays
  Clone ID: MRT4577_27914C.1
caccccccaggtaaccatccttttttatagtgtagccagtaattgttattccgacacgttctttgttttgtaatactactaatatctgttgttatattctgtgctgtgctcacggtggattgttcggtgattgggtagggtatgggggaggatacggtgtcgcagcctcgcaggactggaaccatctctgcatctgatcgacgggacagcccccgtgttgggttgggtgtgttcaaagtgctgccgttgcgggttgggtggttatggatgccttcaatgccgtccggttggatttgcttgctgctagtggtaaaagttgtgccgtgcagactgggctggctctcgcaactaggcaggcaccggatggctttggcctctgggcgacgagcagcggaaaggcggtgccccctgtacattatggccgtggcaaagcgagggggtagggagaatagcatcgagaaagctgtgaaagcttccatattttccttagaggaggacctttggatatccgtcgggctttctttgtgttaaaaaaaaaaaaaaaaaaaaaaaaaaaaaaaaaaaaaaaaaaggaaaaactcgaggggg

SEQ ID NO: 105716 - DNA, 547 bp, Zea mays
  Clone ID: MRT4577_27915C.1
gatacgaaagcaaaattaaatacaactggtgtttgtgttacagcttctccagaaagcagcaattgagtaagccaaagtggcgcaaaggcataactaaatacaacagtgttacagcttctccagaaagcagcagttgatggatcaaaaaacagaagaccacagcatcacttgtcacctaaggcagcgccaccagaaggcagagtacgtgttgcatcaggggctccagctacacaatgccagtccccttgtaaacatgataagaactgagattagcttatggatgccagctatttcatcatggtagaccatacaaacaacaacagcagaggtaacttattcctacttctagaccagccgactcccaggcatggcacaagtaatcaggtctggttgtccacttcaccaaccccttttcttgtaccccactgttgaaaaaataatcagcctcagtcacatgaacaggcagctggattctctccagagacattgcttcaaggaagatggaaagcttgctgggaccttcccatctcagattaatgagcttgct

SEQ ID NO: 105717 - DNA, 169 bp, Zea mays
  Clone ID: MRT4577_27916C.1
attcacttttttttttgttttttttcttttttttttgaagccacacacatgagctgcatatcaattaacttttcgcaacactgacgaagatacataaccatgacgctagctgttctaacccgcttggtaggggacaccaagcacgtgcacacacacacattcatacccg

SEQ ID NO: 105718 - DNA, 1288 bp, Zea mays
  Clone ID: MRT4577_27917C.1
gcacgagggagaacctggccctccgggaccgcctcttcctgatggagcgcgacatggccgacctccgccgccggctcctagccgtcgaggagctctgccgagaccgccacagcgacggcggctgcgtggtggacgccaccgccgccgacgaggccgctcgctccgagagcgctgccgccgtcgtatcccccggcgcctgcgcctgcgaggaggcggacgccatggagaagtgaagcatatacagtaccttctacctgaccagacaaggccctcccggccgtactgaaactgtacatacggtttccgtttcttccctgtgcagatgtcgctgtggagagtagtaggaagaagcggcacctttgaaagccttttagagttactcttcgttgcatcttgttagctttgatttcgtttcatgttcttgtagaaaaggatcatcagtcaggaaaaggccgtgggcgacgatggaatgtgagggggaggaacacgagatcctggtgtcctcctgctcgtccagatcttcaaccaccagctaaccatccttttttttagtgtagccagtaattgttattccgacgttctttgttttgtaatactactaatatctgttgtgatattctgtgctgtgattgttcggtgattgggtagggcagcctcgcaggactggaaccatgtctgcatctgatcgacgggacagcccccgtgttgggttgggtgtgttcaaaatgctgccgttgcggcttgggtggttatggatgccttcaatgccgtccggttggatttgcttgctactagtggtaaaagtagtgccgtgcagactgggctggctctcgcaactaggcaggcaccggatggctttggcctctgggcgacgagcagcggagaagcggtacacactgtacagtatggccgtggcaaagcgagggggtagggagaatagcatcgagaaagctgtgaaagcttccatagaggagaacctttgagtattcgttcgggctttctattctatttgttttcctcgcccttctctcacagctacttgcctctgttaatttttggcgcccatattaccaactttgtttgtttttatttatttttataggacttccgtgctgttcggttggtcctggtcagaaaaaaaactaagatgtgaggaggaactaaatggagtcataatggtggaaaggacctttggctccggaatgcttttagtgcaatcatgtagtgtagagtcacggtctactgccgttaaaaggtgatgctggcttggatcaagaggggtggtgct

SEQ ID NO: 105719 - DNA, 294 bp, Zea mays
  Clone ID: MRT4577_27918C.1
gcgtcctacacaatctcttctatatgatcaaaccgagacatccttgagtaataacaatcggggggcggggatcctgggggggggtgattacctttcttccacaaccttattaaccgccatgacttcaacgtggatttcgcggcaaagactggaggggcacgtctggcatcggccagcatccggaggacacgacttgctgctggggggaggactgggagtgcattccttacacctgtgggcggaccacgatgccgtcctgccgggaggacaggagggctaactgctcctgctggg

SEQ ID NO: 105720 - DNA, 225 bp, Zea mays
  Clone ID: MRT4577_27919C.1
ccgactccggccgccccgaggcagaggcagcaggttcgtcttcgttctccgcgcgctcacgctgattctcctgatgttgctcgccgggttcgcacagactgcttgcagccgcaggcctctgccgttcgtggacgaccaccacaacaacggcgtgtttaagggcgacggcgccgacgacggcaccgacgtgcatactggtggtggctcctctacacaccgacaccg

SEQ ID NO: 105721 - DNA, 1536 bp, Zea mays
  Clone ID: MRT4577_2791C.1
atcggagacaggctcggcgctcgcgcggtcggcaggagctcgcagcgggcaagggctggctctcgggcaggaggtgctcgcagcacggtgctggcaggggtggctcgaggcgcatgcaaggagaagctcacgacaggggcggctaatacttcagtgcgggcacaggttcatgttgcagcaggcactcggtgaagatgtttttcgttgcgctttacgatgctcacttgggaacctcgaggcgggccggggttctgtctctatccatttgtttactcccgatccccatcagccatggcgataaagtgagggttccaggcgacggccgcttcagggagggctcgcggcgaagacaggctcggcgctcgcgcggtcggcaggagctcgcagcgggcaagggctggctctcgggcaggaggtgctcgcagcacggtgctggcaggggtggctcgtggcgcaggcaaggagaagctcacgacaggggcggctaagacttcggtgcgggcacagttgcaggttgcagcagccactcgttgaagatgtttccctctgacgtcgacgatgctcactagcaagcttgcaaaaggactttgctgccagggtgaactggggcagcaaccaagaggtgtgttgataggaggttgtacttgtttgctgatgtggtagataaatcggctcaggtgattagtaattctggtctcacagttgttagtcacagtggtgtggaaagtgcagcatattattccaggaaatggccacacccaaaaggcaacaagttgtgacaaatcaatcaactaatattagtcctggccctgtcacaaggaggcaattggcattatcaatgctcgatgaaagcacaagtcaggaattggccacaccttcgagggcaaccaaatccccttccaagcctacatcaaggattgcaaggaagatcactccaagaaaattcaaaaagtgaatgtttttgtgtctacaaaactatgatattggatgcttttgtaatcttaattaattagaacggaggcatttggatgatattttggcatatgtatggattgttgacattaaaaaaaaaaaaaaaaaaaaaaaaaaaaaaaaaaaaaaaaaaaaaaaaaaaaaaaaaaaaaaaaaaaaaaaaaaaaaaaaaaaaaaaaaaaaaaaaaaaaaaaaaaaaaaaaaaaaaaaaaaaaccccttttgggggggaaaccctgggttggtttcccggaacaacattggcaatggaaacgccaaaattttggggaaattcccaagggcctttccccttcccccttggggaaagggccccaaaaaaagcccaaaaaattttcaaaatttttccccccggagcccaaggttaaagcttggcttgaaggggaacgggggaaagcccaaaaaggaaacttcccccgcggggtttggaaaaggaaaaaaacccgccccggggttaaaaatttgtttcaaaaatttctctttcgggaaaaacttgttttggcccgggggcaaaaaaaaaaacacccccaccaaaagaagggggggg

SEQ ID NO: 105722 - DNA, 262 bp, Zea mays
  Clone ID: MRT4577_27920C.1
aacttgttcgttttttttacgggaatgttaaaaaaagttgatgtttcaatggagtggttcaaaagggtcttaagggtctcagcatgttatgtagttttatgctagaaaacagcatgtcatgggctttcagacttaaacaatttaactctgggtagtcaaatgttcaacaaggtaaaaccaaaatctaaaagttcatgcttatctatagtgttccagcaagacttaatattgtaccatacccttacacgaatttttatttttt

SEQ ID NO: 105723 - DNA, 692 bp, Zea mays
  Clone ID: MRT4577_27921C.1
caaattgcttaaattttcgcaaagtcgtttatacagaacctcgtcaaaacagcttccagatttttcacacacagacaaccaaataagaccagtaaagctgagacaaatgttgtccgtggatcaaaatgatatcaccgagccaaaacaaaactagcagaaaagagtaagttttagtcgctatcatcttcgtcttctcgcgtttcaagctgggagacaaccttttctatgaacttcctgcgaacgccttccatgacattgttacgggatgaatcgccaccaccttgtccatcattcagtactgggtctgaatggcaaagcgccaatgcaacagattcaggtgtgcatttctttccaccgaacttctgtagaccaacataagtccctttgacagcactgttgttgtacaccagtattgtaggaacattcctatctgggtagttgggaatacagtccgttgaaataattttaacaaacttggtttctgcatattttgttgccagttcctccaggcaagtctcaagcagtccacattctggtatcgcatccttgtagaggaagaccacaacccagacatccgggtggagcctgcgaaacctcacgcacaaaatcagagcctgtgatgggctgtactgtgccgaatctggcagtctttgctgcctccttgagctctgcaagcctcatcctcctgtact

SEQ ID NO: 105724 - DNA, 604 bp, Zea mays
  Clone ID: MRT4577_27922C.1
gcagctatggcagtggcaggctccccacggctcagatactaccgcaagcagtgccgatcagctcctccagcaccagtggttcttcaggtaatagagtgccacttgatgatgtagtggagaaggttgccacaatgggattctcaagagagcaggtgagagcaaccgtgcggaggctgactgaaaatgggcagaacgtggacctgaatgtggtgctcgacaagctgatgaacggcagataagtttgaggagtattgtcatttcacagagccacacagtgtgtacagtatggaaacttggaaagtgtcagctgaaccgattttctgtgtgcaaccttgtaaacctgattgtgcctggagaactctgatggccgaacagccgtgcatcgtgattggcggtcacggttgctccatctgaaatggaaacagctcagtgtgcctgtcagtgatatagtattacaatctgaatacgttgttcatttatgtatatgtggtgctgatgatattctaaaacatataccgttgtttcttgtgatatgttaataagcagcctttactgtggttttgggctctaaaaaaaaaaaaaaaaaagcggccctagatcgcga

SEQ ID NO: 105725 - DNA, 549 bp, Zea mays
  Clone ID: MRT4577_27923C.1
ccggccggaagtcttagtcgcacccacccacccacccactcgcttcatgccgcctccgccgtgcgtacaagcaagtggagacaggatgccggctggccacggcctgcgctcgcggatcccgacctcttcgcgcgccccttccgcaagaagtgcatatctccctcctcacgcctacctccgcacctactgtatcaggggttacaacaatgtaaaggcgaacgctcccgtccactgagccatgacgcacaagctctaccacggtcgcagctggcgcagatggatgatacccaacggttcctgcggaaaaaacaggacgaactggggaaatggccggatcctaaggaagggaatacgtgtccgctcgcgatctgcgcagacatcttcctggtgacaacggtctctcctgaggaaggggagaaaagatcagctgaaggcgcatggcagtatgcgaggtgctgctataaggtcctaggggctgccattggggccctctgctggattaatggatcagaggaccacctgggtccctgaagggctcatcccttataa

SEQ ID NO: 105726 - DNA, 232 bp, Zea mays
  Clone ID: MRT4577_27924C.1
cccacgcgtgcgcggacgcgttggcgtctgctcgatctttatatacagcttctcacatttctcacggctggctggggctggttatacactacaagggcgactaccactgcatactaagaaaaaggctcccttagcacatttatcagtgatgtacgcaccgttcatattttaaattcacatggaggtgtatttatgtccccctacaggctatgacttttgtttaccctttcct

SEQ ID NO: 105727 - DNA, 1076 bp, Zea mays
  Clone ID: MRT4577_27925C.1
gggttcaggtgataaggaaaggtagtggtaggaggatagatggagaggaaacggaaggagatggagaagggcaagtctgagctgagactggccatggaggagctccgtttgtgcggttcaagagatggggcggaggaggaggaggaggtgcaggttcagcaggtgaaagtgcaggagcagcacaagtcatccacaatggacctcctctatgtctccaagcagctcatccatgtccttgatgagattggaccaactctgctagtcctgaggcaggacattcagcaaaatgtccagaggttacaagacctgcatgaaaaggactgttccaaatacgcgtgcttgacggcgatagtcaccgaggaaatggagcaagggacagcgaagaagaccaagagctgcaccagagctatcatctggctgtctaggtcgataaaattctcaaagtacttactggagaggctgctggagactcctgagtcgagcctggaagagatcgtggaagaagcctacgcaaatactctgaagccatggcatggctggatctcgtcagctgcttacaaggtagcactgaagctcatcccggaaagagagttcttcgtagcgctgctgatgggtaactgtcaagacttggaggatctagcagaagatgccaggatgctggcctatgccgtccagcccttgttacaggagatcgatgcgatttcggctaagcacaacctggacaagatgaaatcctcttaggacacgaggattttgccgatcacctggtgactgtacatagctgcatacgtgacctgaccttgtcttgtggctgtaaaagtgaaaggtgtaattttggggtttgtctgtagatttctagtgacatatcgaatgtgtaaaaaaaaaaagttgtcttcagtgtatccctgcagtggttttagtgcatgtatacccctcacgacctaggcacagaatcctcttctagtgtcaaattgtgtagtgcttgttttctttcttcgatttttttccaacgtaatggcacaacctctgctttttaataagaagaaaacaagaagatcctggacagtttcagctcc

SEQ ID NO: 105728 - DNA, 396 bp, Zea mays
  Clone ID: MRT4577_27926C.1
attccaaccaaatcatcacccgtgtgtctatatgagttcacgcccatggcgagcaccggcattgggtcagtcaccattcggttcatgctggcccccggcgtgcccactgccagtagctgcatctgtcttgtcagcttctcctcggcgcccaaccgacttggcaggaggcttgtggtcctggccgattatgagtccccggcagagccggcgcccactgcggaatgggatggcgccgtggccaccaagcccaatgccgagaatccttcgtctatcggacccaataggggctccaaggtgaacatcctgatgctgcagttctacttgtacaacgggatctgtaacctcttcaccgtcatcaggatcctaatacccgttaccctgtggatggtgcggtat

SEQ ID NO: 105729 - DNA, 246 bp, Zea mays
  Clone ID: MRT4577_27927C.1
ccgctgtcttgcatcaccacgagcgtgggctctctcctttctcgactacgactggtccaccgactctgccggctgcggcctgccgaactgcgccaggtgccaagcagccatgtcttcttgggacccttcgccggccactagcaccaccagctcaaagatggcgagcataccgtctctcgacagcatgaatgcgttcccacatgcggaagaccacttcgtgaagaagacttactctttcgctgttgt

SEQ ID NO: 105730 - DNA, 396 bp, Zea mays
  Clone ID: MRT4577_27928C.1
aagttctgtgagataaagttagcacttagagaatggtgtgaaagtgccaatatcactatagcttctatggccgaagcaatgcagaaaaaatatgataagtattggaaaaagtccaacatagctcttgcagtggcttgctttcttgtatctaggatcaagaaaaaattggtagaatatttcatgttgaagatttataaggacagtgctgtcgcagaactcactcgctttatggatgttgtgaaccaattattccaatcatatttgagcagtacacgtgatgtttctattactcaaactgatcttgctgcaagtacatctaactcaatttgtataaatactgacattgacgagtttatatatgaagataatgatgcagccaaaggtgaaataaatgaa

SEQ ID NO: 105731 - DNA, 427 bp, Zea mays
  Clone ID: MRT4577_27929C.1
gccgatgtggaaaacgcagccattcgctatctcatcagtgcatcgactctacatatgacaagaggtccttgggagatcatcggtactcatatgctgaggaagaccttgtgcacgacatcgccactgatgggccgcacttaccagaagcatctacgtacctcatgcccttcaagctcaagtatccggagacgaagctggatatgaacaggaaaccctacaaggctggcggcgactctggctaacgcggcaacaagatcaacgaactaatcgagaagctgcactagaagcgcctacattgccttctacggctgacgatacgcatcggagcgatggatctgatattaccttgtcaggtttgtaatatcattagctgggtgtaccttcagctttgaaaccttacctgcgcttgggcgatcaagtcatgaaa

SEQ ID NO: 105732 - DNA, 384 bp, Zea mays
  Clone ID: MRT4577_2792C.1
ccggggtgttctgtctctatccatttgtttactcccgatccccatcagccatggcgataaagtgagggttccaggcgacggccgcttcagggagggctcgcggcggagacaggctcggcgctcgcgcggtcggcaggagctcgcagcgggcaagggctggctctcgggcaggaggtgctcgcagcacggtgctggcaggggtggctcgtggcgcaggcagggagaagctcacgacaggggcggctaagacttcggtgcgggcacagttgcaggttgcagcagccactcgttgaagatgtttccctctgacgtcgataggattaactctgatgtcacatatacagtatgtgttcagtttggacaatagattgctaaattggatga

SEQ ID NO: 105733 - DNA, 1082 bp, Zea mays
  Clone ID: MRT4577_27930C.1
ctcgtcacgtacgcacacgtacgtacacacacctcgcttgatatcatgcccgtgtgctctcaggtctgaaacaacgctgtccgtctctccggcgcggaggggataaaagtctcggcgtgaactcctggccagtcttttgctgctgccatatccgcgcgcactgccgcccggccagccagcgcgcgcgtgtcgcggcggagagggctaggtagtagcgtagcggtcagtggtctggacaggactagccagtggtgaccagtgcggcaacatgtgttgggaacttggaatggcggcggcgccacaacggcgcgcggcgtgggcggcgctgcttgtgttgctggcgctgacggcggcagtgacagcgacggcgaaggagtgcaccaacatcccgacggagctgtcgtcgcacacggtgcgggcgcggctgcaggcggcgccggccggagcggcggagtggcggtggcgcgagctgttccacgagcacctcaaccccaccgacgaggccgcgtggatggacctcatgccgccgcctggcgccgcggctgcggcgcaacaccagcagcaccaccgccaggaggagctcgactgggtgatgctctaccggtcgctcaagggccagcagcagcagcccggtggggggcggcaccgccgcagccgggagcacgccgttcccttgaggaggtgtccctgcacgacgtgcgccgggaccccgacggcgacgcggcgtacgggcgcgcgcagcagacgaacctcgagtacctgctgctgctggacgtggaccgcctcgtctggagcttccgctcccaggcggggctgccggcgcccggaaccccctacggcggctgggagaagcctgacagcgagctcaggggccacttcgtcggtcactacctgagcgcgacggccaagatgtgggcgagcacgcacaacggcacgctcgccggcgcgatgtcggcggtggtggacgcgctcgacgagtgccagcgcgccggcggcacgggccatctctccgccttccccgccgagttcttcgaccgcttcgaagccatcaacccgtctgggcgccctactacaccatccac

SEQ ID NO: 105734 - DNA, 270 bp, Zea mays
  Clone ID: MRT4577_27931C.1
gggggcccaacaaagagtctacctttttactgaaaatcaaaggtttaacccccgttttttgttgctagcaccgccttaaaatacattcgggggggaagttcccctaaagtaccacagcaaacggggaggcctttggaccttgttgcttgcagggcccaatatttcaagggcgttaaactgaaaaacattcctttcgggtaaggccgctccgcctatgtctttccataggagccccactggcttactttcaacaaaaaaaaattcctgtaa

SEQ ID NO: 105735 - DNA, 881 bp, Zea mays
  Clone ID: MRT4577_27932C.1
ctgagtcatgcagatccaccttacaaatctcttgctgctctcaactgtgttgtattagggtgtgcaaacatttgggatattaatcgagcttatgaaacttttgtggctattaaggaaaaatttgacctcactcctgacattcattcatacaatgcccttctgtgtgcatttgggaagttgaaacagacaggagaagcatgtaatgtgttccagcatgtattaactcttggtgttaagccaaatgcaacgacatactccttgcttgtcgacgcccatcttgcaaacaaagatccaaaagctgctcttgccataattgatgagatggttgatgctggcttcactccttccaaggataccctcaggaaggttcgaagacggtgctctcgtgaatcagacttcgacagtgacgagaaagtccaatccctggcaaagcagttcaactaccgaatgggtggtgagaaccgtagagagatgctttatagcatagaatacaatcctgtgtactgaaacagcagttgctactgagtttgctagccattgggagagcacagacattgtagcttgtaaattacttggatgtaccaggattcttaagcaaattttcagtttctcgatcatcatttgtgctcgcagggttcgttttaggatttgctaataagatgacactatttgtttgcttgagaatccgaaaatgtcagttttcccccataaattgtagcatctgcgtggccccacttcttacgtgactcctaggtgttttcggctttgtttacacttgtaactaacgaagaagtcctgggatgactgggtcgcagcttcttcaaaagatgctattcttattatggaaatttaatcggagactgacaatttaaagtcacctc

SEQ ID NO: 105736 - DNA, 458 bp, Zea mays
  Clone ID: MRT4577_27933C.1
gcgttcgtcgcacgccgcccgttgggcaaggagcttcggggcggcccgccgcggcgcgtcggtcgggcgggctgagccattggcacgggcccttggggcgcgaacgccctatcgtgggtcggggcgggcggcgcgcagaggcgccggttgctagcttggcttctgccttagaggcgttcaggcgtggtgcggggcacggttgcttcgcgccactggcttttcttcctgcgcgatgaccaattgtgtggttcaacggttcctctcgtgctacgttgaattgctttcgcggcgcggccatccgtgggcgcttcctgtcctgtctggcgccggtcttgccccttgtcgcgttccctgttggtgggtcgtctgtcgctcacttggcgggttctgctttcccttggttggcggtgccttcgtcgcccgatgcgtgcggcccgtcccgttgagcgcttggctgc

SEQ ID NO: 105737 - DNA, 486 bp, Zea mays
  Clone ID: MRT4577_27934C.1
tttctcacttgcttgtttctcgctgcctttgttccagtcataaggtacaaccataccaagagacacagggaggacggcgacagatcgtgcacccgactgcgtaaacagctaagaatcatccaccgtcaggccttctcctgcgatgcgcatgaggcactgctgctgctgccaacttcgcacccgcccatgtccccaatgacgcacccacaggcgctaccaatatgcaaaacagggaatgagcacctagccccaagctatatgcctactgtatcacgatacaagaatatgccgctgagtccatgaaggtgatatccatcgacaagtgacttattttttactgcctcaacaactacatgagaaaagctactggcataagggagcatgctcaggtctgaagaacagtctacctgctgatccgctgcttaccatgtttccacaaacacagctggcccaaatgattctagtgatgacacacgtgcttctgga

SEQ ID NO: 105738 - DNA, 2335 bp, Zea mays
  Clone ID: MRT4577_27935C.1
ctcgggccggccgggactcgtggacatctccccggccgatatgttgtcttcctgacctcatcacgcccgctcatctcaaagatctcagccgccgtcgtctccgtcgctccgccgcacctccccccatcaccgcctcactaaaaccctaatccctagccgccatggcggctgttgcggcggccacctcgcacctcctacgccaccaccgcaacccccaccttctcctcctccgcgcagcgatctcatcctcccgtgctttgccccagcagccggagctgtcccccgacccgaccgccggcacccccgacctcgccggcgcggccccactccctccaaaccccagcacggggagccccttctacacccagaactggcgcaacccagccgccgccaacccgccctcctcgcttctgcccaccgtcgtcgccggcagccccttcggggcgcagcacttcatggccgccttctacgatgcacccgacgtcacggggctcaaggagacgttcgccaagtatatggcggagcagcggtgggaagacatgaagcacctgttcgaccactgggtgcgctccctcgacgccgccacggggaagcccaaccaccccgacgtcgacctcttcaatcactacctccgcgccaacctcatgaccagggccctgccgcacgagatgctcgatctcgctgaccacatgctcgagttcgagctccaacccaacactgcatcgtacaacctcgtgctcaagagcatggtcgccagccaggagaccgagggcgccgagaagctcattgaacggatgctgcaaacaggaacatttccagacgatgaatcctacaatttggttgtaggcctgcttatcagacagaacctcgttgattcatctctgaagtatttggatctgatgcttaaatcgggctacatgttatcactaactgttttcacagattatatccgagcatgtatgagatctgggaggttggacacgttgacatcaattatagagaaatgcaagacaactgataagaacaaagtcttgtgtccggaatggacttggtgcattgacatagcagatgctgcatttgaagctaacaacagcaaattagctctttttgctttggaatatcttgcaagatggattgctcgtggtgagaatgttaaacctcctgttcagctgtcagttaatgaaggtcttgtaatatcagctctgagtgctgctggcagaacttataatactgacctcttgaatgctgcttggtcgctattacggaaatccctgcgccagaaaagggcacccacccaagagacatatcttgccaagatctatgctcattcatcaattggccagcttcaaagggcttttggtacattgcgtgaatttgaaaatgcctatgggaactctgaggacattgatttagagctcttctcaccatttacttctttgcatcctcttgttgttgcttgctgcaaagatggctttagcacattggattcggtgtatggtcagttggagaatctgatacatgctgatccaccgtacaaatctcttgctgctctcaactgtgttgtattggggtgtgcaaacatttgggatattaatcgagcttatgaaacttttgtggctattaaggaaaaatttgacctcactccagacattcattcatacaatgctcttctgtgtgcatttgggaagttgaaacagacaggagaagcatgtaatgtgttccagcatgtattaactcttggtgttaagccaaatgcaacgacatactccttgcttgtcgacgcccatcttgcaaacaaagatccaaaagctgctcttgccataattgatgagatggttgatgctggcttcactccttccaaggataccctcaggaaggttcgaagacggtgctctcgtgaatcagacttcgacagtgacgagaaagtccagtccctggcaaagcagttcaactaccgaatgggtggtgagaaccgtagagagatgctttatagcatagaatacaatcctgtgtactgaaacagtaagtacttgttcatctgttggattttgccccatgtagtggttggttatgttttcaccctgacaattagtgttgcatcttgctagttatgctttcctggccgtttctcctgactggtgttgtcttcattttgataggcagttgctactgagtttgctagccattgggagagcacagacattgtagcttgtaaattacttggatgtaccaggattcttaagcaaattttcagtttctcgatcctcaaaaaaaaaaaaaaaaaaggcccttattatggaaatttaatggaagactggcaatttaaagtcacctc

SEQ ID NO: 105739 - DNA, 172 bp, Zea mays
  Clone ID: MRT4577_27936C.1
gctcgaggcgagcggctgccctttcttcttttattaacaggacccccagctttaccaaaaggcactttcaagcaaaagtaacttccctagtaacaggctctcggatttaagagcgtgacggagaacctggaaataaataaccacccaaaatctcgggccaacttttctaaca

SEQ ID NO: 105740 - DNA, 560 bp, Zea mays
  Clone ID: MRT4577_27937C.1
acctcgaggccggcctggatctccactacgacgaagtcgaaggttgtgtccgtgtcatggaggcctccaggaagcggcgtgagagcgagaggtccagaaaatgacgagcagcactctgatggcgatcctatgtctccaggcccttctgatctctgcagccgtgtccaaaggacctgcagggacgactaccaacaatcctgctggtgcggcgagtgcaccacctggacgggcgtgtggacctgcgacgacctcctcaccaagtgcgccgccacctgcaataactgtctccccgtgtccacggacaagggggccatcaagcacaggtgccgcgacttcctccccgaatcactgcagctgtaatatccactagatactcatccaaatccaacatggccgcccgccacggcgctacatccgatggatccttccatgctcctccgaccggccgccttgctacaagtatgcagccacaccaataagctagctcctcgcggcgccatgtatgtttgactgtatggcccttcccatgcgagatggaataaaataaatcatcaggcgcc

SEQ ID NO: 105741 - DNA, 884 bp, Zea mays
  unsure (1)..(884): unsure at all n locations
  Clone ID: MRT4577_27938C.1
cctcgaggccggccgggccggccggccgggccgggcttgctatttcgtcatcaagcacgcccgcccgcagctcgcatcgtctaccctgcgcggctgcgcctagggtttaaccactcacagcagccgccgtgactctcgaaccatgtcagcgccgccgtcgctcaagcccccagcaacctccgcagcggcctatccgcgggcgtccgccgccccgagagccaccgggattcgcggcgcctgtgctcttccaactcggcgcctccaatgctcagcctccgccgccgtcgccggagcttccactgagatggctgatgccccgctggactgggctggaaggtcgctggaggagttgcgcagcttgccggaccacgacacgttctgcctgatggcgctctcgccgctggacgggcggtacgaccgcttcgttaaagagctgatgcctttcttcagcgagttcggcctaatcagataccgcgttctcatcgagatcaagtggttattgaaactttctcaaattcctgagatcactgaggtgcctcagttcagcaaggaagcccaagccttcttgattgctattattgagaatttttgcattgatgatgcaaaagaaataaagaaaatcgagaaagtaaccaaccatgatgtgaaagccgtcgagtactttctgaagcaaaggtgcagctccaatccagagattgctaaggtgtcggagttcttccattttggctgtacctctgaagatatcaacaatttgtcacatgcattggctctgaaagagggngtaaaatagaagtatgttccctgccatgattgactatgcacagcattgtggtcctggcgacacnaaatcaggctaccctatgntggctcgaactcatgggcag

SEQ ID NO: 105742 - DNA, 342 bp, Zea mays
  Clone ID: MRT4577_27939C.1
ccacgcgtccggctctgttcgtgctggaaacggtggaggaagaggcggacgcggacactgagaggtcgtccatcggcgcggcgtccgaggacggcgacgacgaggaggaggaggaggtggctagcggcgggacgaagggcgccggcgccgcgctcgcgtgcatggacatgggcgccctcgacgacgcgctccccatcaagaggggcctgtccaacttcttctccggcaagtcgcggtcgttcgtcgcgaacctgcgggacgcggcgtcggcggggagcagcgcccggggcctggccaagccggagaacccgttcaacaagcggcggcgggtgctgcgctact

SEQ ID NO: 105743 - DNA, 889 bp, Zea mays
  Clone ID: MRT4577_2793C.1
tcgaggccggccggggtttactctcgatccccatcagccatggcgataaagtgagggttccaggcgacggccgcttcagggagggctcgcggcggagacaggctcggcgctcgcgcggtcggcaggagctcgcagcgggcaagggctggctctcgggcaggaggtgctcgcagcacggtgctggcaggggtggctcgtggcgcaggcaaggagaagctcacgacaggggcggctaagacttcggtgcgggcacagttgcaggttgcagcagccactcgttgaagatgtttccctctgacgtcgagtaagactaattttgactctaatttctcttatttggattattgtagaagcacccagagaacaaatgagatagggtaaattcacttagcaagaaatctaatactttttttggtttgttggaatttagtaggattaactctgatgtcacatatacagtatgtgttcagtttggtcaattcattgctaaatttgatgacggtagttgtgttcttgtgccacacaaatacgatgaatgggttgtggattatcagcgatgctcactagcaagcttgcaaaaggactttgctgccagggtgaactggggcagcaaccaagaggtagaggtgtcagtatttgacaagagcatcaatctagaaacaaggctggagaatgattccgtattgcgtgcatttttcgacaggtgtgttgataggaggttgtacttgtttgctgatgtggtagataaatcggctcaggtgattagtaattctggtctcacagttgttagtcacagtgggtgtggaaagtgcagcatattattccaggaaatggccacacccaaaaagcaacaagttgtgacaaatcaatcaactaatattagtcctgg

SEQ ID NO: 105744 - DNA, 163 bp, Zea mays
  Clone ID: MRT4577_27940C.1
cggacgcgtggcagaatgtccgtggatatacagcaaggaagcagtgatgcacgcgaccttacctttaagccatattttacaagtagattcagcactttagccaatggattggtcagatgtatcgatacattctatgaccatctaccaaggagttctctgggca

SEQ ID NO: 105745 - DNA, 129 bp, Zea mays
  Clone ID: MRT4577_27941C.1
gaataaagccggagatctattcttcatttctactgggacagttttcttttatgcggaaaaagaactccaaaacgggaaggcctgcaagctgaatgctccatacagacatgccgttatttgcatatgcaa

SEQ ID NO: 105746 - DNA, 450 bp, Zea mays
  Clone ID: MRT4577_27942C.1
gggaaaaaccaacttttgcccaaaaaataccaaaaaggtgtttttgaaaagcaaattagtagatgggggcatgaacacttggaaaactaacttcctaccctggactttatacgggctttggtggatttttcagccattttgggttttttggcttctgcaggtggttcctcgtactcatgggagcagcagcatgtttttatttcactggtcgggagggattgacccgggggaaacccccttttggggggatatgggggaagcaagggcaactggctttaggcaaaggcccttgttttgaagggactgcattgcccttgggaagctggtttccattaggtttacaacctttttcttgaaggggaagggggtttccgaattttccggggccagaaatccttgggcgttggttggagcctacaaaaattgaccccggaaaccctacatgaattg

SEQ ID NO: 105747 - DNA, 367 bp, Zea mays
  Clone ID: MRT4577_27943C.1
ctcccaaaaaaaaaaaaaaaaacaaaaagggggggggggggggggggggaaaaaaaaaaaaaaaaaaaaaaaaaaggggcgggcgcgctctaaaagggatccaagatttaacgtaccgcgtagcatagcaacataaataactggttgtaatagtggtcacctaaaattacatattcacttgggccgtgcgtgtttacaaacgttcttggactgggggagagaacgcctgcctataaccacaactttaatgcgcgcttgcatacaacatcccccttttcgcgcagcatggccgtaatgagcaacaaaggctccacaccgtatcgcccttacccaaccatttgccccacctctgaatgagcaaatggga

SEQ ID NO: 105748 - DNA, 689 bp, Zea mays
  Clone ID: MRT4577_27944C.1
acaacccgtcctctgtccggcctaccaccaccgctacacctcggattggctttctcccgtcttccgtacccgcttctcgctccggattccgtgattccctctgctgcttctccctaacgaaccgtagccatggccgacgataggtaaggctaacggctccagctgcggccttaatgctccgcacaggagctccaagggtgtactcttatctccgctgcgaaagatgccagagtacctagggacgatggaggatgacatagagagcccctccgaaatcccatgaatagcattggtgccccgtcttgacttctcctgtcggtgacgccacttcagctgtaccaaattgaaggtgcgttgacaatgaagatggacaggtcgaaaggaactgggatcacttctgccacaatcatccggaaaagatactgcacgtgatgaattcagagattgtagctaattcggaccatatgtacaaaatggacgtcctattgctcaaggaaatgggcatggacgcatataggatctctatctcttgggccagaatactgccgaatggaatcaaagagggaggtattacaccgtgtggcctcatgtactacagaaagctcatcaacttggtggtagaaaacggcatagagccatatgtaactattttcctctgagatgtacctcaagcactacaagagaaggac

SEQ ID NO: 105749 - DNA, 444 bp, Zea mays
  Clone ID: MRT4577_27945C.1
gtgcacccactgtttttttactaacaaaaacttttcttttccacactagaactgaaccccgatcagggtgtaaccccggaacatatatatcctatggggaacaagaactggggcgtatggcatcccaaaaaatttgtgactaccaagagcccgagcaggccaaaaataaaggctccctcggcctggggcagcttattcacgaggtgaccgaagagccggggcactggccccgcatttctgatcagcaaagcatgaccccccttacaaagccgccttggccagctggggatccaggggctccttaccaaggaaaggaacccccattaaatggaacacctccgggggccctgcctggctgctatgaaagacccaagggaaggccacaaccgacagaaactcaggggctttctggttgatgcaactcaaggcccattctgaaaaatt

SEQ ID NO: 105750 - DNA, 698 bp, Zea mays
  Clone ID: MRT4577_27946C.1
ggtagatttgaagtttgccacatctgaggtagattatacaccaattggtggcaacgatgacaaccatacaatatcagcgagttatgttgacgcggagctatctcgtcttagacaagaacagatatatcttggacatgaaaggcgaaaacttgaaagtcatgcagagtctgtaagcagtgagatgtttgccgaatgccaggagttgctccaaatgtttgggttgccatatattattgcaccaatggaagctgaagctcaatgtgcatacatggaaataaataacctcgttgatggagttgtcaccgatgattcagacgtatttctgtttggagcaaggaatgtttacaagaacatatttgatgataggaagtatgtagaaacatattttatgaaggacattgagtctgagcttgggttatcacgagaacagttaatccgcatggctctgcttcttggaagtgattacactgaaggtgttagtggtatcggcatcgtgaatgctattgaagttgtacatgcatttcctgaagaagatggactgcagaagtttaaagaatggattgaatcaccagatccatcaatatttggtaaactgcatatggaaataagtggtagatcaaagaaaagaaaactcgatgaaaatgattcaaatggaaaggggaaaggcctggaacctgaatgcattcaagggtctgatg

SEQ ID NO: 105751 - DNA, 259 bp, Zea mays
  Clone ID: MRT4577_27947C.1
tttacttgtcttattttttcctttctttttattaaaccaaacaaaaccagctggggggtttggcaccccaggcagggtttttattccttggggggcccccactgggtagttaaagaaaaaaaaaggggcttttaggagatacttgcctaacccgacccctatgtccctactcttaccaatcctcacttagttacctgaattttttcggggaatttctgaggatcggccgagcaatcttctgagaggcccttggtcatcc

SEQ ID NO: 105752 - DNA, 206 bp, Zea mays
  unsure (1)..(206): unsure at all n locations
  Clone ID: MRT4577_27948C.1
ccggtgtcgacccacgccgtccgcagtatttcgttcttgcagtacaataatggggagcctgcaactcgtgccgaggccacggcgtgtgggcggcgggcgcccggggccggcgacgtgcggaggcgaggggtggtgcttcgcgtgacgggcgcgctgcggcggttccctgngcggcacgcgggccgtcgcattgcctgtgaaggcgt

SEQ ID NO: 105753 - DNA, 509 bp, Zea mays
  unsure (1)..(509): unsure at all n locations
  Clone ID: MRT4577_27949C.1
gacccaaacagcagtcacagatcaatatatctcctcttggtataccaaaaccacatgaaaatccatggggtccttcccaaacccattccacacaccgngaacctaaaaacgtctagattgccaacgcagccaccattcccccccggctggatttggtttggtttgctaaataccacccaccaaattccctagtcaaaaggaaacatgatcaaccagcaggcagtgagcatttgacctcttcatcaggattcaaaggaccaccaagatcagggcggcgtcctcaaggcctgcacgaggagcgcgaacccgggcgccctggcctcctcctccagccagagccggttttcgagcgcgctcctggcgcggagcatcacgacggcgcagccgggcgggtcctggaaccaccagccgtggaggtcccacaggacgtcgacgggcgccccgtccacgaacaccgtttggttgccccggaagttccagcgcaagcgccccgcgtgcacggggcgctt

SEQ ID NO: 105754 - DNA, 462 bp, Zea mays
  Clone ID: MRT4577_2794C.1
agcagtggtaacaacgcagagtacttttttttttttttttttttttttttttttttttttttttttttttttttttttttttttttttttaaaaacccagggattttattcgaggttttgaacagggaaattaatatagactccgtacttaagaacacaaaacctggaacaaaacatatttggaacactccaggttttaacagaaaaaaccgcacaccccggtttttattaaaaaggaaaaagggacaagtttaaggcatagcagcataggggcaacactaaaatattaccacatcccataaaacgggcttcagcttaaaattataaggcggaaaaacttccaaaggggaccccgggaggggaaaggacttgattcagtcagtctaaagatcaggggggggggggcaccattaagggtatttaccccccgggaactcgggggggtaaccacggtttaagggg

SEQ ID NO: 105755 - DNA, 518 bp, Zea mays
  unsure (1)..(518): unsure at all n locations
  Clone ID: MRT4577_27950C.1
cttgngggtcttatttacaaaaccgtcttcttcttcctctctccctcacgtgcacacacaagaactgccatgggcacttgtggtcgaccaggagaggaggtagcgcagggaggggttagggcgagctcgcctgccctactgcttgccgcagtagcagcaccacaggaggtggggggaggggagaggggggggggggaggggaagagagagggggcgagggtcgaccgtgccggttgagggctgcgattttaacagtgaaaaacgaggacgaaaaaagaacaatggagtttgctcaccggagaagaccctcgccggagtcgagtcggaggttcgatcgacgaaccgaaagcaccaagatgaagccctcgacgagacaaacacaacggtatcctcggatttcgccaacgacgccnngattgaaagtnattgctcgttggagttggaacccccccaaactttggcgaggaactgacggcgctgtggttttcttctcttgtaaatggttctgtttttctttt

SEQ ID NO: 105756 - DNA, 307 bp, Zea mays
  Clone ID: MRT4577_27951C.1
atttggctgtttcgtcaattacaaatacacccaactctccaaaaccctctggaatacataatctcttattcccgcctatctattataactatgtaataaagcattacacaatgtcctatgtacactaatccgatataacaatagcctaaacaactctttattattctttagcattcactattgactatatcttcaaagtctttcttaatatctgttcttccgtattctcttgactgatcccaattatttatttcttcacccttaattttcctttacctttctcatatcttacttacccaataaacca

SEQ ID NO: 105757 - DNA, 208 bp, Zea mays
  Clone ID: MRT4577_27952C.1
cggccctttttttttttttttttttttggagtgggagaaaaccattacctggattcattaaattggattgggcacaaggcaaacatgcaggggtttgataaagacgtcgatcttaaaaaacccttccttagggcttggcctttttaagggggtaaaatcaggattcccgtgaggaaatttttgttacataaacgaagatggggccttg

SEQ ID NO: 105758 - DNA, 397 bp, Zea mays
  Clone ID: MRT4577_27953C.1
atattgccgggtcgacgagctttcttttcggcggccgcccctccttttttaagggcaagactcttggactactccaagacctactttcccacgggcaaaaccgcggccacttgatgccaccgagatggctgatcaaggtccggtgccacgcacctacacggtgcacagtgaacctagtgatgggctggatggctgcgtacctgaccctgcacatttcccgcaactgcaggctctccgaccccgcacattgtctcagcacctacaactacttgacccagcaccacaactgtgcgctccagcagttactaccgccgctcctggcgaaataccagcatgcgaggatcatgtgccccgactactacggtgccgccatgtgcttcgtcaagaaccccaagca

SEQ ID NO: 105759 - DNA, 399 bp, Zea mays
  Clone ID: MRT4577_27954C.1
aaggtaataaaaaaaaaaattgaagaaaaaaaaacaaaaaaaaaaaacaaaagggggggggaagaaaaaaaaaataaaagaaaaaacgaaaccatggggggggaaaaaaaggtaaacagaaggtctggaggccagaaacaaacccgccaagaaggagaaagaaatatccatcaaaaaggcaccctaaaaacaaaagatttgacaaaagccaaaaaatttaggcagcaaaaaaggatcaaaatccaaaaaaattgacgggctaaaaaccaataaagccacaaaaaaagaaagttttccccccaaaaaatggtgtgcgcaaaaataaagtaaacggggaaagcaaatttgaaaggaccattgaaattgatttaggacaaaatattaggaaagtgggaaaaa

SEQ ID NO: 105760 - DNA, 138 bp, Zea mays
  Clone ID: MRT4577_27955C.1
aacacaattcaccgaggcgcataacaaatatccaatatcgaaaaacaataatgtagtgaagacaaccatacgaaacgtcgttcttaataacccataggcacagatggggcggacataaccagaaaggtttacaaaatt

SEQ ID NO: 105761 - DNA, 403 bp, Zea mays
  Clone ID: MRT4577_27956C.1
ataattgaggaataaggcatggaaggagtgagaggaaacgggtgacacaatggggggggggggggggacgggcccggcgaggaaggaccaccggggggggggggggggggggaggggccggcaaggaccaaaaacccggggaggcaggcgcccaaaaacggaagccgggcgggacgagaacaaaaaaggggcggcggggcgggcggtcgggtttacgcgtgtgggcgcggcgcggggcccgggctggctactggggggggccgggaagaatgcgcgatttacttgggggggaagggagaatcaccgggaccgggagccggggaggccaaaccagggccaccggaaccgcagccggtaaaccaaccgccccaggggggtgagcggaccccccaacccggcaagg

SEQ ID NO: 105762 - DNA, 426 bp, Zea mays
  Clone ID: MRT4577_27957C.1
ccgcatcacgcatagcagagcgaccaacccagaccccaccccaccgcccgcaaccgtaagctcagattccctccccaccccaccccaccccaccgtcccgctcactccagcccagccggcgtgcccacaggccagtgacagcggtcaccgtaggaatccagaaatgtgcggcggagccatcctgtcggacatcatcccgccgccgtcaccgcggcgcgaaacggatggccacctctggtccgagagcatgaagtcgaggagggctgcatccgtcaggaggggagcccccgtggagcatcatgattagtaggaggatttcaaggtcgagttagaggagttcgaggtggagtccggcgacgaggagctcgagtccgaggacgagagcaagccatttctccgccctcagtagttgtgttcgttagaggt

SEQ ID NO: 105763 - DNA, 533 bp, Zea mays
  Clone ID: MRT4577_27958C.1
actaaaaaggcacgctggcggatattttatacgcctatagctttgtacacagatacaatcacacggccggcaatatctgaacatacagaactccattgtcacatacagcctccggcacatggaaggttaatatgaacagtcatatgaacggaaggggagtgggttctgccctcacgctatataactcatgggacatggcatgcacaatcatggctaaaaaaaaaagtatcactgacatacagtcaataacgataagtacgggatggactcatggcaacgataaagtactagctatatcatccttgctagctatggctttgtgcctatgttttacctaggatatattgaaaccatccagactttaccttgtgtttaccttaacaccaatcattggcagtcacctgatgttccacaacatatatacccactgaaagactgagctgaccatccctgttgcattacattgttgaattacctcacccagaaattgtgcctactgactgttaacctgaagattctttagtgttacaaaa

SEQ ID NO: 105764 - DNA, 429 bp, Zea mays
  Clone ID: MRT4577_27959C.1
cccacgcgtccgcggacgcgtgggtggtggcgcactccggtgagccctctgcgtcaagagttctagtgtcccatctcacagatggctcggtactattcgacatacggagtatagcgaataaatggaggtgaagtttaccggtaataatgggttggtgaaggcggttcacggagcaaggcgagatcgcggcgtgataggattccggcgaggaattctgctcgtcccgggctccaattcacatcggggcggtgacgatttcacaccagggaacacttcgaaggtctctgggctagcctcgcgcttcaatctgctacacaggcgaagagcagatgtggcgactctccttctctcttttcgcagtgctggcacggtagtttggataggcgcggtcaagggtgtccagccctactgtaaccctctgaattgggg

SEQ ID NO: 105765 - DNA, 146 bp, Zea mays
  Clone ID: MRT4577_2795C.1
taggggccttttttttttttttttttggagaaagacccaaagcacgacgaaaacagagctacattacgcaggaaccgtggcccacattgtgcacagcaaaactcgcaagccgcgcaagcacgctcacaagagccaaaaccagagga

SEQ ID NO: 105766 - DNA, 263 bp, Zea mays
  unsure (1)..(263): unsure at all n locations
  Clone ID: MRT4577_27960C.1
gcttggcttctgccctgccgtgtagccatggagccagaaagaggcctgatcgcatatgaagggccgcctccagactcgacggacctgctgtcgagcgcgtggtgcagctcggctatccaagttcttgacacaggaggacacaaggagtgctcgatggccctggtggagcatccggtcatggcgcttggcaacgacaggaacgacgntgttgcaaagagcgaccgnagcattgnggnttacaacagcagcgtcagcacggccca

SEQ ID NO: 105767 - DNA, 359 bp, Zea mays
  Clone ID: MRT4577_27961C.1
acgcgttacgcgtcccctgacgcgtatgcagtaaattctctattctcaacactgctgaacaaatccggctatgggttatgtatatttgcaatttgtcttatgaagacattctaccatatgatctcgcctatgactttactgatttttgctccacttctagtgctgccttagtttctcacatgcatgttgactagatgccatttactaatatctaccgctactgattctgttcttactatgcaatcttctataagctaccttattacacttatgctagacccacgatacctgtatgaccacatcctttactgctactactacttttaccttgattttcgaaatcgcgcattctttcttct

SEQ ID NO: 105768 - DNA, 396 bp, Zea mays
  Clone ID: MRT4577_27962C.1
atattattgcaatggagttcagacaatttttttagcattcaccattggtttgttcgttggtctgtttttggctcagtatttttttctcgcgcaagtcttctctacttgttgtgcattaggaagtttggggttctgcactgacttggctccattggagtattcgtcataaaagaatttctgtcgtggattgagtacaaggagcaaatgtgtcattgcgtaccaatcagttattgtgctgtaatttttttatttctttatttggtttccgggcaaaattgagattaacacatttcttcccacagattgcagttcttggtggctctttgctgggaacattcctgtctgaaaagattatagcatacattggagggagcctattcttggcctttgctgcga

SEQ ID NO: 105769 - DNA, 364 bp, Zea mays
  Clone ID: MRT4577_27963C.1
attcggctcgaggtgagctcgcatgagcgctgttagatcggcatggagcggacggtcgtggcggtagccatggacgactaggcggaggtgaagctgcgggacgagatcacggtagagggatgggcgggggtggactggggctacctgggctgcgactggatgggctccggctcctacccggcgaacccattctccagagactgttctatccacgcccacctgcgagtggttgctcctctccatggaccccgcagcgctctttgactttaacggagccttccctgccttcttcacggtggtagctggagaggcaataacaaagggatgccagtccagaacctgatggccgaacaccggcgttcca

SEQ ID NO: 105770 - DNA, 404 bp, Zea mays
  Clone ID: MRT4577_27964C.1
aaaaggccggcctaagtttgtcccccaaaattaaaaacccccgggggaggggttttgaaaaataaaaacccaacaggggggggcaggcggcacacctttgggaaacctcccccagacaaacaggggggggaatccaccaaatggacccccccggttttttgccctttttggggggccgggggaaaaagtttttgccttttaagcgggaaaaggcctttttggattaggggtatggaaaccccttttggtttttaaagggggttaagtggccagggggggcccctttttcaccataaaaaaatttttgggccggtgggtccccagttcctttcaaaaaaggggttaaaaaaaccagggggccattttttttttttagaaggtttcttaaaaagggtgaggttttt

SEQ ID NO: 105771 - DNA, 610 bp, Zea mays
  Clone ID: MRT4577_27965C.1
gccggccgggtcgcggtaacgaacgaacgatttgaacgaccgataaatgtggagtgttgatgttcatccgctatccgtccgcacggagttgttgcctagttctcgtcgtcttggtcgttggcgtgccacagcacgacagctccgctgcgccgccagctccactaccgcgccaacttgttgagcaccacgccatggccgtcggggcggaggttccacgacgcgatgccctacgtggcctcggccacgacattcgcgtccagcgcatgttgatttggttcggcacgtggaaggagcatcatggccatggagtctacggtagcctccggcggcgcgacgcagttgtagacagccaatccgtcgggtatgatctgagcgacctgcatgctcaaagtcatagccatgcaagtgggtggaggacgcgcaccaggtgctcgatgatatgctttaccgactgcctagaaacctgctttcgctgttaagccaaaaagacgatgcttattgtaatacccaacttgtaatttttggaggataacctacaaggagaaattgtattcttgtgtatatatgtgttatccatatttagcaaaaaaaaaaaaaaaaaaggccccta

SEQ ID NO: 105772 - DNA, 341 bp, Zea mays
  Clone ID: MRT4577_27966C.1
acccccctaagagaccgaattacagagcaccaacaagcaccatactaaagtggaacccactagcaacaatacatcaacaatggcgaccaatatatgttccctgcttaagctccttgctctttctacatgtgcagctaacgcgacaacgtatccctcaatgctcacaagctcctatagccattgcttcttccaccataccttacatcaattatagctccaagatgggaaaacccagctcttaaaccatatacgcttcaacaagcagtcgcagccagcaacataccttaatcgcccttggtgttgcaacaatcgccagccctatctttggtgcattcattggc

SEQ ID NO: 105773 - DNA, 328 bp, Zea mays
  Clone ID: MRT4577_27967C.1
ccctgccgcgctgcgttattcttctgcttctcacttggcgcttcattaacttttcttcttctttaaaaaaaaataatgccgattttggcaaccagtaatacctcatccacaatgtgtcattgacatataaacagttcacagtaaaaaaaaaaaaaaagggcggcgcactatgactctcaccgaataattcggaccgtcctgcgctaccactttctatgtagtctattaagctgcgaatcatggcatagctgtcctggtaaattgtatcgctcacaattcacacacaacaccggaacataaggaagccgggtcctatgagtgactacta

SEQ ID NO: 105774 - DNA, 546 bp, Zea mays
  Clone ID: MRT4577_27968C.1
ggtcaatcttttcacgccgcgcgatcagatcagctttggctacgtggtgcataggctcggaggcgctcttaagttcttcatgttccccgacgcgtgggtgcgaatacaattcgctgttcatcctgcacggacacacgagagaacactcctctaaagtcgagtgggccaaaacaaccgatgagattgtgaagaagggactgaaggagagtagaggaggattagggctatggactccgtaccctgcagatctcagctccgtggaactccctgctgtaaaaaggacttcaccggcaggctaggctgggattttttggtcttctattcgttcatggttgtacaaagtagaacactactgatttccccccccctcctatcttttctcgcttaatcagacgagatcatgtaattcctgtagattctgtggtaactgaaccccgggggtactgtaggctaatgcttggagcttgttgcttccagccgtttctgtgcaatttgacactcatttgcatatgtgccataaaaataaaatagaagattcatggttca

SEQ ID NO: 105775 - DNA, 205 bp, Zea mays
  Clone ID: MRT4577_27969C.1
cccacgcgttcggtgaaccattaaattgtttagtgtcttctctgtaatagattgaggtgttcttggttctttgtctatggttgaatcggaacccatattccgtttgcctaaattcttaaattctggtgctgtattccagcttaaactagtaaatctatgatttttggggtgtatcatgtaatagtcacctaccttttatctggtc

SEQ ID NO: 105776 - DNA, 405 bp, Zea mays
  Clone ID: MRT4577_2796C.1
ggacgtgagactagcaatgagctcatcgactccagattggagaactcgacaccatgaaggtgctgatcgttgccattgctctcgtggcgctcgctgctagcgccgactccagtacaagcggcggctgctgctgccagacaccagcgtgtcatctaccgccttagttctatatgccgactccgttctatctgccgacgcagcagcatccgcagccatggcattaccacactcatccaccgcagctaatcccgtgccagcagttcggatcctgcggcgtcggcagcgtatgcagtccgctcctgggccagcgcgtcgagatgctgaggcaccatgtgcagaccggcggctactccgtacagctcgacacagtgccaggcgctgcagcagcaatgctgacaccagatc

SEQ ID NO: 105777 - DNA, 214 bp, Zea mays
  Clone ID: MRT4577_27970C.1
acgtaacatgcgccgtcgtcgacgcgcacgaagctgctcagagaaaagtgctggaagcagagggtgtgcaagttcgaagcacagccacacagagcaggggccgcggttgcgcagcgcccacgtgcgccgttggacagcaactagcatatatagctagagctagctcgatcgatctgctgtgcttacaccaccagtccaccgcttctcttgcttc

SEQ ID NO: 105778 - DNA, 827 bp, Zea mays
  Clone ID: MRT4577_27971C.1
ccggccggggccatatccatctccctatataacggccctttgggcccctcgaggggcttcgggagcacatcatcaacaagggatcatccacacgaccgcacccactactactgagtgagagagctcctgtgccacaggcccacagctagctctcctacacgtccaccgatcatctcgcttgagctctgatctccctcagaagtcagaacctatctgaagagagacgatgcctcggttattcctcttctgcctggtgtccagccagctggccgcgaccgccgtcacggcgcggcctttcgccaccgtcctcctgcacggcggcgcgatgagcagggtagctgcggacgctccttattccgctgccgccgtcgccctacacgcgcactccctgctggaggagtccaggttcgccggatcgccgctgagctcgcaccgcggcgggcacagacctttcgaccgggcgttcgccggcggcaagatcatcgtggcggggctcgccgcggccatcgtcgtcgccgtcttctgctacatccgcatcacgaggaagaagagcgtggagccaaaagtctgatgatgactatatagaccacctgactctttctctctgcacactctctgaaagactgaaaccctttctgctctacaaactgcagagtgaggatatacgggaagaaacaagtgtaacccccctagatttgctgtaatatactacatttgtgatgatggatagatggttcagctcctgtcaaaaaaaaaaaaaaaaaagcgggcctcgagctcacagccgatgttacctctatctatccatcatcgctagtatcaattat

SEQ ID NO: 105779 - DNA, 898 bp, Zea mays
  Clone ID: MRT4577_27972C.1
cctcgaggccggccgggagccatcttcaacaagggatcatccacacgaccgcacccactactactgagtgagagagctcctgtgccacaggcccacagctctcctacacgtccaccgatcatctcgcttgagctccgatctccctcagaagtcagaacctatctgaagagagacgatgcctcggttattcctcttctgcctggtgtccagccagctggccgcgaccgccgtcacggcgcggcctttcgccaccgtcctcctgcacggcggcgcgatgagcagggtagctgcggacgctccttattccgctgccgccgtcgccctgcacgcgcactccctgctggaggagtccaggttcgccgggtcaccgctgagctcgcaccgcggcgggcacagacctttcgaccgggcgttcgccggcggcaagatcatcgtggcggggctcgccgcggccatcgtcgtcgccgtcttctgctacatccgcatcacgaggaagaagagcgtggagccaaaagtctgatgatgactatatagaccacctgactctttctctctgcacactctctgaaagactgaaaccctttctgctctacaaactgcagagtgaggatatacggccatacgggaagaaacaagtggaccccccccccccccctagatttgctgtactatactacatttgtgatgatggatagatgattcagctccttcacagttcagacccaatgttacctctatttatccatcatcgctgagatcaattatgcccgggcgcaaaagaatgtgctttctgacgaaatacgtggatgtcagcgccccagccaccagatcttaaaacaattcggttcttgagctgaattggccttggtttttgaaaaaaaaaaaaaaaaaagcggcc

SEQ ID NO: 105780 - DNA, 248 bp, Zea mays
  Clone ID: MRT4577_27973C.1
attcccgggtctacccactcgtccgaatgaggtataaatcatcgttgtggtgtaaaaaaattaaaaaaaaataaaaaaaaaaaagaaaaacggaaaaattaaaaaaaaaaataaaaaattaaaaaaaaaaataaaataaaaaaatataaagtacaaccttttttaaatttccaaacttactttcacttactttcaacataataactttcctttaatgtcccaaaatttcaattcattaccctttattt

SEQ ID NO: 105781 - DNA, 819 bp, Zea mays
  unsure (1)..(819): unsure at all n locations
  Clone ID: MRT4577_27974C.1
ccggccggggacgaccggcacgcacgagaggagttcgacgcggaaacttgacacgtcgttgtgagcagagaattttcgtgcgcgcaatagaagaatgcgacacgcgcagcagggacgagcagcaggcgccgagctgcgtgacaaagagaaatccgggctgaagctcgcgacaacagggagctggggcgagcagaagtccgggcgccatgggacgaacttggccaaagcgcgaggatgcgctgccatgggagcaggaagcgcgcgaagctgggtctgagcaccagggagctgctcgcggcagaacaaaacagagggacggcgctgggagatccgagcgagctggagagagccgcggcttgcgacggcgagcagagcgtgcgccagagggaactccgagcaggatgactagccggaggatggccggtcgagcaaggagggcgcgcgcaggacgcgagctggagcgccggtagagaagaagggcgagttggcgagcttgcagtggatccggcgccatggagaacagggacctcggcagggagttcagcggtcatgggatgcgtgctggaacgaagaataggggcgagctccatgggaagccaggggctcggatgcctacngccggggaagatgcagcacggccagcgaagctcgcggggaaacaacggccgactcaaggaaaggtcagggccgcagtccggtgggctgcagcatgggtttggcgatctgggnctacgggcgagggaggagctcgagcaaggggcacgacgggcttaggtgaggtgagctgctggagatgataaagcttcacggcgagcagag

SEQ ID NO: 105782 - DNA, 330 bp, Zea mays
  Clone ID: MRT4577_27975C.1
gatctgaacgctgaacatatatgatattacttttctttgaagcaaaacttctataacaaggcttgggaccttgcgttgggatctattcctctttttgtatactagaggaatggcattgcattgggttctttcttagatcaaaacggagtggaatggaaaaataaaaaaaggccttgcctttaaaaatggaagaatagaatgccatatctctcacttggccaaaacaaatccgaagcaatgctctcttatcctagcctggtccttcctttactttacataaaaactcgacaatccccttaccttagcaaaaaatagcaatgggtcccgcgc

SEQ ID NO: 105783 - DNA, 132 bp, Zea mays
  Clone ID: MRT4577_27976C.1
cttaacactacacaataacagtaacaaccccaaacaaaacttctcgatggaatgacaagtcatttatttcaaaaccacatacaggattaaccacaggctgcatcatttctttttaccaactcccttcataac

SEQ ID NO: 105784 - DNA, 299 bp, Zea mays
  Clone ID: MRT4577_27977C.1
caatctacccacgcatgcacccactcgtccacccacacgtcctcccactcttgatttaaaaaaaaaaaaaacaaaaaaaaaaaaatgtaaaattttaaaaaatctaaaacccaaaccacatctacaaaatcaatactataatactaaaataatacctatactctatcatcattcattaatcactcatacattcctctttcatcttatcccacttcaaatcaatctaataaaccaactactatccaacccaatacactcatatttaaactaattccattacaccaataatcacaattcta

SEQ ID NO: 105785 - DNA, 342 bp, Zea mays
  Clone ID: MRT4577_27978C.1
ccttttttttttttttttttgtttttttaagtaagaataatctaaaaaaagggtttttttacttttttttttttttattttattttttaacttatttaattaaccaccatcttaaacattacattcaaatcctccccacttaaatcacctaacgcgaacacaagctttcaaattccttcaaccacgaacctgaaccccacccaaccattaaaccaaaaacttctctgccccattcctaacacaaccccatttctttcataagcacaggtctacaaacttgtagattcccacatcttaatattcccccctttcaaatctaaaaacctacacctcttcccactc

SEQ ID NO: 105786 - DNA, 263 bp, Zea mays
  Clone ID: MRT4577_27979C.1
cgtcattcagctaccctgagttatcttccaaaccgaaatggtggtggaggaccctagcatgtgtaccttatcttctgccactgcacaacatgtgggggcatgcagatgctatctatcagcttcatccatacttgcaaagatttagcctgccttacgctttcatcgatacaatggctctgctccctgggtggcttttcctggcgatcttcatgactatatacttctttgttgtgaggcggaagtggtcgccacacttcttgcgc

SEQ ID NO: 105787 - DNA, 613 bp, Zea mays
  Clone ID: MRT4577_2797C.1
ggtggggctggtctttatttactcatttttcttcctcaggcgcgtgccacggttggattaatatttaaacaaaggttgaaacacccatcttttttacacaagccaaacagactatggaggtcgcatatggccactaaataaacactgatggccaactagcagggctagctaacagactgtggaccatccatttgttacacagactgagaaaccgccgggcaggctggctccatacattgaaagggtaggtcgtcaacgaaccaaaaagaacgcacctgatggacatccaaaatatctgtgcgggagaaacaaacagttatgatggttgcttgcgaggatagctagggacaccacccaatatatccaggaatgcgagggacggactgaaagcatttatagcaagcatgctgcaagctatataggccttccttattgacaccccacgatgcctgctcgggcaatttatacagccgacagagagggtcaaccacgaggaaggcagctaactaacaagactcatcatagctagttcatccagacagacaactaacgcctggacctcccgaagtaaccggcaggcttgcacgaactatgtgccatccacttgatggat

SEQ ID NO: 105788 - DNA, 630 bp, Zea mays
  Clone ID: MRT4577_27980C.1
cggccgggccgggagcaccatcctctgcttcggcaccagcagctaaccgtccagagaacagaacagagatgaccaccagcgtccccgtccctctggcttcacagccacaggcgccgcagcgcaagccacggacctacaccccgagcccatggggtgacttcttcctccaccacaccccatgcactccgtcacagctcttgtcgatgaaggagagggcaaaggtcaaggagcaacaggtgaggcagatcatacaggaaacaatggcctcctccaacctgcttcggaagttggagcttgtggacacgctgcagcgtctcggggtggactaccgctactacgaggagatcgaccagttgcttcgctctgtctacgacgacggcgacaaggatggaggcggctccgacgatctctacctcacctcgctgcggttctacttgctcaggaagcatgggtatacaacctcttcagatgtgttcgagaaattcagggacgagcgcgggagcgtctcgagcgacgatgccagctgcttgctcatgctgtatgacgctgctcatacgagaactcacggggaggagattcttgacgacatcatcgcttggagcaagagccgcctgcaaatccctgctggag

SEQ ID NO: 105789 - DNA, 934 bp, Zea mays
  Clone ID: MRT4577_27981C.1
ggccgcttttttttttttttttttagagacgcaatcagatttattgggccatttccccagcctagggtactctacattgaatgagtccgactattgcacatattggtctaacatttgatatacttggctgctcgatgcgctaggtcgcttatgccttttgcgagacaatcctctcaacgtcagggacgctctggtcaagaatctgcttgagagtcttggggttctcgagctccttctcaatcttggcaatgatggactcggcaagctcgcgctgctgcctctgcttgacctggccctcgtagcggacccacgagtcgaggacagacttggcctcggcggcgatggcagtcttctgctcgagctcgaaagcctgggcctcgagttgggcggtctccttagaaacctcgaagagggtcttggtgacctcaatgacgctgctgaggtcctgaacgctctcaatgcgctgcttgacggctgcggtgtggtcctggcgagcagagttcaagatacccgagatcttgtccaactgctgctgcgcatagtcgccccacgcaggtccggcgtacttggcaacggcccagaagatggtgagcagagagagagcgacaatggactcctcgttgacgacgtagagctcgttgctgatggcggcgaccgagagaccggctccggcagagagcacggcagccttggtgagggggctgttgccgggaacgggtatcgagtcgaggagggtctgggccttcttcttggggtcctcctggggcaggttggagttgtagcgggcctgcatgcccatcgagggcagggcgcggagaggaagcgatgggcggagacgggcggcgccgaccgcgctccttgcaagacgtgaggccatggctgtctgatgagggggtgcagttgggggtgctggtcgtcgtcccgacccggccgg

SEQ ID NO: 105790 - DNA, 451 bp, Zea mays
  Clone ID: MRT4577_27982C.1
gcccttgtttttgggttttttttttttttttttttttttttttttttttttttttttttttttttttttttttttttttttttttttttttttggggaaaagccccatgttcccaaacttggggaacatggggggaccatgaaccccccaaggggggggggggggggggttttgacttccctttttcataatttaacaagaaaaaaaagccgggcacaaaagtaaatcacagcttgggaccttgttctcaaccccaaaatttgcccccaaaatcaagggttttgcctttttaaaaacaccctctttccaagacccccaaataaaaagttgcttccaatttactgccccaagctttgcaaaatataccggcccttccaatccctggggtcctgaatggcccctccggccgggggcccgggccaaaatgcctttcccgcccccctttttttcc

SEQ ID NO: 105791 - DNA, 489 bp, Zea mays
  Clone ID: MRT4577_27983C.1
caccacccaattccatccttcaatgacggaccatccaaaggggttacaaattgcagcgtctgtttctgcacacaggatagcacatgtactaaccaatgagcaaataaactgatttctgggacacacttatacacgcagcacataacaattccccaatgtacacagagctctatgggtttcaagtgccgacgcatacacagatggggacgaacaattcggctttctagaggcggtcgcaccacccacatgaacggaatggccatgtaacagctataacaccttgcacccttaccagtttcactttcgctatttgggcggaacccgcttctgatggacttgccagggattgatctgcctcctgagaacgacttgaagagttgggggcatgctcaactggatcgcggctgcatccattgggcctgcgggttgggaaccaatggcgctacctgggggcttcgagctgaagaactccggaagcaatgtttgcaa

SEQ ID NO: 105792 - DNA, 273 bp, Zea mays
  unsure (1)..(273): unsure at all n locations
  Clone ID: MRT4577_27984C.1
cgatcgatctcactctcagctggtcgctcactcttgcngctccanccttcactcagtcttangctcttagctctaggctctagctatccgcnccactccttngtgtagccatcanccttctcatcgccacnaatggncactncngaggtccanaccccgancgtcgcggcggccgangangcncccgtggtggagancncgcngccggccgttgnntccgangagtcttcccnctcngatgncgaggccgatgncgangctgaggttgctgnt

SEQ ID NO: 105793 - DNA, 335 bp, Zea mays
  Clone ID: MRT4577_27985C.1
aaaattatgggggtttttttttttggacccctccaaaatagccctgtttattttttctgcccagggaaactgaaaacaaattttactggggggcctttttttttaaagcaccccacccggggcccttccatcaatggaccacaaagatcgacttctttcctataacattatttccaacccttctttatttgcccggaaaaaaacttaatgcttgttttaacaacctagctggccctatatttccccaaaacccccctctttgtttgaagagattacttcccttcccccacagtcattacttatgaacccttgatgaaatcccagcatgggcctcc

SEQ ID NO: 105794 - DNA, 423 bp, Zea mays
  unsure (1)..(423): unsure at all n locations
  Clone ID: MRT4577_27986C.1
ggccgcttttttttttttttttttggggggaagctccgaaccagntatagactttnngncaggaagaaccgntccaacatccaagcaatgcgatccaacaaaaaaacaacaggctgactgaaccctggcacaggacgacaacggaaacacaccgccgcaaattacgacggaaagctcacacggggggggggggacaacaagaaaaaacagaccaaccaggaagagggaagaacaagaccaccgcgcggacgcggggaaggcgcaaacgcgagccccaacagtcagcgcgcgccttgagcccggcgacgcgctggagcatgtgggcgagcctgacaaccagccgggcgaccgagaacaggatccagcacaggcgccagcgcggcggccaggaggagcccggtccgcagggacttcatgacggaa

SEQ ID NO: 105795 - DNA, 293 bp, Zea mays
  Clone ID: MRT4577_27987C.1
actcgtccgacgctccataatatgcttcattccatatccttttccatctctgtctctgacatcaactgggactgttatatacactcactctgccagaaatcatcaccgaacttctctccaatcaacgtccaaatactcaccttccttctctaatccactatgctgactctatattcattcttcatcttcctcttgatcaccaacgctgtatcacatgaccagatctctaccacttcaactactccatcttaacgcattcctttaaaaccaacctatcatttcaaattccatac

SEQ ID NO: 105796 - DNA, 163 bp, Zea mays
  Clone ID: MRT4577_27988C.1
gtcacgcacaaatgcatgtgaaggtggagacgtgcgccttggaggccgaggatggcgcggcggctgtggtggaggccgcaaagcagcacggctcgtatctgctctttcttggccagcgcccgctgtatcacgccgtgatgcgctgactgaaggctctgtggca

SEQ ID NO: 105797 - DNA, 321 bp, Zea mays
  unsure (1)..(321): unsure at all n locations
  Clone ID: MRT4577_27989C.1
cgcgtncgcaatgactctgatttataaccgagtactagatgccaaattctttgtaataaaatcctgcacggatgaccatgtacataggggcgttaantataaagtttgggccagcacagccagtgggaacatgaagctggattctgcttaccatgcagccaaagagaaagaagagcattgccctattttcttgtttttctcggtaagaacagctcatctcctttggttttttgcttttcccttcgaggaaaaaaagagtaacagtacatagtgggtgtttgatcctttattagcatgtgctaaggtgtttccgattttggt

SEQ ID NO: 105798 - DNA, 226 bp, Zea mays
  Clone ID: MRT4577_2798C.1
aattatttattttttttgtttggtctgcgaaccttacaaaaaagcatacatgtgtacgttggccatcatgtagattatttattagatgtttataaaaaattatagtacaaaaaaagtaggtcttttagataacccgtttttatagaggcttatatgaattcgatcttctagcgaagttctattgatctgactgggtgttttatttgtatatacactagacattaaa

SEQ ID NO: 105799 - DNA, 935 bp, Zea mays
  Clone ID: MRT4577_27990C.1
ccatttcgccccgcctcccgccccgcctccctacaccttcaccgctgtcgggggaggcggctcgccgtgacatcgaccccaccccacccccagcgtagcatcccgccactccatcgcactgtccatggaggatgacgagtacgaggaggggatggagatgggctacggcgggcatcaccagcacggcggcggccacgcggggtacggcgcggaggaggacgacgaggtggggtacggcggcgggggcggggaagagatggatgaggatgcggacggggacgctgagcagcaggaggatatcactcaggacgacgcctgggccgtcatatccgcctacttcgaggagaagggcctcgtgcgccagcagctcgattccttcgacgagttcatccagaacaccatgcaggagattgttgatgagtccgccgacatcgagatccgccccgagtcgcagcacaaccctggccgccaggccgaatttgccgaggttgttgccccactctgatcgactgttgcaagtgatgcctgaatggttcactatttgctgctgctagactgggcgattagcctggggtgctgggggagcttggtatgacatggtgtctcggtagcatttgccggctcatcactttgccatctgtgcacctgcttgattagatgtccacctacggttttggatctagtgcggaaacaggtgcccaattttatggctgaggatgaattttgcaccgacttaggtggacaggggattgtggaattgttcagttctactagtgtctagaatagcttctgctgaagttccctctgtgcgatatatggtagggaattcttgagtttgacaaggatagcataaaagattccagagtgagttttgtattgatcaggacatttgtagtgatcttcagttggtactagtaatatatggagttgatctt

SEQ ID NO: 105800 - DNA, 280 bp, Zea mays
  unsure (1)..(280): unsure at all n locations
  Clone ID: MRT4577_27991C.1
ggggggaggggggcgttcgttctcgcttttgggtggtgcttggcttcccctctgctggggtgggtctntttcccgggctgttgtgggtggngtgtnttcgtgccgtcttgctgtcttttttgttactctggctcccgcgcactggtgggggggggtggcgtnctcnngttggtgncctggtgtttgcgttgccttgtgttggtggtgttggtggttcctgtttgggccgggggttcccctgncgtcggtggctgggggtgtttggtggtttggttggatc

SEQ ID NO: 105801 - DNA, 442 bp, Zea mays
  Clone ID: MRT4577_27992C.1
aaaaacaaaaaccccgtaaagttttcccaaaaaaaaaaacagggtaaagaaacaaggccgtttaaaaacccggaaaacttgggggttttggtttttttaataacattacccgaggacggggggaggcttttgcaaaaaaaagaaatttgggttgacaaagggggaggggcccccaaaaaaagggggcggcctgttttgtgaaatccaccaaaacaccgggcgcctggaaggaaaaaacggtgccccggggggtttcccccaaaggcgggaatttccaccccagcgccgggggttttttggggcggaaaaaagggttattgctcccctgcacaaacttggggggaacatgactggggggagggtcccaccccttgggcaggggtccaaccccaaacattggctttgtttttgggggaaaaaagaaccgcccaaacccccccgg

SEQ ID NO: 105802 - DNA, 344 bp, Zea mays
  Clone ID: MRT4577_27993C.1
caaaaaccaaaatttttaaggtagccagttttgcctgggtagcttttttaagttgcagaaaaaaagatacattccccgtttgcttggccagggggcccataaatttcttattttgtagttcagggacggcaaaacctttaaaccttacagtccaaaggcccatttgtttaattgaaaagcaaccaaagggccttgaatcaaattacgggagcctgtttatttttaaacccactgaattttttgggttccgccaggaatttggtaatcctcctcgaaggcctcttaagaaaaataagcctgtttcctgcgaattttttccttgatttttttaaaataatgcatgg

SEQ ID NO: 105803 - DNA, 630 bp, Zea mays
  Clone ID: MRT4577_27994C.1
gctctttttttttttttttttttttttttttttttattttgtttttttttttttttttttggtttttttttttcttttttttttttgtgggggcttttgtttttttttttttttggggggccggcgggcatgggcccttggttggacgggggcggggggttttaaaaccctgggaaaataaccccccaagaagcgggcaggcggggttttttcttttaccacccaaggggggacccttggggggcaaaaggggtggcaaggttaagaaccctgccgggggggccgcccaaagggggaaatttgcggaaattccttaaaatggggggcgggttggcctgtcttttgaggggcccaatccccctctaagggggggggtttccaataactgggcccggggtgttaaaacacgggggggtggggaaaaaccacgggggttcccccaccctaaaattgcttgtggggggaaacccccctttttgccgagggggggggttttgccgaaaagaggccggcccccaaagggggctttcccccaaggtggggcgcccccctgaaggggggaagagggacccccccctgtgtggggggggaaaatatgcgccggcgggggggggggggggggttcccccc

SEQ ID NO: 105804 - DNA, 503 bp, Zea mays
  unsure (1)..(503): unsure at all n locations
  Clone ID: MRT4577_27995C.1
gttccatcttcctcttcctctaaaattaacccagcgactcgaccctgcgaattcatacgcgcgcgcgcgcgcgcgtgcacgtgcgcaggcgcggctggtagcctgcagacaccgacacgtagcaagcggcgtcccgtcttccatcttccatggcggcggcgagctatgatcggttggccgtcgcggcgtccgctgtggtggtggcggcggtgncgctggaggccgctggactgaccatggctggagcgctcggagggaactggggctccttgacgaagactggtgctgcgaagcacgtgccccgtggtggttttgatgaccttgaacccactgtcatcaatgacgcgacaactggcacctaccgccagctcttccaccctgagcagctcatcagtgggaaggaggatgcacccaacaactttgcccgtggtcactacaccattgcccaggagattgttgacctgtgccttgatcgcatcaggatgcttgccgacaactgcact

SEQ ID NO: 105805 - DNA, 888 bp, Zea mays
  Clone ID: MRT4577_27996C.1
gcagtggcagctcggtacgctcagcatcaacatggactaaagcgtgtgatgataatagattttgatgttcaccatggcaatgggacgtcagattcattttatgatgatccagatatcttcttcttgtcaactcaccagcttggaagctaccctggtactggtaagatcaatgaagtcggacagggtgatggtgaaggcacgacactcaaccttcctctgcccggtggcgcaggtgactacgcaatgagatgtgcatttgatgaggtcattgctccatcggcccatcgattcaagcctgatataatccttgtatcagctggatacgacgcacacgcgctggaccctctggctggccttcagttcacaacaggcacgttctacatgctggcatccagcatcaagcaggtgaccaaggaactctgtggtggccgctgtgtcttcttcctggaaggcgggtacaacctgcagtcgctctccagctccgttgccgacacgttccgtgcattccttgatgagcccagcctcgcagcacagtttgatgatccagcgatacttttcgaagagccgactcggaagatcaaggaagcaatcgagaaggccaagagcatccactcactctaggctgtcagctaattttccccccaatccccagaaatcccggaggggtagccctaaattgggaaaaggtgctgtcagcagtgtgcactgcagaactgcaagatcttgtggcaattggcattttgcaggtaggtagtgcatagtttgaacttggaaggcatggtcattttaatttagccaattctcaccagaaaatggaattaccgttctctcaatactagctgtatatattgaccaaaagttatgtgctacattattaattttaaaact

SEQ ID NO: 105806 - DNA, 426 bp, Zea mays
  Clone ID: MRT4577_27997C.1
tggataaaagggaaaagttttgctctgggtccccggcgaaggattttaaatgaattgcagacaggtcctcggtgcactattcacttgagtttacggctctgcagaaaaccccctagggtttctggaaatcgaacccacgacccttccctaatggaacggtggccgcagaggaaggaaggggtggaggggcttaccggcggcgagactgctctggtgaggtggtcgaggatgtacgggaggtcttgaggatcacggcgatgtgcgggtcgccgtcggggatggtcggagtcggccggtccgcgtgcgcatgcggagatgctcgccggcggcgaggagtccggcctaaccagggcacgataggtcaatcgaatgggtcagagagcttcactggatgctatggaagatgtgggtgcaaggaattggaaa

SEQ ID NO: 105807 - DNA, 893 bp, Zea mays
  Clone ID: MRT4577_27998C.1
ctagcagaagctttcgtgttatatacatgggatttgatattgcgatagaacgtcaaagctggtccatattggattcatatttttctcaattatcttcatactagttgcaagggctgcaaatgtcttctcttgtgcatacatactgaatttggcacgacctccacattgccaaatacctaggcaatatcagcaggctctttggtatagtgggcttagaggagctatggcttttgccctcgctcttcagtctgttcatgatcttccggatggacatggcgagacaatttttactgctaccacatctattgttgttctaactgtactccttattggtggctcaactggaacaatgcttgaggccctacaggtagttggggacagcaaccgttattgccaactgtatgaggagagttctaatggcaacgacactggttacacgggacaaaattatgatgaaggagcatccacttcaagcaaattcagatctaaacttagagatctaaggagaagcacctcgtctttcgctttactggacagaaattaccttactcctattttcacttcgcaaaacggcgactgcaatgataacactacagaaagtcccaatgaagaattgacgatattcagaggacctggggatttggaggtacatgattgatgactgcagatatgaagtgcttatcttccatgaatctacacgatactccttgtaccttcctcggcgacccaaagtggaaagtgcaaccagacattcggccatagcattgccatattattaatctataaacattagttagctaggatagttcaacgtaagtctttgtacgtagaatataggtgtaatttatcagccttgaaattctgttctgatccgtttcagaaactttgtgcgt

SEQ ID NO: 105808 - DNA, 667 bp, Zea mays
  Clone ID: MRT4577_27999C.1
gaggtcgtcgcgcgcctgccacaggaacgccgcgtaccgccccagcgcctccgcgtccgcgggctccgcgcgcaccgccctcttgaagaagtgctccgccctgtcgaggtcgccctgcacctggtacaggaactgcgcaaagtttgccaggagcagcgagctgttgggctcctcggacagggcctgttcgtacctctgcgccgtggccacgtgctccggcgagtagtggaccgtgtctggctttggcgcctccaccggcgcgacgagctgctccagggtttccgggtccatcagctcctctgcacgcacgctcgcctgcatcctggcggcttcatcggatatccgtttccagatggccagctcgtcgtcgtgtacagtctgttgcgcttgtgcatcctccacggccatcgagtcggacacggacgccagtggcgtcgcctgcgactgcgacacgtcctgcggcagcaccaccgctccgttttgccgatgcgacgactcgtccgactggccgtcgccggtggcgccggcaactggccgcactttgccgcccccgtcgccgtttccacccactgaggccgtgcggccagtggagaacgtcttgagcgcgggggtgtcgaaccgctgctgggaatgggattgctgttgcggacgcggggcggacgcgggg

SEQ ID NO: 105809 - DNA, 333 bp, Zea mays
  Clone ID: MRT4577_2799C.1
gagatacccgatcgacataggcatacctgacttaacttgaaggctgacacacgtacatgcgggaggggagaccctttatgagctggacctggtagcggcgattgagatccgacgcaactctatgccagctacttacacgagcacaataaactacgacggatgttggagcacatgaatgctttacatgatgagaatcatctaataactggtcacttgagtgacgcctgactgacaaagagagagatctactgatgaatgggctgatatctctactaaagagtcacatgtagacacccatgaacttcatgatctatgtcaacgtcgacgaacagc

SEQ ID NO: 105810 - DNA, 355 bp, Zea mays
  Clone ID: MRT4577_279C.1
ccattttaagtgtattttattgataatgttttatctgcatcacctagcaaatggttgctttgtttttggatttatgtgatcctcttatgctttttcctcttataaatatatgtagtatgtactgctctgtaaataaaaacactgaatgcctgtggtctgtgcacaattatactccatgctttctattcagcttaatgcaaatctggtatactcagttgttaacagccagctgactattatgccctcagcctagggtacttgtagctgttgcaactctgtttttctaagttctaatataaaaaaattagaccaacctaggaggaatacgtggcgttttatgaagaagaaaataggc

SEQ ID NO: 105811 - DNA, 211 bp, Zea mays
  Clone ID: MRT4577_27C.1
acgagtgggccggttggactctagaggaaacattgagctactgggaacaacatctctgcctaaggtggatgcagagcagggcatgctgccgcatctacagcagagcgcacgcacaggcgtgcggcgacgaagcagaaagaggagaatggaacaacgacacaagttgatgatccactggaattggagaggcccgagggattggaggcagaca

SEQ ID NO: 105812 - DNA, 1640 bp, Zea mays
  Clone ID: MRT4577_28000C.1
ggggtggcagagtactgtggcagcgcggtacgctccgcatcaacatgctacgaagcgtgcgatccgattagaggaccatgttcggcatggcacactaaccagggaggcattttatgatgatccagcactcttctgcttgtcaaagtcatcatttggatgctataatgtggaggaacagattcatgacatcgcgaagagaacaaaaacaaatcaggagttgggatgcacagtgctcagcaaatcaggatcaagcttctatagagaaatgcaatgctccaaagaatttaccaatacctgataattcacttctcgatgctcgtattctctattgtacctctcctgccctgggtcataacaaagaagcacacccagaatcgaacaaaagagttcctgtgatagttgatactcttgagaaattggagcttagtcccaagcatcgtggttcacaggttcttgaaattcaaaatttcaaccctgcttctctagatgatgttgcacgagttcattcaagatcttacatcactggactcgaaaaggctatgggcagagcttcagatgaaggtctgatattgattgaagggacaggaccaacatacgctacagaaactactttccgagaatcacttctatcagctggtgccggaatcacactggttgattcagtggccaccaggacatcatgctgttcctcaaggtcccatgggtttttgtgtctttgggaacattgcagtggcagctcggtacgctcagcatcaacatggactaaagcgtgtgatgataatagattttgatgttcaccatggcaatgggacgtcagattcattttatgatgatccagatatcttcttcttgtcaactcaccagcttggaagctaccctggtactggtaagatcaatgaagtcggacagggtgatggtgaaggcacgacactcaaccttcctctgcccggtggcgcaggtgactacgcaatgagatgtgcatttgatgaggtcattgctccatcggcccatcgattcaagcctgatataatccttgtatcagctggatacgacgcacacgcgctggaccctctggctggccttcagttcacaacaggcacgttctacatgctggcatccagcatcaagcaggtggccaaggaactctgtggtggccgctgtgtcttcttcctggaaggcgggtacaacctgcagtcgctctccagctccgttgccgacacgttccgtgcattccttgatgagcccagcggacgcgtggggtttgatgatccagcgatacttttcgaagagccgactcggaagatcaaggaagcaatcgagaaggccaagagcatccactcactctaggctgtcagctaattttcccctcaatccccagaggggtagccctaaattgggaaaaggtgctgtcagcagtggcactgcagaactgcaagatcttgtggcaattggcattttgcaggtaggtagtgcatagtttgaacttggaaggcctggtcattttaatttagccaattctcaccagaaaatggaattaccattctcagtagaagcagtgtatagtataatactagctgtatatattgaccaaaagttatgtgctacattattaattttaaaactatgttaaaggttctaaa

SEQ ID NO: 105813 - DNA, 302 bp, Zea mays
  Clone ID: MRT4577_28001C.1
ctgtaagggcatatggctataaatagctcccacacgcagaatgctatatgacctagtgcgaattgacacctcgactgaaggcggcgaggaaaataactgcttgaaaggggagtgctacttacccgatggcgatgaaactgttgcagagcttagtgcagactacatgtctgcaacatgatggagtacaaacctcgtgtaaaacctgccagccgcaagactgacgttagaaaatacaatcactcacaaccctctactacacttgaaggcgagggcacccagagcggatcacatggtgttataat

SEQ ID NO: 105814 - DNA, 456 bp, Zea mays
  Clone ID: MRT4577_28002C.1
gcgcacgcaagcgcggagcccctagagcggccgccccccggaaattagcgacggcggaaaaggccacaccagggggcaaacaaaaggagaagcgcgggaccgacgccggaacacacggacaaagcacaaaaacaacgacaaccatggccatcggagattacaaagccagcggcacacgacccacgaagagaacagggtgcccatcacgcagcgatgactaaaacagcacatggccaacacctggggcgacggcggggcaaccacaaacggacgcacgaacataacgaacgaggcgggaaagacaacagatatatacatgactccacacagaacaaacggaggaaaggcggcaatgacactgagcggagggaacactgcgtaccgctacagatcagacgcagctggacagagggccaaggccataaggccagcaggccgaggcctggccacagcaga

SEQ ID NO: 105815 - DNA, 583 bp, Zea mays
  Clone ID: MRT4577_28003C.1
gtcacttgctctgcctacaacagctaattcacggcggccatccctcttctagctcgtttcattatccatggcggcaagagaacatcaccaccaccacgctgttccaccacaagaaggaccaggagcagctcaccgtcagcagctacggcctagtgcacccagtacacggcaaccacggtgacccaggagaagtccacctgcgaacactagtacgactagtacaagaatgaagagaaggagcacaacctcaagcaggacctcggctaggacggcgccatcatcaaccccgccttctcactctaccagaagcacgaggcgaagaaagacccggtacacgcgcacctactcaagatcgacgatgatgtcgaggcgactgcccactttgacttccgaggttttatctatcaccaacaccaccaaaagaataatgtccacacggatgtcgaagaggacggcggccaaaataagcaccacttattcgactgattgatcctcccgtatctttgtccctcctcgtgtgctactagtgcgtgtgagactcatatctacctcccaccgtgttttacgcgcgtacttatgtatg

SEQ ID NO: 105816 - DNA, 867 bp, Zea mays
  Clone ID: MRT4577_28004C.1
attgggacctcgaggcggccgggaagtcccggaccggttgtcgccgccacgccgggagaacacggcggtgctgcggccgacgagagcagcacccttgtggatgctgccagtggcacggatgagagccacagggcactcgccgacgccgacgtgaagatgaacgacgatggcgacgtacaaggggacgagctgtccgcgtccgtgcagcgccggctggacgagagcagcgccgtggagggggaggatgaagaggaggagattggtgacgacgcggaggccgacgacatggcggcgcgcatgggacggcgcctggcggcgctgcccgggaatgcgcacgagagcgagccgttcaccatcttccgcgtggcggggcccatgcgcgaccgcaaccggcacctctacgagccgcagatgatctccatcgggcccttccaccgtggcgccggccggcacctcgccgccatggaggagcacaagtggcggtacctccgcgacattctggcccgccggtacgcggagcccgtgctgctgcccgcggccgagttcgccgagatgctcctcctggacggctgcttcctggtggagttcttcctcaaggggcaggagagcgcggaggacgcgctcatcgacgcctcgtgggcgatgcagaacgtgtacaacgacatgctgctgctcgagaaccagctccccttcttcgtgctcgaacgcttctacgacctggccacgggcgggctcggccgggactacttcgtcaccaacgttctcgtcaactacctcaccgtggacatgtgcgtcggcccgcgggaccccgagagcacgcgccccccccgacggtgagatccaccacctgctgcacctctactacta

SEQ ID NO: 105817 - DNA, 1841 bp, Zea mays
  Clone ID: MRT4577_28005C.1
tgtacaaaggacccagatataaaatgtcgtctagcatttctaacctgtcccgattcggctgacggtcgtcttgtgtcactcatggactctcctctaatggagcccctactagtgcccaacaaccacagtcccggtccggttgtcgccgccacgccgggagaacacggcggtgctgcggtcgacgagagcagcaccctcgtggatgctgccagtggcacggatgagagccacagggcactcgccgacgccgacgtgaagatgaacgacgatggcgacgtacaaggggacgagctgtccgcgtccgtgcagcgccggctggacgagagcagcgccgtggagggggaggatgaagaggaggagattggtgacgacgcggaggccgacgacatggcggcgcgcatgggacggcgcctggcggcgctgcccgggaatgcgcatgagagcgagccgttcaccatcttccgcgtggcggggcccatgcgcgaccgcaaccggcacctctacgagccgcagatgatctccatcgggcccttccaccgtggcgccggccggcacctcgccgccatggaggagcacaagtggcggtacctccgcgacattctggcccgccccggcggcgcgacgctggcctcgtacgcccgcgccgcgcgctcgatggaggcctccgcgcgccgccggtacgcggagcccgtgctgctgcccgcggccgagttcgccgagatgctcctcctggacggctgcttcctggtggagttcttcctcaaggggcaggagagcgcggaggacgcgctcatcgacgcctcgtgggcgatgcagaacgtgtacaacgacatgctgctgctcgagaaccagctccccttcttcgtgctcgagcgcttctacgacctggccacgggcgggctcggccgggactacttcgtcaccaacgtcctcgtcaactacctcaccgtggacatgtgcgtcggcccgcgggaccccgagagcacgcggccccccgacggtgagatccaccacctgctgcacctctactactactggttcctgccaccggaggaccgggacgggagcggcacgggcagcaaggacaaggaagacggcgaggcgctcgaggaactgatgtccacgtctgcggatgagcgcatgccgtggcagctgccgccggcgtcggagctgaaggactccggggtgacgttccgcgccaagaagtcgccgcggagcatggtggacgtgaccttcgaccgccgcagcggcgcgctggagatcccggccgtggagagctacacgaaccacgccatcttcgcgaacctgctggcgtacgagcagagccggggccggtgggagctgcagcgcctggtgagctacgtgctgctgatggcgtccgtggtggacgcgcggcgcgacgtggaggtcctgcagcgggccggcgtgttcgtgcgcggggacgaggagacggcggcgttctacgcgcacctgggcgagctgtgcccgccgcccgagttcgtcaacaactgctacgccgacctgttccgcgacgtcctggagtactgtgggcgcagctggaacaggcaccgcgccgtgctggtgcacgactacttcagcaacccgtggaccagcatgtccgccgccgccgccgtcttcctgcttgtcctcaccgtcgtgcagacggtctacaccgtgctgccatactacagccagaattaaccgggcaaaaaacaaaaaaggcgttttgccgccgtcacacagaccgggtgtcgccctctgttttttctttttttttgcctgcaactacaagaaaccctatgatttttccttggctcctatacaatccatatgaatgatgg

SEQ ID NO: 105818 - DNA, 419 bp, Zea mays
  Clone ID: MRT4577_28006C.1
cgtcagcatccgtcgcattggccgagggtacctcctgccaaaaagaagaaaaaaaaagggttcacatgcgatgctgccgagaccggagagcacagtacacgacgggcactgacggcgcatcgggattgaagcagtcctccactaccactgccactccagatctgcccaaaacaccctgacggacggagggtatcttttcaacaagtgcaaggcgcctcgtgctaattccaaggtgtttttaggtcctcatgttggccatgaccgatgcatcgcgcgggtcgcctgcgagtgcgctttgcgttgatccaatcacaagcagcggggacaatcatgcatgcccccggccccgtcgtcccttcttttgaaaatctggccaaatcttgatcatgcttttcgcaaataatggtcggtggaatctt

SEQ ID NO: 105819 - DNA, 650 bp, Zea mays
  Clone ID: MRT4577_28007C.1
aagtaaatgttgtgggaaataagaagagataatatttgtcatgggtgaaatgaatgaatgaaataaataaaagaatgaatgaatggccccaaaaaaaaaaaaaaaaaaaaaaaaaaaaaaaaaaaaaaaaaaaaaaaaaaaaaaaaaaaaaggaaaaaaaaaaaaaaaaaaaattaaaaaaaaaaaaaaaaaaaaaaaaaccctaaaaaaaaaaaaaaaaagggcccttgggcccctgggcccccattttttttcccttttaggggggttaattgcccccctgggcgaaacaagggccatagtttttccctggggaaatttgtttcccgttccaattcccccccaaattccggcccggaaccttaaggggaaaccccggggggccctaagggggggcctacccccctttattggggtggccctccttgccctttttccagggggaaaccctttcggcccacttgttttaataaatcgcccaccccccggggagggggggtttggttttggggcctttttccctttcctggttcattgactcgttgccctgggcctttgggttggggggagcgttttaatttccttcaaggggggaattccggtttcccccaaattcgggggttaccccggaaaaaaccttgtggccaaag

SEQ ID NO: 105820 - DNA, 279 bp, Zea mays
  unsure (1)..(279): unsure at all n locations
  Clone ID: MRT4577_28008C.1
cggcgaccannnncccgcaaggcncgcaagcnccaaaagcnncccnncnncccccgnaccncncaccagcggngncnncggnaggggaaaacccaanncggggggggggggganccaacaggcaancacagcnggcancnnaccnngancacccgggggcccccaacaaccagcagnccnancacannagngaccnnnggngcacgnnccggcccaaaacagcggggcacaacaacgacaacaacncgggcgagcacaccgggcgggcccacccgcagc

SEQ ID NO: 105821 - DNA, 334 bp, Zea mays
  Clone ID: MRT4577_28009C.1
ggtgttcttccaagagaaaaaacgccaaattggatggaactgccagacatagcttgagctcctaggaagcgtagaatgccgggagctcatactggattcaaaactcagaagacacaaatagcccttcccacctgacttggtaggcgctcagctgctactcacggatatcacccgcgggcacgggagttgagttcctatatggacgatgacagcgcctacctacacatctggcaggctgtttgcacatgcagctcatctttgcacagggcctacacctgatccagaagccttatttcgtaaacagtgctccgaggacgcaaatgggagccttgat

SEQ ID NO: 105822 - DNA, 911 bp, Zea mays
  unsure (1)..(911): unsure at all n locations
  Clone ID: MRT4577_2800C.1
tctgcggggtcgaactgggaaaaaacacagagagttcctcgacctcgactggactcccttcgctgttgacccaatccgccgccgcgtccaagatggcatctccggcgccgccgcttaaggacgccgtcggagtcctggaccgcgaccccttcgtcgccctcctcgccaagctcatcggcgagtcccagcgcctgcagaacgacccgccggccctcgtcccgcaggaggacctcgtggcgcagcacgtcgtcgacgcgctccgcccggtgtcgacggacaccggcggcggcccgctcgtcgtgcggaaggtgagctacaccgacggccggagcaacgtcatcgtcgagtaccccggcaccgtccccgaccgcgtcgtctccttcgtcggcatgcacatggacgtcgttccggccaaccctagcgaatgggacttcgatcccttctcactaacattcgaaggtgatgacaaggaaaagcttaggggccgtgggacgacggactgccttggtcatgtggcgctagtgactcagctcatgcggcggcttggtgaggtgaaaccaccattgaagcattctgtcattgcggtgttcattgccaatgaagagaattcatcggtcactggcattggtgttgatggccttgtcaaggatggtttgttggataagctcaaaactggacccttgttttggatagatactgcggataagcagccatgcattggtactggtgggatgatcccttggcatctaaaggcaacagggaagctgtttcacagtggccttgcacataaggncataaattcgatggnagttaatatggatgcactttaagaatccannaccngnnnttacatgacttccctgcacacngagaaagagagctctacnagtttgctanctcatctacgatga

SEQ ID NO: 105823 - DNA, 142 bp, Zea mays
  Clone ID: MRT4577_28010C.1
ggcgcctctcgtgcgcaccgaggcacatcagacgagccgtccctccgcgccgcgcttgtgggcagctgggtgtgagcgcgggtgcgcgtgtccctctgccgggtgatggcctcagtgacgctcgcatcgcgggccgggtgat

SEQ ID NO: 105824 - DNA, 229 bp, Zea mays
  Clone ID: MRT4577_28011C.1
aggcgatccctagccggcgcccggagccgggtccggagccgcctctttttgcagccacaccgcggccggcccagaggaagaggaggaggatggcgggagggaaggggcacacccttgaggaggtggccaaggacaacaccaaggacgactgctggctcgtcatccgcggccagggggacaatgtgaccaagcctctgcaggaccacccaggaggcgatgatgccctggt

SEQ ID NO: 105825 - DNA, 237 bp, Zea mays
  Clone ID: MRT4577_28012C.1
gggggggctttgcccaaatttgttgaggcactcactggtaaccataaaaacaccccccggaaaaacaaacaagcctattttagtggaatgccaaaggccgcggtgaaaaccctgggaaaaaccaaccgcaggcaatccccaaacaaggcctaaaaaaaggccaaaaaaaggcacggggtctttcaaccagccaaaaaaaaccggggggcaaaaatgggggaaaaactgccccttcca

SEQ ID NO: 105826 - DNA, 609 bp, Zea mays
  Clone ID: MRT4577_28013C.1
ttacaacctcttagaatggttgatgagcggggtggtgatgagtggagcaaggcaactggtaaccaaggcacaaacagatatgcagatgacagaagacgtggtgatggatggggtacagctcctagtcgtgattattcttctgctagggcgccttctgatccagatgcatggaggcggcgcggggcgggtccatctccaagaggggtttggaacaaatcacgcaggaacaggagtcgttccagaagcagaagcagaagcagaagcagaaacagaagtaggagcagaagcaggagtatagggcgaggcagaggcaggagcagaagtccatatattgctgaccgtggatctgagtggagggttgagagaggcagaacatctggaggacctgttcggccctgtagggattttgtggctggtaggtgcagaagaggctcaaattgcaggttccttcatgaagatggtgggcacaggccatttgatgatcactatcctgctgacccaagggaaaggtatggttatcagagcaaggagtttatggatacaagaggaccaaatgactatttgcggagtaggcaatctcgagatcgttatgatgataggccttgggag

SEQ ID NO: 105827 - DNA, 282 bp, Zea mays
  Clone ID: MRT4577_28014C.1
aattgatcaagtaacatgttgcatgtggcttactctggatatatctaagcccttctgcacatctaaacttagatggagttggtcaaatgagggaacatctgggttatgccttttttaaagtacgtctcttcaggaactgtcagcatgttgttgttgaagtgtggagttgtaactctgcgtggactatggacagtcagcaatatgtacttaaaagttgcactattgcaaaacgggtgtattatccaggtactcggacactatttttttgtactgctggtcctg

SEQ ID NO: 105828 - DNA, 432 bp, Zea mays
  Clone ID: MRT4577_28015C.1
aaaaatcaaaaaaccggccaaccctttggggaatggaaaaacaaagtccaaaagcaccttttggcaaacatcaccaaaaagccggtgggtttttttttaataaaaggcccatggcccccccaaaggccccacgaccaacacaccccctttggtttttaataaaaggcaaaaccccctcccaaaccaaaggcccaaaaaaaaccccggttcacggccaaaaaaactttggttgggggttaaaaaaaccggaggggaaaaaacccataatggggccccatggacctgggccataattttgggaagaaagggccccccctaaggatccgctgggggctaaccaaagggggcaggatggtcaataacattttgaaaagcccccataaccttggggccccggaaggcggccataaggccagggccttcaaggatttt

SEQ ID NO: 105829 - DNA, 395 bp, Zea mays
  Clone ID: MRT4577_28016C.1
attcggctcgagccacctcatatcggggctttcttttgtggatcctcctggagagatgggtatgaggatcctcacatctggagacggggaagggctatatttgcagccatgctgctggttaggggctggccgttacgaggagcatgggtgtgagcgcagtgcagcctgagaacccaaaatcattaatacagggaagcggaacaggtgcttgagttgccaacaatgtgaccaataaggcgatccttgtacgggcacggatctaaaggagagctggagagatgatccatgccacacagggcgagcagtattattacacacactttgcacacagaataaacagctgcgacacggaaccaaacaagttgttggcatgtgatacacggctgaggcctgtt

SEQ ID NO: 105830 - DNA, 543 bp, Zea mays
  Clone ID: MRT4577_28017C.1
cgcgactgcagttacctcagttcatgaaatggagaatggctttcaaatatgggccttcagtggcaagcatctttacaaggtgtcaaaggatcatttctatcagtttatatggcgcccgagaccgccctcactactgacggccgagaaggaagaagagatctcaaggaacctgaagaagtatagcaagaagtacgaacaagaagaccaggatgcattcaatcagttgagcgagcaggaccgcaagaggcggacacagctacggctcaaccgtaacgaggcggtctgggagtgaagcagctgcctggagaggagacacgtgcgtgtcctggactctgaagtcctcgtcttttttttttagttcgctagctagctctgtacctcagcgcacgctttacctacgtccatgtaggtagcctgcgaagtaccgtcgtgtcaatgtgacggctcagaacgtgtcagtgtgtgtaactcgacatcaggcgatcgagctgtgtaaatatgtagtgttgtaccttcgtgcaatataataaagtaagatacgcg

SEQ ID NO: 105831 - DNA, 864 bp, Zea mays
  unsure (1)..(864): unsure at all n locations
  Clone ID: MRT4577_28018C.1
ggtacccccgggttcggccggngttccatcgtggctcaaggtgcttcaggatgcaggctcagactatcttcacagcaggactggtgataatataagaagccatcaaggttacatgcaagggaagggtggtagaactcttaaacgtataatcagagatttcgcagaaagccaccggaatgttccaatccccagtcctacatgatatggatgtgtcacgagtcttgcactctttactgatttgaggatgtccagtccctccagtagcttggactctgactctagagagggggtccttgtggaactgatgtccgtcccgtctctgctggcatgctacatgttggttccatctatagttcagcaagaggaagaggctatttgattgttccggacatctggttcggacttggagagtcttctctgtatagcaaggtagtcgcaccattgttctgctgactaattgggggttgaatgcaaagtctgaagccgcatgtcatggttcgagatccaattttgttttgatagacatactgtgaaattcattgtgccggtaaagctatatgaagacaaaatggggggatggaatgcaacctgtacataccattctttgctggttggggcaggcgatgtacgaacattcatatgcagcagtgttactgctcgaatctggagttaaacatgggcagtaatgctaggcatttatcaaacttctatcatgtcagtcgaaactttgaacaagtgtacataatcaaatatattatcagatatcataattttatggcaaaaaaaaaaaaaaaaaaaaaaaaaaaaaaaaaaaaaaaaaaaaaaaaaaaaaagaaagaaaatataaaaaaaacgggggtccct

SEQ ID NO: 105832 - DNA, 1100 bp, Zea mays
  Clone ID: MRT4577_28019C.1
tttggtggggcattgctgagtcaagtgaaatgccttgtgtgcaaggggagtctaacaagactgatgagataatggacatcagtctcgatctgcctgggagcagttctgttgctgatgcccttgcccgcttctttaagccggagatattggaaggtgcaaacaaatatagttgtgaaagatgtaaaacgctcacctcagcgcagaagcaaatgtttatgctgagggcacctaaggtgcttgtcatacaactcaagaggtttgaggggataaatggtggaaagatcaacaggaatatagaattcaaggagacacttggtctttctgattgcatgtacaataaaagccaggatccgcatccagtatataacctttttggttgtatcgtccactcagggctctcctcagagtctggtcactactatgcatatgttaaggatgttgctattgatcaatggttttgttgtaacgattctcatgtctccctgtcaagctctcagaatgttttgtctgagaaggtctatatcctattttatatactgaattcgaaaactcaaaagcctagtagaaatggttactcttctactgcagctaaacctttcagcaccaatggaattggcatatcaagcacctcatctagtgagacctcgaagatacctttggtaaaacaggatggtctatgttctaccaaaggtaatgtactgatgcccttgaagaatggcaagactgcatcaggtccacttatcaagccgattcactttaagaacagtgcagcagaaaaggttatgtcaaatggcaaagtaaacctcacttcaaaaaacaatccagaggttaatggaactgctaaatcatcagaatcaaacagatgcaagactggacaatttgtgggacccagtaaaaataatgctgataatactatttcttgtggagagagaggccaacagtcagaaagaatacaggatgcaaatggaaatggccagtcaattcatcattcacagtattttggtgagatcagtaacggcaatgctatgcctacatctgctcaacaagagaccagtcatggcaatggcacgcccgcccgacaagagaccaataatagcaat

SEQ ID NO: 105833 - DNA, 492 bp, Zea mays
  Clone ID: MRT4577_2801C.1
tttttttttttttttttcccttgagatggcaattgctctattaatctagcctctaagggcactgtacggggatatttataggtgtccgagtgcccaacgtctccatgtaaagacgcttgtgccctcaggcacctggattatccctagaatattcccataagggagggttacagactgtcattataggaaatctattacaaatcaggcccgtaacacgcctgtccctgcggagcctgttacaatgggccgaatcccacgtgggcctccaggtcgagtgaggacgtgggatggagagacttcgtcgtaggccttcgtcttgcggtgaagagggcgaaggggtgggccgcgccggtcatcttgcctccgctggtgcagcgagttgacgagggcctgaagcgaagggtagcgtcttcgccttcgccccaacaatgtttattacagttacataacttggtagctatacaactagttttgacagggaactgatgcaat

SEQ ID NO: 105834 - DNA, 390 bp, Zea mays
  Clone ID: MRT4577_28020C.1
attcggctcgaggggcgaggcagccggtgctcataccgtggatgcaattctcccctgtaggggatacggttcggggtctggcctatacctatcaacagcggactccccggacagaccgcgactccagccttggcggagggtgcattgcggggtatgcccaagcccgccagtcagcaccgagaccggctggacaccgtcccgtgctccgacgactgcaccaagcaggctctggatggcgcggcgacggcagtcgcgactgaggcgccgatgatgggcaaggtagcattgggggatgtttgcaccacctacgaccgctaggtggaggacaagaccgagtcgtggtagaagatagcgaatgttgctgtgtcaggacacgggctggatgatgtc

SEQ ID NO: 105835 - DNA, 1111 bp, Zea mays
  Clone ID: MRT4577_28021C.1
attgggtacctcgaggccggccgggaagtcgaagtactgtgagagtaaggctaaagtcgccggataatataagaccagcaataacaagctagtttgccctcgttctccaacaaaatgtctgatgtggagccgctggttctggctcatgtcatacgagatgtgttggattcatttgcaccaagtatcgggctcagaataacctacaacagcaggttacttctatcaggtgttgagctgaaaccatccgcggttgtgaataagccaagagttgatgttgggggcaccgacctcagggtgttctacacattggtattagtggatccagatgccccaagcccaagcaatccatcactgagggagtatctgcactggatggtgatagacattcctggaacaactggagccagctttggtcaggagctcatgttttacgagaggccagagccgaggtccggcatacaccgcatggtgttcgtgctgttccggcagctcggcagggggacggtgtttgcaccagacatgcggcacaacttcaactgcaagagcttcgcccgtcagtaccacctggacgtcgtggctgccacgtatttcaactgccaaagggaggcaggatccgggggcagaaggttcaggccggagagctcgtaaggaatgaagcatgcacagaagaagactgcagcgctttcgcatgcatatgatctatcgtcgtcctgcggaatatatatatagtaaccgttgttatatggaataatgtgcatgaaattggtatcagatgcaccgacccgtacgtacgtaattaatgtttgttattacacgcagacatataatatacatactcattcacatgtatccgtatatgtatctatggcacgagaacaaggattgatatttactggttcttcacaaatttaagcagaagttctgccaaacagctagcttctgcagcagcttatcagttcagctgcttctcagaatacactaaaagcagccaacaagcagaagctgcttttcaccagcttatcagataagctgctttttcaacaagcagcagctatgccaaacagggcctatgtatctatggcacgagaacaaggattgatatttactggtc

SEQ ID NO: 105836 - DNA, 543 bp, Zea mays
  unsure (1)..(543): unsure at all n locations
  Clone ID: MRT4577_28022C.1
tttttttttttttttttttttttttttttntttttttttttttttttttttttttttttttttttttttttttttttttttttttttttttttttttttttttttgggccccccaaaaccgggcaggggcggggggggatcaaaaaaacccccccaaaagggggcaaaagaaatcggggagacgggctttggcttacaaaaaagggggcccccccgggggggtttttttggggggaaagaaattaaaaaaactgggcccggggggggggacataaggcaaaagccgccaacaggcccctttaaggtggggggggggtccccctttcaaactccggccggaagggccggaaaagcccctgcaaaggccaccccgaagggcccccgggggcacaaaaaggaggccctttaattgggttggggacccccggaagcagggggatttcctttaggttgggggaaccaacctggggcctttccaggaacaaccaaagccggggggggccctttggggggggggggcccggcccaaagtttttgggtttg

SEQ ID NO: 105837 - DNA, 357 bp, Zea mays
  unsure (1)..(357): unsure at all n locations
  Clone ID: MRT4577_28023C.1
ccgcaggcnaagcagaggcacaagaaccnanacagcagacaggccacagaacacagcggcncagngaaggaacnagagcaaagaggcgcacacccgcggncgggcgcaccgagagggggggcgggcagcccagcnagagcgcgagggcggccncagggcacggaggaacggcgcgggccggacgnaggggaaccccgcgaagnggccnggcccgccgccggcngggacgggggnggcggccggggaggccagcacgggncgggcggcccagcacacggcgaagngggcgaggcagggcaggccggcgacgncgggccggaagcncggngggagcgcccgggcgggcagccgccccca

SEQ ID NO: 105838 - DNA, 477 bp, Zea mays
  unsure (1)..(477): unsure at all n locations
  Clone ID: MRT4577_28024C.1
gccaacggggaaaaccgaatcgaaacaaaaactgcaagggaagaaaatggggacaaaaaaaaaacaccccagaccgggggggcaacccaaacggccagaaagaccggggggcacccaaagcaaggagcaagaaccggacgggggggaaacccggcgcgggggccgccccgggaagcccgggccggaacccggggggggcccaggggggccaaaaggggggcggaaaaagggggggggaaaaaccggggaaaaagggggcccgggggaaattggcaaccggaaacaattccccacaaaaaaagagccaaaaaaaagagggggaaagccgggggggcccaaagggggggccaaaggacagaaagggcggtgaccaaacgggccgccttccagggcggaaacctggggggaaaaccccactaaggaagcgggcaaaacgcggggagaggcggcngggggagggggccccagagcggggcc

SEQ ID NO: 105839 - DNA, 826 bp, Zea mays
  Clone ID: MRT4577_28025C.1
aggctcaaatccgttgaaaaccttttacaaattttctcaatcccatctcctacaggaataaccgaacagtacctaagcaacatgaacagtatgtgcatgtctccctcagttcgctatcaaatttgcctgaaaaaaaaacggtctctcgttttactaagaataggcattttgttatacctgatgatcacatcaaagcgctagaaaaatattgagagggatgggggcagacaagtacgatgcagtatattctacggtgaaaaaaaagtgcacgtgccagcctccggcgactttgacgggcggtccatcagagctcagaaggtggctttcttgagcgaggtgatggtcaccgacgaccccagcgcggaggcgccgacctggacgtcaaaggagtcgtagcggaggaagagctcggcgacgaggaggcgagcgatgagcacgacgaagtccttgccagcgcactgcttgtcttgcagcgtgggcgacgccgtctcggggccgttggaccagacgacgtggcggagcagctgcgcgccgtcctcgccgaggaacctgtcgggcacgtactcctcggcgcgcgcgaagacgcgcgggtccttggtggccatgggctggtagccgaagagcatctccccctcgcgcacctcgaagccatagtcgtggctctccaccaccatgtcctgctctggcgcggccgtactgcatcgccacggggggccccggccgcagcgcgagggtaccgcgcgaccccaccagcggcatctccgccagcgaaaacataaacacctcgccgccgtgcgcgcgcacggcgtcgcgtacctccgtggcc

SEQ ID NO: 105840 - DNA, 363 bp, Zea mays
  Clone ID: MRT4577_28026C.1
gggaatcccccccgaaaaaaaaaaatttcgggggcaaaagccaaatatatctagccccaggggaaaaagttaaggggaccctttacaacccaatacaatcctcagaaagcaattcggccaaaggaaccttttttcaaaaaagggaccttttattaagggttcccaagcctatttaccccctggaggaacccccctgggcaaaggacccttaaagatcaaagatccccccttgccatgtccccccaaattccgggggcaattcttcaaaaccggcttatgatgccccgctaaaaggggcccccagttttgaccattggaaacgtatcgggaaaagtggggcccccccaaagggcatttttcccc

SEQ ID NO: 105841 - DNA, 392 bp, Zea mays
  Clone ID: MRT4577_28027C.1
tttttatatatattaaagaggacaaacaccggctttgcccctgagggtgtgtcacatctttatataaggaacttgtacaccccttcatattacagagaagagaaagagggcaaaggcccaaccctacatacgggtctcgtgagaatcctctgtcatgcttttggcaagggatacgggtcttacacgacttttagcgcctaatctgctgacgggaggaaaaggtgtgaatctggtgatccgtgttaacataattctcaatacaccgaacacgagtacccgtgcccgtgctccaccatgtgggaagatgcctctgcaatctacattctgaaggctgacgcgaccatcaacaattgggcttcttaaacaaaccttgggcccaaatgaacatcatg

SEQ ID NO: 105842 - DNA, 403 bp, Zea mays
  Clone ID: MRT4577_28028C.1
aggggaagatcacaaaattttctgcttgggttcaatgttttgccctctttggcctttgcctcctccagaaatttttaacccccaaggtgaagggaaaaattttctgcgtgccctggaactttttccccattgctccttttaaggggcgtcatgtggcttactaatctttccaaccctttttcgcccatcgccttggggcgagacctttggaccaagggttgggcccaggcttggttggcgtcccccgagcttcctcgtcgtccccgtcctctccccagttgttgtcccacttttcagacccatcgtcatgttcttttttgcctcccacccaaacccgcgagttttacctgttttgctttttgatcccccgggtcctcccaactggttgcgcccccttctggcc

SEQ ID NO: 105843 - DNA, 781 bp, Zea mays
  Clone ID: MRT4577_28029C.1
cccttccctggcacccctattctagcacatgacacatgcgcctcctctgctcaagtccgcccctgctgctttccccttggcgccgcctgccccctcctccgcctggttgcgccgtcgccccctggtcacgcctcccactgctaggcgcccagatccgcacgaccctccctcctctctgggtgtgagcacgatggctgcccttgtccccaatccgcctctgccgcgcctcctagcgccgccggccgcccgatcagaagcgtcctgcgcctctccttaaagcttcttccgtcgctggcgtcgacaccccttgccagacccggcgcaggcccctgcccggctggtcccaccccgtcggcctccgcctccacagccgtcatcattggatctgtcactgccgcggctttcccggtcggatccaccgctgccgcgaccttctcggctagattcgttgtccctttggccggatcacggtcttcatggctggatccgtcgctgtcgtagctttcccgaccggatccgtcgataccccttctactctgccgcgggcacgaccaccctgactggcgtagacgcgcgcgctgcctctggcctccttggcagggctcctcgacgaccggatgacagaggaaggaagaaggtccccgatctactgctactcttcttttggtgcatcgccctgccgatcgttgacgatcgaacgtcgtccccttccgaagacaggctccactgcgtgtctcctgaccacgacacctcgacttggctacctcggcatacagggcta

SEQ ID NO: 105844 - DNA, 389 bp, Zea mays
  unsure (1)..(389): unsure at all n locations
  Clone ID: MRT4577_2802C.1
agaccaggaccgagaacaatgcccgagctccacacagctcactagtcatccgcctccacttctattttaaagcctccaacgtgctggtgaagaccaaactctatttttacggtactacctcnacttaacccacgtcaacttctactacgcgcttcaaccaacaaacgcaatcaaggccaataacaaaaaaaccattacccccacctcctactctatgtaaacaaagctaaacgttttcacggacttcttccgccgacaatacagctcaaaaacccatcttgccaccaggtttgcatccatcgtccaaaatcagcgagggcgagttatcctgaatcccccaaaccacctccaccatgtaggaccgcgtcccggggccctctccgattcac

SEQ ID NO: 105845 - DNA, 715 bp, Zea mays
  unsure (1)..(715): unsure at all n locations
  Clone ID: MRT4577_28030C.1
attttcccgcctccccccttccgccatctcccgcgtcttctcctctccaaaccccgaaaccctagagcccccctcgaccccccgcctccgcctccgccaccggatcggcagccacccatggctctcaagcagaaggggagcgacgccgccgccgccgacaccagcaagcgccgccgcgtcggcttcgccggcatcgatgctggaactgaagcgaatgaatgcatgcaagtgtttattgcaagaaaccctgacgaggtgggctcagcagacagcactcccatcgagccatttgacctaaaccatttctttggtgaagatggcaagatatatggctacacaaatctcaagatcaatgtgtggataagtgctatatcatttcatgcatatgccgagatttcattccaggaaacatctgatggagggaaagggatcacagatgtaaagcctgtccttcagaacattttcggggaaaacctagtagaaaaagatgaatttctggaggcattctcaaaggaatgccagtgcatcagtgatgttgtgaagaatggtaattccattanacatgatgcatcagatgaagatgatctgtcagttcagattgttcgagttgaactccaaggtgctgctgcatacctttattcacgtttggtatcacttgttctgcttctggttgaaggttccacacctatagatatcacggaacatgcatggcaaa

SEQ ID NO: 105846 - DNA, 203 bp, Zea mays
  Clone ID: MRT4577_28031C.1
accatccattccaattcaaggtatcctaaatcatcaacatatgtctcgagaacacgaggacttataccttctgcggatcaatcatctatcatccaatcccctacaaaaaaaccattgccacatgttggctaattccacgactcactgatatttttcttacttgattgtcttcctgctatttataattaatcttcaacttacat

SEQ ID NO: 105847 - DNA, 608 bp, Zea mays
  Clone ID: MRT4577_28032C.1
ctttcttacatagataccacatattatgcatactcagctcattacgatacgtgatgacacgctacaacatcaagcacacggggacagagcagcgaccaactaaggtgagggcagtgatacaagaattaactggggatcaacagtgggtaaaaacagcgtcacgatctgtataagatgatgctttagctccatccgagagccatcaatcggtggttgcacatgacctgcgtgcactgggctgagactgctgaatcttttgttaccacctcatgtagagaacgctatagcttgatccgaaagcggacaaggcgctgcaagcaaagcatggtgaatagatccactaccttaaatggagccgaggctgcaactgtaagatgctagctacaccatacatataaagctggaatctggaggccagagatacggcctgccgcaacctccatatgcgtggtgggactagcatgtagcaggcgcagcctaggcaaccgctatagccgtaaggctatataccatgcttggctgacagagcctatgacaattccaaaggagaaagtagagtcctctgcatgggtggtatcgaaaacttcaccagcctcagcaagtgtacc

SEQ ID NO: 105848 - DNA, 494 bp, Zea mays
  Clone ID: MRT4577_28033C.1
ccggccggggatacctgttcttccatcctcccccactcgctgaacgaactgcgggaacagaaggccgcgacatcaggcatcgggcacgtgcagcgcctaggcaaggaaagctaggagactacagccactggtgagacgcgacgcgctctgcacgccgatgagggggccggaagcactccttttaccgggtgatggccgcctagagcactcgcccttgagacagtgagcacctcaagggcctcctgtactataacccgctccgaaggaaaaatgtaatgaagaggttgctcctgaaattcgaccggacgaagcatagtatgccagcaggtaaacagtcatcagatccctgcgcagagtattatctttcgtgtcggacttctcgatcaccacctccattgctactcatgctacggaagcatgacccacgtgaaaggcaacccaaacatccagtgactcggcaacctcaggatctctcagcagacatgattatctgt

SEQ ID NO: 105849 - DNA, 478 bp, Zea mays
  Clone ID: MRT4577_28034C.1
aaaaaaaaaaaaaaaaaaaaaaaaaaaaaaaaaaaaaatttaaaaaaaaaaaaaaaaaaagagagaaaaaaagaaaaaaaaaaaaaaaaaaaaaaaaaaaaggctttgggaagccccgcatttttgccaaaccgggggctggccaccacggggtcccccccccccccgggggcccccgtttggggctgcagggcataccctccagggccccccagaattgggggggggggcccctcattgttttccggaggaggctttttgggccagaggtaaggggggaactttttgggacagcacccctgaaggagccaatttcaaaggctatccgggactgggtcccaaagggggagccccccccctatatttggggctctggggccgggccgcacccgaccccgatgatgggaggggggtccaatagggttttgggaaaggaaacccgggggcaggccttgccaaggtgggggggaaagcccgc

SEQ ID NO: 105850 - DNA, 534 bp, Zea mays
  Clone ID: MRT4577_28035C.1
cgcacactatgatgcctggctgatcgtcgcatagcatccggctgctgagcatgctcttggagatatcgtgctgccgagggcccaggtgtcttcccgagcgggatagtgctggcatagcgatgaatcttcggcaggattcaccgcatctctcttgctggcacgtgaatgacccctctatagctacacatagacactccaaggcattgcacaccaggctgcgccctaacgcaccacgtgcagcatctactacggaatcactctgtccactccaatcgtggagatgaggactccaagacctgatcgcagatactggttagccagtgcacacatcgtgaatccatgagaatacgacaactcgactgagacacatctacattatcaactcgctcaccttgtaaccagctcactacggtcccagcggcatactcccctgtgtaagtagaattatcacagagcatatctagcctgccctttagatacttgccatgcctgcaatgattcaggatgtggcgtaaactggatgggttggaccac

SEQ ID NO: 105851 - DNA, 224 bp, Zea mays
  Clone ID: MRT4577_28036C.1
cgcagatttatatttttattcggaccttcgtccccaaaccaccaatcggggaggtgatttgatgggggagtgcgaggaccccaaagaatacaggtgctgggaggagctgctgccggacacgcttggcctcatcttccgcaacctgccgctgcaggaggtgctcaccgtactgccgcggttgtgcaagtcctgcgggctgatggtggccggcccctactgctggc

SEQ ID NO: 105852 - DNA, 557 bp, Zea mays
  Clone ID: MRT4577_28037C.1
ctcgcctgcgctccctcgccgccccagttccccaccccctgctcacccacccgtcccctcctgctcgcccatggctcccatcgctgtcggcgacgccctccccgacggccagctcgggtggttcgacgagaagacctaccccgagaacaagcacgtgaagttcctcgccgacggatctggagcgtacaccaaggcgctcgacctcgagctcgatctcacggacaaagggctgggcgtgcgctcgaagaggttcgctctcctggccgacgacctcacggtcaccgtcgcaaacatcgaggaaggcgggcagttcacgatctccggcgctgaggagatcctgaaggcgctttagaagctccgtctcctctagaagccgcagcaacgatcggtctatagtttgaactcgcctttgaataacttgtcgttgggcaaggtctagttcggtgttgtgtatggaacggtcgtcactgagtcatgcacgatttggtatccgtgttgtttatgttcaccggtttgaggaactctctgatccgccgtgacacaaagttgatcctgag

SEQ ID NO: 105853 - DNA, 1750 bp, Zea mays
  Clone ID: MRT4577_2803C.1
gggaggagtgcaagctttgaattcggcacgaggggagagccggagagggaagagaagcaggccaacccacccccacccctgcactgcactgcacacacaatccctccccatggcctctgctccagctgctgctatataagcgcgacccggacggctctgcttccccagtagtcctctcctcccatccatgcttcggtccacgcacccacccagccccaccagcggcagctccgacgccgcggcgatggtcgggggcggcgcggcggcgggcagcggcggcgcaccgagcggcgccaagctgctgcagatcctcaacgtgcgggtcgtgggcagcggcgaccgcgtggtggtgctgtcccacgggttcggcacggaccagtcggcgtggagccgcgtgctcccctacctcacccgcgaccaccgcgtggtgctctacgacctcgtctgcgccggcagcgtcaacccggagcacttcgacttccgccgctacgacacgctcgactcgtacgtcgacgacctcctcgccatcctcgacgcgctccgcatcgcgcgctgcgccttcgtcggccactccgtctccgccatgatcggcatcctcgcctccatccgccgccccgagctcttcgccaagctcgtactcatcggcgcgtcgcccaggtatgccgccgtatgcgtgtgaatatgatgccgaccgaatccatccatccatccatcccgattcgattcgatcaacccaacctctggaagcaatttgagtttgttttaaattcccgggcacaggttcctgaacgaccacgactaccacggcgggttcgagctgccggagatccagcaggtgttcgacgcgatggcggccaactactcggcgtgggcgaccgggtacgccccgctggcggtgggcgcggacgtgccggcggcggtgcaggagttcagccgcaccctgttcaacatgcggccggacatctccctccacgtgtgccgcaccgtgttcaacaccgacctccgcggcgtgctgggcatggtgcggtccccctgcgtggtggtgcagaccacccgcgacgtctccgtcccggcctccgtcgccgcctacctcaaggcccacctcggcggccgcaccgccgtcgagttcctccagaccgagggccaccctcccgcacctcagcgcccccggcctcctcgcgcaggtgctccgccgcgcgctcgcccggtactagcggagcgcctgccacctacctggtgcctggtggtcatcggtatttttaccgcctcgatttaccccgtgccgagaccggggcggggatcagataatgtggcgacccgcgccgtttgctgtgcgcgccatgactgtagactgtagtacgagtgtacgacttgttctggacttctggtacccgatttttttttactgctttttaatggagagccgagcagtagcactggtactctaaaaaaaaaaaaaaaaaaaaaaaaaccatcttaacctacctagccgaattcctattttactgctggtagtttactgctatgagaatatgagatagggatcagccgccgccccgtcggatattctgactttaaaaaaaaaaaaaaaaaaaactcggaggggggcgcccggtccgcatttcgccctcttctcctgcacctccacccaggtcctggtgggcctgctcgcgacacgtggcgagtactcgaggcggtgcacgagctcggtccagattcggcttcgccttgtcctacgtgacacccccgc

SEQ ID NO: 105854 - DNA, 2333 bp, Zea mays
  Clone ID: MRT4577_28040C.1
cattgggacctcgaggcggcgggaaaaaaaaaaaaaaacccgtctttcagaattcagagggccgcacacgttccctgccgctgcctctacccctctccgggctctccctccccctctccaccgtctctacaccgccgccgctcacaccccaattcctctcgccccattgccggccgcctccctccgtcctctcgcctcgcttgctgcaggttcaatcgccgccgccatttctgcagtttttaattcccacgtcctgttccggcccggccgtgcactccaaattcttccaagaaggccagcccacgccacccggccgggatcccagaaaagttgcgctcggccttcgcgcgttacgtctcccacccagcccttcgatcccgtgatttcagaggcgcccctgtaccgaaagcctagctcccaatcttccttggattcgtcttttttttggatcttggggactgcactgcacacagtttgcctctcttacctttttttggatcttggtggtgccgagccgacaagcaattgcagatagaactgatcaagctatactatactacaacatcctattgaatgtgcgatgacctacatatacttttcaatagttttattactctttaatgctttcaaggcatggcgttttaactcggtgaatcttgtgggggttgctttctgcagccaatggagtttgggtggcaaattgtgctggggtcactgatcggattcttcggtgccgcgtttgggagcgtcggcggagttggtggcggcgggatcttcgtgccgatgctgacgctcatcattgggtttgacccgaaatcatctactgcgatatcaaagtgtatgattatgggagcctctgtttcaactgtttactacaatctcaagctaaagcatccgactttggacatgccagtgatcgattatgacctggctgtgctcatgcagcctatgctaatgcttgggatcagcattggtgttatttttaatgttatattccctgactggctggtcacagttctgctgataattcttttcctaggcacatccacaaaagcctttctgaagggcattgagacatggaagaaagagacagtaatccaaagggaggctgcgaaacttttggagcaaactgcaggtgaggaagcagagtatgcagcacttcctactggaccagatgttgcagcaaacaaaaaagccctcacatcagatgaggcgccatcgcttataaagaacatacattggaagaaggttggccttctttcatttgtgtgggtggcattccttgttcttcaggtcacaaagaattacactgctacttgctccccatggtactgggtcttgaaccttctccaggttccagtgtcagtaggagtgacactgtatgaaggatttgggctgatgagtgggaagagggtgttatcatcaaagggaagtggacaaactaccatgaaatttcatcaggtagtcgtatacggtctattcggtatagccgcaggactagttggtggactccttggtcttggaggtggcttcattatggggccactgttcttggaacttggcatccctccccaagtttcaagtgctactgctacctttgcaatgatgttctcatcttccatgtcggttgtcgaatactacctcttgaaccggtttccagtgccttatgctgtttatttcatcgttgttgcatttgttgctgccatcattggccagcatgtggtgaggaagttgatcaactggctagggcgagcatcacttatcatcttcatactggctttcatgatctttgtcagcgcgatttctctcggtggggttggcgtctctaacatggttcacaagattgagcgacatgagtacatggggtttgaggacctttgcaagtacgatgcataagaagcagggaagctgaagatgtgagctatgtggtgtgcagttctccgcaagcagaagtgggataattcaaggatagaagggttccatgatgcaatttggtgcgtaggaccgaagaggttctagcagcgacagttcctcgaagggaggctagctgcatggattggcttaagatgaattttgggcactgaattttcaaaacaaatgtagagatgattttctgccacggcagaatgtcgtcagtgcatttcgttgtaggaaatgtacactgcacatcttcagataaccatcctatagtactacgcgatatgaaatatcacatgatagacatgagatgggtgcctcgtgcaaaaaaaaaaaaacaaaaaaaaaaaaaaaaaaaaaacctaaaagctccacttatagctcccctttattgaggccttaattgagcggctaat

SEQ ID NO: 105855 - DNA, 165 bp, Zea mays
  Clone ID: MRT4577_28041C.1
tcaatcaatatattgattatttctaggaaacacatgcctgtatcagcgcacgctgctacgagatcgtaccatctgtgactcaactagcggcgcgctaaccctgcgtggctgctggcaccacatggcttgcattcatacacaactgacctgtgtcgtatcgctgct

SEQ ID NO: 105856 - DNA, 2428 bp, Zea mays
  Clone ID: MRT4577_28042C.1
gtcgccttcgccgtgcgtttcgagaagcgcccctcttcattgtgggacctcgagctgccggccggggccgtctttcagaattcagagggccgcacacgttccctgccgctgcctctacccctctccgggctctccctcccccctccaccgtctctacaccgccgccgcacacaccccaattcctctcgccccattgccggccgcctccctccgtcctctcgcctcgcttgctgcaggttcaatcgccgccgccatttctgcagtttttaattcccacgtcctgtcccggccgtgcactccaaattcttccaacaaggccagcccacgccacccggccgggatcccagaaaagttgcgctcggccttcgcgcgttacgtctcccacccagcccttcgatcccgtgatttcagaggcgcccctgtaccgaaagcctagctcccaatcttccttggattcgtcttttttttggatcttggggactgcactgcacacagtttgcctctctcacccggtggtgccgagccgacaagcaatggggaggaagtactactgccacgccgtggccgcgctggccgtcgtgttcgcggcggccgtcgtcgtcgctgccgaccggcgcctgtcgctggtggttggcgccgcggtggcgcccgaggaggtgagtctgctccggaaggtggccaatctgatgtggaacggcgatggcaactcgtaccagcacgtgtggccgccaatggagtttgggtggcaaattgtgctggggtcactgatcggattcttcggtgccgcgtttgggagcgtcggcggagttggtggcggcgggatcttcgtgccgatgctgacgctcatcattgggtttgacccgaaatcatctactgcgatatcaaagtgtatgattatgggagcatctgtttcaactgtttactacaatctcaagctaaagcatccgactttggacatgccagtgatcgattatgacctggctgtgctcatgcagcctatgctaatgcttgggatcagcattggtgttatttttaatgttatattccctgactggctggtcacagttctgctgataattcttttcctaggcacatccacaaaagcctttctgaagggcattgagacatggaagaaagagacagtaatccaaagggaggctgcgaaacttttggagcaaactgcaggtgaggaagcagagtatgcagcacttcctactggaccagatgttgcaccaaacaaaaaagccctcacatcagatgaggcgccatcgcttataaagaacatacactggaagaaggttggtcttctttcatttgtatgggtggcattccttgttcttcaggtcacaaagaattacactgctacttgctccccatggtattgggtcttgaaccttctccaggttccagtgtcagtaggagtgacactgtatgaaggatttgggctgatgagtgggaagagggtgttatcatcaaagggaagtggacaaactaccatgaaatttcatcaggtagtcgtatacggtctattcggtatagccgcaggactagttggtggactccttggtcttggaggtggcttcattatggggccactgttcttggaacttggcatccctccccaagtttcaagtgctacagctacctttgcaatgatgttctcatcttccatgtcggttgtcgaatactacctcttgaaccggtttccagtgccttatgctgtttatttcatcgttgttgcatttgttgctgccatcattggccagcatgtggtgaggaagttgatcaactggctagggcgagcatcgcttatcatcttcatactggctttcatgatctttgtcagcgcgatttctctcggtggggttggcgtctctaacatggttcacaagattgagcgacatgagtacatggggtttgaggacctttgcaagtacgatgcataagaagcagggaagctgaagatgtgagctatgtggtgtgcagttctccgcaagcagaagtgggataattcaaggatagaagggttccatgatgcattttggtgcgtaggaccgaagaggttctagcagcgacagttcctcgaagggaggctagctgcatggattggcttaagatgaattttgggcactgaattttcaaaacaaatgtagagatgattttctgccacggcagaatgtcgtcagtgcatttcgttgtaggaaatgtacactgcacatcttcagataaccatcctatagtactacgcgatatgaaatatcacatgatagacatgagatgggtgcctcttatggatttaacgtctttagcctagctcaactcgctttctttgtgcattcaagttaatcttggagctgaatccaaaaaacaacaaaaaaaaaaaaaaaaaaaaaaaaaaaaaaaaaaaaaaaaaaaaaaactcgaggga

SEQ ID NO: 105857 - DNA, 239 bp, Zea mays
  unsure (1)..(239): unsure at all n locations
  Clone ID: MRT4577_28043C.1
ggaaataaacttcttacttctaggaggccacatacatcagccaaaaaacttcattattgaatgacaactaataagcaaactaaaagagggcaccgccaatgatgcgttgttggtagaaggctgctgggtttgctaaagccggttggcccaagggcagcaactgtcgcggttctggcatgcttcctgtggcangcacaggctgctagaacctgccacagcacctttggggtggccccgga

SEQ ID NO: 105858 - DNA, 174 bp, Zea mays
  Clone ID: MRT4577_28044C.1
tttattgaccgagcatggctgagctcccgtgcaccgggcgactggacgtcctttcaaccccgcagcacgaatagagctgaactagcaactcaaacacacacacgactgaaccgagcaccggacgccttgctgaatctgaagaaacacccaaagtaccacgaggagtgaagaccc

SEQ ID NO: 105859 - DNA, 319 bp, Zea mays
  Clone ID: MRT4577_28045C.1
gaaaaacaaacaaaccgagcctttgtgaattttgcgctgttgggactttagacagaaccatgtttttgaacgattacaagatttttcccaagattccgccacaggaccaactttttcccccgattccccgaccgccaaagcttcctcttttataacgaagggggccacatagcaccttttttcccttaggggccccaacaaaagctttggaatgggcagtaattttttggccaggattacactttgtccagcaaaaaccttaaaaaccttgattggaagtccaccaaaaaatgctgggctgttggaatttcatgcccct

SEQ ID NO: 105860 - DNA, 392 bp, Zea mays
  unsure (1)..(392): unsure at all n locations
  Clone ID: MRT4577_28046C.1
ttggccgggggcctctccactagccgngcttcctgnccctcttctgtttcccgcggngnncttcagtntctgtcggngcctctggctctcgttccggagggtttttttcctctcttccctcnccttggtctgctgggccngctctctctccttnccctcncgctcagntccccccgccttcttcctctctctcccctgttgcgctgtccccctgttcctccctnccccntncgcggcgcttgtgctccttgtccgcgtggctgtggccccggcggcgcgcgctggcctgcgccgcggccgcctgggcccgggcgcggtctgccccccccgcgccctggccggccttcctggccctcgtgggnggctccccgcncctccccgccccgctccgg

SEQ ID NO: 105861 - DNA, 435 bp, Zea mays
  Clone ID: MRT4577_28047C.1
gagctatgatccggatgcacgcctgggcgggcgcggaattcggctcgaggatcatgtcattgcttaagtttatctggtccatcaaaatagtcgagggtggcgggtacaaaaacttggaaaacggataaatgtactggacaaaggaagaagaaaacctcccatccaatatttcctctcccttcctcgtgaatgaccaggaggatcacaatcaaccacagatggccgtggaggcccacagctggcattctccacggtgacaggttctcgctctgattctaaaattaatatagcttacacttttgccaagacatactaaactgcgctcaaatattttagtggctacaacaaatgtaattaagccaatccactacaatttggtgaatcatcatccttgacgcttgggatagctgatcgacaagttgccacttttttttt

SEQ ID NO: 105862 - DNA, 409 bp, Zea mays
  Clone ID: MRT4577_28048C.1
tttggatcttttacgagacgagaaccctcgcctgggccacccggaacgaacaagttaccatgtcatgccaaccccgtcttggccggatctcgttggactcggatccgcccgaccacccccagcccgtctagatcaaagatgatgggggctctcgacaccttcctcttcacctgggaggatgtgaacgagggacaccctggcaagctctgtgaccaggtctgagatgccgctcttgacgcttgcctggctgaggaccctgacagggcggttgcttgtgagacctgcaccaagaccaacagggttatggtctttggtgagatcaccagcaaggccaatgtcaactacgagaagattgtcagggagacctgccgcaacattggatctgtgttgagcgatggggggcttgacg

SEQ ID NO: 105863 - DNA, 431 bp, Zea mays
  Clone ID: MRT4577_28049C.1
gtcaaagccaccgttttgattccgcttacgtgagtaaagacctctgcctgcgcgacgcccaccagtagagtccacagccatttcattgtcttctttgcgcaatgcccgtgcatcagctcgcagtcgcaccagcgaccagagcagcagaccaagcaagcgcgagggagagaagagacgatgaatatgagaaaaggcggagctctgacgagcttagtccgcggaggcggcgaccggcgacgcgtaaccatggagcgggcggaggaggcgcagcccgccgccgagcggagggcgccctctacggcgccgtcggcgcgggtgtcgatctgggagtcggtacgcacgtgcggcgcgtgggggaaggagctggacaaggccgagctgcggaggcagagtctcatgccacgctacctgcgccggggcgtcgcggacag

SEQ ID NO: 105864 - DNA, 1685 bp, Zea mays
  Clone ID: MRT4577_2804C.1
attgttcgcgaaatttcttactatgtagctttttgccattttggtgcggaacacgaacatataggagcatgcggcacggattgtgctatggcaggtacccgacccaccgcatttcttatccgctggggtgtggtgcgcctcgtcgtcggcgacctttctcacccccagcggagatgacccattccgattggcggagggagctctcgtccaatgggtcgcgggctcgcggcgccatgggattcacgcatcccgccgccgggcgtgcgtgggccaaaatcagctcagctaattgggtaaagcgaccgctttttccggtgtgttgtgtgtgcgggcttggctttggctttggctttggctcgagtccgttccatcacagcaacttgccacttgctgccagtaaacaacacaaaggcgttcaccaccggctgccggctggagatgccctgccaatagcgaggagagcccctactgggtttggttcatacccgtgttatccactacagaatcccagctcgattggcacgagccgactggtcgctacacttgccgacttgcgtagggaggagtcctcttccagttgtcttgccctgccacagcccacaggggattcactgggctgtttgcgatggcagagttagccacggcaacgtacaaaaccagctcttgctaaggggggaaaatcacaaaattattgttgcgtctccttttcactactgtttgctgcggtgtggtggtctggataattgggcatctaaacgaaggttcgggcccttgttggcaccgggaaaaacttctcttatccaatctgcaacttcctcccgcaccaaaccttacccaggactaggaggaggaaagaaatggagaataaagcagagtgagaagagaagaggaagggaggcctctgctccagctcctatacaggagcgagcgacccagacgcctctgcttcccagtaccagtagtcgcccaatccgtccaggtctcatgcttcggtccacgcacccacccagccccagcagcggcagctccgacgccacgatggtcgggggcggcgccccgagcggcgccaagctgctgcagatcctcaacgtgcgggtggtgggcagcggcgaccgcgtggtggtgctgtcccacgggttcggcacggaccagtcggcgtggagccgcgtgctcccctacctcacccgcgaccaccgcgtggtgctctacgacctcgtctgcgccggcagcgtcaacccggagcacttcgacttccgccgctacgacacgctggactcgtacgtcgacgacctgctcgccatcctcgacgcgctccgcgtcccgcgctgcgccttcgtcggccactccgtgtccgccatgatcggcatcctcgcctccatccgccgccccgagctcttcgccaagctcgtcctcatcggcgcgtcgcccaggttcctgaacgaccaacgactaccacggcgggttcgagctgccggagatccagcaggtgttcgacgcgatggcggccaactactcggcgtgggcgaccgggtacgccccgctggcggttgggcgcggacgtgcccgcggcggtgcaggagttcagccgcacgctcttcaacatgcggccggacatctcgctccacgtctgccgcgccgtgttcaacacggacctccgcggcgtgctgggcatggtgcgcgcccct

SEQ ID NO: 105865 - DNA, 392 bp, Zea mays
  Clone ID: MRT4577_28050C.1
acggcccgacacgtaccatatgaataagctgtgcctggagccgacgtacttcacggtccaggctgcaggcatcgtcgataacgccgcgaccgagttccagaagaccaatctcatgacccgtctcacgtacacgctggacgagatcgaggtcccgttcgatgtcggatccgacggcacgctcaagtccgaggataaagacagcatctactacgccgacgtcaccgtgcagttcccagtgggcgaacgcgtgccgttcctcttcaacgatcagcagctgcgtgtcaccggcaagctctagagcttccgatgtgcctttctcgtgcccagctaccgtggctccttcttcctatgacacaatggccgaggcggctacaccggctacgacaacgcca

SEQ ID NO: 105866 - DNA, 1822 bp, Zea mays
  Clone ID: MRT4577_28051C.1
catgagagaagtgcaccaagaaggagagatagattaacgaggccactggtcagtgatttgaaaggggattggtatcctgcagatatgccagaaagcagcatgagaagcctgcaaggttacaaggccttcatctgcatagcgctcctcttgggcgatggtctttacaattttgttaaggttgttgcattcactgttaagagtctacttggcagatcaagactgaagaatgcaaagaaagaggaagacattccagtgcttgatgaaattcagcgcaatgagatttttacaagagacagtatccccacatggctagcctactctggatatcttgcactatcagctgttgctgtgtttgccattcccttgatgttccatgagatgaaatggtactatgttattatagcatacttattggccccggcattgggtttctgcaatgcctatggtgctggccttactgatatcaacatggcctacaattatggaaaggtcgcgctctttattcttgcggcctgggctgggaaggactctggtgttgtagctggcctagtgggttgtggtttggtgaaatcactggtgtcaatatccgctgatctgatgcatgacttcaagactggacatcttacattaacatcacctagatcaatgattattgctcaggctattggcactgccatgggctgtgtcattggaccactgacatttttactgttctacaaggcttttgacattggaaaccctgatgggtactggaaggcaccatatgctctaatctaccgcaatatggcaattcttggtgtccagggcttctctgctctgcccctgcattgtttgcagctgtgctacggattctttggatttgcagtggcagccaatctgatgagggacctcttgccaccaaagtacggcaaatgggttccattaccaatggcaatgggggttcccttcctagttggtgcgagctttgccatcgacatgtgtgtggggagcttgatggtcttcatctggcacatcattgacagaagtaaagcatctttaatggtgccagcagttgcatctgggttgatatgtggcgatgggctttggatcttccctgaatccttgcttgccttggccaagatcagtccaccattgtgcatggcattcaggtcttcacactagagtaacaaaatgctcgacatctgagaacagttccatgtccaatcggagaagctgttggcatgccaagtttgtcattaattagctgggatatgatacatgcaggtaggtaaagatgcagtgcctatctggatgttacctacatataatgacgtaatgtggtacccctgtaaaatttatcatatgcaagatgatacatcacattagagcaatggtaagtttgagaatttcacccccagtggtaatggatggatgcaagagctagcagtagccaaaattttgcaccataggttgtacccccacccctatagtttaatatggaaccacaagctacagtatacaaaccatcttccaaagacagctgaccctattgccaatcacagctgcttttggtaaaagaaaaatgcagtcaaatcttgcatgaatggttagcaaatcatgtgtatatttatgtatgtctttgccataacttggattcacaagatgcaatgtagtaagaggcatcttggtcaggcatctgatacaattgtaaaatcatctgctgcgtccttttatcataaacaaaatcatcaggtgatgtatgcctatgaatagttagcaaaaggtacatatatggttatgtatattaaacacgttctgtgaaaaagcaacccaaccattcacc

SEQ ID NO: 105867 - DNA, 135 bp, Zea mays
  Clone ID: MRT4577_28052C.1
caaggctggcccctacagtgccagcacgctcagcacctatgagttcggcaaaagcttcttccagacgctgaaccacgaccggcttctgggcggctgaaaggggcaaggaggcaaggaccctgtctctcccacgga

SEQ ID NO: 105868 - DNA, 363 bp, Zea mays
  Clone ID: MRT4577_28053C.1
atgatgacttgtttttttcatcttattttttctgttttattataagcatttttttactaatgtaatggcataacagagctagccaagttctccgaaacatgacagatcaaaaaaatttaattgaaccagacttgcaggaagaaggggtgctccgggtgcggtacgagcgtgagcttaaagaggacacagttcccttgctatcgagcaaaataaatttagtgaactgtacaaaacctgagacgtcgccatccaacgatcacgaatcaaactgtgagcggatgcaagtggataccaatccaactgataaagatattttaaaaattggataaaccataaaacagaggaaatgataagagtggatga

SEQ ID NO: 105869 - DNA, 451 bp, Zea mays
  Clone ID: MRT4577_28054C.1
cggacgcgtggtttagcggcagacgagagagctaaagcaaggagcaaccctaaccatggcgactgaaccagctactgaatctgtgcaatgcttcggaaggaagaagaccgcagtggccgtcactcactgcaagcgtggatctggtttgatcaagctcaacggttgcccaatcgagcttttccagcctgagatcctccgattcaagatcttcgagccggttcttctcctcggaaagcaccgtttcgctggtgtgaacatgaggatccgtgtcaacggtggtggtcacacatcccaggtttacgccatccgtcagagtatcgcgaaggctcttgttgcgtactaccagaagtatgtggatgagcagtcgaagaaggagattaaggatatcttggtgaggtatgataggactctgcttgtggcggatccgaggaggtgtgagccgaagaagttt

SEQ ID NO: 105870 - DNA, 142 bp, Zea mays
  Clone ID: MRT4577_28055C.1
gatactaatcggggggccggatacaaacctatacatgagggccaccttgtcggaaaaagaggaccacccactggaaatgctggtatagatggcatacttaacaagctgggcaaagacaaattgcttgtagactttagccaac

SEQ ID NO: 105871 - DNA, 148 bp, Zea mays
  Clone ID: MRT4577_28056C.1
ctagtgagatcgtcaacacgggaactgattcgggctctgaacgtgtaggcgtggctacacttcttccagttgatcgctttcgagcttggcgtcttcctggacagggctgtgatccgtgtgcgatcatgccacgctctattccacacac

SEQ ID NO: 105872 - DNA, 575 bp, Zea mays
  Clone ID: MRT4577_28057C.1
gcgggcaccagcgccggcgtacgggtggccggggtttgagagaagaacacggagttcagcgcactggcagggcatgaagctgactggaccgtcttcgtcaccgccggcgcccaagagggcctaggggaagaacagctccgtctcgctcgcgcctgctgcggcgcccgccggcgccgacgcgacgccggcgaagacaggcacggggagcactgcggtgcacttgtgcaagctagggtgccgcgtaaagatctggaatgggaactttttaagtacagtcagcgggaggagaggacacaccttacgggctgcagcgctcaaaaaaagtattactgattggattgctattaatctatctacatatataaatctatatataccgtgattagacggttttcaccatgattactatatattactagcgttcatgactatatttatcgtaggaacaagacatgcgtgcgtcgtgtgtaaatacattaccccatgcatttactttcacttttgcttcaaccattttccccccatgtgattgatcagtgggacggctgatgtataaatacatgtgattgtacact

SEQ ID NO: 105873 - DNA, 434 bp, Zea mays
  Clone ID: MRT4577_28058C.1
agaaaaaccacccactcccatgttcgaccagtccccactctcctctcctccctgcgcatggatagccatgccgagcacctcgccagaaccgtcgcagcagccagagcccaccgtctccatgaatccagcggttccagctccgcccacccatgcagcgcgcctggtccctgcctcgtcctcgccctggccccaggtcgcggccaagtccggcgagcctggcatcccgacgcgggtgcacacgagcccgacgtcccggcgagccgtcctccctgtccctacgtatggctaggctcccctgcagcgcggacaggaggccatggcgcgcggctgagtgcccctgcgcagcggcgtcacgaccagcccctttcttctctgccatatacccctcttgctgcaagttgaagaaccggtcatggaggagaaaatagcctgag

SEQ ID NO: 105874 - DNA, 328 bp, Zea mays
  Clone ID: MRT4577_28059C.1
gcggcggtaggtggagggtcgcgcggcggaagggggaccaggacgaggcggggaggaaggagtgggaggtggttcgggtgatacagagcggcctcaaggagttcgagcgccggagcctgtccagcggcatatttgctggattccgtggccgtggcgagtttgtggagaaatttaggttcggcatgaaatcactgaacaagggcgatcaggaatccaaggttgttccaccggtgcctcgggctgacagcggggcatatcgggtgcggcgctctgggccatttttagatcaacttggcatacagagagacctttgtgagagagtagtggg

SEQ ID NO: 105875 - DNA, 367 bp, Zea mays
  unsure (1)..(367): unsure at all n locations
  Clone ID: MRT4577_2805C.1
cgaggcgggcgggagtgagggacgtacgaagtctcctaattctttctatcnaattaagcgcttttttttcactactttcanattccacattataatcacatcaataacccctccatcttcaaccataaccccatcttctanacctacatccttcccccacactaatacttctactccttcancttcttcaaccctctcaacttcacccccactctcnactccaaaaataattaactcaccaacanctacctctccattcttcccttcctccccttcctaatccatcacaacttcacctncaanaatcccttctacaaccttctacaacacctctcccacccataacacaacaccatcatccacaccc

SEQ ID NO: 105876 - DNA, 375 bp, Zea mays
  Clone ID: MRT4577_28060C.1
gagggggcggaagggcccaagggccaccccactcctggcaacgctaggacattttatacttgggtcctcccatcgggcaggggcaggggggaaacaccaaattatgcgaatggcatacaaaagggggggtaaaaggaagggggcaaacttgtttgggtgtcaacgggttttaggccagattggctggctaatactagatttttaaatccccagggccggttggttttaccttgaccaacctgggaagtgcccaccttattttagtcttttttttcgatgggggggcgttttttttcgggtttcccccaggggaatcttccgtggttccagccttttttggaaacctgggactgggaggattttcttttagcttta

SEQ ID NO: 105877 - DNA, 399 bp, Zea mays
  Clone ID: MRT4577_28061C.1
cccgaaaaggaagaattaccggatcacttaagggtggccaggggccgggataacaggggaccgcccggctttcacgggggccaaaaaaaaaacccccacaaaaggccccgcccccccaaaataaaggttaagggggcacaccggaccgaccgacgacaaaaactcgggggagggacggggccagccagcaactggggcacgctaaaaactgacaacaaaccggttaggccacccccttaattttggggccagggcccccgttgccagggggggggtccttgtccatgccgccagggccgcccatgttttcacccgcgccctggtacattttggcaaagatggggttgcaaaggctttccagctcctttattttggcctcaaactcgtccgccttgggga

SEQ ID NO: 105878 - DNA, 491 bp, Zea mays
  Clone ID: MRT4577_28062C.1
cctttgcatggagaagctcgagagcgagctcaatggatacagggtgcggaaatcctaccccttgtacccttcctcagagtacctggctacctgctgtgtaacggcgtgatgtttccttgtgcgtgattgcggttgatttacttggtttgtcaacactagtcacagtaacgacttactgtgtgtttagtgtagtttactgaccactgggctgatccctgcgaattcgttggtacttttatgagtcctaagtcttgatgattatttgcaaacatcacattgcttgtacgtttgtgctttgctaacctgtgattacaatagatttcgtggctatatttactactgggcatataaaacaatttatttatagtttcccacatatgagacttgttgtgatttccgctatatgttttattttgtggctttagttgggcatatttcctattctaaagtgacaagtgcttatcaatgaaaatgccattctgcatttagtc

SEQ ID NO: 105879 - DNA, 688 bp, Zea mays
  unsure (1)..(688): unsure at all n locations
  Clone ID: MRT4577_28063C.1
aatccgcngatcacagacgcgtctatctcagcttgctgcactgcactaccctgccctgccatcatatcgtacgtgagcccggccgagcgagagcgagggagaggcatggctgctccgaagctcgcgacgctggcgctggccgccgcggaggcccacgcggaggaggaggccgcgcggagggacgctgacctagccgcgcggaccacgcccaagagggatcgagcctcgcaccgggggcgggccggacccagctggacgtggaggcggcagctctggatggtcatccttgcggatctcctcctcctcacaatcctcttcgccgcctggctcgcagtctgccggggattcagctgcattggtcggtaaatagctacacaacctctaaggtggctcccttgtgatatcttggcgttgtctccttagatgctagcatggtgctctgttgagttgtttcttcagccttttcattcatgggccatcgatttcttcagcgggttcttcatttagcacttcaagagcaagcgcagctctggtaggaagtgcagctccagcagccaggagaatacaagtcatgatgcgttcatcgcaaaatcagtgttcgttcaaatgtatagtgctcagatgggatctcaaatgggaccccagttcacccgtccgtcacaatctggacagacaccaaacaccaatg

SEQ ID NO: 105880 - DNA, 133 bp, Zea mays
  Clone ID: MRT4577_28065C.1
ggggaagatgagtcgctttattcaatggtcgttcgttgccggttactctgaaactaataaggcggaggatttggtcattacctaacggatgtccttccgaccttaaattttattggtacaggtaccccccctt

SEQ ID NO: 105881 - DNA, 408 bp, Zea mays
  Clone ID: MRT4577_28066C.1
gccggcgccgctgcattgtgcataggccccaaggagactgagagggggggtttttgtcagacccgaaggagcaatgcatacttaaaagcgatattcaggtagaagttccaagatatggcgcgctggccagacagactacagggccagcattatgctgattaaccaagacataaacaagcacaatacacccaaatacagatttgttgtgcgatttaccaacacaggacatcacagcacaaatcatctctgctagtatagcatgtgatatggttcttgcttctgcttactcgcatgagttgccacgatatggtcttgaagttggtctgaccaactatgcagctgcctactgcactggccttcctgatggctcggccgcgtgctcaagaccctttgggtcagataaggaat

SEQ ID NO: 105882 - DNA, 402 bp, Zea mays
  unsure (1)..(402): unsure at all n locations
  Clone ID: MRT4577_28067C.1
ggcggaccacccgtccgtttaacctggggggccctaaaacaacaaattcaaggaggaaccaccattgcttttaagggctgaataaaaacaccaggccgtgccaattnaatttccaaaaatttcaccaaaaaacttaaggcccttcaccaaaggaattgtttttaccattttccactttttaattattgccctttgaaaaatgaaccgcttcaattaattaaaattttttaagggtttaataacttgcggcaaatctttttgttggccatttaaaaccaccaggaccttatttccacacttgttttctttttaaagatgaagtcctaaaaaccttattttacctgaggcaacttaaccttactccaaccttttgttttgaattgcttttcaaaaccaggtttt

SEQ ID NO: 105883 - DNA, 336 bp, Zea mays
  Clone ID: MRT4577_28068C.1
gcgttgcagcgagcgcggcgggtttggccgtggcttctggcgctgctggcgcggcgaccgtggcgggcgccgaggctgccgtcgccggcccacgtaagaagaaaaaaaattggtccccattaccaaacctcgaccgcttcttaaagaaaaccagatcaacaaaaaccaagaaaactaacttcaattgattccccttaaagaacaacaaaacattcaaaaccttgttcccgagcttaaagaccaagttaataaaaacaaccccgttcaaaaacaaacacctgcccgacaacacaaccggttcaaaggctctttcctccttggccaattgcaacggca

SEQ ID NO: 105884 - DNA, 238 bp, Zea mays
  Clone ID: MRT4577_28069C.1
cccttataactacagctatgatccgttgggagaatacctgacctttatcaatgaggggggctcctctgttgatggggtttggccaaaccacccattacctgattaaaaggcattgggtggtttacctaaccggatttaaaataaaactgaccatggagacccctaagttttctaacatatgggggctgggggagactacccggcctgtccagacttggcctaccttagtgcattgatg

SEQ ID NO: 105885 - DNA, 428 bp, Zea mays
  Clone ID: MRT4577_2806C.1
aatgccgcgtcgtaagctcggaattcggtcgggtggcgcctttaatttcagcggcactggggcatcctccggtacgacgggcactcaagtacccgatggacctgagcgggcaggggcagaacgcgatgctggtgccggcgcgcggcgtggagtacctgcccggcgtggtgcgtagtaacaccaacgccggaacatggacaagctcgcgacaacataactactcgtgcacgttcgcgactgaccggctgggctacggctccacgtgcggaggatggacagaacggaacgcgtctacgcattaacgccttcttccaggtgcagaacctaaggaggaggcctgcggtttcagggcctcgcctgcccacacagactgacccgtcaccgtcgtctgaacttaccatacagatcgtaccacctggctggtaccg

SEQ ID NO: 105886 - DNA, 713 bp, Zea mays
  unsure (1)..(713): unsure at all n locations
  Clone ID: MRT4577_28070C.1
attccattctaagcaaagagctaatacaagtactactactagatactcgtgtgtgtgtgtgtgcgctacaccagtgagtgtgtgcttcactagcgtgtttgagcacagcaagatcagaaagtagagcgagcgagagtagtggtcagtagcttagctcgggctaacaagcacctcccacttgtgctctttcagagtgattaatcccaagtggcaagtgcatcgtcggtgcaaatctggcaccagtacagccgtaccatacatgtagatcttccaggtcccaattgcataggacgtggttgggacttgggagcagcagaaaccactatcatctatggacgcaagtggactggaccgggatgaacccacctttcggtccagcatgttctctttgcttcgacggtgcacaaacctgcaatttccagggtgcttgttcaggcaccaacgggatcggagacaatgaaacctcattagatgcacatcatgcagtggaaaacaggatgcagcagggatttcttcctcttgctcgttcatctatgctgtggcaatgcgacgtgggtattctgcgatgaggaattgagcgcgaaccatgtgaccaatgggatggtggctgcaggaaagagcggactgttagaatatacgttgtgtagagataggagaatagttgagcagtttaaatctttgnaatcttatctccttttatctctacttctgtt

SEQ ID NO: 105887 - DNA, 729 bp, Zea mays
  unsure (1)..(729): unsure at all n locations
  Clone ID: MRT4577_28071C.1
aattcggcacgaggcaatctcaaatgaacttaaggataataagggtcaacatgagatatgttgttctaaaattgaaacaataaaggtttgaatacttacatcttgttacctgaactgaaatgatttttttacatcttttttggtcccatcttttatgaattgacttaagttgttttgtagggtaaatggcttccaactatgtggattcattcgtaactttcaagaaatggcagtcgctcactactaacagtttatctacagcctaatgaaattcgttggtagtgtccacttcatatgccataagttgaaggtagttactaatgtggtagatagtgccaggttttgtgaaaaggatataaaagcttgtattttttttttttgcctttgacaagtccacctgctgatttctggccttccaaggcaacattgatacttataatgttaaaatcttattcatctcgattagttgggtattgtgtgtcactgttgtacaagaattttggcatctattagtatgttagtttcatctattaggcctctaaatcctgaatccatatgctactgngttacagataagcagaatgcaaatccatcctttactgttatgttcatagttaattgacctggttctagattaatttagttaaaacacattcttttttcatatcttagaagtaaccatcaagcttgacaaacangaaacatattatngtcagtgatggctaatga

SEQ ID NO: 105888 - DNA, 638 bp, Zea mays
  Clone ID: MRT4577_28072C.1
gcctccaaccggttcatgaatgcgacgcctacttcttctgcctggaggaccgcgcgctgctctgccggagctgcgacgtcgccgtgcacactgccaactccttcgtctcggcgcaccggcggttcttgttaaccggcgtccaggtcggccaggagctcgagcctgacgacctctccctggagcagcgagaggcagaggcgtcgtctcccccgccggcgaagagcgagccgaccccgccgctctacagcgagagcgacttcggctgggcggctggcgccggcgccggtgccaccggaagcctcacggactggttggccgtggaggaggagttcgactcccctgccccccgcctcgcggaggtggcgcccagggccacgccgaagcggactccgcgggcgccggctttcggtgccgggcagggccgcatcgccggcggggtcatggattggccactgggcgagttcttccgtggcgttagcgacttcaacggcggcttcagcttcggcgagagcggcaactccaaggccgacagcgggaagctcggggacagcgcgggtggctccccgtactaccgctcgtcggaggaggagcgggacgccaacgagctcttcggccaggtgccggagatccagtggtcg

SEQ ID NO: 105889 - DNA, 1813 bp, Zea mays
  Clone ID: MRT4577_28073C.1
ccggccgggacgatggtcgcatttgtgcggccgtgaggcctcgacgcctcgtccaacaggagccggcgacgtcgcccccttcgtcccctccgctgcgcccacgccacgaatccattccattcccattcctccccacgccgcgcgcctccataataccacaccgccacccccatgccgctcgcccaccaccacaatccccagccctcacgcgccattggaattgacattcgattcccagcgcagctatcgagctccctttccccgccttgttggcgcgcgttagagcgcgagagagaaccggctaacccccggcggcgaagaagttcatgaaggtgctgtgcagtgcatgcgaggcggcggaggcgagcgtcctctgctgcgccgacgacgccgcactctgcgcgcgctgcgaccgagaggtccacgcggcgaaccgattggcaggcaaacaccagcgcctgcctctcctcgcccccggcggccaaggcgccgccgccgtgtcgccgcccaagtgcgacatatgccaggaatgcgacgcctacttcttctgcctggaggaccgcgcgctgctctgccggagctgcgacgtcgccgtgcacactgccaactccttcgtctcggcgcaccgccggttcttgttaaccggcgtccaggtcggccaggagctcgagcctgacgacctctccctggagcagcgagaggcgtcgtctcccccgccggcgaagagcgagccgaccccgccgctctacagcgagagcgacttcggctgggcggccggcgccggcgctaccgggagcctcacggactggtcggccgtgcaggaggagttcggctcccctgccccccgcctcgcggaggcggcgcccagggccacgccgaagcggactccgcgggcgccggctttcggtgccgggcagggccgcatcgccggcggggtcatggattggccgctgggcgagttcttccgcggcgttagcgacttcaacggcggcttcagcttcggcgagagcggcaactccaaggtcagcgcagacctctgtttttttggatcgtagatcgtgtttactgtctagtcgtctttctgacattctgccgtcgcgtttcctgtcatctcggcaggccgacagcgggaagctcggggacagcgcgggtggctccccgtactaccgctcgtcggaggaggagcgggacgccaacgagctgttcggccaggtgccggagatccagtggtcggtgccggcgctgccctccccgccgaccgcgtccggcctccactggcaacacggcggccccgacagcggcgccttcgtgccggacatctgcaccccggacggcgccggccgctgcttcccgaccgccagtggcgccgcgaagcgccagaggaaccgctagctccgcgaggacaaaggaggttcatactaccggtcgctatgttccagatcgttcttgcagctaagctaagcaacaggagatcacagtgaatgctcctactagtgaggagtacgtcgcaccgcgtcgtcgatcacatccctgatccaaggtgaaggccttgagctcgtgcgcctgtttaacggatgcatcagatctggacgatgctagaaacaacttgtgctagtgctacctagcctttgacttccaatgacgctttgaaagattgaaactgatgcgctaaccgatagcttagacattggacagtagtatgatgctgatgcttcgttttcttgtccgttcaatcaatgtaacaaagagaagttggggatgccaaaaaaattcaaaaaaaagctggtgatatgctatctaatcagtttgcctc

SEQ ID NO: 105890 - DNA, 727 bp, Zea mays
  unsure (1)..(727): unsure at all n locations
  Clone ID: MRT4577_28074C.1
catccactcgcagcaccatcggctgattgtcccttacgctatcggggctctgtacaaccacccactggagggcctgcttctggacaccttaggaggcgccatctccttcttggtctccggcatgacgccgaggaccgccatgttcttcttctgcttcgcagtcctcaagacggtcgacgatcactgcgggctttggctaccgtataacatcttccagcacctgtttcagaacaacaccgcctatcacgacatccaccaccagctgcaaggaaccaaatacaactactcccagccattcttctcgatctgggacagaatgctaggaacccacatgccgtacgacttagtgagcaggaaagaaggtggatttgaagcaaggccgtcgcgagactagcttgaagtcatggaagtgtacaggctccggtgaatgagtcagacagaatatggttttttagctgtcatggttcattttttaaaaattttgtgcagggctgccatttacattgctgtgcagatagtgcatttgaaaatccacacttctgtatgtacccagttatttgtgtaattgattgaacctctggtcgtgatcgacaccttcggagcaatctttggctactactgactgtgctttgtttcacttgttttgatatattcatatatcctttcactttcccctcttgngaaaaaaaaaaaaaaccaaaaaaagccgaaatgagaaaaacttgca

SEQ ID NO: 105891 - DNA, 427 bp, Zea mays
  Clone ID: MRT4577_28075C.1
gggaaaaaaaggggggcatgtttcatttgcgggggccgggtttattttttacaagaggccccaacaatccccaaaccaaaagttgccggggttttgctcgcccagcttattgcactggtcgccctacccccctagatacatattttaaaaacatcggaagagctagcttctggaaccgatgcgaccgcaccaaaccatttttggggggccatgggaacatccgggaccaccagccctttttcctaatggtcttggccctccgacgggtcaagtcaagggggggccccccccccaaactaaggctaaactttcaagacgatgactaacctggaaccttgcaccccatgcgtaaggccaaagttagtctttatatgacggggccccccttgaggggggggttctttaggactaccacgatcccaaaccg

SEQ ID NO: 105892 - DNA, 221 bp, Zea mays
  Clone ID: MRT4577_28076C.1
gaaatggatagaacttctgaaccaaggcgacagagtatcgggaaatggcagacatcatacactcacttagcataacaatacgcgaggactagagacgctgggtcatcttatgtggggactatggcatggatgctaactgctggattgctgacaatgacaatggcattcgtggttgatcgataaagatatatagagcgctagcgtgcttcccctgaacaagc

SEQ ID NO: 105893 - DNA, 474 bp, Zea mays
  Clone ID: MRT4577_28077C.1
acaggggaaaaaaaacggggcccttttactggacaacccaagttgggggaacggggccgggatgccaaattttttacatggggggggggctttacattactttacaaaaacccattttggccaaattggtggggggggggggcccgcccaaatggggcccccccaaaaaaaattttgaggagaacttgaagcatcccaagcccccggggggggggcaggcctgccccaaaaaaaagggccactgggcgttaattttggtgcaccccttgataaaacaaatgcagaaacagcagtcccccatgggggtggaaaaaccaggggccttttcaaaaaaaaaaaaattttgggggggtttaatgtttccaaaacctgtgggaagggtttttggtggtggcgggaagttgccaaaacccaccggtgggccacctagggggattggtgggaggtaatttgggctactggtttgtttcgggg

SEQ ID NO: 105894 - DNA, 625 bp, Zea mays
  Clone ID: MRT4577_28078C.1
ttttgatcgcgagcggcgccctttttttttttttttttttcttttcacccgacgacgacctggtccgcctccgcgtccgcgccgtcgcggcagccgccttcatcggcgctgcaggcccaccacggctggccgctggccgtgccggcgccccacagcctgacagcggcagggagcgctcctccgctggcgccgccgacagctcccacgcccgacgcgcaggccgtgaagcggcgcgggagaccctgccaggtccggactacggcgccgccccaggggaagacgccgtccgcggccccctcgtagaacccgattcgcttcagatcctcgccgtcgtcgcccgaggagctggcgtcgacctcgtcgtcggagctctcgtcttcgtcttcgtcgccgtcctcgtcgtcgtcgtcctcgcaggacgagtagtaggtccccatgtgcaactggatggcctccttcccacgggagcggaggcgcaggacgatgacctgcaggcggcgcagcaggctgggcagcgtggccagagccgccagcgccacggccagcggcgcccacatctccgccagcagcgccgcggccatcgccggcgcccgcgagaccgccccaccccggctccagcatcgcc

SEQ ID NO: 105895 - DNA, 449 bp, Zea mays
  Clone ID: MRT4577_28079C.1
accgacaagcgattctgcaagattccaaaaaaaaaaaagggcgggcaaaccccaggcaaaaaaaaaagcgggggaaaccccgcaacccccccgccctggaacgggcaaaagtttggagggaaaatctatgaagggggggggggtttctttttttattcaaaacatggggggggcaatggcccccggggggggggaaaatttccccgaggcatgagaaagcaagcgttttcccccccggcagctttggggcaggggcatccatcttcttccttgaaaacccatcaatcgggaggccctgaacgattttcctttcccccccactggatgttacggggaaggaaaaaaggagccccaaaggaacccccgttgacccctcaaagaccccccccagggaaacaaatggcccctcagggggtcccaaaaccccaccccaaaaggggccccaagca

SEQ ID NO: 105896 - DNA, 399 bp, Zea mays
  unsure (1)..(399): unsure at all n locations
  Clone ID: MRT4577_2807C.1
nnctttttnnnnnnnaaaaaannnnnnnannnngnnaaatttttaaagaaaaacccccccgcctccccnncgcccccacaaaaaacacccctcccacttattattgaacccaaatatacccccctcccaaaaaaaccaaacgagtcccaaaaccccccctttttgacgtaagcccacccccacaccaccttttttcccccaagctcacacttttactcaccacaagcaagcatctaccaagggcccgaaagggacccaatattgggaaccctcaaatttcccccccatgccgtcccaaattaaacccgtgtgtggttttttccccccgaactagctaacttttggncgcccccccgcccgaactaccgtcaacccaaaaagggggggggctttttctcc

SEQ ID NO: 105897 - DNA, 827 bp, Zea mays
  Clone ID: MRT4577_28080C.1
cattccgcctccacccccgaactccaaaccctagtagcgccgccgccgccaggtaagaggcgagatggtgtccggctccggcgtgtgcgccaagcgcgtggtggtggacgcccgccaccacatgctcggccgcctggcgtcgatcgtcgccaaggagctgctaaacgggcagcgtgtggtggtggtccgctgcgaggagatctgcatgtccggcggcctcgtccgccagaagatgaagtacctccgcttcctccgcaagaggatgaacaccaagccctcccacggccccatccacttccgcgcccccgccaagatcctctggcgcaccatccgcggtatgattccgcacaagaccgcgaggggcgaggccgcgctcgccaggctcaaggcgtacgagggcgtgccgccgccgtacgacaggaccaagcgcatggtcatccccgacgcgctcaaggttctgaggctgcagcctgggcacaggtactgcctcctcggccagctctccaaggaggtcggatggaactacgccgacaccatcagggagctggaggaaaagaggaaggagaaggccaaggtctcctacgacaggagaaagcaactggccaagctccgcgtcaaggccgagaaggcagccgaggagaagttgggaactcagctggagatcctggctccgatcaaatactaagagatatcagagctttcgtgcgccatcagttttgggaaacctctgtcgtattttaagtagtttggtaactctgatagtacaatctggttggtaaacctttgttatgcatgcagttctgctaccctcatttgaaattttctac

SEQ ID NO: 105898 - DNA, 674 bp, Zea mays
  Clone ID: MRT4577_28081C.1
atcttctgtttggctgttgccttgcgggtggcggctgctttggtgcgctgcgcagtgcgctcctcttcctcgggtcgggcgctcgtcatccactcttcctccagccctccatctgatccccgtacgaccgtcccctgctcgtcttcctggtgctcggctgctccagtgctcggcccctgctgcagtgctgctcggtcgcgtcggcacctgctgcagatctgctcgacctcggctgctcggcttcctggtaacctggttcctgctgaagtgctgattctagagtctgctgcgtacgtttagtagtatcagttccttctgctacaaattcatagtcactgatggggaaggcaaagcgtgcctcgatcttcatcaggctggtttctgcagccggcactggattcttctacgtgaagcgcaagaatcctcgtcgcatcaccgagaagcttgagtttagaaagtatgatccccgtgtgaacaagcatgttctgtttaccgaagcgaagatgaagtgagatcttgtttctccacaatgcagaactgtaataagttgtcaaccttttgcgaccagaaacctttatgccgttattagacagatgattaacgatcctatgtgtttttcctgctccaatgagctgcaagcagcagatggctagtgttttgtcattttgtgtggg

SEQ ID NO: 105899 - DNA, 113 bp, Zea mays
  unsure (1)..(113): unsure at all n locations
  Clone ID: MRT4577_28082C.1
ccccgggcgnnggcgaaggaagcgacgcggagcccgctagtgtcggggagcgaacgcgggcgcaggcgaggatgcgtattggtttgccctggtctcggcgagcgaaccggaag

SEQ ID NO: 105900 - DNA, 424 bp, Zea mays
  Clone ID: MRT4577_28083C.1
gcacaaactacttttttttctgaacattgcttttaccatgaaacaaaatgatgaggccccattcacccatgggaacaggcctgtgactataaacacaacacctgcgtgaagaatatggattgttttatgcatccgatgaaccctccgggggccatattcactggacatgtccattatattgttgctgaagatctcatcacgcgactggaaggaatggatatcccctgcttcacgaaaacatagctctttccggggatcaatcgcaaaaggaaaggctttcaagcagatgaccaacacgacttgcaatccactctgggctcctgccacctgactaatccatgagcacggcgacaggggcgacgaacatcaacagcctgaagccgagcaggacgtacgtcttgcacaacgacttgcggttcttccc

SEQ ID NO: 105901 - DNA, 902 bp, Zea mays
  Clone ID: MRT4577_28084C.1
ctgtgcggcgctcaggcggccggccgggattttcctcatccattccaatcaatcggaccgacaccggctaaccctagcttctgtttggctgttgccttgcgggtggcggctgctttggtgcgctgcgcagtgcgctccgtccgtccgtcgaccggaaggccgtcccctggcccctgctcgtcgtcttcctcgggcgctcgtcttcctccgaacgcgcgcgggccgccgacctgcttgttctcctggaggagcgcgcccggcgggcaggcgacgcagtccagcggcgggttgaggaagaaggcgagcgaccggtggatccccgtccagccgtcccctgctcctcttcctcgggtcgggcgctcgtcatccactcttcctccagccctccatctgatccccgtacgaccgtcccctgctcgtcttcctggtgctcggctgctccagtgctcggcccctgctgcagtgctgctcggtcgcgtcggcacctgctgcagatctgctcgacctcggctgctcggcttcctgttccttctgctacaaattcatagtcactgatggggaaggcaaagcgtgcctcgatcttcatcaggctggtttctgcagccggcactggattcttctacgtgaagcgcaagaatcctcgtcgcatcaccgagaagcttgagtttagaaagtatgatccccgtgtgaacaagcatgttctgtttaccgaagcgaagatgaagtgagatcttgtttctccacaatgcagaactgtaataagttgtcaaccttttgcgaccagaaacctttatgccgttattagacagatgattaacgatcctatgtgtttttcctgctccaatgagctgcaagcagcaggatgctcgagctcttgccgaaaaaaaaaaaaaaaagcggcc

SEQ ID NO: 105902 - DNA, 872 bp, Zea mays
  Clone ID: MRT4577_28085C.1
tggttcgagattcctcatccattccatcaatcggaccgaccccggctaaccctagcttctgtttggctgttgcctggcgggtggcggctgctttggtgcgctgcgcagcgctccgtccgtcgaccggccggccgtcccctggccctgctcgtcgtcttcctccgaacgcgcgcgggccgccgacctgcttgtgctcctggaggagcgcgcccggcgggcaggcgacgcagtccagcggcgggttgaggaagaaggcgagcgaccggtggatccccgtcctgccgtcccctgctcctcttcctcgggtcgggcgctcgtcatccactcttcctccagccctccatctgatccccgtccgaccgtcccctgctcgtcttcctggtgctcggctgctcggctgctccagtgctcctggctgctccagtgctcggcccctgctgcagtgctgctctgtcgcgtcggcacctgctgcagatctgctcgacctcggctgctcggcttcctgttccttctgctacaaattcatagtcactgatggggaaagcaaagcgtgcctcgatcttcatcaggctggtttctgcagccggcactggattcttctacgtgaagcgcaagaatcctcgtcgcatcaccgagaagcttgagtttagaaagtatgatccccgtgtgaacaagcatgttctgtttaccgaagcgaagatgaagtgagatcttgtttctccacaatgcagaactggaataagttgtcaaccttttgcaaccagaaacctctatgccgttattagacaaatgattaacgatcctatgtgtttttcttgctccatcagcagcagacaaaaaaaaaaaaaatctggcctccatctttttctttc

SEQ ID NO: 105903 - DNA, 1240 bp, Zea mays
  Clone ID: MRT4577_28086C.1
gcaacaaaagtatgctaccactttcatcgtcaagcgattctgcaagatttcaataaatataaatgtcgtgcaaatcacaggcaaaaaaagaagctgggcgaagccagcaacacgcctgcactgcgacgtgcagcagttctgagtgagaatctatgaatcgagttggagtttctttttttattcaaaacattggggtggcaattgctctctgggtgtggtagaatttactcgaggcatgagtaagcaagcgtcttctcctccgtcagctcttgggcagtggcatccatcttcttccttgagaactcatcaatcgggaggccttgaacgattttccattcactaccactgcatgttactgggaatgaataaatgagtccagaaggaacaccgtatgaaccatcagagtacacacccatggaaacaaatgtaccctcaggtgttccaagaacccaatcacgaatgtggtcacaagcagagctagcagccgagagagcactggagaactttctcgctttaatgattgcagcaccacgctgttggacagttgtgatgaattcaccattaagccccagatgataacattcttcacatcactaacttggacattaagtctctcagaaatctggccaagagccctgttgtgctcgagacgggtcaggcaagtaacgttcttctctggaatagatggagcaaattctttcaagataagagcattggtgtttgctgggttggttcgtctcaatggaaggcaaaacagggcagctcaggtgctgtttcgtcgccatcgtgctcgtcctgggtcttgtccttgagtcccaccaggctgaagctggaggcaaatggtgctgcgaaaccgccaccggaaaataccattttaatcgctgcgttgactcgggtttggtcgacaatattgggttctgtgcgggtaatgccggttgcatcattatggaagacagatgtggaggccgttggccggtgcctgctcgtgatgcgctttccctggatgtcatttgattaattataagcaagtacgtgaagaaacgagggccagacgactgtcgtccagcgattggttatttgtgaacttgtcgtttgtcttcttatttcaactttccaataagccccttcgtgaagtgtcatccccttcaaagtctgtcgactgttacgtatacaaatctatatatcaaataaagacggcgccgtacgtgtgtatcaaaaaaaaaaaaaaaaaaggccccta

SEQ ID NO: 105904 - DNA, 803 bp, Zea mays
  unsure (1)..(803): unsure at all n locations
  Clone ID: MRT4577_28087C.1
tctggccgtcccctggcccctgctcgtcgtcttcctcgggcgctcgtcttcctccgaacgcgcgcgggccgccgacctgcttgttctcctggagaagcgcgcccggcgggcaggcgacgcagtccagcggcgggttgaggaagaaggcgagcgaccggcggatccccgtccagccgtcccctgctcgtcttcctcgggccgagcgctcgtcatccactcttcctccagccctccatcggatccccgtccgaccgtccccggctcgtcttcctggtgctcggctgctccagtgctcctggctgctccagtgctcggcccctgctgcagtgctgctcggtcgcgtcggcacctgctgcagatctgctcgacctcggctgcttggcttcctggtaacctggttcctgctgattctagagtctgctgcgtacgtttagtagtatcaggtgagcaacttaagtagcaactagcaaataagtttagtagtatcacgcacagatctgcagtacgtacagttgatttcttcactgaccatatatttatttgtagttggtcttgagataatgtcatcgagcaaccacaatcatgaccataatgtcaatgaatcgcagtcacctttgaatgtttactattgtatgtttactgttgtatgttcactgttgagtgtttactattgtatgtttactgttgngtgttcgctattgtaatatgctgttgatttattgtgctgggcaggatttttaggtggttactggcagaatcaatatttttctaattctaagtggctgtggggggggatttttccc

SEQ ID NO: 105905 - DNA, 628 bp, Zea mays
  Clone ID: MRT4577_28088C.1
ccctttgttgccgccgcctccaagccactcccaaacccccgcttccagaaccttctcgaagctcaccgcctcctcctcctcctcctcctcctcctccactcgctccgatggcgaaggacccgatgcgcgtgctcgtcactggcgccgcaggacaaattggatatgctcttgttcccatgattgcgaggggagttatgcttggtgcagaccagcctgttattctgcacatgcttgacattccgccagcagctgaagcccttaacggcgttaagatggagttggttgatgctgcatttcctcttctgaagggagttgttgcaacaactgatgttgtggaagcctgcactggtgtgaatgtggccgtcatggtcggtggattccccaggaaggagggaatggaaaggaaagatgttatgtcgaaaaatgtttcaatctacaaagcccaagcatctgcccttgaagcccatgcggcccccaactgcaaggttctagtggtagccaacccagcaaacaccaatgctcttatcttgaaagaattcgctccatctattcctgagaagaacgttacttgcctgacccgtctggaccacaacagggctcttggccagatttctgagagactcagtgt

SEQ ID NO: 105906 - DNA, 882 bp, Zea mays
  Clone ID: MRT4577_28089C.1
gccggccgttccggggaccgactctcggcaacggatatctcggctctcgcatcgatgaagatcgacaccggctaaccctagcttctgtttggctgttgcctggcgggtggcggctgctttggtgcgctgcgcagtgcgctccgtccgtcgaccggccggccgtcccctggcccctgctcgtcgtcttcctcgggcgctcgtcttcctccgaacgcgcgcgggccgccgacctgcttgttctcctggagaagcgcgcccggcgggcaggcgacgcagtccagcggcgggttgaggaagaaggcgagcgaccggcggatccccgtccagccgtcccctgctcgtcttcctcgggccgagcgctcgtcatccactcttcctccagccctccatcggatccccgtccgaccgtccccggctcgtcttcctggtgctcggctgctccagtgctcctggctgctccagtgctcggcccctgctgcagtgctgctcggtcgcgtcggcacctgctgcagatctgctcgacctcggctgcttggcttcctgttccttctgctacaaattcatagtcactgatggggaaggcaaagcgtgcctcgatcttcatcaggctggtttctgcagccggcactggattcttctacgtgaagcgcaagaatcctcgtcgcatcaccgagaagcttgagtttagaaagtatgatccccgtgtgaacaagcatgttctgtttaccgaagcgaagatgaagtgaggtcttgtttctccacaatgcagaactgtaataagttgtcaaccttttgcaaccagaaacctctatgccgttattagacagatgattaacgatcctatgtgtttttcctgctcctggaaaataccaaaaagcggcc

SEQ ID NO: 105907 - DNA, 289 bp, Zea mays
  Clone ID: MRT4577_2808C.1
agtaaaatatgtaatttgtaatatgttgcacatacaatatacgtgtcagggggtgcatcgtcacaccatatgtatgcggcattcgatcgaggtatatatatatgctgccgtcaccttagtggtcgtcggcgttcccaatccgtcacgcaaacagcacacgacaaagcacgcctctcttgttccatctccatccaaaatacacggtgatgcgtgcatgctcaccgccccccaacacttgatgcacgtcgtcgttccaacaagctgccaatgcctgccgtcacgctccctc

SEQ ID NO: 105908 - DNA, 586 bp, Zea mays
  Clone ID: MRT4577_28090C.1
atgctaccacttcaatcgtcaagcggttcaattgcaagttttcaataaatgtcctgcaagtcaatcaggcaaaaaagaactacaagcctcatacgacatacatgctggacgaagccagcaaacacgcctgcacatcgcagtgcagcagttctgagtgagaatctggagtttcttttattcaaaaagataggggtagcaattgtggtctggggtatggtagaatttactcgaggcatgagtaagcaagcgtcttctcttccgacagctcttgggcagtggcgtccaacttcttccttgagaactcgtcaatcgggaggccttgaacgattttccattcaccaccactgcatgttactgggaatgagtaaataagtccagaaggaacaccgtatgagccatcagagtacacacccatggaaacaaatgttcccttcaggggttccaagaacccaatcacgaatgtggtcacaagcagagctagcagctgagagagcactggagagctttctcgctttgatgattgcagcaccacgctgttggaccagttgtgatgaattcgccattaagccactcatcatcagcaaca

SEQ ID NO: 105909 - DNA, 178 bp, Zea mays
  unsure (1)..(178): unsure at all n locations
  Clone ID: MRT4577_28091C.1
tcgactgctcatgacgagagctgctggaaggacgacttccaccattttatctgctntcccgaagacgggcgtggtggggctgccatcgatcagcggccacgccggacggtccgctgcaacatgggcattggtctgtggaggcccgtattgtcagtgcctgtttggcggtactgccaat

SEQ ID NO: 105910 - DNA, 219 bp, Zea mays
  unsure (1)..(219): unsure at all n locations
  Clone ID: MRT4577_28092C.1
cgcggtctctttggggaaaagaagggggggggaggggaagaaaagcggatccgagaggccttaagaagcctgggagacatgtaagacatggtgaaaaagcaggcgaagcagaggcctgatcgctcgaaaaagaaggntggaagaaaancacgcggggggaggggcctattaaccattgagaaagcagaacgtagacaacatgaagtggagggtggagag

SEQ ID NO: 105911 - DNA, 1567 bp, Zea mays
  Clone ID: MRT4577_28093C.1
gagataggcttatatgataacttttgaaagtggtggaatgccacattttaaaaaaatagcatactccattagtaagattcgggaccttaaggataatagtcagccaccaggaaagcaacaaaactacactaccactttcatcgtcaaccggtacaattgcaagttttttttcaataaatgtctcgcaagtcatcaggccaaaaaggggctacaagccctcgtagtctcgtacacgctgggcgaagccagcaacacgcctgcacagcgacgtgcagcagttctgagtgagaatctatggacggagctggagtttcttttattcaaaacacagggggtagcaattgctctctgggtgtgtggtataatttactcgaggcatgagtaagcaagcgacttctcttccgacagctcttgggcagtggcatccatcttcttccttgagagctcgtcgatcgggaggccttgaacgattttccattcaccaccactgcatgttactgggaatgagtaaataagtccggaaggaacaccatatgaaccatcggaatacacacccatggaaacaaatgtcccctcaggggttccaagaacccaatcacgaatatggtcacaagcagagctagcagctgagagagcgctggagaactttctcgctttgatgattgcagcaccacgctgttggacagttgtgatgaattcgccattgagccactcatcatcagcaacaagctcacgaacaggcttctccccagtggaagtcttcactgtggcatggttaacatcagggtactgagtggacgagtggttaccccagatgataacattcttcacatcactgacttggacactaagtctctcagaaatctggccaagagccctgttgtggtccagccgggtcaggcaagtaacgttcctatcaggaattgatggagcaaattctttcaagataagagcattggtgttcgctgggttggcaaccaccagaaccttgcagttgggggccgcatgggcttcaagagcagatgcttgggttttgtagattgaaacatttttagacataacatctttcctttccattccctccttcctggggaatccaccaaccatgacggccacattcacgccagtgcacgcttccacaacatcagttgtcgcaacgactcccttcagaagaggaaatgcagcatcaaccaactccatcttaacaccattaagggcttcagctgctggcggaatatcaagcatgtgcagaataacaggctggtctgcaccaagcataactcccctagcaatcatgggaacaagagcatatccaatttgccctgcggcgccagtgacgagcacgcgcatcggttccttcgccatcggagcgagtagaggaggaggcggagagtttcgagaaggttctggaagcgggggtttggagtggctttggaggaagcggcaaccaaggatagcagatgggacgcgacatgcgacaatgggtggccgctatttaacgacgccgctgtgacggggagccaggggagtccactgtcactcgcccacgcgtccgcccacgcgtccg

SEQ ID NO: 105912 - DNA, 452 bp, Zea mays
  Clone ID: MRT4577_28094C.1
aaatgaaacttgtaacaaaaacattacatgatacaattacaggagggaatacatgaaaaaaagacacaaaagaaaagaaatcaaaaagggaaaaaataaagaaaaatgcaaagagaagggccaacccaagtgaaaaaaccaaaaaaagaaactaaacaagggatgaaggtatataaaaagggcaagcccacccaacctgaacacaacacaaaacagaacaaaaaaacaacccgaaaaacaacacggaaaaaaacccagggatgggacaaaaataggggagcaaagggagaacaactccgagagcagcgcctatccgggcaatccactggagcaaccaatataagtaagaccaggagaacaacttggcgagcaaaccaaatcccgtgccaaagcacgggaccaattaacaaaccgacccaaaaaccgacccgacccgaggaatgacccgacga

SEQ ID NO: 105913 - DNA, 1199 bp, Zea mays
  Clone ID: MRT4577_28095C.1
ttgcgccctcacccctcgcgagctctccacccctccacacgaccctcctcggcggcgggagcgcggatgcagatgacgcgaaccaccaccgagtcgcaaccaggattgcctgcgccgagcccgggccgggatttcctcatccattccgaccaggcggccgacaccggctaaccctagcttctgtttggctgttgccttgcgggtggcggctgctttggtgcgctgcgcagtgcgctccgtccgtccgtcgaccggaaggccgtcccctggcccctgctcgtcgtcttcctcgggcgctcgtcttcctccgaacgcgcgcgggccgccgacctgcttgttctcctggaggagcgcgcccggcgggcaggcgacgcagtccagcggcgggttgaggaagaaggcgagcgaccggtggatccccgtccagccgtcccctgctcctcttcctcgggtcgggcgctcgtcatccactcttcctccagccctccatctgatccccgtacgaccgtcccctgctcgtcttcctggtgctcggctgctccagtgctcggcccctgctgcagtgctgctcggtcgcgtcggcacctgctgcagatctgctcgacctcggctgctcggcttcctggtaacctggttcctgctgaagtgctgattctagagtctgctgcgtacgtttagtagtatcagttccttctgctacaaattcatagtcactgatggggaaggcaaagcgtgcctcgatcttcatcaggctggtttctgcagccggcactggattcttctacgtgaagcgcaagaatcctcgtcgcatcaccgagaagcttgagtttagaaagtatgatccccgtgtgaacaagcatgttctgtttaccgaagcgaagatgaagtgagatcttgtttctccacaatgcagaactgtaataagttgtcaaccttttgcgaccagaaacctttatgccgttattagacagatgattaacgatcctatgtgtttttcctgctccaatgagctgcaagcagcagatggctagtgttttgtcattttgtgtgggaaactacaaatgaaatctggactcccatctttttctttcttttttttcacaccgccatgttttgtgaaacgatgccatgttttcctctgagccggcggcgaaccgtcgagatgctcaactaaaaaccaaacgaagctgttggctctg

SEQ ID NO: 105914 - DNA, 1502 bp, Zea mays
  Clone ID: MRT4577_28096C.1
cctcgaggccggccgggccgggaggcttccccgtcacagcgacgttgttaaatagtggccacccattgccgcgttctcttcgctatcccttggttgccgcagcctccaaagccactcccaaacccccgcttccagaaccttctcgaagctccccgccgcctcctccactcgcaccgatggcgaaggaaccaatgcgcgtgctcgtcactggcgccgcaggacaaattggatatgccctggttcccatgattgctaggggtgttatgcttggtgcagaccagcctgttattctgcacatgcttgacattccgccagcagctgaagcccttaatggtgttaagatggagttggttgatgctgcgtttcctcttctgaagggagttgttgctacaactgatgttgtggaagcctgcactggggtcaatgtggccgtcatggttggtggattccccaggaaggagggaatggaaaggaaagatgttatgtcgaaaaatgtttcaatctacaaatcccaagcatctgcccttgaagcccatgcagctcccaactgcaaggttctggtggttgccaacccagcaaacaccaatgctcttatcttgaaagaatttgctccatctattccagagaagaacgttacttgcctgacccgtctggaccacaacagggctcttggccagatttctgagagacttaatgtccaagttagtgatgtgaagaatgttatcatctggggtaaccactcgtcctctcagtaccctgatgttaaccatgccacagtgaagacttccactggggagaagcctgttcgtgagcttgtctctgatgacgagtggcttaatggtgaattcatcacaactgtccaacagcgtggtgctgcaatcattaaagcgagaaagttctccagtgctctctcggctgctagctctgcttgtgaccacattcgtgattgggttcttggaacacctgagggtacatttgtttccatgggtgtgtactctgatggttcatacggtgttccttctggactcatttattcattcccagtaacatgcagtggtggtgaatggaaaatcgttcaaggcctcccgattgatgagttctcaaggaagaagatggatgccactgcccaagagctgacggaggagaagacgcttgcttactcatgcctcgagtaaattctaccacacccagagagcaattgccaccccaatgttttgaataaaaaaagaaactccaactcgattcatagattctcactcagaactgctgcacgtcgcagtgcaggcgtgttgctggcttcgcccagcttctttttttgcctgtgatttgcacgacatttatatttattgaaatcttgcagaatcgcttgacgataaaagtggtagcatacttttgttgctttcctggtgcctaacttcttttaaagtttcatttagatcttttaaggattccgtagaaaaaaaaaaaaaaaaaaaaaaaaaaaggcgcggctgcaccgggaa

SEQ ID NO: 105915 - DNA, 489 bp, Zea mays
  Clone ID: MRT4577_28097C.1
gaaaacttttctaatttcctgccagaccgatcccctgatctactagcgtcccgatatgttatagttgaagaggaagcgccaagagggcccacgtatacgaggaatggaagccagggaccacatggaggaagggtgccatgcccccgccggacccactctttgaataaataactggggatatttcggcagagcgtggaccttgaacaggtgctgcaagtgcctcagggagatgatcacgaatcaggatcaggccatgttggctgcctgctctatcgccagatgctggaacggaagcgactccggcaaggagacgcgtgtcgtatgcaaccacacgggacgtagctgctgcccaactggaggctgagactatgaacttgcaccgacatcatactgttgctggacccatcgagatggtggtggtgatctccaaaggggccatggtacgctcgaaccggtgcatcaacagcgtgaagaggcttggacctacgg

SEQ ID NO: 105916 - DNA, 716 bp, Zea mays
  unsure (1)..(716): unsure at all n locations
  Clone ID: MRT4577_28098C.1
cgcctgcggtttcggtccggaattcccgggtcgacccacgcgtccgaaccttatatatgttagtgagtgtgacaaatgctttacccaaccatcccatcttagtattcatcgtagaattcattcaggagagaaaccttacaaatgtagtgaatgcgacaaatgctttactgacaaaggcagtctgagagttcatcagagaattcatacaggagagaaaccttacaaatgcagtgagtgtgacaaatgctttactgacaaaagcagtcttagagttcatcatagaattcatgcaggagagaaaccttacaaatgtagtgaatgcgacaaatgctttactggcaaaggctatctgagagttcatcatagaattcatgcaggagagaaaccttacaaatgtagtgaatgtgacaaatgctttactcacaaaggctctctgagagttcatcatagaattcatgcagaagagaaaccttacaaatgtagtgaatgtgacaaatgttttactgacaaaaacggtctgagaacgcatcagagaattcatacaggagagaaaccttataaatgcantgaatgtgacaaatgctctacccgaaatcacatcttagtattcatcagagaattatacaggagagaaactgtacaaatgcagtgaatgtgacanatgctttacccagcactgccatcttagtattcatnaaacgattcattcaggagag

SEQ ID NO: 105917 - DNA, 258 bp, Zea mays
  Clone ID: MRT4577_28099C.1
aggggcatgatgtgcttgttcaacatcctgtactctgagagttgtgttgaaaaaaacagcaattcaagatagggacctatatggctcaccgcaatatacatacaagtatacaaccgggggggggggggcctcttggtcatcctggggatcttacccgggcgagggtaactggtataatcctcaaaattctggaccaatgccttagaatttacaagggggcagccgagctgtttccttttgaatcctaccgctaaaacc

SEQ ID NO: 105918 - DNA, 278 bp, Zea mays
  Clone ID: MRT4577_2809C.1
agacaatcctcagccttagatttctcaagaatacgtcctctaaagggctggatatgcgcctgctagtcatccagacattcagaggacgtattcgtgagacaagcctcagcctcagagttctcatgcttcagtacgggattgtgtacaagcctacaatgacagagcatgatacttcgcttgcagtttggcttctcatgggtcgtagtcattgggatggttcgtcggttcaagcttcttactgcagctcctacgaagtcgacagccttgccgactttcgt

SEQ ID NO: 105919 - DNA, 573 bp, Zea mays
  Clone ID: MRT4577_280C.1
acactgagaaccgagagacaggcgtcttcgtgctcgcctatctgcgcgacccaaagcgttcccccttctgccatttttctctcattttcaccaccgacgccgctaccccctttcgacaacaccatgagggtagtgcatctcgatccacatcggccaggccggtatccaggtcggaaacgcgtgctgggagctgtactgcctcgagcatggcattcaggctgatggtcagatgcccggtgacaagaccattgggggaggtgatgatgcttgcaacaccttcttcagtgagactggcgctgggaagcacgtaccccgtgctggttttgttgaccttgagcccactgtcattgatgaggtgaggactggcacctatcgccagcttttacattctgagcagttcatcattggcaaggaagatgcaggcaacaactttggtcggggtcactgcaccattggcaaggagattgtcgacctgtgccttgaccgcatcaggaagcttgcagataattgcactggtctccaaagcttcctctgctgtaacgctggtggtggaggaacgggctctgggcttgg

SEQ ID NO: 105920 - DNA, 297 bp, Zea mays
  unsure (1)..(297): unsure at all n locations
  Clone ID: MRT4577_28100C.1
ggcatgcgtgccaaagctgacccaacattcaaggtactgatcgtcgaagggttgtacaccgatgcgatccacctcgatcacacggtcaagctcgtcgaggcgcccgaccacgaatacacatttgctaaaggagccccatgaattaggaaccatcgaaaatacagaggcctctacattgacctcgtattgcctggaaaggatgctagcataggattcnacagtggatgcacggggtcagcagcgtcttctgactgagtgttttcattgaaacactgagtccataccttatcattaatg

SEQ ID NO: 105921 - DNA, 117 bp, Zea mays
  Clone ID: MRT4577_28101C.1
ctgctttgattcatgcgctgtttcgtatcctttttcattcgcacgcgcccatcccttaaaaattcggtgttgtgaccatctctctccctgcgctcgtgatccaggaatagtcgtttc

SEQ ID NO: 105922 - DNA, 597 bp, Zea mays
  Clone ID: MRT4577_28102C.1
gcaaagcttgtcccgcagtccttcccttagccttaacactcggagttgatcccgtctccgggggaagcagctggtaataatggcgcggtgccaggggaccgttgagagcctctgccaggggctgctcgacctcgacgacgacaagttcggtgcaatgtgcagcgccttcggctacctccaggagtggccggacctgggtgccgccatgcgcggcgccaatctcgccgtgccgcctgccgtggcgacgccgagcgccggcgacggcaacgattcctcctcttgcagcgtcagcggcgggttgaggaagaggaggccggacgcgtacctcgatgccaagggtggtgcgaacggcatgaacaagagacccagagggaagcagcagccgtctggcctctctgagatcgcggcggcgcccgggaaagggaagcaggagaggccaaaggctggcacaaaaaaaaaaaaaaaaaatgcggcggcggcggcggctgccggccagaagaccgactacatccacgtccgggcccgccgcggccaggccacggacagccacagcctcgccgagcgggtgaggagggagaggatcagcgagcggatgcg

SEQ ID NO: 105923 - DNA, 448 bp, Zea mays
  Clone ID: MRT4577_28103C.1
ccaaggtaaaccaggccaaaacataccataccacagctgtgcacgtcacaaaacaacaaaggggaggggaggcaaaaacaaaaaaaaaaaaaacgaaaaaaaacaaggggcggaaaaaaggaacagaaaaaaaaaagggaggcaaaaacaaaaaacaaaaaaagaaaaaaaacacgaagaaaaaccggggcaacccgggaaggcaaaaacaggcccggcaggcgccccagccgggcccggaccgagacccacgagaacgcaccgccatcagggccaacgctgggaaatgggggaaaggggaaagcgcgcacaagccccccgcccgaaggggccgggggccaaagggggaagcctgcggtgcccaaaaagggacctaacccaaataaagcgcagtgaacccactggccgctttacagggaggaaacctggcgggccaggggccccaaaa

SEQ ID NO: 105924 - DNA, 488 bp, Zea mays
  Clone ID: MRT4577_28104C.1
acattaaacggggggcccccaaaccacttggttattaatttggggcaaacagggatgaagaaaagggtagggggggggggggcacaaatacatagcatgcatgccttgaaacaaaagggggaagcttatatttgcgggggcgtttatccctcgaggggaaccccagggggggccaccctaaacggccttgggtttttgccgcttcctggtgaaaagggcgccgggacatgctcgggatcatgttggggttccaagggggggaaaaggacccccaaggccccccttcccgagggggccaaatttcctgaccattgggcggcccactcgaagggcttgggtgggctgcaccccacacttggcccaccagggaccggaaggataacaaatttctgggggaaaaacctttcaaaaaccatcctgtaataaaaggcctccttggggggcggagggttgtgggggaaaaataactttgcatttgacagcatttt

SEQ ID NO: 105925 - DNA, 326 bp, Zea mays
  Clone ID: MRT4577_28105C.1
acgattgataccaactagcatcatacatagtgtagtacaatagcaacatcttaccaccaaagagagcctttattataagggtgggtaccctccctactctttctgcaagtgttgctaccgcgactattatcccactatgctcacaacaacacctaattattgagacagccgctatattaaaatacccatctacacaatcctactagctacaagtggccatcacaacaatcatcttacagccgctagcattgtctgaccaacaaccacattctctattgcaacaaccattcttaacgaatctatatctacaaagaatcgcagctcaa

SEQ ID NO: 105926 - DNA, 410 bp, Zea mays
  Clone ID: MRT4577_28106C.1
aattcccgggccgacccacgcgtcagcccacgcgtccggttacctatgactgggcttccgaggttttcattcaaatcaaacacattagatccggttttcctcggcttctcattcagccaattcacggttcaaaatccactccttaaaattcaacataaaaaaaaaaaaaaaaaaaaaaaaaaaaaaaaaaaaaaaaaaaaaaaaaaaaaaaaaaaaaaaaaaaaaaaaaaaaaaaaaaaaaaaaaaaaaatctaaaaaaaacagtaacctaagaaacaatgtaaaatatgaaaatgaaataaaaaaagggggggcccccaaaaaggttcaaattaaagtatcgggtaaaggaaaattaaaacctctccaaaagggcccccaaatttaaattaagggggcgttttttaaaa

SEQ ID NO: 105927 - DNA, 428 bp, Zea mays
  Clone ID: MRT4577_28107C.1
tggcttggaacctttgggctgatttatgtgcttgtcaaccaaataacgagtaaccctccgcccactacgtaaagaaaatacgccccgtatggcacagacgcatcggaggtacgtaaacctcacaacgccccgagaggctaaaccccatacaccgagccgcggatccggatacccgataaaaaagagcgaggaaagaagcgtgtcctagccaccaatccgccagcacggtcggatactctctccgagcggacgtattcaacatatcgtaaaacacgcccccaataaaaagcccgcccgattccgcttcgatttacgattccatacaccgttgcctaagcaactttagtaataggcccaataattgcggcggcccttaagtcggctgaggttgcggttagccttagagtcgggggagaggttgcggctag

SEQ ID NO: 105928 - DNA, 247 bp, Zea mays
  Clone ID: MRT4577_28108C.1
aactcgtcttctttcacggaaatgtttaaagtacaaaccctgtctctaccgacaacgacaaaattttgactgaacatatatatgcatatatgtatatgaagctatcaacacgtgttgtcatttcacaaatacccaatgatgatgacttcttcaatctgcaggaaccagcagctgttttctggcagcaaatgtattatgctttagccgtttgtgtcgacccacactatgagctgatcggaagttcttg

SEQ ID NO: 105929 - DNA, 289 bp, Zea mays
  Clone ID: MRT4577_28109C.1
tgcccgttttgacgaattagctctttagtgtctctgtattgaccttgtgaccttgtgtgtttgggtgcccttctctttgtctgtaaatcaacagttaactacttcaaaatgaccaaaagggttgaactttctttagaagccactttgaaaggccataccggatgggtaactcaagttgccggtttccaagataaaattatttcttcatcacgtgataattccattattatttgggatttgaaaaataaagacaatatttatcctcttcgtcgtttgaccggccactcac

SEQ ID NO: 105930 - DNA, 256 bp, Zea mays
  Clone ID: MRT4577_2810C.1
ggcatcaggacagagaggtgtccaagtacctgtatcacagccgcctacgcccacctagtggccagtcccagagccgcatggcagacagcttaaatgacttcaggagagccctgggcctgtgctggctgctccttccctgccaccgctgctgcttctgactttgcctctgtcctgcctggtgtggagggctctgtctgttgctgaggaccacggaggagaagagacctttgctgccccatcatgggggctggggttg

SEQ ID NO: 105931 - DNA, 451 bp, Zea mays
  Clone ID: MRT4577_28110C.1
gtatccatattcagctcgtgtatctatctagcgagacacagagaggaaactagctagctagcatgaagtgcggaagcaagaaggcagatagcggtgtgatggagctgctgtttcaccagctgatgttacctccgacgacggcgacggccctcctcctgcaggtggatacctccaccgtgcgttgtcctgcacatcatcgcgagggagtttggccatctcgagtacagccatcctctgtggtgaaacctgagtcttcctaccatgctatacgccagccatggcttgccaatggattgtgcaaatctgcatgatgtgatatctggactagcgctatttgtattttgtgttgggagaaacacaaagacgctacctggctgatcaacttattgcatgtgtatggtgatctaataagtacagcataataaaaaggtatatgatggatgagtaccac

SEQ ID NO: 105932 - DNA, 1272 bp, Zea mays
  Clone ID: MRT4577_28111C.1
taacaagtatttccttcacaaagccatcttgaacacttcgcccataaaaaagattaattctctttttaattgtctgtctgcaagacaagtgataattgcaataagtaacatgatatgttaatcagaaggtatgctagcaccagaaacgaccaaagaagatattatactaggaaagatattatgaagaagacattcgcccggctcaggaaggaattgatcccctagttttcaatcaaaatcacttactcgagcagtcgctaatggcgacgacgacatataagttctagtttacaacgaacaaatggaaaaggaaatgtaaatatcactcacacgagttaagttaaatgagacagtgcatgagatcatgctgatatctttactcaatgaaacaagcagatggtacagaagaaaaaaggctaggaccatgtctctgtcctagttgtcaagatataaaatgaaccagtatcatgtaatcatatcaagactacctttcaacattatatgctatatctagaacttacataatcatgaagagcctgcacgaactcatccaatgtgaatgatggaagcccaagaacaacaccaaaggtaacaaagaacttccaaacctgggcgaagcgctcaaaggtggagatgggggcatggcccctggcaggcgagctgtgtgaatcaaatagggccccggtcttcttccacaaacagcatctcttctcactcaagtaggcaaaccctaggttggggcaagatgctcggtggcctgtacgacaaactcccaccatgtcgtcgacgtcggtcaggctgcgcccgcccaaagccgcctctacctccatccctgctcccaccgctattgccactggacaggatcacaaatggaggaatggcgatgatgggtacactagcaccgccgaccacacgagtaggagaagacaagtcgggatagccgcccgacgtctggagatcgggcgggtttcctcgtggaaactgggctcggaggtgggcggataccccacggagccgccttccaaacagatcgatgccggcagcgagcccgcggcggcaggcctcgcccgtcgatatgaccttaatgtctgcccgcaccaccaggcgccggccgatcccggccgacctgggcagcagcttctcgaatgaagacgagaaggcggctgttgggggaaggaaacgacggtcaggtacatcgaagccagggagcgcgcgactgctaagtttaggtaaatgggcccgtaggggcccggccggcctcgagggtcccaa

SEQ ID NO: 105933 - DNA, 246 bp, Zea mays
  Clone ID: MRT4577_28112C.1
aagggaaagcgtcagaccgacatgcattaccgcctctgacctgttaaccgaaaaactttttgttctcctgccatccggctcgtgagggcaccatgattcatatagcaccggtggtgctactttcttaccctgattagatcgtgtatcgtacaactattgtaattatggaccctcttagccattgaatttatatgtagtagtttatcttctaatgaattactcattttttctccttctctttctttt

SEQ ID NO: 105934 - DNA, 254 bp, Zea mays
  Clone ID: MRT4577_28113C.1
atttggtttttaacaatacaacttcatctgcaattatttgctcttaattctttattttcaaactaaattgttttaatatttaagtaaacttgctatttaattaaaatgaagattttttcgattgttggtttagctctagcagccaattcaatgctagccagtggtaatattttacgtcaacagcaattagttattggtcaggctgtgaaaccaattgtaccagatcattatttgcctccaccagaagcacctgt

SEQ ID NO: 105935 - DNA, 342 bp, Zea mays
  Clone ID: MRT4577_28114C.1
attcggctcgagcacgtgtgaagggcgggttttttatgcatagtccatcagtatgtggccggagggtttgtgcatatggtgggggcgatcacggagacacttttcctgcactcatgcctggggggcacactgctggaccaagctctagcggaggaggcgtcattcaacctgtgcacgtagacgagaatgtcagctctaaagatgtcgcccgacttccggagaccattgatgctctcgaggaaatggctttctactcatgattggatccagatattattgcacactatcagatcactcatgacagccgtggtctggttttcggcccaccatgcgcaggaaaaa

SEQ ID NO: 105936 - DNA, 339 bp, Zea mays
  Clone ID: MRT4577_28115C.1
gctgctcagggggctgcatttttctctcaagctcatggtcggccagctccacctgccgtcgggcggccgctggctcgacgagtacatggacgagacggcccgcctctgggacgcctgcctcgccctcaagctcggcctcctctccgccgagcggaattgcgcggcggtactttctgcgcctcccgaccgcgctggaatgactggacttcagaaatcacttctccttttgtccacatcacacacgttgatgtccggctgaattctccgtgtcataggagtggaggccattggccctgtgcaggaaagaagaaaccgccccgcctggatgatctgtctgag

SEQ ID NO: 105937 - DNA, 278 bp, Zea mays
  Clone ID: MRT4577_28116C.1
cattgggacctcgagccggccgggaacttactctgtgcttttggtagaggtgagctcatggagtaagacaagagagtcaaggtgctgtgcctgcacggtttccgcacaagagatagttgtttagaaaaaaccgatcagcaaatggaacccttccatatttcagcagtttgagataggcttccctgatgtgctcttcccatctggaggaaagacagagaagtacgtgatatttccaccaccatacttcgagaggttgcagatgaataaggaattcactg

SEQ ID NO: 105938 - DNA, 616 bp, Zea mays
  unsure (1)..(616): unsure at all n locations
  Clone ID: MRT4577_28117C.1
ngagcactgtgacatgttccatctcgatttcctgctgtccagttgctcacttggaaaagaaagttgttgtcacagataggctcatgggacacttgtttgcggtgagaatggtggtggtgcagctgagctgtttgaatgtgaaaaggacattgacataggtgttggcaccttaagcaaggctgccggctgccagggtggttttataacatgcagcactcaatggaaaaggctgattcagtcgcgaggtcgctcgttcatattttcaactgctttgccagtgccagttgttgcttctgtgcatgcggcactctatgtctcgagtaaggagacatggcggagatcagtgatctggaggcatgtgcagtattttgcctcattgaccaagctcgagataactagtcccataatttccattgtggttggaagtgaagcaggagcgctcagggctagcaggtatttgctaagatctggatttcatgttacaccaatcagaccacccacggtgccacccaactcatgcaggctgagaatcactcttagtgcttcccattcctcggacgacatcaaaaggctggttgatgcactcacaccatggctccctgtcaaatatggtaat

SEQ ID NO: 105939 - DNA, 1823 bp, Zea mays
  Clone ID: MRT4577_28118C.1
cctcgaggccgggccattacaatcgcaaataacttcatccgcaccggaggcgttctccctcccccgctgcaccttctgtcacgagtccctcgcccggtgcggcgcgccgcctgctcgacgaaatggggcagtgggacgcgctagtggacgccgcgctcgcgaggctggaggccaggagcctgctacgtgccacgcgccccatcgcgctcgcggcgccgaccgcggcgccgaggaccttcgacggcccggggccttgggaccatgccgccgtcgagatccgcctcgaccgcgacaccctgcaccagtggctggccgaaggcgatgaggcgggtggacaggaagaacagctggatggaaacctgatcctcttctcagggaatgactacatgggcctcagctcgcatccggcagtccgtgaggctgctgtgaaggcagctcaagattatggcatggggccaagaggctcggcgttgatatgtggttatactacttatcacaaattggtggaggaatcattagcacgactgaagaaaaaagaggattgccttctttgccccactggattttctgccaacatggctgcaattacagccctggggagtattacctctcttttgtcccctggaagaaaacctgcagagcacgagagaattgccatcttctcagatgcgctgaaccatgcttcaatcattgatgggattcgccttttggagcggcagcaagaagcattagtgtttgtgtacaagcactgtgacatgtttcatctcgatttcctgctgtccagttgctcattggaaaagaaagttgttgtcacagatagcctgttcagcatggatggtgatttcgctccatttcctgaacttattaaattacgcagaaagtatggttatttgttggtcatcgatgatgctcatgggacacttgtttgcggtgagaatggtggtggtgcagctgagctgtttgaatgtgaaaaggacattgacataggtgttggcaccttaagcaaggctgccggctgccagggtggttttataacatgcagcactcaatggaaaaggctgattcagtcgcgaggtcgctcgttcatattttcaactgctttgccagtgccagttgttgcttctgtgcatgcggcactctatgtctcgagtaaggagacatggcggagatcagtgatctggaggcatgtgcagtattttgcctcattgaccaagctcgagataactagtcccataatttccattgtggttggaagtgaagcaggagcgctcagggctagcaggtatttgctaagatctggatttcatgttacaccaatcagaccacccacggtgccacccaactcatgcaggctgagaatcactcttagtgcttcccattcctcggacgacatcaaaaggctggttgatgcactcacaccatggctccctgtcaaatatggtaatgggagctatgctacagcttcgaaactctaacccatcggaggagagtctggtatcctgcggaaagaggcggcatgctagtgggtggttgacgcgtacgcatttatatattctgtggcgtgacgcctacgtccttccccatttataagcaaatactactgttttgttagataccaatgttgaaataggcttattattattattattattagcaagacaccgtcgtgacaccataaatatttaggttgcatctagttttggaacgattttctctattttctataatgggatgatctcacgaagcaatattattgtttgtaatgaggatggagccatcttggggtgatcatcgtcaaaaaaaaaaaaaaaatatccaccctt

SEQ ID NO: 105940 - DNA, 449 bp, Zea mays
  Clone ID: MRT4577_28119C.1
cggacgcatgggcacatggcgtacagcgtcatcggactgcaggtggtgcagacaggaaagggggtgaggaaggccaagctgatcggcgccacggagatcgcggtggccagcctcgacgagctcgccatgatggccgtcgccctcgtcgctggggacgccgagcacttctgctgcctggcggcgctctcgggcgcatcggtcgccgacgacgattgcctgttctgcgcgtggctgaccaaccccaccgacgacctcatgaggctcttcccatgatgatacaggaataggactaggagacgcaattttttggataatagtcaattcgtgtacctagctccaaatatttagcaggtataagctccaatcatttacgcgtactgcatccactttgatttttgaaatcaatattataggaaagacataaacttgcaataactttatccaaaata

SEQ ID NO: 105941 - DNA, 431 bp, Zea mays
  Clone ID: MRT4577_2811C.1
gggggggaaaccacggcccttttttggggggggcggccaaaacacatccggggaattcttttcctgttaagcccaaacaaaaaaccctttaaaactgggaacaaatttacaacaaaacgggggggggaactggacgggccccaggccaacttttttttttggggaacccacccgatttacaggggggcggctggaaaaaccctaacaaagggccctgggccggtttaacgccccttaatttttcccccagtctaaaaaaaaaaaattgggaaaataggcggggtttcttttaaaggggttgggaacaaggacgggggggtttaaaatagcccccccaagaaaccttttttagcccagctttagcagttataatggcccttactttttaaaaaaatgcaatggccgtttttccctccctaaaatttgggggg

SEQ ID NO: 105942 - DNA, 292 bp, Zea mays
  Clone ID: MRT4577_28120C.1
cgggtccggatttccggggtggcacccgtcctccggttttggatcgcgggcggccgttttggaggttccaggcttacgtcccctggcttgcgacgtattagtttttttttggggcaacctaaattaaattaactggccgtggttttccaccgtcgggcctgggaaacccctggcgttccccaacttattggcttggcagaacatccccttttggccggttggcgtattagcgaaagggcccgaaccgttggcctttccaaccagttgcccagcctgattggcaattgggccc

SEQ ID NO: 105943 - DNA, 627 bp, Zea mays
  Clone ID: MRT4577_28121C.1
tgtggaggaggatgagtttgtcgcgggaatgaaaacatggcttaatgaggcgaagcaaaaagtggcggctagtggtgcctactctaataagtttgtcaacgactaccacgctagaaccagggaggagcatgaccagttggtcgacagatctgacgaggcagtggagagcgtcgagaaccctggctggtgcattgccaaagccgtggggtacctgattctcggtgctaccatttgtgccgcatttgcagacccgctcgttgatgctgtccacaacttctctaacgccacacacatcccgtccttctttgtctcgttcatcggcctcccgctggcaaccaattccagcgaggctgtctcggccatcatcttcgccagcaggaagaagcagaggacttgctcccttactttctcggaggtgtacggcggtgtgaccatgaacaacacactgtgcctgggcgtgttcttagcgctcatctacttcagggagctgacgtgggacttctcctcggaggtgctcgtcatcctgctcgtctgtgtcatcatgggcctcttcacaagcttccggaccagcttcccgctctggacctgcctggtggcgtacctgctgtaccctctgacactcgccgt

SEQ ID NO: 105944 - DNA, 742 bp, Zea mays
  Clone ID: MRT4577_28122C.1
tttttttttgttgtatttcttctcccctcttcttgttcttgcagttgttggtgtcctcggagctaaaaaaaagcccccccgccttttggctcattgtcagactttgccacctgctccaagaaagcttcttggagatggtgcgcgccgagaagctcgccggcgatggctgctccggcggcgaaggccaagtggaggtggaggtcggcatggggatggacgggaagggggtcacagagtgccggatatgccaggaggaggggaaggaggccgctatggactcaccctgcgcctgcactggcgctatggactaccatgtcgtcgtccctgctgagactgagatggtgtggtctgcttctgttttgagtgtcgtgtgcttgcttctgtttgattttgatcgcaagactcctttttcttctttcgttcaggcgactcttcagttcaccggattctttctgccttgctatgtaatagctcgctcttgctacgctttgcagcaccggaaacgaagacaggtacacttcctttttcctacaagtcctgttgatacaactcttccgtttgatctattgacgcgaacgtccttctgcctgacttgtaagctgtaagagactgacgtttatttactactggaaccctgtgctgcttcttgcaaggggagtctcaagtacatgcgcagtggtctgtctatcctacagaggggacagtcctaacttgttgtgctgcctatctctacgtacaggta

SEQ ID NO: 105945 - DNA, 411 bp, Zea mays
  Clone ID: MRT4577_28123C.1
ccttttccttcctttccaaatttcccccttttttccgggagcccattgcttccttgcctggaattttaaacccaggtcttttttattttgcaggcaacagcggttgtggtggatggcccagataatatccttggcgggaaattctgcctttgcctgggccagatgggttaaccctttggggtaagcaggacccatttgttggcaccggttctttcctgggccatggtggttgttaaaatttaaaccttgcccagaattagtaacctttggttggacaggacggaattccttgggtggaaaaacatttccttggaaaagcaccttttttgattccccatcagttccaattttgtttaggtggttttaaaggccccattcaggtgactaaaaatccaagtttaagccattggc

SEQ ID NO: 105946 - DNA, 113 bp, Zea mays
  unsure (1)..(113): unsure at all n locations
  Clone ID: MRT4577_28124C.1
tccgcttattgcatnncgcgtaatncctgcagggtgcaggctacggcgggcatcctgtncnngccgcttcgctttcggggacggnaaggggctgtcccggnaggggtgtggag

SEQ ID NO: 105947 - DNA, 303 bp, Zea mays
  Clone ID: MRT4577_28125C.1
caacactgcaacaggctggatagtgccttatgtctacaacgtttaggaagcaaacttaactaccttgcactgtgtgataggtgaagaacacaaatgcagctacatctagcccatgtcctgtgcggagcttaactgcctccgagccatttctgctgtgaatgcgaggtacacgggtatgtacaagaagctattgcttggcatgcgcccactattgttttagcttgctacggcactgttaacacctcgagctatctgcacttcaaaggtgatgcctctggcaaaagccacaattagtgctgactt

SEQ ID NO: 105948 - DNA, 3360 bp, Zea mays
  unsure (1)..(3360): unsure at all n locations
  Clone ID: MRT4577_28126C.1
ttcaanctctacattcccaatcangcatacanactanactttntatgctttaggggtnacactgtgtagtggaggaacaatcacaacnattttttccttgaaatagaaagtgacatagatgaacactcatttgaggacttcttggttgaagaaaagcgaaaggaactcgagaggcttgctgcagaagaagctgaaaggaaaagacaacccgcggagcggcggaagcgaggggaagaaagggccgcgatggaggctgacagagcacaggcaagatccgaggttgagatgaagaaagagaaattgcgccagttgttgagttcagccagtagatatgctgataacttatggtacatagaaccgaacacctacagaggaggggacagggttagattgtactatcacagaagctcaagaccactaatgcatgacactgagatttggatgcatggaggttacaacaactggattgatggactctcaatagctgaaagacttgtcaaatctcatgaaaaggaaggtgattggtggtatgcagaagttacattacctgaaagggcattgctgtttgattgggtttttgctgatgggccacctgggaatgcaaggaattatgataacaatggaagacaggatttccatgctatcgttccgaataacatatcggatgatatcttttgggtggaagaagaacataggatctttacaaggcttcaacaagagaggaaggaaagggagggcgctgatagcttaatggctgagagatctgctaaaatttaggctgagaaaaaggataagatcatgagagcgtttctgctttaacaaagacaaagtgtgtatgctgagcggctagaagtagatgcaggaaccactgtggacattctttataacccttctaacacagtgctgaatggaaagacggaggtttggttcagaggttcctttaaccgttggactcatccaagtggtcccttaccaccacagaagatggtaaaggctgagaatggttcacacttacgaacaacagggttcccttggatgcatatatgatggactttgtcttctctgagtcagaaggtggaatatatgacaataggaatgggatgcggttcattatacatcagagaatgttcttgagggcaagacctccaatgcatattgtacacattgcagtggaaatggctcctatcgcgaaggtcggaggccttggtgatgttgttacaagcctttcacgagctgttcaagatttaggccataaagttgaggttattctgccgaaatatgattgtttaaaccttaacagtgtaagtttgtctactggtgtaaaatgtcctgcgtcttcttttctttcccttttttatctgtctcctcacctttctttcatttccaatttccaatttcagcgtctttttcacttcaatgaagttgagttcatttagttttaaaagcacatgaatttatggagggagaatattcttaatgtgtgctctttcatatttaatctgcagtacctttttatgttatttgtggagagtttcatgtgtatggatggatgaccaatggtagttggtggataccaattttcttcattatgttggcgtccttcggttgcaggtgaaggatttacgctaccaacaaagttttacttggcgtccgcccacgcgtccgggcacagaggtaaaagtatggtttggaaaggttgaagatctccctgtttatttcttggaaccacaaaatggcatgttttgggttggatgtgtctacgggaagaatgatgagagtagatttggcttcttctgtcattctgctctggagtttctgctccaaaaaggatcttctcctgatatcatacattgtcatgactggtcaagtgctcccgttgcttggctatacaaggaacagtatgctcttaatgggatgggaaatggtcggattgtatttaccatccacaatcttgagtttggagcgcatcacattggcaaggcaatggcacattgtgacaaagctacaactgtatccgatacatactcgaaggaagtggccggacatggagctattgcacctcactactataaattccatggaattcgaaatggaattgatcctgatatttgggatccatatactgacaaatttattccggtccattatacatcagagaatgttgttgagggcaagagtgctgcaaaaaaggcattgcagcagatgcttggattacagcaaactgatacccctgttgttggaatcatcactcgtctaacagttcagaagggaatccaccttatcaaacatgcaatgcatcgagctcttgaacgcaatggacaggtggttttactgggttctgcaccagatcctcgcatacaaagtgactttacaaatttggccagtaagctgcatggtgaataccatggccgagtgaagctatgtctaacctatgacgagccactgtcacatttgatatatgctggcgcagacttcattctcgttccttccatcttcgaaccttgtggtctaacacagcttattgctatgcgctatggatccatcccagttgttcggaaaactggaggcctgtacgacaccgtttttgatgtcgacaatgataaggatcgggctcaagcacaaggtctcgagccaaatggattcagtttcgaaggagctgatagcagtggtgtggattatgctctcgacagagccataaccacattttatgatgcacgcgactggttcaattccctttgcaagagggtaatggagcaagattggtcatggaacagacctgccctagactacatggagttgtaccattctgctcgcaaaagctgatagcttttaccactagggaaatcaggctcgttttgcccaggttagaagcatctcagcctcaggccttgtgcaaattcatttgtgcactgggaagaaaagagtaccgactggccttgagcatgcccgccgtctaaggatgcaacacacaccgtgtatagttagagaatgctactcgtcgtacgtttcatgcatgtgttttgtgtatacacctcatgtagcttgcaaaacaacagtacgacgtatcccggccgtctaccatgcctgagggcgtatataggctataggcttatgcaaagcatgtaccattaattaattattacatagtctttttatgtcaaagtagtggaggcaaccaaacccacgcttccgcgctcctcccccctgttctatccccggtggttgatggtatgtcggttgtaccagactcagagtaacagatgtcgtggccctcgggtacccttcctcctttctcctctcggtggttgttggctccatgttgtagcaatgattgttgttgccgtaaatttagatttatgt

SEQ ID NO: 105949 - DNA, 326 bp, Zea mays
  Clone ID: MRT4577_28127C.1
cggggggttttgaacgagatgagggctacagctacctgagtagcatgaacctacgtataccggctgccaacatgaaagtggaggggccaacaaggcaggggatgagggcacatgcaaccaatgtgaacagacgtgtgggcaccatctagctcggccgaaccatatgcgactgcacattcgacaaggagaagctggcctagatccccaagactgtggagccgactgctcctaagactctttacaaggagaagaggctgagtcacaagaatgccacgcatattaagagggagacttggaccatgaagcagactaaacaacctaaccct

SEQ ID NO: 105950 - DNA, 269 bp, Zea mays
  Clone ID: MRT4577_28128C.1
ccgctgagccgtggcacactcgcggccctcaggggtactgtctactacgagttctcatgtgagagcagcctgcgctgcctcttcggtcgcgtggaggggacaagagaggaaatggctgtgaccgagggcgtgctcctggggatgggcaatcccctccttgacatctacgacggcgtagatgacgccttgctgacaagtatgacatcaggggggggggctattctcgcttaggagaagcacttgcctatggatgacgaggtgggtgtcaa

SEQ ID NO: 105951 - DNA, 2136 bp, Zea mays
  Clone ID: MRT4577_28129C.1
atggcaccggcgcctgcgtcgccgtccgacggggagctgctgcgctcgctgcaccgcctcgcgcgggacctgtccgcggccgccgagacgccggccccgttcctgcgcggcgcgctcgcgtccatcaccaggcgttccaagctcctggccgccgcgttcgacgacctggtcctgtgcgccgccaccggcgatctgccgcggtccgcgtcgctgtgcctgcgcgaggtgctcttcgtgctgcagcgcttcaatgccctggccaccgactgcgccgcgcggagccggatgcggctgctgcttcactcggacgagatcgaggaggaggtgcgggagcttcaccaggacctggcaaccctgctcgacctcctccccgtcgtcgagctgggccttgccgaggacgtcatggacctgctggacctcgcgtcgcgccagtgcaggcggttcgcgccgtctgcccaggcggagcaggccctcaaggccagagtgctctcgctgatacaggaaattgagcgcgagatcgtgccggatcgggagaggctgcaggagatcctggaggaggcgggcatcaacgacccgcccagctgcagcaaagagatcgagagcctcgagcgggagatcggtgaccgcgcctcggagaggtggacggacgccatgatcgcgctcgtcggtctgctacggtacgccaagtgcgtcctgttcagcgccacgccccggccttcggattccaggccggaccccgaggtcgacgaagaaggggagcccccggcgccgccgccggacttccgctgccccatcaccctcgacatcatgcgcgaccccgttgtcgtcgccagcggccagacatacgaccgggactccatctcccggtggttcgactccggcaagtcaacgtgccccaagacagggcaggtccttaccgttttggagcttgtgcccaacaaggcgctcaagaacctcatcgctaagtggtgccgggagaacggcgtcgccatggaaagcagcgcggcgagcaggagcgagccggcccaggcggtggccgcgaacaaggcggcgttggaggcggcgcgcatgacggcgtcgttcctcgtgaagaagctctccatctctttctcccctgacgcggccaaccgcgtcgtgcacgacatcaggctgctgtccaagtccggcgccgacagccgcgcgttcgtcggggaggccggagccgttccgctgctggtgcccctgctctactccgaggacgccgggctccagctgaacgccgtcacagcgctgctcaacctctccatcctcgaggccaacaagaagcgcatcatgcacgccgagggcgccgtggaggcggtcgcccacattatgagcgccggcgcgacgtggcgcgcaaaggagaatgcggcggccgccgttctcagcctggcgtccgtccatacctaccgccgccgtctcggccggaacctatccatcgtggagaagctggtgcatctggtccgcaccggcccgacaagcaccaagaaagacgcgctggccgcgctgctgtcgctggccggcgagagggagaacgtcggaaagctcgtgagcgccggcgtcgcgcaggtagccctgtctgcgatcagcgaagaggagaccgccgcggcagtgctggccgcattggcgaagcgcggcggcgcggaggcgatcgtgggcatcgatggcgccgtggcgcgtctggtggccgagatgcggcgcggcacggagtgggccagggagaacgcgacggcggcgctggtgctcctgtgccggcggctgggcgcgcgggtggtaatgcaggtgatggccgtgcccggcgtggagtgggccatctgggagctgatgggcaccggaacggagcgggcgcgtcgcaaggccgcgtcgctcggcaggatatgccgccggtgggccgccgcctcggccgctgacggtgagcggggcagcgtgtgcccggccgccagcgtcgtgcctccggctatgatggcgtcataatcaagtccagccatgggcaatgccagataggataaaagctcagattaaacgattttccccctcttctcctcatgtacaaactttgcttaggctgtcacgattctttgatcagagagtgataatggtgagcggttgatcacctgt

SEQ ID NO: 105952 - DNA, 3174 bp, Zea mays
  Clone ID: MRT4577_2812C.1
atggagttggtggaaggcgagctaggaagatttgctgtgatcaggggagaggagccaactcagacctacaacaggctcaagaccctcatcaacaagattagaagctatggaagcacaagatggacggaccacgacgttgtccgactcatgctaaggtcattcacgataattgacccccatcttgtcaatcttattcgtgaaaatcccaggtacaccaagatgacacccgaggagattcttggaaaattcgtgagcaggcgcatgatggtgaaagaagcacgatatgtagacgatgcgcttaatggtccactacccgtctacgagccacaacccgttgctctcaaagcaacaagcagcaaggaggcgctacaaagcaaggtggcacaagttgaggctgccgggctaaacgaagatgagatggccctaatcatcaagcgcttcaagaccgcactgaaaggacgcaaggagtaccctagcaagaacaaagcaaagggaaagcgctcctgttttaaatgcggtaagactggtcatttcatagatcaatgccccgataatgataatgaccaggaacaagaaaagtatgggaagaaaaagaagaagaagaattacaagaaggcgaagggtgaggcacatcttggaaaggaatggaacttcaactgctcttcatccgactctgatgatgaaggattggctgcctcagccttcgacaaatcttcgctcttccccaacgaacaccatatgtgccttatggctaaggaaaagaagggatgccaacactatggtagacactcctctattaaggatggacttggttttcgaaaggaaaccaagaacttaacaagccaaaaggctcccgttctcaacaaggagaaagggaaggctcctatggctagtagttctcaaaagtgtcatgcctacatttatgatagaaaattttctaggaatgctcataggagtaatgatcatgatgcttttaattcacatgctatgtttgcctctagctctacttttgttcatgatagaagtaggcctaggagaaatcatgttgtgcatcatgtgcctaggaaagtttatgcatccgggggctcaagctggattatcgacagcggatgcacaaaccacatgacaggggagaagaagatgttcacctcctacgtcaagaacaaggattcccaggattcgatcatctttggagatgggaaccaaggcaaggtcaaaggattggggaagatagccattacatccgagcattctacctccaatgtgttcttagttgaatcgctcgggtacaacttattgtatgataaatcagaaacccaagggaccctaaagcgctttctaaggagggctcaaaacgaatttgagctaaaggtgaaaaagataaggagcgacaacgggtccgagttcaagaacctacaagttgaagagtatcttgaggaggaaggcatcaagcacgagttctccgctccctacacaccacaacaaaatggtgtggtagagaagaagaacaggacgcttatcgacatggcaaggacgatgctaggagagttcaagacgcccaagcggttttggtcggaagctatgaacacatcttgccacgccattaaccggctctatatgcatcgcctcctcaagaagacctcatacgaacttctgaccagtaagaaacccaacgttttttactttcgtgtatttgggagcaaatgttacattctggtgaagaaagaacaagttgatcttgatgacatagatgaagatgatgttccaacagccgcaatgcgcacgatggcgataggagaggtccctcgagaagaggcgcgtgatcaagggggagcacaagaagaacaagttatggaggaagaagcaccactggcccctccaactcaagtccgagcgacgatccaaagaaatcaccccgtcgatcagattctgggtgacataagcaagggagtaacaactcgctcacgtttagctaatttttgtgagcattactcgtttgtctcttctattgagcctttcagggtagaagaggccctgcaggatctggactgggtgttggctatgcaggaagaactcaacaactttaagaggaacgaagtttggagcctggtgccacgtccaaagctaaatgttgtgggaaccaagtgggtgttcggcaacaagcaagacgagcatggagtggtgacaagaaacaaggctcgacttgtggaaaaaggttatgcccaagtcgcgggtttggatttcgaggagacttttgctcctgtggctaggctagagtctattcgaatattattagcatatgccgctcaccactctttcaggttgtttcaaatggatgtgaagagcgctttcctcaatgggtcaatcaaggaggaggtatacgtggatcaaccccctggctttgaggatgacaggtaccccgaccatgtgtttaagctctcaaaggcgctctatggacttaagcaagccccaagagcatggtatgaatgccttagagatttcttaattgctaatgctttcaaggttgggaaagccgatcccactctttttacaaagacttgtgatctttttgtgtgccaaatttatgtcgatgacataatatttggttctactaatcaaaagtcttgtgaggagtttagcagggtgatgacacaaaagttcgagatgtcgatgatgggcgagttgacctactttcttaggttccaagtgaagcaactcaaggacggcaccttcatctcccaaacgaagtacacacaagatcttctcaagcggtttgggatgaaggacgccaagcccgcaaagacaccaatgggaaccgatgggcatgtcgacctcaacaaaggaggtaagtctgttgatcaaaaggaataccggtctatgataggttcattgctttatttatgtgcaagtagaccggacattatgctaagtgtatgcatgtgtgctagatatcaatccgaccctaaggaatgtcaccttgtggccgttaagcgaattcttagatatttagtttctacgccttgcttcgggatctggtatccaaaggggtctacctttgacttgattgaatattcagactctgattatgccgggtgcaaggttgataggaagagcacatcagggacgtgccaatttctaggaaggtccctggtgtcctggagttcaaagaaataa

SEQ ID NO: 105953 - DNA, 1124 bp, Zea mays
  Clone ID: MRT4577_28130C.1
cgggatattgtgtataccgggctcgaagtacgtgcaggaaccactgtggacgttctttataatccttctaacacagtgctgaatggaaagtcagaggtttggttcagaggttcctttaaccgttggactcatccaagtggtcccttaccaccacagaagatggtaaaggctgagaatagttcacacttacgaacaacagtcagtgttcccctggatgcatatatgatggactttgttttctctgagtcggaagaaggtggaagatatgacaataggaatgggatggattatcatattcctgtgtctgattcggttgcaagggaacctccaatgcatattgtgcacattgcagtggaaatggctcctatcgcaaaggttggaggccttggtgatgttgttacaagcctttcacgagctgttcaggatttaggccataaagttgaggttattctgccgaagtatgattgtttaatcctaagcagtgtgaaggatttacactaccaacaaagttttgcttcgggtggcacagaggtaaaagtatggtttggaaaggttgaagatctgccagtttacttcttggaaccacaaaatggcatgttttgggttggatgtgtctatgggaagaatgatgagagtagatttggcttcttttgtcattctgctctggagtttctgctccaaaaaggatcttctcctgatatcatacattgtcatgattggtcaagtgctcccgttgcttggctgtacaaggaacattatgctcttaatgggatgggagatgatcctattgtatttaccatccacaatcttgagtttggagcgcatcacattaaagaagagcttttacaaagtatttgccccattttccagcaactcagcctcaggccctattgcacctcatttgtgcactggaaaaaaaatcttaaaagccttgtctccagcatgccctccgtctaagtatgcaacacactccgtgtatagttaaagaatgctactcgtcgtacgtttcatgcatgtgttttgtgtatacacctcatgtagcttgcaaaacaacagtacgacgtatcccggccgtctaccatgcctgagggcgtatatagactattgaattatgccaaccaaaa

SEQ ID NO: 105954 - DNA, 2245 bp, Zea mays
  Clone ID: MRT4577_28131C.1
gataaaaaaaccgggagttaaacccacggctacagccacggccaaagcagagcaggagcaggccgcgcggaacgagggaagcagcaggccgctagactagggagcggtcgccggcctcggcggcggagggatggggcgtgggggtgcggtgatggaggacggcgacagggaggagggaagctatccgacgctgctgcagcggtggtcctcgtcggtgtgggccgtcagcggcagcgggcgcctgctgtgggcgggcaacgaggcgtggcgggcgcacgtcgggatggccctcgtccaggtcgcctacggcggctaccacgtcctcaccaagtccgtcctcaacgtcggcatgaaccagatcgtcttctgcgtctaccgcgacctcgtcgcgctcgcgctcctcgcgcccatcgccttctttcgcgagagaaacgtgcggcgcccggtgactcctcgcctcctcgcgtccttcgctctcctcggattcactgggatcttcgggaaccagctcctcttcctcctgggcctcggcttcaccaacgcctcctacgccgcggcgttccagccggccataccggtgttcacgttcctcctggccgcaatcgtcggcgtcgaggtgatcaacatcttcacgaaacacggggtcgtcaaagtcctcggcacagccgtgtgcgtctctggcgccgtcctgatggtcttctaccgaggcccatctctgatcgggaccggaggcgcggccgatgcaactgccctgtcagtggttattgaccacagccatgcctataactatgctcctcagtggctggccgcggccatgctccggaacggcgtggaggcatggcatctcggcgtcgtctgcctcatcggaaactgcttcctgatgggcgcttacctcgtcatccaggccccggtgctgatcaaataccccgcgagcttatccctgaccgcctactcctactccttcgcaaccttgttcatggtggtcaccggcgcgttcgccaccagtgggctccacgagtgggcgctgacagcgaccgagatcttagccatcttgtacgctggagtcgttgcgtcctgcctgaactacgcgatcatgacctgggcgaacaagatcctcgggccgtctctggtcgccctctacaacccactccaaccggcatgctctaccttgctctcgaccatgtttcttggaactccaatttacgttggaagtgtgattgggggactcttcatcatcgctggcctttacctggtcacttgggctcgctacaaagaggctcagagcgctctggtagccggttatctgcgacctcttcttctgccgaccaccaaggcagaaggaagctccttcagggggctccattgatccttttacaccccaggcagagaggcagatggatttttgcctcaagtgtttctctaggccagcggcgtcagcagatttagttttcatgtctttgttgtataccaatcttgcatatatttggtttgtactttgcacggcagtttacacggtagagatggccagtactagtaccattttttcaagcattcaagcaaggttccattgtcagggaagaacggcagggcactgaagaaaatatcgtatcctgaacattgtattctggtgtcccaatcggcatttttgaagatgcccttttggttgtcctttcgacttcaacacttgtgtctgtaaggctagctgcagctgggtttaacgtcaccaacgaaagaatatgaatatcattttcatgcctaagaagtgaagctgcagtgcgctagagctatcgtgctcgtggcaagatgaactattcttctgtgatgatggaacctaacccgttccctgtattcaagggagagtcaaaataatactccaaagttcacgtactcgtgtatcagattttggaacaattggacaaagtagtctcgtattgtgccctttttgttctactctttttgttctactatatgcgtttatatcttctctgttacctatgctgtctgtgcttctttgggcattatgctccaataaaaattcaactttgacagctgttttgccgtcacaaaaaaaaaaaaaaaaaaaaaaaaaaaaaaaaaaaaaaaaaaaaaaaaaaaaaaaaaaaaaaaaaaaaaaaaaaaaaaaaaaaaaaaaaacggggggcatgcaaaaaaaaaaaaacaatctataatgacaaccaaattcaaataaaactggccgttctttttacaacccctaaaactaagt

SEQ ID NO: 105955 - DNA, 1814 bp, Zea mays
  Clone ID: MRT4577_28132C.1
ggatggactatcatattcctgtgtctgattccatggcaaaggaaccacctatgcatattgtgcacattgcagtagaaatggctcctattgcaaaggtcgggggcctcggtgatgttgttactagtctttcacgagctattcaagatttaggccacaaggttgaggttatttttccaaagtatgactgtttaaacctaagcaatgtgaaggatttacattgccgtcaaagttttacttggggtggtacagagataaaagtatggtttggaaaggttgaaggcatctctgtttatttcttggaaccgcagaatgggatgttttgggttggatgtgtctatggaaagaacgatgaaagtagatttggcttcttttgtcattctgccctggagtttcttctccagagtggctcttctccagatatcatacactgtcatgattggtcaagtgctccagttgcttggctgtacaagcaacagtatgttcataatgggctgccaaatggtcgggttgtatttaccatccacaatcttgaatttggggtacatcacatcggcaaagcaatggcacattgtgataaggctacaactgtttcggacacatattcgaaggaagtggctggacacggagctattgcacctcattactataaattccatggaattcgaaatggaattgatcctgatatttgggatccatatactgacagatttattccggtacactaatgatcacggagtgttttcatgtatatatttttattgatatacatttggcctttactacctcattggacttgttcattatacatcagagaatgttcttgagggcaagagtgctgcaaaaaaggcattgcagcagatgcttggattacagcaaactgatagccctgttgttggaatcatcactcgtctaacagtgcagaagggaatccaccttatcaaacatgcaatgcatcgagctcttgaacgcaatgggcaggtggttttactgggttctgcaccagatcatcgcatacaaggtgactttacaaatttagccagtaagctgcatggtgaataccatggccgggtgaagctatgtttaacctatgacgagccactgtcacatttgatatatgctggcgcagacttcattcttgttccttccatcttcgaaccttgtggtttaacgcagcttattgctatgcgctacggatccatcccgattgttcggaaaactggaggcctgtacgacaccgtctttgacgtcgacgatgataaggatcgggctcaagcacaaggcctcgagccaaatggattcagtttcgaaggagctgatagcagtggcgtagattatgctctcgacagagctataaccgcgttttatgatgcccgcgactggttcaactcccttagcaagagggtaatggagcaagattggtcatggaatagacctgcactagactacatggagttgtaccattctgctcgcaaaaactgatacatattatcacaagagaaaacaggctcagtttgcccagtttatgagcatctcagcctctcaggcctctgtgcaaattcaatttgcacactgggaagaaaaagagtactgattggccttgtggttgtgcatgaccgccgtccaaggtccaacgatgcaacacagagtgtatagttagagaatgtcacccgttgtacgttactgccgttacatgcatgtgtatacacatcaggtagtttgcaaaacaacattacgcgtatcccggccggctaccctgccataggctctgtctctttcaatttcaattaagaagaatgtaattgacctagttttag

SEQ ID NO: 105956 - DNA, 475 bp, Zea mays
  Clone ID: MRT4577_28133C.1
atggtttttattatttttttgttttttttttttattttttttttattttttttttttagaaaccattattgcagtctgagatacatggttaaaggaatggtttaatagtccatgcccaattaaatgttttttttttgtttccaaactaggctatgaatttgccacgaccaagctaaaaaacttttcccactaaacagtaaacttttgggcagggaacaacaagccgctttttttggtttaaacaaccactcgggggaagcggggatcattttctttttttaaaaggggggtgggggactttattaaaaaaattaatcttttaaaaattttacttctttttcttaatggcaacggccccaaaattgggggcggaggcaataagctttttattcttttcaacaatatttttaacgaaatcgtttccccctttgccattgggtggaagaatattattattttcattggaaattttctt

SEQ ID NO: 105957 - DNA, 788 bp, Zea mays
  Clone ID: MRT4577_28134C.1
gcattccaccgctcaccatgtccgccgccgccatcgaagcagctggtcgccggaagggtagctgcttcttggaagtcggccgccgcgagatcggctcttcattcccccgcgtctcttcccgccgaatcagcggctccgagcatatagtgtcgtctatgtcccagtatggaaaattgcatggtcatgaaggctgtgttaataccgtaagcttcaaccctgctggagacctccttgtgtctggttcagacgacacaaacatcatactatgggactggctttctaaaactaaaaagcttgtttacccttctggtcaccaagataatgtcttccatgctcgtgtgatgccgtttactgatgacagcaccatcgtaactgttgctgctgatggccaggtacgagtaggacgactaaaggagggcggtgaagtcacaactaaactagttggggagcacgattcacgggtgcataagatggctattgaaccaggaaacccttacatattttacagttgtggagaggatggcttggtacaacatacgccgtgtaaaactgaatagcattgtcattgacccacagaatccttactatttttcaattggtggttccgacgagtatgcacgtttgtatgacatgaggaaattccagttggatggttcaagatacacaaaccagcctgtagatacctttctgccctaagcaccttattaagggtgcgagtgcgagggtccacatcaccagtattgcatattcctatgcacaggagatacttggatcctacaatgatgagc

SEQ ID NO: 105958 - DNA, 419 bp, Zea mays
  Clone ID: MRT4577_28135C.1
ccgcggcgtagtctccacggcgtgcgccacgcattcggctgtggtatacgtgtgacgcaggctgttggcgggaggtactacgttgaggccctgtttaagcacttcgctgatcaatgcaaagtggaatgtcacagtgatgtgttccagattgttcgtgcatgcacaagaccgatgcctggatgtgagatacttaaaccggcaccgagcgccaactgagaaggcctactgaacattgagtgtttgaacgatcataccgatgctcgactttttaaccaacgggtggaagaaggaaaaggcattcccgtccggccatgacgagtatattgaccggtgtgggagggctctgctgcagctgggccgactgccgtaaatgtgcactaacatgagggtgttggatcttggtgctgggatgcggctgt

SEQ ID NO: 105959 - DNA, 231 bp, Zea mays
  Clone ID: MRT4577_28136C.1
agcctggggcggcaaatgtattctaccagttttattgttaagcgattctgcataatttgaataactctaattgtgccgcaactccctggcgaaaacagaagctcggctaaacctgtgacacaccctgcctgcgacacacgataattttgaatcacaacttatgaatccagctggttattcagattcaattgaacacacagcgggggaatctgctattcaggggggggggag

SEQ ID NO: 105960 - DNA, 1973 bp, Zea mays
  Clone ID: MRT4577_28137C.1
tctccagtcattccccgctcaccatggccgccgccgccatcgaagcagctggtcgccggaagggtagctgcttcttggaagtcggccgccgcgagatcggctcttcattcccccgcgtctcttcccgccgaatcagcggctccgagcatatagtgtcgtctatgtctcagtactagaaaattgcatggtcatgaaggctgtgttaataccgtaagcttcaaccctgctggagacctccttgtgtctggttcagacgacacaaacatcatactatgggactggctttctaaaactaaaaagcttgtttacccttctggtcaccaagataatgtcttccatgctcgtgtgatgccgtttactgatgacagcaccatcgtaactgttgctgctgatggccaggtacgagtaggacgactaaaggagggcggtgaagtcacaactaaactagttggggagcacgattcacgggtgcataagatggctattgaaccaggaaacccttacatattttacagttgtggagaggatggcttggtacaacattttgacttaagaagcgattcagcaacaaagcttttcacctgctgttctttcttgaatgacagacgccgtgtaaaactgaatagcattgtcattgacccacagaatccttactatttttcaattggtggttccgacgagtatgcacgtttgtatgacatgaggaaattccagttggatggttcaagaaacacaaaccagcctgtagataccttctgccctaagcaccttattaaagggtgcgagtgcaaggggtcacatcaccagtattgcatattcctatgccagggagatacttgtatcctacaatgatgagcttatctatttgttccaacacaatatgggtcttggtccaaatcctgtgtcgacagagccagagtttttcaacatgcttgatcagccacaagcatacagagggcacaggaattttcgaactgttaagggagtcagtttctttggacaacatgatgaatatgttgtgagtggatcagattgcgggaatgtattcatatggaggaagaagggaggtgaattgatcaggatgatgaatggtgacaaaagtgtagttaactgcattgaaccccaccgcatttcaccatttatggctactagtgggattgataacactgttaagctttggactcctgcagctaaaaaattgattatgccgctgcctaaaaatgcaaagcaaataatagccgctaatgaacttgagaggacagttcatatttctcaagcaacagcgtcactttcatctgatgtcatgatgcatgtgttgaggttgttacgtaggagagattctgaaatgtatatcgagaatgagccggctagtgcagatttggccagtgatgacgatgaggctttctactttggatttgaggacgatgcggaaaggaacgaaagggaaaactctgatcccagagaatgcaacatgacatagctaaaacaactggggaattttttttgcagcctgggcctggccctgcctctatgttggagtaaactgaataggtcttagatttcagttctacatagtaaggtgtgctgaatgggcctgaccgcctgatacacatgggaggactatacaggtcgtgattattaatggagaaactaaacgggtagagccacatcctaccactcggttattctgctctagttttaacgcatgttcaatcttctcgattgccgtatacctagcctagtaaaataagttgtgccccccagcctgtgtgattatgaactgtaaacctgaatttttagttatcatcaggcaatatgtacataggttttccgtagtgtggaaatgttgagaagtttgttgtttcatctgtctggcaatgtgttctcatacgtaatctggaagtacagtggcttggtatttcaacaaaaaaaaaaaaaaaaaaaaaaaagtactctgcgttgttaccactgct

SEQ ID NO: 105961 - DNA, 154 bp, Zea mays
  Clone ID: MRT4577_28138C.1
tttggggcttccaatctactcactaaacttatcgccaagggttttctttccgtcaattgtagcactagcgcggacgcctgcacgtcgaccatatgtgaaaactcccaactccttggatgcatggcttgactactctacactgtcacctaaaata

SEQ ID NO: 105962 - DNA, 344 bp, Zea mays
  Clone ID: MRT4577_28139C.1
cggtccaatcgtactcatgcggattaatgcgacgtgacgaggtttggtttttggaaggtagaagctaaaccaaagactttatcctaacgagcatgttactttaaagccgactttctcgcatttgaaattgaaaatatctgtgaatctgtttttagcgactttattttgaatgggagaactttcccatataggcctttggtgagtttctgaatgtatatagttttccattcctatgtactttcccagatatcgtcctaattgaaatacgtgtatggatatttcagggacgtacccctgggaaacaatttgtcaagtaatttcaaggaagcctgtacttgtttggt

SEQ ID NO: 105963 - DNA, 385 bp, Zea mays
  Clone ID: MRT4577_2813C.1
atattaaaatttatatgatcggcagattgacccggccatagggtagatatattagtagaacctcccagattacatgaatggaaaaggaacctaaccccttagagtttatggcacctcacacatcataccccaatagctttatgctcaaaagaaaacccgatccccataaataagcatgacaacgaagcgttccctgactattaactatcccgtacacgaggcgcaaacgataaactcatcttccccatggtgagactgctgtactttcataaacctacattggaccttctccttttcctggaccaggtttaccaacacccaagccttcaacacaaagggaagcttgcccttgttcaagatgaccttgacaccataaaccaacaca

SEQ ID NO: 105964 - DNA, 459 bp, Zea mays
  unsure (1)..(459): unsure at all n locations
  Clone ID: MRT4577_28140C.1
ccgcancggggggggcggacgccgggncnaggccagggccgcgccggcgncgccgncgccaaggcccccccnccgcgacggccccgccggcgcgggcggggngcgcaccaccaggcgcaacgacccgngggacggcccgcaccgcgcgaaggcccagggccccgaagagggggagacaaaaaattttttttttgtcgagngncnccgncgactacggcgcgcgacaccgccggggtggagcgggacccccacgcggccgcggngaacgcgccggggaaggcggcgcacccccgggggcacgacactaggagcngctgccctcgggcaccgtgacttcctcccgaagcggagcactgggacctcccaggctgactgcgctgccctgtatattgaccccccgctgggggctttgaggctggtctctccaagggtggcccggcccgtgngcccgctctgctt

SEQ ID NO: 105965 - DNA, 421 bp, Zea mays
  Clone ID: MRT4577_28141C.1
ttttttttttttttttttttttttttttgtttgtttttttttttttttttgttggttttttttttttttttgggccaaacatttggggattcaggccttaaaaaagttcttccataatggacaaaagggtaaaaaaactttttccagggtctaatagcggtcctaaaaaaacttcgggccttagttcccggccaaaaaaaagggggggggaaaaaaaaagcgacaaacattacacttgacctcacccccctatgggtaggtcgcttcaacggacggggggggggttcctcggtaaaaagggcggaaccctttgtccctggagcggggggcttgctaaaacttaaccttctcttttttcaggtggtccggggcaaataacaaactggaaaaagggaacccctgaaaaagggggggtcccagc

SEQ ID NO: 105966 - DNA, 334 bp, Zea mays
  Clone ID: MRT4577_28142C.1
gggggtaacgagcttattgtaagatagtggagtactattagggtgtttggtttgatgaaataaaatgagtttatctatcactatctcatttttcatagttagttagtattaatataagtaatataatcatcccaacaaatttgagaaatggactcatgatgtaccatctaaatttcaatagagggattcctcaaaacaaacatcccctatgccttgttcacatgaatttgcagcctccataactgggatcagctgtggtaacaatgcctgtctgtccaaaatcgcagccaaaggcatgctcgccattggcctggaagtagaggttcatggcgta

SEQ ID NO: 105967 - DNA, 395 bp, Zea mays
  Clone ID: MRT4577_28143C.1
cttgtaggaaacaaaaacttataccctgcttaaattcgaaccccattgaatggggcattggcctaatatacccaatctgccatagaaatcatggcttgttatctttctatggaaagggtaaaacataactagatctcaagatccccatactcattgctaatctgttagatctttgcatccttccgctgcatcgaaggaacttaagcggacacccttgcaaaccttacaaataccggtggtgccatcaagctcaaggctgacggaccacaatcagaggcccaggatgccatggaacccttgttcgccacccctcgatcacatcaacgacgcacttggataccgcaaatctgcttgaatactttttctgattaaacataaagtttatttccctggca

SEQ ID NO: 105968 - DNA, 595 bp, Zea mays
  Clone ID: MRT4577_28144C.1
ctgtcactccactcctaccccacacagaagcggagcgagcagcaaaaaacgcagaaaaaccagaggctgcgagaggaaggagcaccaggcatgctgtacgtcaacttctaccgcacctatgggaagacgatcaagaaaccatggagtacgtatgagaaggaacgccttgatgctgaactgaacctgcgcaccgagaatggcttgacgtgcacgcgagagctttggaggatgcacgatgccctgagcacgatccgaactgctgcgaggcacttgttcacccttggctaaaagaacccccggcgaatccttgaggctgaggggcttcttccgctcatgaaccgctatgggatgctatgcatgatggccaaaacgagatggactatggtctctcgtcctcaccgctgatgaacttcctcacaagggggctctcaacactcgtcttcgaggctggaatgagctagacacattgcaccatgctcgcgtattgatcaagcagcgccacgtcaggctggtaggtgaattgtcgacgaaccatcattcatgacgcaggcatgtagtctcgataagcacagtgtacttctcgctgtcaaggcca

SEQ ID NO: 105969 - DNA, 378 bp, Zea mays
  Clone ID: MRT4577_28145C.1
ccaatatctttgaacctcgattatgtatcccatctttatcaagcatgatttgtataagattggttcgaatcatttacttcagtctttatgcattcattgcacatatatttttagcagtcatctagtgaggttacattatccagctgcatgcaacataatctcttcaatcaacatttttttgcatgtgtatcgactaatatcagtctgtaggttgtcagatatatttgcatgttctgttgcttatattatgctttcaatttgcagcactgcgggttgtccctttggttcaaattgccattttctccataacttcccgggtggctacctggcggtttcaaagatgaccaacttgggtgggccacctgttccggctccccc

SEQ ID NO: 105970 - DNA, 2168 bp, Zea mays
  Clone ID: MRT4577_28146C.1
gaaaaatcttaatgtatgcttaggtaaatttagtgagcagtatcaaccatggaagataagaaaggtagcagctaaatagagaacgactagtctactaacatatgcacaaactccacatatcagtaatgcatgttccacaagaacctagaacaaaaaatgaaatggcatagagtacaaaagcgagactatttccatcagatttgagcttctatcatgttcaaccacgataataaacaaagcttgcaatctctagctgtcacataacaataaagattggtgaacgaaaaagaaaaagagagagagcaagagagtggaaactagaacaaccatgtcccccatatcacaaaatgctctgaccttgttgatagccaaagcaagtatgcaattgccaaaccaccaactctcatctgaactttcaggaaattgtagatattttggccttcatatctaagttctccacatcattaattggtctagttgtctgatccctgaatctcttgatcttggggctttccagccccttgtgtgagaaaccatatagccgaagcacctggttgtcggcaaaattaaacgctcgctccatgctcctgaggcagcgctccactgggtaatccccatagctcccacatggcttgcacccaacaaagtgagtcacgaaaggccaccgctcgtcgccgaggcctgggtggtgattctccatcatctcctcatacttatccaccaacccagcccagaagccatgcaagtagtaggaattctcaatgaacaccttgtccatccacttgtccttttgcgagagcaagaggtaaatcagtgccgactggtcgtcggcctcaaatgctggccggcccttgaggtttgccgtgagtaccttgcccgcctgatcgcggatgaaccccttgggtcccatgggcgcccacgcgtccaggaggtcaagcgaccactggcaattcctgaagaggaagctgccggtgttgagtgcaatccaggagtgcttctcgaagaggaggtcctggtagccgtggatgatgaggttgtggccgtcgtagcgtgacaggggcagctcgaacgacatgtcggtgaagagcgcgtcgctgtccatccaccagatccactcgacctccgggtgggagagcatgaggcggcggagcagcggcaatttggcccagtatccggcgagctcgttgtcaaggtgcgcgaggttgtggacgatctcgatgccatggaggcggcagtaatcgatcttattcttggtagtcttgagcaggtagtggtcgccgagcgggttgtcgcagggccccggctgcgagccggttacgagcataatcctgggcttgcccccggcaagggtggccgggaagccagggttctgggccagccaccgtcggcgctgcgcgtcccagtcggagatcttgggcccgagcgcgtatttgccgaccgcggccgcgtacgcggcggcggcctcggtggcgctgagcgcggtggcgttgaagccagaggcggcgccgaagtcgccctcgtcgtcggggtcggggccggagtcggagcggatctcgcggaggatgcggtcgatgtcctcgacggccttggcgtccgcgagcgcttcggcgtcggagggctgcgaggggagggagaggttgaggccgatggtgccccggaggacgaggatggtgacgaggccgcagagcacggtaatcttgaggttgttgaaagtgcggtggatcttgcgcgaccggctgtggtggagcggcgacgcgccccgcggccgcggcgccgtcatcggcagccctcccccgccgccgccgcctcctcctccccccttgctgttgtaccccatcccctcctggcccatccccgccacagaggacggaatcctcggttttttattgcccactcctggttccccccgcccggcgccgcggattggggtctcggactgctgactgtggggggcggggcgcgactcgcgtcacatgggcggggagagcagcaccgcgcggcgcgctggagctggagtgcgacctgcgtcgacggcgagtggggacgggaattgatatgggatcgcaggatgcgagggtgtgaccgtgtgagtggtgtcgggaataggggaaagaggaagcggggtgtggatttatgtgagcggtgagccggtgaatccgcccgccggc

SEQ ID NO: 105971 - DNA, 504 bp, Zea mays
  Clone ID: MRT4577_28147C.1
ccccccctaaaaaaaaaagggggaccccccccccccgggggggggaacccaaacccacctatgggggggcgaaacccccttttccccaaaaaaaaatcccttcccattaaagggggcaattcggggcatggcccccccggccccccaggggggggggggaccccccgtaacccagggccggaaaacgggggaacaacctaaacccctaaggggggctaggcgggggccccattcctttattcccccgggccaaagttccccaaaaaaaaaacccccccggcacctgggttaaaggggcagggcccgggggggggaagttgaaaaccgcacatggccggaggggggggggctaccggggccgccataagggccgggggccccccctggggttgtggttgaaaaaaggaccgcgggccccccccgtatggccccgggacccggggcaggggcccccccggcctaattggggggaaaaactgggcctgaaaccccgggacttggggg

SEQ ID NO: 105972 - DNA, 418 bp, Zea mays
  Clone ID: MRT4577_28148C.1
aaaaaaaagaaacggcctgggccatcctttattcactgccggggtttttaaaggcaaaaggttcccagcctaaaaccaggggaagcataacagttcccctggcccaaacttaaaaaggaaacaggttctagggtttaattagggaatggaacaaaccggccccgaccccggtttataaaaaaaaaaatttgaaccctacataacccccaaaacttcctgcctggcctaacctaaagggacaacccttccaaaaatttttgaacatgtcactttaacccaaacgggacctaattttgtcctgggaacgctggcggtccaaactaaatcactgtgggttttcacggccccagcaaaactgaaaatcttgttcggggcgctcaggtaagctttgcccctggacaccacaatgtccagggat

SEQ ID NO: 105973 - DNA, 444 bp, Zea mays
  Clone ID: MRT4577_28149C.1
gccggccgggtcgggcactctccatctattcctcacgagcgatttcggcggcggcggaagtaagaggaggcgatggggcactccaacgtgtggaactcgcaccctaagaactacgggcccggatcccgcgtctgccgggtctgtgcgaaccctcatggactgatcaggaagtacgggctgatgtgctgcaggcagtgcttccgcagcaacgccaaggacattggcttcatcaagtaccgctgaagtcagctgggcgggctatctgaatgccatctcttggacagtgtagtagaggcgatgccacaattttaattactgtcatttagatgttcccttcagaactctgctatttaagtccgccatgtttgtgatggagaacttaagctttgtttgttataaaaaagaaaaaaaaaaaaaaaaaaaaaaaaaaaaaaatttgcggcc

SEQ ID NO: 105974 - DNA, 1587 bp, Zea mays
  Clone ID: MRT4577_2814C.1
atggatcctaaggggaagggaatcgtgatcaacgacaaagagaaggaatccttcgtcaacaagccgaaggacgacaagcctaccgactccggctctggccatagacggaaggaagggaagaagaagaagacgaggcacatcaaggagatcgtctactacgacgacagcgatgagtctacttcttcccaaaaggacgatgaccacaacgactacgagagaaggaaaccggtaaattcgaacttttcttttgactactctcgtattccgcaaagttcaaattcacatttgctctccattccactcggcaagcctccacactttgatggggaggactacggattttggagccacaaaatgcgtagtcacctattctctctccatcctagtatatgggagattgtagagagtggaatgaactttgatagttcggatagtcccatgttcattaatgaacaaattcataagaatgcacaagctactactgttcttctagcttcattgtgcagggatgaataccataaagtgagcggcttggataacgccaagcagatctgggacaccctcaagatttctcatgaggggaacgacgtcaccttgctcaccaagatggagttggtggagggcgagcttggacggttcgcgatgataaggggcgaggagccaacacaaacatacaaccggctcaagacccttattaacaaaataaggagctatggaagcacgcgatggacggaccacgacgtcgtccgactgatgctaaggtcctttaccgttcttgatcctcatttggtaaataatattcgtgagaatcccaggtacaccaaaatgtcgcccgaagaagtccttggaaaattcgttagcgggcggatgatgatcaaggaggcgaggtacgtggacgacgccttgaatggtccgatcaacgagccgcaaccccttgctctcaaggcaacaagaagcaaggaggcgctacctagtaaggtggcacaaattgaggcagccggacttaatgatgaagaaatggccctcatcatcaaaagattcaagacggcgcttaaaggtcgcaagggacagccaagcaagaccaaagccaaggggaagcgctcatgcttcaaatgcggtaagcttggtcattttattgctaactgtcccgacaatgatagtgatcaggaccaagggaacaagagggagaagaagaagaattataagaaggcaaagggcgaggctcatcttgacaaggaatgggattcggactgctcctcgtccgactccgacaatgaaggactcgccgccaccgccttcaacaagtcacccctcttccccaacgagtgtcacacatgccttatggcaagggagaagaaggtatgtactcgagactctacttatgcttcttcaagtgaggacgaatctagtgatgaggatgaaatagattattcatgtctatttaaaggcctagatagaaataaaattgataaaatcaatgaattgattgatgccttgaatgaaaaggataggcttttagaaaagcaagaggatttgttgtatgatgaacatgataaatttgtagaggcacaaaaatctatgccttag

SEQ ID NO: 105975 - DNA, 221 bp, Zea mays
  Clone ID: MRT4577_28150C.1
ccccaccccctttttttttttttttctttttccaaaatgtcttggtacctatttattatccctctaccatttcgatggctcattcaggggattgctctcactgccagccatggagaacgcggtgacactccgttacaccactgacgctgagtgaaccatctaactgtaaaggagttatatagcgggaacatggatgtttggctacaaaacctccgaacgaa

SEQ ID NO: 105976 - DNA, 417 bp, Zea mays
  Clone ID: MRT4577_28151C.1
ttgttttttttttttttttttttttttttgtttctttcttctctttcattataagaggtggggggccaatttttttactttttttaaaaaaaaactaaaagggtgttaaactttccattctttatttagcctcccgggggattaattgccccataaaaaggaaaagccctacccccctttttttttttttttttgtggagaaaaaacaatttggcagttgtttcctatcaagggatgtttttacaggtgaaatagcggagcaaatgcaagcggaaaaagaaagggaacccgggggcaaacagctttagatgaccgattcgtttttgacttggtgccgaactttggagcttcaaaaagaaaaaacgtcccctgggggggacaatcaggggcctttttttttttttgaagggggaagct

SEQ ID NO: 105977 - DNA, 405 bp, Zea mays
  Clone ID: MRT4577_28152C.1
gctgcatatgcagctaggcgtatctgagttagtccggacgatccagatccgtgcgctgtagcggtgcgcgtgtgtctcgtcgacagtggagatcggcactggtgatgcttccttggccgcagccagagtaaggaccagcagactatcgatgcactcgagggctacgggcctatcatgcgctgcttcgctaacgaggcggccctgacgaataactggatcagccatgcaacccaagactgcctcgtaccagaggggtgcacgctatcaacgagtgaccccttcatcggcaggctggagacaccggtcagatcgagcccgctcgaggccgaggatcctgtactaccttgcggactaccttacccgcatgagccccatgatgccgggcgtccacgtcgaggttgctca

SEQ ID NO: 105978 - DNA, 354 bp, Zea mays
  Clone ID: MRT4577_28153C.1
ctgcagtgtattaatctacgaatacaaagactttggcgcgctaaggtgccttgtaaaaaaaaagggaaaaaaaaaaaaaaaaaagagaaaaaaaaataaaaaaaaataaaaataaaggcagaatggagcattaaatatattaattttttattgggccgcctgtcttatgtagtccattgtttttaactaattctgacgaactattatgtttttatctggggcctcctatcttttgtttcggtgggattgttttgccctttctggcatttgtcttttatcgtgggggtgctcttatattataggctttcggccctttcccttttcccctgttgtctttctttctttgggtttagc

SEQ ID NO: 105979 - DNA, 582 bp, Zea mays
  Clone ID: MRT4577_28154C.1
ggggtcaaaaaaggaaacccctccccgttaaaaagggggagttaaggggcaaaaaaacccccccccggggcccttttagccccccccagtttgggcccccccccaatttttaacaagggccccttttaccggggggggggccccgtttttttttattttcccctttaattgaaaccgggggggccaaagggctcccaaaaaccctgggctaaaaaaggggaaaggggacccctggggaattggggccccggggaaattaaataaggggggtcccttagggggggtggggttcccccaagggggcaaccccaaatggggggggttttttgggggcattcccgggggatgggccccaaaaaacggggggggggggggaaacccaaaggggcccagccctttgatccctttgggccccaaaaaaaaaaaaaaaatcgggggccccaaaacgggattttgggcccaaatttttttcaaaccccccccccaaagggggcccccggcaaaaattaacatctccggggggggcttaaatgggagaaggggaacccccccctctggggtctacacggggggggggggaaa

SEQ ID NO: 105980 - DNA, 206 bp, Zea mays
  unsure (1)..(206): unsure at all n locations
  Clone ID: MRT4577_28155C.1
ttcctctcgtccggggaacatgaagccatggctggagctagcaatgaccatgtaccgaccatattgtgaccaagatatatcagcgtgttgatcatcccttacttcncgtggtatgcacgctcgagccgagtaccatagatggacgctaaaaactgacagattaggaagagcttattggacagaagtgttccactaccatgtccttg

SEQ ID NO: 105981 - DNA, 749 bp, Zea mays
  Clone ID: MRT4577_28156C.1
cctcgaggccggccgggatccactcttacaaaagccgcgcgctgccacctccacacattcctctccgcccccctcctcccttttccaccacctcgcagggagccgaagcaatccaatcggagcaagcaggcagctcatccaactctcaggcagccatggacgccgccgaggcgaggaggagcagcagcgcgtcctcctccccggagttcgagttctggccgctccaccccaaccccgccgcctcgccctcctgcgccgacgagctctttgccggcggggtactcctcccgctccccgtcctcacaccgaaacccgcatccagtaacattggcagcggcatcagccaatgcgtgcccgtcgtggagccggagccaggagaggcgttccttctcgcgaccgtctcgccgcctccggcctcgatcacttccacagctctgcccaccgccaccggaggaggagggaggggggtccaagcgctggaccgacatcttttccaagaagccggcgccgggagccgaggagaaggaccgggacaaggagaaggagaagcgccgccgccgcggcacaaggagaaactggccagcgctgctcggaagcctggcctgggcagcggcgtccgcgggttgaacttgagcgtgactcctgcatcgggtaccggcaccaggtcagctggcggcgcgcggacctcggcgggcggcggcgggctgttcggcatcaaggggctctttctccaagaaggtgcattgatg

SEQ ID NO: 105982 - DNA, 128 bp, Zea mays
  Clone ID: MRT4577_28157C.1
aggcggatataggatttttgagtcagactacagaagaattttaattggtgatggttaattcgtagtgtgcaagaaaattttattggtaagaaagaagcgattagtttttgtaccttgatgtgtaggga

SEQ ID NO: 105983 - DNA, 434 bp, Zea mays
  Clone ID: MRT4577_28158C.1
gctcatcatgatgcaacattttttgacggacagcagattggacaaagcaaatgacaaaaaccccaactccttcaatcgctctgaattaaacggtattgattgactaagacatcaggtccccccgcacctgggttgcaagaaggagaaaaacttgaagacccctacactcgaggtcttgcacttaactggtgtataataaagaaacaagtctgtcttaacacggtggtgggaaaccacaggataacagctaacggccaacgcatggacctgggcataatggaacccacacacttgggacctttgaagggggggccagaaccatgccaacccgatgaggtaacgcttggcactccccctagaggcctagcatatcggcaggctcctaccagaagagaccgtatcattttcagacgcaccattcatactgacgcctg

SEQ ID NO: 105984 - DNA, 1034 bp, Zea mays
  Clone ID: MRT4577_28159C.1
cacacactacgacccagtcagcaactcagccatggggcaggctagtagggctcatcagctcctagcctccctggcggctatctacgtcaccctagccatcagtatcacccagcagcagcatgtcgccggcaacatgaccgacgacctcgagataatgtggggcaacgcgaaggtcgtcaccgacggcagcggccagcaggccatcgcgctggctcttgaccgctcgacgagctccgcgttccgctccaagaagacgtgccagttctgcagggtggacatcgagatcaagctcgtccctgggaactcggccggcaccgtgaccacgttctatatgataaccgagaacccgtggcagttccacgacgagatcgacatcgagttcctgggcaacagcagtggccagccctacaccatgcacaccaacatgtacgccagaggacagggcgccagagagaagcagtacaagttcgacttcgaccccactcaggagtaccacaagtacaccatcatctggaacaaagattggatcttgttccttgtggacgacaagctgtaccggcagatcaagaacaaccagatagacggcgccccgtacccgtactactacccgatgagggtgtacgccaccatctggaacgccgacgagtgggctacgcagggcggtcaggtcaagaccgactggtcgcaggcgcccttcacggcgtacttccggaactacagggccatctcgtgcaactcgttcatggcctcccctctgtgcctcccaggctccggctggttcgaccagcagctggacgagtcgcggaagcagcagctggcgcaggtggactccagtaacaagatatacgattactgcaccgactccaggaggtacaagaacggcctcccgagggagtgccaggtacattaattagctgcgaagtgtgtgcttcagcaactgaagaacgatcgagaggttgtgttggggtgattattgagtgattcggcaacattcttttaattatataaggaattttctacggtacccttaagag

SEQ ID NO: 105985 - DNA, 666 bp, Zea mays
  unsure (1)..(666): unsure at all n locations
  Clone ID: MRT4577_2815C.1
cctcgagccggccaggaaacgcccaccacgccgcactcgcaaccgcacaccagccctcgcaacccaccaccacgtccgagacgtccgagatggagttcctcgccgcgtacctgctgccgtgcctgggcgccggcccggcccccacgctcccgaccaaggacgacgtgcgtcgcatcctgagatccgtcagcgccgaggtggaggaggaccgcctcgacctggtcttcgccctcctagaggttaaggacatcgccgagctgatcgccacgggcggggagcatctcgcctacgcgccgtcaggagccgctgctgccgtcgttgccactcctgccgctgccgaggtcgaggaggaggccacgaaggaggaggatgaggacatcgccctcttcaacctcttcgactgatcgtgcaaccctacgtggaccgatcgatgccatcctcgtccttgcctgctgccgtttgcttgttgctctgattgtacattgtagtattgtgttactgtagtaataaaaccatggtgctcttctcgtctatatccgggatagagcctgcgtttgatgccgatcgaaaggttttgggcggatccatcttgctgatcggagattgatctgaggctgntctaatcaatttcagtagttaatacatgattttaactgtttgtggtcc

SEQ ID NO: 105986 - DNA, 817 bp, Zea mays
  Clone ID: MRT4577_28163C.1
taccctcgttttcggccgggtcaatcattagcctcgtgactgcttacttgtttacttattttacttatttgtctctgtcactagttatatttaatgactctggttggttaattggtctagcttattaattagtttatatgcatggtcagccgagattatttgtgttaattatttaattaaacacctatacatatcatttgtgttccacttccttattttatagttagttatttccgttgcttgtttagggtgatattcggttctgcttgcatcgagaaattttattgggctcccattcaccccccctctggtcgccgtttcggtcctacaaaatatctacccctcatattgacaagatggctttgtttgatgcttgatttcccaaaaactacatggcttggtcgccatggtcgatcttcggaatcttcaccaccactttccacatcatagctatcactgtcaccagtatcttcagagaggccctctagaatctctttagtaattttctatgtgtttgtcttcgctattgattcaaggaagccgagattcatctcttcggaaaggcttagcttcgcctcagcgacagctttcttgtcttcagacatcttcgaaaataccaagaaagtgctctcaaagatgaagcttaaaactttaaaaaagccaggcaagcgttggtgtgcaaagagctaaaaattaggaaggcaagagcaaacggcaagaaagcatgctaagtgtgctcgcggtgcgttcttatttatacgcccaacgcgttgcaagtggcagggtcccacttgtcattgactgttgctattctagc

SEQ ID NO: 105987 - DNA, 894 bp, Zea mays
  Clone ID: MRT4577_28164C.1
cattgggtacctcgaggccggccgggagttttcgcctaatttcccggccgggaatttcttagtggcccgtacactctgcagcagtgcggtgcgggcgtgcggcctccctttttttctccagttcctccggcggcggcgtgcttggcggtgcgccaggtgcccagatctccaccatcttagtcgccggcgacgagcatcaccaggttcctgatgaccatggcacagcgcacgatgtgcctgcttcggcggtccattgggtttacagcgccgcaggcacagagagccctgagtaccactgccgctggtgcggagggtgcggccgtggctgaagctacggcgaaggaggcgaagaggaggaggaagaatctgtttgacgtagtgcagttcctgccagagtggggcattggatacaaggttgccaagaccacctggcgtgacgtctcctatcagatcaccaagatcaacctgtacaaggatggtcggcatggaaaggcgtgggggcttcggtacaaggcaggtgtgcaagctgcagacaccccaactaggatcagcggtgttaacaaacgtgggtggaagtacataaaagaatcacagaagaaactacaagaagcccccaaagtagacgtagctgttgctgctgcctagtttgtagttacatgcatgtttgttgtaagatgattcggtaaatctttagatggctgttgccagggtgagaacagggaaccacttttttttggatcgactctatacttttttgtcgatgacgactgaacctctctgcaacatgtccagtttctcttcttttcttttccttatggaacgaacctttaccgtaatgtactgatgcagaagaactgtgttgattgtggcaaactagtttacattcaagcggcc

SEQ ID NO: 105988 - DNA, 367 bp, Zea mays
  Clone ID: MRT4577_28165C.1
cctttgtgctataaaatggtctaccaccatgacacatgatatgtggtaaatataatataagtcacctgtaaactgtggcagatagaaatagaaaagagaggggaggaggaagtgtgtgcatatgtgtgcgcgcgcaaacagaccatcacagagagtattgtttctttcattaggactatgaggtctcgagaatcgaaggggccacaatgtatcaagcaaatgttataaggtgtatgcttgggctggtacgattggtgtagcaacctcattgatacaaccgtatgttgctagttatatgaaaggtgtaccaggggaggtgatcgaaagaaaatcctatgtgatagtgtggcacccagctttcatgcga

SEQ ID NO: 105989 - DNA, 352 bp, Zea mays
  Clone ID: MRT4577_28166C.1
aacagatctcgctatggacattctatttatactctacttcaagatcaatcagtaagggtgcatgcacgtaggttcattccaaatatctgtactcagcaattgactaatccgattagtcgaaatgctgcgtattgagcaacacacggctcttgaagcatcatatattgccatgcaaacctgtaaacttagcgtggttcatattgtgtacagtcagatgacctgcaactatgacaacttaactcacgtagtactgtcgagctaactaaactacatatgctagtaaagcactaattcatatgatactataggatgagcatatgcctatttgaactgctgatgctattggatcttg

SEQ ID NO: 105990 - DNA, 394 bp, Zea mays
  Clone ID: MRT4577_28167C.1
gtcgagccgtccgtgagggcgcgtccagcacggcgcatcaaacaccagtccgtgaccgcttttccgacggcagcattgatgctgacgcctcagttgactccgatgaacgtacctgggacggtacccgttctgaagacttatcaagtccgttttttcgattgttacgctatctttcgctatcttggtcgcttgaaggatgacaacaagtcttttttggtcttcccatatggaacaagcccacgttgtgcaatgtatggattttgtcacatcacaatgtgatccttggtgttgcatgagtctcgtatccaaagcttgagtaccttcattatgttagtacaacttatgaaactgctattttttcattgatgaagtcgcttggtgccttgaacacaca

SEQ ID NO: 105991 - DNA, 142 bp, Zea mays
  Clone ID: MRT4577_28168C.1
cctgtttttttttttttttttatagaagatttcatgtcgtagaaggacattacatataactacttaatgcggctggagctccacttctaccatgagattcatatacgggccgacaatgatcttgagggcctgcgtaatgaca

SEQ ID NO: 105992 - DNA, 367 bp, Zea mays
  Clone ID: MRT4577_28169C.1
ccccactcctccggtgaccaacttgcttttttgaaagcacactactgtgccagcaggggaatgttagacagccaccctccataacatccgagaagttacagcagagctgctacggcgaccattttgccacaatgctcacaagctcctattgcttgctttgttgccccgtacctctgaccaacggtgtattctggttgggaaaacccaattcttcaaccctactccatccaacatgcagtatctcattggtgttacctttattaccctcggccttcacaccattcatgagccttatggcgacagctacctatgttgcatctattggcgcagatcatatgggcacaacttcttacatcgatctggtcta

SEQ ID NO: 105993 - DNA, 4934 bp, Zea mays
  Clone ID: MRT4577_2816C.1
aaagagactaatcgcccgaagatatggatcctaagggaaaggggatggtggtcaacgacaatgagaaggagtccatcttcaacgagccaagggacgacaaagtcaatgactccggctcgagtcaaaagaagaaagacggaaagaagaagaggcacatcaggaaggttgtctactacgacagcgacgaatcttcctcttctcaaaaggacgacgaatacgaggaaaaaaagaaaacggttaactcgaacttttcttttgattgttctcgtattccgcataattccaatgctcatttgctttccattccacttggtaaacccccacactttgatggagaggactacggattttggagtcacaaaatgcgtagccacttgttctctcttcatccaagtatatgggagatagtagaaaatggaatgcaatttgatagttcggataactccatgtttatcaatgaacaaatccataaaaatgcacaagctactactattcttttagcatccttgtgtagggaagaatacaataaggtgagcggcttggacaacgccaagcagatttgggacaccctcaagatctcgcatgaggggaacgacgtcaccatgctcaccaagatggagttggtggaaggcgaactaggaaggttcgcaatgatcaggggagaagagccaactcaaacgtacaataggctcaagaccctggtcaacaagataagaagctatggaagcacgagatggacggaccacgacgttgtccggcatatgctaaggtccttcactgtccttgatcctcatcttgtaaactctattcgtgagaatcctaggtacatcaagatgacgcccgaggaaatactcgagaagtttgtaagcgggcgaatgatgatcaaggaggcgagatacgttgatgagtcgttaaatggcccaatccacgagcctcaaaccattgctctaaaagcaacaagtagtagggaggcactacctagcaaggtggcgcaagttgaggcggccggactaaatgaagatgaaatggccctcatcatcaagcgcttcaagacggcgctcaaaggtcacaaggagcatcccaacaagagcaagacgaaggggaagcgctcctgcttcaaatgtggtaaggttggtcactttattgctaactgtcctgataatgatggtgaccaggataaagaaaagaagagggaaaagaagaagacttacaagaaagcgaagggcgaggcacatcttggcaaagagtgggactcggattgctcttcatccgacgacaaaggacttgccgcctcggccttcaacaaatcatccctcttccccaacgagcatcacacctgcctgatggcaaaggaaaagaaggtatacactagggatactattacatatgcttcttcaagtgatgatgaatctagcgatgatgaaatagactatgctagtttattcaaaggtttagatagaactaaaattgataaaatcaatgagttaattgatgctttgaatgacaagaatagattattagaaaagcaagaggatcttttgtatgaagagcatgataaatttgtagatgtccaaaaatctcttgctttagaagttaaaaggaatgaaatgctttcttgtgaattatctacttgccatgagactatttctagtttaaaaagtgttaatgatgatttaaatgctaagctagaagtagcaaatagatccaattcttgtgaagaacatgtagtgatttgcaataggttcttaatgcccaacttaagactagcaaaaattattgacaaactaaaatttgcaagtgatgcctacactgttggtagacacccctcaattaaggatgggcttggctttaagagggaagccaagaacttaactagttataaggctcccatctccgccaaggataaagggaaggcccctatggctaatagtgttcaaaagaatcatgctttcatttatagtgatagaaaattctctagaaatgcttataggaattattcttatgattcatatgctatgcctgcttctagttcttctattgtgcatgatatgcctaggaaaaatattattcatcatatgcctaggagaaatgttgctcatgtacctaggaaaccaagtaatgaaccttctacaatttatcatgcttgcaatgcttcctttgcaatttgtagaaaggataagaaagtggttgctaggaaattaggggcaaaatgcaagggagataaagcttgcatttgggtccctaaggctattgtcactaaccttgtaggacccaacaagagttgggtttatgcatccgggggctcaagctggtttatcgacagcggatgcacaaaccacatgtcgggggagaagaagatgttcacctcctacgtcaagaacaaagattcccaagattcaatcatattcggtgacgagaatcaaggcaagatagaccttgtgcagcttgtcaagcaggataaaatagaaacccaagggaccgtcaagcgcttcctaaggagagctcaaaatgagtttgagctcaaggtgaagaagataaggagcgacaacggatccgagttcaagaaccttcaagtggaggagtaccttgaggaggaaggaatcaagcacgagttctccgctccctacacaccacagcaaaatggtgtggtagagaggaggaacaagacgctcattgacatgtcaaggacgatgcttggagagttcaagatccccgagcggttttggtcggaagccgtgaacacggcttgccacaccataaatcgggtctaccttcatcgcctcctcaagaagacgtcgtacgaacttctaaccggtaacaaacccaatgtttcatactttcgtgtatttgggagtaaatgctacattctagtgaagaaaggtaggaattctaaatttgcccccaaagctgtagaagggtttttgttaggttatgactcaaatacaaaggcgtatagggtcttcaacaaatcatcgggtttggttgaagtctctagcgacgttgtatttgatgagactaatggctctccaagagagaaagttgttaatcctaatgatgtagatgaatatgatgttccaacggacgcaattcgcaccatggcgattggagatgtgcgaccacaggaacaccaagagcaagatcaaccttcttcctcaacattggtgcaccccccaactcaagacgatgaacaggttcatcaagaagaggcgtgtgatcaaggaggagcacaagatgatcatgttatggatgaagaagcacctcaagcccctccaacccaagtccgagcgacgattcaaaggaatcatcccgtcgaccagatattgggtgatattagcaagggagtaactactcgctctagattagttaatttctgtgagcattgctcttttgtctcttctattgagcctttcagggtagaagatgccttgctagatccggattgggtgttggccatgcaggaggagctcaacaatttcaagagaaatgaattttggacactggtgccacgtcccaagcaaaacgttgtgggaaccaagtgggtgttccgcaacaaacaagatgagcacggggtggtgacaaggaacaaggcacgacttgtggcaaaaggttatgcccaagtcacaggtttggactttgaggagacttttgatcctgtggctaggctagagtcaattcgcatattgttagcctatgccgctcaccattctttcaggttgttccaaatggatgtgaagagcgctttcctcaacgggccaatcaaggaggaggtgtacgtagagcaaccccctagctttaaggatgaacggtaccccaaccacgtgtgcaagctctctaaggcgctctatggacttaagcaagccctaagagcatggtacgaatgccttagagactttttaatcgctaatgctttcaaggttgggaaagccgatccaactttattcactaagacttgtgatggtgacttatttgtgtgccaaatttatgtggatgacataatatttggttctactaaccaaaagtcttgtgaagagtttagcagggtgatgactcaaaagtttgaaatgtcgatgatgggcgagttgaactactttcttgggttccaagtgaagcaactcaaggacggcactttcatctcccaaacgaagtacacgcaagacttgatcaagcggtttgggatgaaggacgccaagcccgcaaagactccaatgggaactgacggacacgtcgccctcaacaaaggaggtaagtccgttgatcaaaaagcataccggtctatgataggttccttgctttacttatgtgctagtagaccggatattatgcttagtgtatgcatgtgtgctagatttcaatccgatccaagggagtgtcacttagtggtcgtgaagcgaattcttagatatttagtcgctacgccttgcttcgggatctggtatccaaaggggtctacctttgacttgattggatattcagactccgattatgctggatgtaaggttgataggaagagtacatcagggacgtgccaattcttaggaaggtccctggtgtcttggagttctaagaaacaaacttctgttgctctatccaccgctgaggccgagtatgttgccgcaggacagtgttgcgcgcaactactttggatgaggcaaaccctccgggactttggctacaatctaagcaaagtcctactcctatgtgataatgagagtgctatccgtatggcggataatcctgttgaacacagccgcacaaagcacatagacatctggcatcactttttgagagaccaccagcaaaagggagatatcgaagtgttttatgttagcaccgagaaccagctagccgatatctttacgaagcctctagatgagtcaaccttttgcaggctgcgtagtgagctaaatgtcttagattcgcggaactctgattga

SEQ ID NO: 105994 - DNA, 623 bp, Zea mays
  Clone ID: MRT4577_28170C.1
cattgggtacctcgaggccggccgggaacccacccaacccagcggcgttagtcgccgccatcgatcgatcgccgcaaaactaacccctaacgatgtctgcagccgctaagcagcacaagaagcccgcgaaggacggagcccacatcatcctcaaaggcaaggcacaggatggcaatgaggtgttctttcacataaagagagtccacccagctgagaatataatgattgaacggttattgtgaccgccagtgtgtggacatgaatcgccattgcgctcctgattgcatgaccgcatgccttccggggagcagacacacctgatgacctgcagatgcagaacgacctaccacatggatgccatgctctctccaaatcgcacgcagagctcctatcaccacctataaggatcagccacgaagcttccgtttagcgtctccgccctgtcgtactaccaaaaaagagggaaaaagtacttttaaggaacttgtgatgctctgactccttgtgacattgctgaggcgacatccttatgctgtggttagtgaatatgtttctggtactaagatcgtgtcatcactcgccttatctatccctaatacattgtcgccactgattgtactcct

SEQ ID NO: 105995 - DNA, 924 bp, Zea mays
  Clone ID: MRT4577_28171C.1
agtacccccacctccctccggggtcccccttcgcctgggaaccccgcgctcgcgccacccatcgtggttgacccgaccagcagccgagtgcccgatccgacaatcagccatcgccaccacctccctccgcggctccgccttccgccgcgaacacgccgctgtctcgaccccttgtcctcctccttcagcaagatggcggagattgagataaaaacagcacctgctgacttccgcttccctacaacaaaccaaacaaggcattgttttactcgctatgtcgagtaccacaggtgtttgaatgccaaaggggatgatgctggtgtttgcgaaaaatttgccaagtactacaggtccctttgccctggagaatgggttgagaaatggaacgagcagagggagcatgggacgtttccaggacctctctgaatgtaccgcccgagacctccagttggaccagtcaacaagttggccaggcagtcctactgttccattctgcattcctacttccagaatcgtaaatgccttttgtcccttgctcttcaaccagtcaccacaaaactgttagtgatgcctctcgtatgcagctctaataatttggctacagttgccccacatgcagccttgttttgtgtgtggactgtggacctcattttgtaaacgtctgaatggacttgcattttctttcgtgcctgcgaccgcgtcgtcctgtactgcggcttttgtgtcgtcagtaagctggcattgtagtaatggcctatgaatgtgggtgtacctttcccgtttaaattaagggtctccaattctggaggattggaggggattgagtttaaaaataaactgatttcccctcttattcacctctaataaaagtggcaatttgaatttcgaaaaaaaaaaaaaaaaaaaaaaaaaaacccaccccgc

SEQ ID NO: 105996 - DNA, 845 bp, Zea mays
  Clone ID: MRT4577_28172C.1
ccggccgggaagccatcgaggttgacccgaccagcagccgagtgcccgattacaatcagccatcgccaccacctccctccacggctcccccttccgccgcgaacacgccgctgtctcgaccccttctcctcctccttcagcaagatggcggagattgagataaaaacagcacctgctgacttccgcttccctacaacaaaccaaacaaggcattgttttactcgctatgtcgagtaccacaggtgtttgaatgccaaaggggatgatgctggtgtttgcgaaaaatttgccaagtactacaggtccctttgccctggagaatgggttgagaaatggaacgagcagagggagcatgggacgtttccaggacctctctgaatgtaccgcccgagacctccagttggaccagtcaacgagttggccaggcagtcctactgttccattctgcattcctacttcccgaatcgtaaatgccttttgtcccttgctcttcaaccagtcaccacaaaactgttagtgatgcctctcgtatgcagctctaataatttggctacagttgccccacatgcagccttgttttgtgtgtggactgtggacctcattttgtttgcgaccgcgtcgtcctgtactaccgcttttgtgtcgtcagtaagctggcactgtagtaatggcctatgaatgtgggtgtacctttcccgtttaaattaagggtctccaattctcgagcattggaggggattgaggtaaaaataaactgaattttcccctcattcacctctaataaaggtggcaatttgaatttccgaaaaaaaaaaaaaaaagcggccctcgagcctcagcttttg

SEQ ID NO: 105997 - DNA, 1633 bp, Zea mays
  Clone ID: MRT4577_28173C.1
acgggatagtgtagtagcaagcataggagttttgctgtcttcttcagcttcagtagttcagtccaatcacagatcgcagtacaaccgaacccgccgcacaaggcatccaaggatttgttcggccttcggacttcggagggtagggaatcgaagccacgagaagtcgagaacaaagcaatgaacgaggcggtgcaggaggcgaagctgctgcggcaggtgaacgcgctcatcgtggcacacctccgtagccagaacctcgggcaggccgcagccgccgtcgccgccgccaccatgacccccatctccgctgccgaatccgtccccgccaatcacctcctgcgtctcgtggccaagggcctcccacgcgtccgcggacgcgtgggcgccgtttccgcattcgactccgccgggttcggtgtggcggtgcagccgcccggctccagtgccgtggatttcagtattcaggatgtcaagggctcatccaaaagcttccccaagcacgaggtgaagcatgtctctgaccataagaacgctgcccggtgtgtgaaatttagtcctgatggaaagtattttgcaactgggagtgctgatacatccattaagttttttgaggttgctaagattaagcagactatggtaggagactctaaagatggccctgccaggcctgtgatacggacattttatgatcacacacaggccatcaatgatctggattttcatcctgagagtccaatactgatatcagctgcaaaagacagtacaataagattctttgacttttcaaaaaccaatgcgaggaaagcgttcagagttattcaggatactcataatgttagatctgtatgttttcatccttgtggggattaccttttagcagggactgatcacccagttgctcatttatatgatataaatacttttacatgctacttatcagcaaatgcacaggattctagttctcccattaaccaggtacgctactcttgtactgggagcttgtatgagactgcttctaaagatggttctctgcgcatttgggatggagtatctgctgaatgtgttcgacctattattggagcacatggatcatcagaagctattagcgcgattttcaccaaagatgagaggtacgtcctatcttgtgggaaagattctcgtgtcaagttatgggaagttggcactggacgacttgtgaagcaatatgcaggagcaattcgcagacaatttcgttgtcaggctgtcttcaatgaaaccgaggaatttgtgctatcagttgatgaacaaaacaatgaggttgtcgtctgggatgcacttactgctgaaaaggttacaagattgccttctggcagcactggtgctcctagatggctcgaccattccccagttgagccagtttttgttagttgtggaaacgatagatcgatcaaattctggaaacaaaccgtataagcttgtagattcaaccacgcaaatcaaaagagtatgttttcagtattactgtttcaggaggaatgtgctagtgtaactttagttgtatatgggagaaatttgcataagcgatttttttttgaaactgcataaacaattgattgacctaatagcaaatcccaatcagatgttttttttggtg

SEQ ID NO: 105998 - DNA, 556 bp, Zea mays
  Clone ID: MRT4577_28174C.1
tttttttttttttttttttttttttttttttttttttttctgtttttatttttaacataatgttgtaagtcaaaaaagtcttcagagaaccaaagggggaaaaaaacggggggggggcacacaggcacccaccaaccgggcaaaacaggggcagggggggggagggaggggaaaagggcccaaaaaaggggggggaaagaagggacaaaacggggcccaaaggggaaccaaaatcgggacggggggggggaggcccgggaaaacaagcgggagggcaaattcttcggggacaagcaggggcaagccccaggagcaggaaaaagggggcaaaagcgcattcaaaagggggctgaaaaccgggccaaggggcacaaaggggggaagaacccggccacgccaaaaggggggcccaaagggaaggccaaagggggggggggaccccaaggagtctttctggggggggggccatcggaggcagggggcagggacggggggaaaggaggggggcccgggggggcccaggcccgaccccccccccgcgaggcggggggggaag

SEQ ID NO: 105999 - DNA, 2424 bp, Zea mays
  unsure (1)..(2424): unsure at all n locations
  Clone ID: MRT4577_28175C.1
gccggccgggttctgcaancactggcgcccagacacacacttcgccaccgcaacacggaatgcttggacacccggcagatctgcggcgcccctgcgctgtgctcctgccaccaacgccaaatcccactcgcgatcgcgggaggcgaaaatcccgttagttgcccagcccccagacctagagaggagggcgacgaacacacggtgacggagagccgagtggacaggacaggagcgcggagggaggaggaaacaaagcagaaaaagcaacccccgtcttccatcttcgcggaacgacgcccatctggcctgcccatctctttcgtgctcctaccccccgccttcttccgccctcaaggcttttccttccttctcatcttctgctcggaccggggacgggccgacggggacagggacaaaaggtggtgcgatcttgttgggttcactccgcctccgcgcgcgggaagagagagagagagggtgggtggcagggccgccgcgccggtgagccgacccccagccatggcattgccggctccccccgtccgcctggcgctgctgctgctcgccgcgctgccattctgcgcagcgcatcccgggccgggggccttcaatgctcctcgccacttccagacgcccgcgctccactctgatggatttggcttggtggcaagaaggtcggttgctgaagctcctgctgacatcaacgtcactacgaatagctcctttgtgctggcggcagataggacatatcgaagggaccctttgaatggcttcaggaaatacccgggcggctggaatatcagtgaagtgcactatttcgcttccgtcggatatacagccattccgctgttcgccattgctctcgtgtggtttgtgatctttttcctggttatgtttgggatttgctgccgtcattgctgttgcccgcatcacacctacaagtattcacgaacagcatatgctctatcattgatacttctaatactgttcacatgtgctgcaattgctggatgtgctatgttatacgatggccagggaaaattccacaagagcacaacgactactctgaagtttgttgttagccgaggcaaaatatactgttgacaaccttaggaacctatctgatagtttgtctgctgcaaagaaggtcgacatagcacagtcctttttgctgcctcctaatgtgcagaacgagataaatgaaattcaaggaaagctgaactcatcagctactgatcttgctattaaaacaacagataatgccgcgaagataaaaaaggtgctaaacagagtgcggcttgctttagttgtcattgcagctgtgatgcttcttctggcatttgttggcttcttgttatccatctttggtctggaattccttgtctctgtcttggttattattggatggatattggttactggaacgtttatcctgtgtggtgtatttcttcttctgcacaatgttgtttcagatacttgcgttgcaatggaagagtgggttgctcatccgacagaacacacagccctggacgaggttatcccctgcgtggagcctgccacggcgaacgaatccctgtacagaagcaggcaggtgacgttcgagctggtgaacgtggtgaaccaggtgatcaccaacgtgtcgaacaggaacttccccccgcagctgacgcctttctactacaaccagtcggggccactgatgcctctgctctgcaaccccttcacgcctgatctgagagaccgcaactgcagcagaggagaggttaccttggacaacgcaacccaggtgtggaagaagtacgagtgccagagcaccagcgtctcaggaggagccgagatctgcgcgacggtggggcgcgtcacccccagcatctacgggcagatgaccgcgggcgtgacggtgagccaggggctgtaccagtacgggcctttcctcatccagctgcaggactgcaccttcgtgcgcgacaccttcacgaccatcaaccagggctactgcccggggctggagcgctacagcaagtgggtgtacgtgggcctggtgatggtctcgtcggcggtgatgctgtcgctcatcttctgggtgatctacgccagggagcggcggcaccgcgtgtacagcaagcagcaccagccgtacccggtggaggacaagccggcggcgacggtcccgggcgcttgaattgatggggccgttccagtgctccggcctactcccgtgccgctgtgcatactctactccgcgctagttgggttttacgtggtggtgtatgtaggtggatgtaccctggatttgttgtttcgtttgcttggtgttgctgtacgtttgctgattttccgtagacgaagttgctgtgcattctcgtactgacggtagctggatgaattgattatgttgggattggttattattaggtgttcttc

SEQ ID NO: 106000 - DNA, 316 bp, Zea mays
  Clone ID: MRT4577_28176C.1
atagaacaccgagattttcattacaattgccacaaccagctggtacaagaggagtattatttgtggaatgcatgtctttgtaacatatttatcctattttttattgttaaccaagataaactggcaacgacggcagcaagctagccaagcgcccaagccacgacattattgctatcttccatctagtgaaaatgatactgaaccatagtccatcatcgtcatcgctggtgatggatacaatgacaccgttgatgtgttaagccgtgtttcactctgcagcaaggcgagcatatgaaaactgaagtgcccccgtagt

SEQ ID NO: 106001 - DNA, 176 bp, Zea mays
  Clone ID: MRT4577_28177C.1
atatttttcggcacgaggacctgatggaggggggcggatccaggatggcacggcctccttgggaccttgcctccccgagtgctctacagagagctactttgttgacgactcatcaggaaatacgatgacttcatgttgtgcacgctgataacaaatatgctgaattcagaaaaacc

SEQ ID NO: 106002 - DNA, 719 bp, Zea mays
  Clone ID: MRT4577_28178C.1
gggacccggcagatctgcggcgcccctgcgctgtgctcctgccaccaacgccaaatcctactcgcggtcgcgggaggcgaaaatcccgttagttgcccagacccagacccagagaggagggcgacgaacacacggtgacggagagccgagtggacaggacaggagcgcggagggaggaggaaacaaagcagaaaagcaacccccgtcttccatctttgcggagcgacgcgcatctgccctgcccatctctttcgtgctcctaccccccgccttcttccgcccgccgcctcagccctcaaggcttttccttctcatcttcttctcaggccggggacgggcccgacggggacagggacaaaaggtggtgcgatcttgttgggcacactccgcctccgcgcgcgggaagagagagagagagagagagagagagagagagaaggacggagggtggcagggccgccgcgccggtgagccgaccccccagccatggcattgccggctccccccgtccgcctggcgctgctgctgctcgtcgcgctgccattctgcgccgcgcatcccgggccgggggccttcaacgctcctcgccacttccagacgcccgcgctccactctgatggatttggcttggtggcaagaaggtcgattgctgaagctcctgctgacatcaacgtcactacgaatagctcctttgtgctggcggcagataggacatatcg

SEQ ID NO: 106003 - DNA, 705 bp, Zea mays
  unsure (1)..(705): unsure at all n locations
  Clone ID: MRT4577_28179C.1
cctgccgggttgactttgtcagtgttatccatctttggtctggaattccttgtctctgtcttggttattattggatggatattggttactggaacgtttatcctgtgtggtgtatttcttcttctgcacaagttttcctcctattcctggttaatgccaccttttgcaagcggaacttgtacacaattttatattaacatgtaactatcagtagtaaagctggaaaaaaaacaaaacttgagctgttggaaccactacatataattttcgcgggatttcgacttggggtgaaacatctaccctcttaaaggcaacctttatggtcaagtaagcatgtgtctcccttttgatatcagcatctcatctcctcttcaaaacacagtgtcgtttcagatacttgcgttgcaatggaagagtgggttgctcatccgacagaacacacagccctggacgaggttatcccctgcgtggagcctgccacggcgaacgaatccctgtacagaagcaggcaggtgacgttcgagctggtgaacgtggtgaaccaggtgatcaccaacgtgtcgaacaggaacttccccccgcagctgacgcctttgtactacaaccagtcggngccactgatgcctctgctctgcaaccccttcacgcctgatctgagggaccgcaactgcagcagaggagaggttaccttggacaacgcaaccc

SEQ ID NO: 106004 - DNA, 813 bp, Zea mays
  Clone ID: MRT4577_2817C.1
ccggccgggaaccgctccggctccgatttcctcgcgtccaaggaagctgcagcgagccagccatggacggcccagcccggtcgacctcgagccacgcccgcatcctcgccagcttgcctataagcgccgccacggcgcctggtagcgctcccaaaacgcccaccacgccgccagtcgcaaccgcacaccagccctcgcaacccaccaccacgtccgagacgtccgagatggaggagttcctcgccgcgtacctgctgccgtgcctgggcgccgacgccgccactggacagagggttgacgtgctcccgggcccggccaccgcgctcccgaccaaggacgacgtgcgtcgcatcctgagatccgtcagcgccgaggtggaggaggatcgcctcgacctggtcttcgccctcctcgaggttaagggcatcgccgagctgatctacacgggcggggagcagctggcctacgcgccgtcaggagccgctgctgccgtggttgccgctcctgccgctgccgaggtcgaggaggaggccacgaaggaggaggatgaggacgtcgccctcttcaacctcttcgactgatcgtgcatcctacgtggacccgatcgatgccatcctcgcccgcccgcccttgctgctctgattgtagtaccgtattactgtagtaataaaaccatggtgcccttgctgtctagatccgagatagagcctgtgtttgatgccgatcgaaaggttttggccggatatcttgctgatcggagattgatctgaggctgttctaatcattccagtagttatacatgattttaatgcc

SEQ ID NO: 106005 - DNA, 448 bp, Zea mays
  Clone ID: MRT4577_28180C.1
gtcgaggtatcgataagctttatgggtttagtcggttactaccaaagattgtaaaaggattctccatgatagtgactccaatgtcaaggttgctacagaaagacattaagtttgaatggacagaaaagtgtcagcaaagtttcgacaagttaaagacattactgactgaagctcctgttttagtattgcctgaaccgggaaaagagtttgtggtctatagtgatgcatccttaaatggattgggttgtgtacttatgcaagatggcaaggtgatagactatgcttcacaacagttgaagccacacgagaagaactatccgacgcgcgatctagagcttgccgccattgtttttgccttgaaaatttggaggcattatttatatggtgaaacttgttgtatatttacgaccacaaaagtttgaagtatttgatgactcaaaaagaattg

SEQ ID NO: 106006 - DNA, 682 bp, Zea mays
  Clone ID: MRT4577_28181C.1
ttattcggcacgaggcttccgccctcaaggcttttccttccttctcatcttctgctcggaccggggacgggccgacggggacagggacaaaaggtggtgcgatcttgttcggcacagagagagagagagagagagagagagagagagagagagagagagagagagagagagagcgacggagggtggcagggccgccgctccggtgagccgacccccagccatggcattgccggctccccccgtccgcctggcgctgctgctgctcgtcgcgctgccattctgcgccgcgcatcccgggccgggggccttcaatgctcctcgccacttccagacgcccgcgctccactctgatggatttggcttggtggcaagaaggtcgattgctgaagctcctgctgacatcaacgtcactacgaatagctcctttgtgctggcggcagataggacatatcgaagggaccctttgaatggcttcaggaaatacccgggcggctggaatatcagtgaagtgcactatttcgcttccgtcggatatacagccatttccgctgttcgccattgctctcgtgtggtttggtgatctttttcctggttatgcttggggatttgctgccgtcatttgctggtgcccgcatcacacctacaagtattcacgaacagcatatgctctatcattgatact

SEQ ID NO: 106007 - DNA, 449 bp, Zea mays
  Clone ID: MRT4577_28182C.1
aaaaaaagggggggcgataaaaatctaattcaaatttaaaaaacttttattagggacccaaacccgtcaaccaaaatttaaaaaaagttttttttttttttttttcaaccatcaaaaagaggggaaccatttaatttaaaaaaccccgccccagggaaaccaaagggttttccaagggggaaaaaaacggaaaaatccggtattttccttaaaagcccgcccttttgggcccaaacaaaagggttaacctccttccaatccttaaaaaaaaaaaacgggggaaacccctaaaccttcaatggcctggaaacccccggaagcttttaaacctcaaccttaaaaaaaaggggttcgaaaaaaacggaaggccatttccttaaaggccgcttaaaaaaaagggaaggcccccccccaggaaggccaaaaaagaacaaccaaaagttgggggc

SEQ ID NO: 106008 - DNA, 672 bp, Zea mays
  Clone ID: MRT4577_28183C.1
ccggccgggagatcatccagcttaaaaatcgaactcccattagcaagcaaaacgaagcagatcaaaaggacatacttccggcggaacagagagttgcaggtgccaattaagagcatcatgcgtaactcgaagccgccgagcaaactggccatgcttatggcattgctgtcgctgtcgtttctgctttgttatggagttgagaaggtccattgctcgacagttcacgaggacaaccaagattttcactctctgctcgatttcaagaagggcatcaccaacgatccaaatggagccatgagcaattggaccaacaacactcatttctgccggtggaacggtgtgaagtgcaccttgacaccgccatatcgtgtcacggagctcaacctcactggcaacgacttggctggccgaatctccacctctcttggaaacctgacctaccttagtttgctagcactataaaaaaaaaaaaaaaaaagcggcccaatacctccccttaacaaactccaaaacctaagttacctttccctggacaacaactttttgaatggtgtgattcctgagtcacttacaaactgttccaacttagacacactaggtctctctaaaaaaacctcacaggtgttattcctcctagcataggttctcttaccaagctaaaattattttcct

SEQ ID NO: 106009 - DNA, 424 bp, Zea mays
  Clone ID: MRT4577_28184C.1
ggaacatatacaaaattaccaaagcttacattggccctggagaaggtttgtcagttgagctttcaccattgcttagatatcagtaccgtgcaattcttagttatgcaaccttgtactctgagtttgccctatttatgtaaagtgcaagtttttttacttgttggtttaccatctgaagtgaaaataatataccttggtttgagttatgattttttgaaacaacatcgagtgcaccttgataacaaatagatcaattaatttacaatgtaccagttgctacagtctgtaagtaagaaagatgaaatgaggtttcccatgtctaggtttgagagtgtatcttctgacagttttccttcattcattatatttgtgttatgacattatccaaatacttacatgagtaattattgattttcttgctctg

SEQ ID NO: 106010 - DNA, 246 bp, Zea mays
  Clone ID: MRT4577_28185C.1
aaacaggcacccactgtattttttccttttcaacacccacagaagggtggaaatgactttatgttcagttcggagtaagtaacaatccgccacaggtacagggaaccaccaaaaaagatagaggcctgactcaaaaacatgaggtacaggaagcaatccctgcggatccagatttgaaaacaaacaacaatccttggatagaacctgacgatgacacaatcaccgaatagattccggagttctaaa

SEQ ID NO: 106011 - DNA, 104 bp, Zea mays
  Clone ID: MRT4577_28186C.1
agttgtttaggacttccaggccgcacacgaggagggtgaatttggctcgcttgctgtgtattctaaacccttctcccggccaacctgtacaggatacacaatat

SEQ ID NO: 106012 - DNA, 139 bp, Zea mays
  Clone ID: MRT4577_28187C.1
tttcttcagcactctgctctgctcggcttgccttgtccttttaacttgccatatcgctaccaaaataatcctgtgtcgctttgtagccctcgcggctctcgcctgcctcctccgacctggcgcgtgcggcgagctccac

SEQ ID NO: 106013 - DNA, 251 bp, Zea mays
  Clone ID: MRT4577_28188C.1
gaaggacttaccgtgttttcgcaccagagatttatagaaaatgcggcgagtagaccgtgagacaagtggatgcgtacgtgtgataggcgagatacatcgaaatttggacatgtaacattatcgtgaactgcgcaccgctcgggatactatgatgaaactgacgaagaacatgctcaagttgctacagacactggagatacacttaatggcgctcccagaataaacgcgcttcaaagcgctgaaaaagctag

SEQ ID NO: 106014 - DNA, 436 bp, Zea mays
  Clone ID: MRT4577_28189C.1
ctcttacatttgttgttgaatatgtttttttttaattttgtaattagttatcttgtttgtttcgcccgcaaaaagaggggggaaaaaagaaaactggggggaggagggggggctaaaaaggggtcaaagcagaaaaaaaagaaaaagccccctgcggcggcacccaccggaggggggacacctggtgtggttaaaaaaaaaaccccccccctacccccaaaaaaacgccgtttggcgcgcggcaccaaagaggggcccccggcgagcacccaaaaaggagcacccccgaaaaaagcgctaaaaaagggctttaaaaaaaaaaaaaacacgcaacgggcggaaaaaaaaaacaaccatgaggaatcccacagagaaaaaaacaaaaaaaaaggggccgggggaaaaaaaaaaaaaaaaaggggggccggcggaaaaa

SEQ ID NO: 106015 - DNA, 2391 bp, Zea mays
  Clone ID: MRT4577_2818C.1
atggccaaggaaaagaaggtgagtgctcgagattcccccaagtactctacttcttgtgatgaggattctagtgatgatgaagtagattactctagcttgttcaaaggattagatagagctaaagtagaaaagattaatgaactaattgatgctttaaatgaaaaggatagacttttagaaaaacaagaggatattttgtatgaagagcatgataaatttgttagtgtgcaaaaatctcttgctttagagattaaaaggaatgaaatgctatcttctgaattatctgcttgccatgatactgtgtctagcttaaagagtgtaaatgatgatttaaatgctaagctagaggaagcaaataaatctagttcatgtgtagagcatgttaatatttgtaatagatgtaaggattttgatgttgatgcttgtgacgaacaccttatgtctattaccaaattgaatgatgaggtggcaagtcttaatgctcaacttaagacttgcaaaactaattttgatcaattaaagtttgctagggatgcctacaccgttggtagacacccctcaattaaggatggacttggttttcgaaaggaaaccaagaacttaacaagccaaaagactcccgttctcaacaaggagaaagggaaggcccctatggctaatagtactcaaaggaatcatgctttcatttataatgatagaaaattttctaggaatgctcattataataggagttatgatcatgatgtctttaattcacatgctatgattgcctctagctctacttttgtgcatggtaagcctaggagaaatcatgttgtgcatcatgtgcctaggagagtatgtagtggatcttctactatttaccatgcttgcaatacttcgtctgcacttgtatataagaatgaaaaagtagttgctagaaaaatgggatccaaatgcaagggagacaagacttgtatttggattccaaaggctattgtaactaaccttgtaggacccaacaaaagttgggtttatgcatccgggggctcaagctggattattgacagtggatgcacaaaccacatgacgggggagaagaagatgttcacctcctacgtcaagaacaaggattcccaggatacgatcatctttggagatgggaaccaaggcaaggtcaaaggcttgggcaagatagccatcaccaacgagcactccatttcaaacgtttttctagtagagtcgcttggttacaacctcctatctggagaacatgtgttaggactaaccaatgtctacttcgaaaaagatagaccttgtgcagcttgtcaggcagggaaacaggtgggaagcactcatcacagcaagaatgtgatgacaacgtcaagaccactagagcttcttcacatggacctcttcggacccgtcgcctacattagcatcgggggaagtaagtatggtcttgtaattggagatgacttttcccgcttcacttgggtgttcttcttgcaggataaatcagaaacccaagggaccctaaagcgctttctaaggagggctcaaaacgaatttgagctcaaggaggaaggtgtcaagcatgagttctcctctccctacacaccacaacaaaatggtgtggtagagaggaaaaataggacgcttatcgatatggcgaggacgatgcttggagagttcaagacgcccgagcggttttggtcggaagctgtgaacacaccttgccacgccataaaccggctctatctgcatcgcctcctcaagaagacctcctacgaactccttaccggtaacaaacccaatgtctcgtactttcgtgtatttgggagcaaatgctacattttggtgaagaaaggtagacattctaaatttgctcccaaagctgtagaagggtttttactagggtatgacttaaatacaaaggcgtatagggtcttcaacaaatcatcgggtttggttgaagtctttagcgacgttgtatttgatgagactaatggctctctaagagagctagttgatcttgatgacatacatgaagatgatgttccaacgaccgcaatacgcaccatggcgattggagatgtgcaaccacaagaacaacaagagcaagatcaaccttcttcctcaacgatggtgcatcccccaactcaagatgatgaacaggttcctcaagaagaggcgcgtgatcaagggggagcacaagaagaacaagttatggaggaagaagcaccactggcacctctaactcaagtccgagcgacgattcaaagaaatcaccctgtcgatcagattctgggtgacataagcaagggagtaacaactcgctcatgtttcgctaatttttgtgagcattactcgtttgtctcttctattgagcctttcagggtagaagagtga

SEQ ID NO: 106016 - DNA, 532 bp, Zea mays
  Clone ID: MRT4577_28190C.1
ggggtaatttccgggtacgacccacgcgtgccgcgcgccggcacggcacgacggacggaccctccgaacgtggcagcggcctggggaggccgcgagcggcggccttcttcttgtcggagacctccctccgcgccgcgccggcgcctaccgcggtggagctgcctgcgcccaaggtgggcatcatggggcgcagcgccaggagcacgcgcaggctgcgcgggcaggccacctacaacgagaagctgatcacgccagaggggaaggtggagctgcaggtgaccgacgacatgtacatcctggaccaggccgaggaggacggcatcgacctgccctactcctgccgcgcggcgtcctggctcctcgagcgccggcaaggttgtctccgggtccggggaccagggggaccagagctacctcgacgacggagagatcgccgaccgctgggagatgagctgccacgccaaccccacctctgagcgcgacaacgagacgaacgaggaggaaagaggctccccgcccgagtaaagattcc

SEQ ID NO: 106017 - DNA, 706 bp, Zea mays
  Clone ID: MRT4577_28191C.1
cctcgaggccgccgggggtctcgacacaccaaggcagcccactaaccaccagcaaaatggcccgcacttccatccccacccacaatgacatcgccgtccccgagtcggtgctcaagaagcaaaaggctcaccagaagaccaccgactcccaggctgccgagctgaagaagaagcgtgaggccaacaagcagaagcgcgaggtcatcaaggagagggccgccaagtacaaccaggagtacgtcaaggccgagagggacatcatcgaggccaagcgtgccgcaaagcgcgacaactctttctacgtccctgccgaggccaagctcgcctttgtcgtccgtatcaagggtatcaacaagatcgaccccaagaagcgcaagactctccagctcctccgtctcctccagatcaacaacggtgtcttcgtcaagctcaccaaggccacctctgagatgctgaagattgtcgagcccttcgtcacctacggataccccaacctcaagactgtccgtgagcttgtctacaagcgcggttacggaaaggtcaacaagcagcgcctgcctatcaccgataacgccctcatcgaggagaacctcggcaagtacggcatcacctgcattgaggacatcatccacgagctctacaccgtcggcccccacttcaaggctgtctccaacttcctctgggcccctcagctctcctcccctac

SEQ ID NO: 106018 - DNA, 823 bp, Zea mays
  Clone ID: MRT4577_28192C.1
cattgggtacctcgaggccggccgggagcgtctcgacacaccaaggcagcccactaaccaccagcaaaatggcccgcacttccatccccacccacaatgacatcgccgtccccgagtcggtgctcaagaagcaaaaggctcaccagaagaccaccgactcccaggctgccgagctgaagaagaagcgtgaggtataaaatctcccagaacctgcgtaagcagataggagtagcacagttggctaagatttccttaggccaacaagcagaagcgcgaggtcatcaaggagagggccgccaagtacaaccaggagtacgtcaaggccgagagggacatcatcgaggccaagcgtgccgcaaagcgcgacaactctttctacgtccctgccgaggccaagctcgcctttgtcgtccgtatcaagggtatcaacaagatcgaccccaagaagcgcaagactctccagctcctccgtctcctccagatcaacaacggtgtcttcgtcaagctcaccaaggccacctctgagatgctgaagattgtcgagcccttcgtcacctacggataccccaacctcaagactgtccgtgagcttgtctacaagcgcggttacggaaaggtcaacaagcagcgcctgcctatcaccgataacgccctcatcgaggagaacctcggcaagtacggcatcacctgcattgaggacatcatccacgagctctacaccgtcggccccaacttcaaggctgtctccaacttcctctggcccttcaagctctcctccccctaccgggtggtttccgcacccgcaagttcaagcactttcatc

SEQ ID NO: 106019 - DNA, 492 bp, Zea mays
  Clone ID: MRT4577_28193C.1
tgaaaaaaaaaaaaaaaaaaaaaaaaaaaaaaaaaaaaaaaaaaaaaaaaaaaaaaaaaaaaaaaaaaaaaaaaaaaaaaaaaaaaaaaaaaaaaaaaaaaaaaaaaggaaaaaaaaatataaaaaataaaaatttaaaaaaaaaaaaaaaaaaaggggggggctttttttggggtcccatttttttttccggggggtggcgagtttttattttttttttgggggcccttattttattttcctgggcgggtttttttaacggtggggttgggaaaaccctggggtttcccaattttatgggtttggaaaaatttccctttttgccggttggggtttttgggaggggggccggcccgtcttttttttccaactttttggccgctttgttggggatttggccccccctttttcggggcttttttagggggggggggggggggttttccccctgggtgccctttatttttgcgggggttttagggccgttttttt

SEQ ID NO: 106020 - DNA, 579 bp, Zea mays
  Clone ID: MRT4577_28194C.1
ccccccccccaaaaaggggaacaacaaaaaaacggggggtcccacaaaaaggcccgggaacccattttggtccaaaactttttttttaaaaaaaacccgggttaatttttttttttccccccctttccggggggaaactttgggggggcccccccccccccccctaaaaagggttcccccgggacacccccttttttttcaaaaaaaatccgggaaaaatgacctgcccccctaaaaaggggaaaaaaacctcccccgtaaaaaaaaccccgttttggggggttggggggggggaccctttaaaaatccagcccccccgggcccccccccttgggggggcccgggcccttttcttgggaaatctccacaattggggttccggggggggttatgggggccaacccctttgcccttccccccaaagggtttttaaaaccttttagggggaaaaggaacccggttttcccctggaaaaaattttcccctttagcggcttttaaccccgggggggttttttttggccaaaaaagttttttaaaaaatatgggtcccctcaccccaaaattggggggaatttgg

SEQ ID NO: 106021 - DNA, 430 bp, Zea mays
  Clone ID: MRT4577_28195C.1
ccagcggggaggggagtatatcacattaggacatcaaagaccacggggcacccccccccacgtccacaaatatatgggggcaaccattcccccccaaaaagccaaacccagcttggggttcgacaacccaaaaacaaccccccgttcagcggcttttttgggcaaaaagccccccggggcccccgggggggaacccccccccggtgccgttgtcgtcccccccggaagcctttttgccgggggtcgttttggcccgggaggggggggccggcccggcccccaccttgggggggagcgggcccccccccaccaggggggcctttttgaaaataaacccaaaaatgggctccccggggcccttttccttcttggccggggccgggccccccctggtgggagggggcggccctaccagaacggaccggggccc

SEQ ID NO: 106022 - DNA, 239 bp, Zea mays
  unsure (1)..(239): unsure at all n locations
  Clone ID: MRT4577_28196C.1
gaggcagtcatatcaccttacctnaataaaggggtgttaccacttaagagattggatgacttcattgttgactgaaaccacttcataagcctcttttacatttacatttcaatcatagttcatatattcaaaaaaacatatattgtgccaggttcttgaacattactttcaaacaaaactttggcatttggaaaggtacttttctcggactccattggaatttctgccatttatactca

SEQ ID NO: 106023 - DNA, 337 bp, Zea mays
  Clone ID: MRT4577_28197C.1
ttttagttttataggcaccaaatcaaatctgggacatgaattatctaactgcaaataccatgaagctggtgcttgtggttcttgctttcattgctttagtatcacgtgtttcttgtacacagacaggcggctgcagctgtgttcaacaacaaatccatgagcagcaacatcattcacaacagcatcatacacagcatcatcaacatgttccaccaccacagcataaccagctgcagctgtcaccaactactccaagttcacatgcaaccacttaaacatcaataacaacgcgaagtctatgttcaacatcgacaacaacaaccgaatcaccacctgc

SEQ ID NO: 106024 - DNA, 634 bp, Zea mays
  Clone ID: MRT4577_28198C.1
ctccgaaaacatcatttaccccgtcaataataaaaccatatacaacaacaacccccaaaaaaacacccacgaccgaaccaaccatggccccagcaacagtcctagtcctctaccccaaaaccccaacctcaaccttcaacgcagactactacctctcaacccacatgcccctggcctccaagcactggaccaagcacggcctcaaaggctacaaagtaaccgagctcaacgccgacagcccctacgcgttcgtctcggtgctcgagtgggagagctacgagggctttcaggccgcgattaaagatgcgggtactaaagagattatggaggatgtgccgaattttagtaatgagaaggcgattttggtgcatggaccggttattgcgactggctaaggcttgtggaaaggcgggggtggtaggtagctagctagctagctgccagtgtcttttttctcctctttgggatgaggggaagagagagagaggaagagaggggtcaagtatttttttttttgccccgcaaccgaggttcccgatctttacggatctgcgggatcactagagatgaatgatattgcgactctgccttggagcgcattctttattttcccaagtcaaatatcgtttttttt

SEQ ID NO: 106025 - DNA, 506 bp, Zea mays
  Clone ID: MRT4577_28199C.1
aattcggcacgaggatcgccaacctcgccgcgcgcaacccgcccgtggcagccagctagctagtagctacacggcgggcagcactcgtgattcgaacatcgaccgtcctcgatcgtgcagtggtgatttttttttgccgcctgccatgcgtggggttggggtccggatcaggtgtgtgtgctctgccgccttggacgagttgcagctggacctccggcggttagctaggtaggtagagctatacggagcatgcacggactgacgatgaagaacgacatgcatctggaggacgaagctacgtagaggcgcggcggagagaaggaaatgaataacgaaagctttgttgtgacgacctagctagctgtacatgtacaaaaccacagtagcaaatgaacagatcgatcgattatcaccatgtatatatgtgttcttgagcttcattagttccatcttcgctttaccagctagagcggaaagagtaaaattgaacaaaaaaaatcatgact

SEQ ID NO: 106026 - DNA, 5436 bp, Zea mays
  Clone ID: MRT4577_2819C.1
atgaatcctcttcttcccaaaaaagacgacggcaacgtctacgagaataagaagacggttaattcaaacttctcttttgattattctcatattcctcaaagtaccaatgctcatttactctccattccacttggtaaacctcctcattttgatggagaggactacagattttggagtcacaaaatgagtagtcacttgttctctctccatcctagtatatgggagatagtagagagtgaaatgaaatttgatagctcagatagtcctttgtttatcaatgaacagattcataaaaatgcacaagctactactgtgttgttagcctcattgtgcagggacgagtatcataaggtgagcggcttggacaatgccaagcagatctgggacaccctcaagatcttacatgaggggaacgacgtcaccatgctcaccaagatggagttggtggaaggcgaactcgggagattcgcgatgataagaggggaggagccaacccagacgtacaacaggctcaaaaccctcgtcaacaagataaggagctatggaagcacgcgatggacggaccacgacgttgtccgcctaatgctaaggtcctttaccgtccttgatccacatcttgtgaacaatattcgtgagaatcctaggtacacgaagatgacgcccgaggagatccttggaaagttcgtaagcgggcggatgatgataaaggaggctagatacgtcgatgatgcattaaatggtccaatccaagagcctcaaaccattgctctcaaggcaacaaggagcaaggaggcactacctagcaaggtggcgcaagttgaggcggccgggcttaatgatgaagagatggccctcatcatcaagcggttcaagatggcgctaaagggtcgcaaggagcaccccaacaagaacaagacgaaggggaagcgctcctgcttcaaatgtggtaagattggtcattttatcgctaactgtcccgataatgatagtgaccaggaaaagaagagtggaaagtgggaaaagatgaagaactacaagaaggcgaagggtgaggcacatcttggaaatgagtgggattcggattgctcctcgtccgactccgacaacgaaggactcgccgccaccgccttcaacaagtcatcgctcttccccaacgagtatcacacttgcctcatggcaagggaaaagaaggtaaacactcgtaatactagtacttatgcttcttcaagtgaggatgagtctagtgatgatgatgaaatagattattcatgtttattcaagggcctagatagaaccaaggttgataaaattaatgaattaattgatgccttgaatgataagaataggttattagaaaagcaagaggatcttttgtatgaagagcatgataaatttgttagtgcacaaaattctcttgctctagaagttaaaaggaatgaaatgctttcttgtgaactatctacttgtcatgaaaccatttctactttaaaagatgttaatgatgatttaaatgctaaactagaagtagcaaataaatccaactcttgtgtagaacatgttatgatatgcaataggtgcaaagatgttgatgttgatgcttgtagtgaacacctaatttgcatttctaaattaaatgatgaagtggctagtcttaatgcccaacttaagactagcaagagtgaatttgagaagctaaaatttgcaagggatgcctacacaattggtagacacccctcaattaaggatggtcttggcatcaagaaggaagtcaagaacttaacaagccataaggctcccatctccgccaaggagaaagggaaggcccctatggctagaagtgctcaaaagaaccatgccttcatgtatcatgataggagacattctagaaatgtttatagaagttatgatgcttttgattctcatgctatggttgcttctagttcttctattgtgcatgatagaaatttagctaggagaaatgctattaatcacatgcctagaagaaatgttgttcatgtgcccaggaaaacaaatagtgaaccttctacaatttaccatgctttaaatgcttcctttgctatttgtagaaaggataggaagataattactagaaaattaggggcaaaatgcaagggagataaaacttgcatttgggtccctaagactatttgtactaaccttgtaggacccaacatgagttggtacctaagacccaagcctaaatttgccttgcaggtttatgcatccgggggctctagctggattatcgacagcggatgcacaaaccacatgacgggggaaaagaggatgttctcttcctacgtcaagaacaaggatccccaagattcaatcatattcggtgatgggaaccaaggcaagattaaaggcttaggcaagattgcaatctcaaatgagcactctatttctaatgtattcttagttgagtcgcttggatataatttgttatccgtaagtcaattatgtaatatgggatataattgtctattcaccaatgtagatgtgtctgtctttagaagaagtgatggttcattagcttttaagggtgtattagacgacaaactctatttagttgattttgcaaaggaggaggccggtctagatgcatgcttaattgctaagactagcatgggctggctgtggcatcgccgcttagcacatgtggggatgaagaaccttcacaagcttctaaagggagaacacgtgattggtctaactaatgttactttcgaaaaagatagaccttgtgcagcttgtcaagcagggaaacaggtgggaagcactcatcatgcaaaaaatgtgatgactacatcaagacccctggagttacttcatatggatctcttcggacccgtcgcctatctaagcataggaggaagtaagtatggtcttgttatagttgatgatttttcccgcttcacttgggtattctttttgcaggataaatctgaaacccaagggaccctcaagcgcttcctaaggagagctcaaaacgagtttgagatcaaggtgaagaagataagaaacgacaatgggtccgagttcaagaatcttcaagtggaggagtatcttgaggaggaaggaatcaagcacaagttctccgctccctacacaccacaacaaaatggtgtggtagagaggaagaacaggacgcttatagacatggcgaggacgatgcttggagagttcaagacccccgagcgcttttggtcggaagccgtgaacacagcttgccacgccatcaaccgggtctaccttcatcgcctcctcaagaagacttcgtatgagctactaaccggtaacaaacccaatgtttcgtattttcgagtttttgggagtaaatgctacattctagtgaagaagggtaggaattccaaatttgctcccaaagccgtagaagggtttttgttaggttatgtctcaaatacaaaggcgtatagggtcttcaacaaatcatcgggtttggttgaagtctctagcgacgttgtatttgatgagactaatggctctccaagagagcaagttgttgatcttgatgatgtagatgaagaagacgttctaatggccgcaatgcgcaccatggtgattggagatgtaaggccaatggaacaaaaggagcaagatcaaccctcttcctcaacaatggtgcatcccccaactcaagaagatgaacaggttcatcaagaggaggcgtgggatcaagggggagcacaagatgatcaagtaatggaggaagaagcacaaccggcacctccaactcaagtccgagcgatgattcaaagggatcatctcgtcgaccaaattttgggtgacattagcaagggagtaactactcgatctcgattagttaatttttgtgagcattactcttttgtctcttctattgagcctttcagggtagaggaggccttgctagatccggactgggtgttggccatgcaagaggagctcaataacttcaagagaaatgaagtttggacactggtgcctcgtcccaagcaaaatgttgtgggaaccaagtgggtgttccgcaacaaacaagacgagcacggggtggtgacaaggaacaaggcacgacttgtggcaaaaggttatgcccaagtcgcaggtttggactttgaggagacttttgctcctgtggctaggctagagtcaattcgcatattgttagcctatgctactcaccattctttcaggttgttccaaatggatgtgaagagcgctttcctcaacgggccaatcaaggaggaggtgtacgtggatcaaccccctggctttgaggatgaacggtaccccaaccacgtgtgtaagctctctaaggcgctctatggacttaagcaagccctaagagcatggtatgaatgccttagagactttttaattgctaatgctttcaaggttgggaaagccgatccaactctttttactaagacttgtgatggtgatctttttgtgtgccaaatttatgtcgatgacatagtatttggttctactaaccaaaagtcttgtgaagagtttagcagggtgatgactcaaaagtttgagatgttgatgatgggcgagttaagctatttccttgggttccaagtgaagcaactcaaggatggcaccttcatctcccaaacgaagtacacgcaagacttgatcaagcggtttgggatgaaggacgccaagcccgcaaagactccaatgggaaccgatggacacaccgacctcaacaaaggaggtaagaccgttgatcaaaaggcataccggtctatgataggatctttactttatttatgtgctagtagactggatattatgcttagcgtatgcatgtgtgttagatttcaatctgatccaagggagtgtcacttagtggctgtgaagcgaattcttagatatttagtcgctacgccctgcttcgggatctggtatccaaaggggtctacctttgacttaattggatattcatactccgactatgctggatgtaaggtcgataggaagagtacatcggggacgtgccaattcttaggaaggtccctggtgtcgtggagttctaagaaacaaacttcagttgccctatccaccgctgaggccgagtatgttgccgcaggacagtgttgcgcgcaactactttggatgaggcaaaccctcagggactttgactacaatctgagcaaagtcccactcctatgtgataatgagagtgctatccgcatggcggataatcctgttgaacacagccgcacaaagcacatagacatccgacatcactttttgagagatcaccagcaaaagggagatatcgaagtgtttcatgttagcaccgagaaccagctagccgatatctttaccaagcctctagatgagaagaccttctgcaggctgcgtagtgagctaaatgtcttagattcacggaacctggattga

SEQ ID NO: 106027 - DNA, 879 bp, Zea mays
  Clone ID: MRT4577_281C.1
ccaagcagagcatcgcagagaccggcgtcttcgtactcgcctctctctcgcgcttccgagctttggcctccctcccctcctccccgcaatctccccaccagcgtagcgcagcgcgcgcctccgccgctccgacccgcagccatgagggagtgcatctcgatccacatcggccaggccggcatccaggtcgggaacgcgtgctgggagctctactgcctcgagcatggcattcagcctgatggacagatgcctggtgacaagaccgttgggggaggtgatgatgctttcaacaccttcttcagtgagactggtgctgggaagcatgttccccgtgctgtctttgttgatcttgagcccactgtgattgatgaggtgaggactggcacctatcgccagctcttccaccctgagcagcttatcagtggcaaggaggatgcagccaacaactttgcccgtggtcactacaccattggcaaggagattgttgacctatgccttgaccgtatcaggaagcttgcagacaactgcactggtctccagggattccttgtcttcaacgctgttggaggtggaactggctctggccttggttctctcctccttgagcgtctctctgttgactatggaaagaagtccaagcttgggttcacagtgtacccatctcctcaggtctccacctctgttgttgagccatacaacagtgtcctgtccacccactctctccttgagcacactgatgtggctgtccttcttgacaatgaggccatctatgacatctgccgccgctcccttgacattgagcgcccacatacaccaacctcaacaggttcgtttctcaggtcatctcatccctgactgcttcccctgaggtttgatggg

SEQ ID NO: 106028 - DNA, 630 bp, Zea mays
  Clone ID: MRT4577_28200C.1
taacttgtgcctgctgtcgccgccgtcacgctcgatccaatcctgtgccaccatcaccgccggcctcgcgctccacccagtcctatatcccccgtcccggagctcgcactcccccgccgccggccttacactccaccccgtcctcaatccgccgtactcaatcccctgagctccagacctatatcgaggcgccgtcctcgcgctgtccatccagtcgctgtccgcgcacaaccccctccccccaacgtccagccaacgtcatcgtcaatccccgtcctgcggctgccggggatccatctctgggctcccgctgcttccgcacctgctgctgcggggctccatatctgggctcttgctgccgccggagctccatctccgggctgccgctgctgtcggccctgctactgtttgacttctgccctctgctgctgggctccatctccaggctcatgagatccgtccccaagatccgtccatccaccgcccccaaccccaatcccattccacgtccccgagtccccgaccccatcccttactcccttccttggagtcacagcctccgacaactccgtccatcatcgccttgcacctcgggctggagggagtgggcgttactagaatgcaccactt

SEQ ID NO: 106029 - DNA, 304 bp, Zea mays
  Clone ID: MRT4577_28201C.1
aataaatatttttagcggggcaccaaaattcttataaattttcaattttaacattaaccccttttatacctgacctctttttcctaccaaaatgcaccccccaaatttcttggccttttattctaacttcacattaaacactaaaccaaggaaccccaaacacttttggccaaaaatggggtggcccctttttctggcaatacaaaaacccactaaccctacccccccggaaaaaaaaacaaaaatttgccagggggcggccaaccccaacaaatcaacactaatattttccctcaagagcccc

SEQ ID NO: 106030 - DNA, 220 bp, Zea mays
  Clone ID: MRT4577_28202C.1
atgattttcaagattttatgtgtgcatatattgatgttccacgctgcttgagtcatcttcaatgtcacgtggacctggactccaatgagatggcgtacatttattaattactaaatggattttatgcttttagagtcagaactaatcgtcagctctgaaaatggtgccatttcttactcatcaagccgttcagatgctaatgactcagcttcttccctat

SEQ ID NO: 106031 - DNA, 848 bp, Zea mays
  Clone ID: MRT4577_28203C.1
cctcgaggccggccgaattcggcacgaggcccacacgaattgccgccaccaccccacacgacatcctacaaccccagcctcattccaccgggcccgcacctcagaccacaggtggacgaggccacctgccggccagcttctccggccaccaccgtcgaccgtgtaaaacttgcactgacgaagcctaccttcttatccggcggcggggccatggggttctcgctgtaccccaccaagtcgtcgacgcgcacgccgttgagcaccagcttcttccgccacaagttcccggccgccgcggtgtccttctgatcaggctagctccggccgcccggcggtcgacctcgctccgcgcttcaagaagaggtggaggagcgtacatacagacacgagcgccgccgttggtgggtggtgcggcggacgggcggcgcaagcggccgttccagctgacggcgcacgatgagctgcagctgcagctgcagctccagctggacgacgagctgtgcggcctggactacgagctccatgggccgcagcaggagcggacaacgaagcggcggctgacggcggagcaggtgcgggagctggagctgagcttcgaggaggagaagcggaagctggagcccgagcggaagagcgagctgggcgcggaggctcggcatcgcgccgcgccaggtggccgtgtggttccagaaccgccgcgcgcggtggaggagcaagcagctggagcaggacttcgaccgcctcagggccgcgcacgacgacctcatcgccggccgcgacgcgctcctcgccgataacgatcgtctccgctcacaggtgatcacgttaactgagaaactgcaaacgaa

SEQ ID NO: 106032 - DNA, 224 bp, Zea mays
  Clone ID: MRT4577_28204C.1
ctttctttcttcgcctggcgttcccgttccctgccacctcgcccgctcttctcccccctctcgaccatctcctcgggagtagaggggggctgctttgggcgtggtgcggcccccagatctgggtcggcgggcggagggcgggatgaagtcgtcggtgatgagccggcaggagccgcggtgggtcagcaatggcgtcatcatcggtgccatgctgctgtccctct

SEQ ID NO: 106033 - DNA, 148 bp, Zea mays
  Clone ID: MRT4577_28205C.1
gaatttttgatttgtttttcttttttgaatacaacacaggggatgggcctttatctaaaagcccggggagatgcctggcccaaggtagtattggtggtacatccggttgcaagatcgtttatttaaaaactaacgctcgtcgaccacg

SEQ ID NO: 106034 - DNA, 259 bp, Zea mays
  Clone ID: MRT4577_28206C.1
tcgatcacaatacatatcagccgtttattcaccaaatcaaatctgcaacatcgggtgtctatcttcaaaaaccatgaagctgctgcttgtggtacctgcttccatcgctttacaatcaagcgtatcttgtacacagacaggctgtacgttttttttttttttttctttttttttagcagctacatctttcacaacaacaatgttccacacatcaacttcattaaccatcacgacaatatcaccttttgcatcaacacca

SEQ ID NO: 106035 - DNA, 221 bp, Zea mays
  Clone ID: MRT4577_28207C.1
ctcgaggggcgcaattttttttttttttttttgcaaaaaaacaaaaagctactggctcaattgccataatataaccgggttcttctgctgactctacacagagggccaaaaactagtctccctgcacagcaccgcctccaggaacttacccgtcgaccacccatgccgaaagcagctcccagaacgactcaccccaccctgtcgacacccccgaaaactgc

SEQ ID NO: 106036 - DNA, 218 bp, Zea mays
  Clone ID: MRT4577_28208C.1
cccacgcgttcgagcgctcagtagtcattagcagttcccgggagcaaccaaggagggggggcatctgtctgggccgcaggtgagagccgctgctaaaccggatgcgttaagcgggcttctactgacaccaggcttagtggtgcctaaggggctagagggccaggggcctcgtggtgagggccgccacggtcgagacaactaagtatacatccataaaa

SEQ ID NO: 106037 - DNA, 360 bp, Zea mays
  Clone ID: MRT4577_28209C.1
attcggctcgagtctggataaggctttagctattgaacacaaacgtgttcagctgggtgagatgaagaggaaggctatcacccaagggtaggggagcagtagcatccgtccttgctatgttccaccccagggtacaccaactcgtcctggaggaggacagcgacaagctcagtatacaacacaccgactcgtggtaattctcagggcaagcagacatagactccaagaagcaactgtggttacaacattgccagggttaatcaattcaatgttgaagctactgaggatggtcccaacatcgtcattggtacgttattcattaattctgtgtcaggtactatactttttgattctggagat

SEQ ID NO: 106038 - DNA, 4759 bp, Zea mays
  Clone ID: MRT4577_2820C.1
tcaatccaagttctgcgaatctaggacatttagctcactacgcagcctacaaaaggtcgactcatctagaggcttggtaaagatatcggctagctggttctcggtgctaacatgaaacacttcgatatctcccttttgctggtggtctctcaaaaagtgatgccggatgtctatgtgcttggtgcggctgtgttcaacaggattatccgccatgtggatatcactctcattatcacataggagtgggactttgctcagattgtagccaaagtcccggagggtttgcctcatccaaagtagttgcgcgcaacactgtcctgcggcaacgtactcggcctcagcggtggatagggcaacggaggtttgtttcttagaactccacgacaccagggaccttcctaagaattggcacgtccctgatgtactcctcctatcgaccttacatccagcatagtcagagtctgaatatccaatcaagtcaaaggtagacccctttggataccagatcctgaagcaaggcgtagcgactaaatatctaagaattcgcttcacagccactaagtgacattcctttggatcagattgaaatctagcacacatgcatacgctaagcataatatctggtctactagcacataaataaagtaaagaccctatcatagacccgtatgccttttgatcaacggacttacctcctttgttgaggtcgacatgtccgtcggttcccattggtgtctttgcgggcttggcgtccttcattccaaaccgctttagcaagtcttgtgtgtacttcgtttgggagatgaaggtggcgtccttgagttgcttcacttggaacctaaggaagtagttcaactcgcccatcatcgacatctcgaatttctgagtcattaccctgctaaactcttcacaagacttttggttagtagaaccaaatattatgtcatcgacataaatttggcacacaaaaagatcaccatcacaagtcttagtgaataaagttggatcggcttttccaaccttgaaagcattagcaattaaaaagtctctaaggcattcataccatgctcttggggcttgcttaagtccatagagcgccttagagagcttacacacgtggtcggggtaccgttcatcctcaaagccagggggttgctccacgtacgcctcctccttgattggcccgtttaggaaagcgctcttcacatccatttggaacaacctaaaagaatggtgagtagcataggctaacaatatgtgaattgactctagcctagctacaggagcaaaagtctcctcaaagtccaaacctgcgacttgggcataaccttttgccacaagtcgagccttgttccttgtcaccactccgtgctcgtcctgtttgttgcggaacacccacttggttcccacaacgttttgcttaggacgaggcaccagtgtccaaacttcatttctcttgaagttattgagctcttccctgaaaggctcaatagaagagacaaaagagtaatgctcacaaaaattaactaatctagagcgagtagttactcccttgctaatgtcacccaaaatctggtcgacgggatgattcctttgaatcgtcgctcgaacttgagttggaggggcttgtggtgcttcttcctccataacttgatcatcttgtgctcccccttgatcacacgcctcttcttgatgaacctgttcatcgtcttgagttgggggatgcaccattgttgaggaagaaggttgatcttgctccttttgttcctgtggcctcacttctccaattgccatggtgcgtatagcgaccgttggaacttcttcttcatctacatcatcaagatcaacaacttgctctcttggagagccattagtctcatcaaatacaacgtcgctagagacttcaaccaaacccgatgatttgttgaagaccctatacgcctttgtatttgagtcataacctaacaaaaacccttctacagctttgggagcaaacttagaatttctacctttctttactagaatgtaacatttgctcccaaatacacgaaagtacgaaacattgggtttgttaccggttagaagctcatacaaagtcttcttgaggaggcgatgaaggtacacccagtttatggcggggcaagccgtgttcatggcttcggaccaaaaccgctcgggtgtcttgaattctccaagcattgtccttgccatgtctatgagcgtcctgttcttcctctctaccacaccgttttgctgtggtgtgtagggagcggagaactcgtgcttgatcccttcctcctcaaggtactcctccacttgaaggttcttgaactcggacccgttgtcgctccttatcttcttcaccttgagcttaaactcattttgagctctctttagaaagcgcttgagggtcccttgggtttcagatttatcctgcaaaaagaatacccaagtgaagcgggaaaaatcatcaactataacaagaccatacttacttcctcctatgcttagataggtgatgggtccgaagaggtccatatgaagcaactccaaaggtcttgatgtggtcatcacatttttggtatgatgagagcttcccacctgtttgcctgcttgacaagctgcacaaggtctgtctttttcgaaggttacatttgttagacctattacatgttctccctttagaagtttgtgaaggttcttcatccccacatgtgctaagcggcgatgccacaaccagcccatgctagtcttagcaattaagcatgcatctagaccggcctcctcttttgcaaaatcaattaagtagagtttaccatctaatacacccttaaaagctaatgaaccatcactccttctaaagacagacacatctacatttgtgaataagcaattatatcccatattacaaagctgacttacagacaataagttatatccaagtgactcaactaaaaacacattagaaatagagtgctcggatgaaatggcaatcttccctagtcctttgaccttgccttgattcccgtcaccgaatatggttgagtcttgggaatccttgttcttgatgtaggaagtgaacatcttcttctcccccgtcatatggtttgtgcatccgctgtcgataatccagcttgaacccccggatgcataaacctgcaaggcaaatttaggcttgggacttaggtacccaactcatgttgggtcctacaagattgcgatccgtttccgagcttcgaggaatcaaagatcaagcgtgggcgaccaagtgatccagttctttgagttccacgagattgaagacctgagcatcagtttggtgaagggtgcctttctaggaatccttgttcttgacgtaggaggtgaacatcttcttctcccccgtcatgtggtttgtgcatccgctgtcgataatccagcttgagcccccagatgcataaacaaaagaagaacttgaagcaatcatagcatgtgaatcataagcataactcctatgagcatttctagaaaattttctataactatagatgaaagcatgattcctttgagcactattagccataggggccttccctttatccttgacgggaatgggatccctttggcttgttaagttcttggcttcctttcgaaagccaagcccatccttaattgaggggtgtctaccaaccgtgtaggcatccctagcaaattttaatttatcaaagtcacttttgcaagtcttaagttgagcattaagacttgctacttcatcatttaatttagaaatggaaactaaatgttcatcacatgcatcaacattaaaatccttgtataaaatgtcttcttgcttctccaaaagtctatccttctcatttaaggcatcaattaattcattaattttatctacctttgctctatctaagcctttaaataaatcggtatgatatacttcatcatcgctagagtcatcatcacttgaagtagtatacttaggagtttctcgaatgcttacctttttctcctttgccattaggcaggtgtggcgttcgttggggaagagagaggacttgttgaaggctgaggcagtgagtccttcgtcatcggaatcggaagacgagcagtccgagtcccattcctttccgatgtgtgcctcgccctttgccttcttatagctctttttcttctctttcttcccgccctttccttgttcctggtcactagagttatcgggacaatttgctataaaatgaccagtcttaccgcacttgaagcaggagtgctttccctttgcattgttcttgttagggtactccttgcgtcctttcaatgtggtcttgaagtgctttatgattagggacatctcatcctcgtttagcccggccaccacaacttgtgccaccttgctaggtagcgcctccctgctgcttgttgctttgagagcaacaggttgaggctcgtagacgggtagagggccattgagagcatcatcaacgtatcgcgcttccttcaccatcatccgcccgctcacaaatttcccaagaatctcctcgggagtcatctttgtgtacctgggattttcatggatgaggttcacaagatgaggatcaataacagtgaaggacctgagcataagtcggacgacgtcgtggtccgtccatctcgtgcttccatagctcctgatcttgttgaccagggtcttgagcctgttgtacgtttgtgttggctcttctcccctgatcattgcgaaccttcctagctcgccttccaccaactccat

SEQ ID NO: 106039 - DNA, 566 bp, Zea mays
  Clone ID: MRT4577_28210C.1
ccccgcgtccgcccagcgtccgctgaccctggttagcttctgctttttactccatgcaaggacgacaatggcgaccgcctccgtcgccacctccctccccttcggcttccttctccctccgcggctattccgtgggaggctggtgaggtggcggcggcagattagggcttcggcgtcgagcaacgcgagtaacgtcgcaggcggggagaggaaattgggggctctcaagggcaagatccagaaaaacattggcccaaattttgttgctggtttctgtgttggcattgcatttttggctgctgttgcaagacagatcaccttaagaagtcgagagcatgataataaaggtgctgttgctgatctagtaaggcgtggacagttaaaatcagggcaacgagggactgcaaagccccgcacattcgatgatcctttcaataatccattagtcaagattgatgagggtacatctactgcacaaatgtttggcaaggagtaccgtctggctcctgtgaggcttacaaaagaggaacaagaaatgcatcagaagaggagatcacgtgcatatc

SEQ ID NO: 106040 - DNA, 1312 bp, Zea mays
  Clone ID: MRT4577_28211C.1
gtcgaccgcacgcgtacgtaagctcgggatcggccgcgacattacagggcagcgtctctctccatcccccggagcctcctgaccctggttagcttctgttttttactccatgcaaggacgacaatggcgaccgcctccgtcgccacctccctccccttcggcctccttctccctccgcggctattccgtgggaggctggtgaggtggccgcggcagattagggcttcggcgtcgagcaacgcgagtaacgtcgcaggcggggagaggaaattgggggctctcaagggcagggtaggagatctgagggcgcttgtcgcctctatgcctgatgccgttggctcgatccagaaaaacattggcccaaattttgttgctggtttctgtgttggcattgcatttttggctgctgttgcaagacagatcaccttaagaagtcgagagcatgataataaaggttctgttgctgatctagtaaggcgtggacagttaaaatcagggcaacgagggactgcaaagccccgcacattcgatgatcctttcaataatccattagtcaagattgatgagggtacatctactgtgcaaatgtttggcaaggagtaccgtctggctcctgttaggcttacaaaagaggaacaagaaatgcatcagaagaggagatcacgtgcatatcagtggaaaaggccaaccgtgtttctcagggaaggtgattccttacctccagatgttgatccggatacagttagatggattccagcaaaccatccctttgctgctgcttcaagtgaagtagatgaggagaccgccaaacaaaatgtctaccaaaaggatggcatcccatcccgtgtcaaggctgagcatgaagctttgcaggcaaggctagaggcctcaaacgatgttaccagactcccttcggatccaaggagtattcagcgtaatgagagaccaatgaaattgtcaggcaagccatctgaaaatcttcagggctccaagtttgagaaccaagatagacaactggctattgagtctggtaaacatagctctgatggaagtttacaatcaaatgagccggaagggcaataaaaatttgtgtacttcagctcttcgaagacatttgctttgttacgtagtgttatcagcttttaggctgtagctgtagatagagaagttttggaacagtgcttggcttaccggtttacatagtgagcagttaatatgcgagttgcttgacgtgttgggaccgaatggataattattttgacgagccaatcacacagacttgaagtagtatggactgcagagccgtagattt

SEQ ID NO: 106041 - DNA, 325 bp, Zea mays
  Clone ID: MRT4577_28212C.1
cttgctcaaaaaaaaaaaaaaattaatatttaaaaaaaaaacaaaaaaaaaacacggaaggggccaaaaaacaacgtaccgagagccgacaaatggcaacggaggcaaaagaacatctggaaggccacgccggcaacgtactgtgacgaggcatcggcggccgcgaatgggatgagctgctgctggggcgaagtactttggccgtactacctgtaatacatccatgacctgcagctacagatccggcagaagacccataacctcaaccgactcgaggtccaccttaacgacctgaacttcagagttagaatgctcagggatgatt

SEQ ID NO: 106042 - DNA, 2199 bp, Zea mays
  Clone ID: MRT4577_28213C.1
acgggcgcccgccccgccccccgcccggtctccgtgttcccgaacccccactcctcctccctctccgctcgccactcccgtcgctcctctcctccacgcctccctcgctcgctcgccccctcgtccggtcgtccctccctcgctcgtcttggcatccccgcaaggaatgtcccttccgtagcgtcccttgcttcttccccaccccatcctgtattatccccgcaaggaatgtcccttccgtagcgtcccttgcttcttccccaccccatcctgtattagtgcgttctctgccgctttattttccggtttctttgggctctttcgccgccttggatcttggttgcctcatccggttcataggtaccttctttaacctttgctgggactccattgatgcactctttggttgtttttcggtggagcatttcgtcgaacacaggggcggagggcccagtatggtccagaaatcaaagtaaaaaaaagccctagtgtcttcgcatcgcgctccccgcacacagaccgaccagccgcagcccgtagcgcacctgcctgcgcccgccgcctccgtcatccactcaactcgcgtcctcgcccctcggccactgccgcccggcgcccgcccgcctgccgcaccggccgaatcatccgacggcccttaagctgaggcggtgtggcctaagttgcagcgcggcggtcgccccgagtcgtccacttcggccccgacaggctgtccacggtggcgcgaactgcccctcgccggttcggccccgcccgcccgtagcagctcaccagagaactagcctctcgtcggccttccccaggtctgcgcgtggcgcggcgccgcagcaaagctccacgcgtgcgtgtccgccacccgccgtcccggcccgggccgccgtcgttgctcgtcggtgaacgacgtctcgctgggtatcagcgcgttcttcgagcggcaggaacgacaaacgggagaaggaagagaactcgtggggaaggcgaagcgggacgatgcagcccaagatcagcgcgttcttcgagcggcaggagacggacccagatccgattagtggcgacggtgaggggaacgggcagggaaacgtcggcgcggcgacggaggcgaagcggaaggccaatggctgcaggctcgatgggctcgtcagcaagaagaggaactacgcgcagctccatctggagctagggcagcctgatttcgtcctccacacgtgctccgtgtgcggcatgatgtacgcccgagggaacgacgaagacgaaaaggttcacagggcgtaccacaagagctactccgagggagtccctttcaagggttggaaaaaagagacagtgatagcgaggtccgagggcggtgatcgggttgttcttgcaactgacgagaactcttgtatgtcgaaaagtaaggtcagagaggtgatcacagtggtggagaaggagctgggatttggtgaagggaaactcctgcataagctttgcaaggtgtatctatacatatctgcacaaaggatcgtggggtgccttgtcactgaaccgataaaaacaggacatagagttatcccaagctccacggaaggaagccctaatgatttgccagttagtagtactgagcgaggaaaaaatggtcatacattagagttcggcagtattagtttcaagagggaaatcataaggcggcacagtcgttcggtcaagaacaaagaagagtgccaggaccctggtgccatactttgcgaaacggaagctgttcctgcgctttgtggatttcgagccatctgggtggcaccatcgtgcagaagaaaacgaattgcctcaaaactaatggacgttgcaaggaaaaccttctgcgaaggcaggactttggggatttcacagtttgctttctctcccccgacctcctctggcaaggggctagcatgccgttactgcaagaccagtgcattcttagtctacaaagacggaccggtgtaacacttgtactctaagaaagccctctctgaaacttttcttcctcttgtaaaatacgcttatcttgttggagcatttgacaaaaaaaatgtaaacaattagatcaatatgtattcaggtagaccagaaattagcgatgctttgtaacaatgtagctttctcttttgagtggtgacaatagctttcttgtgatcttcataaataacttttcaaaaactcaaa

SEQ ID NO: 106043 - DNA, 160 bp, Zea mays
  unsure (1)..(160): unsure at all n locations
  Clone ID: MRT4577_28214C.1
acagggggacacccaacatcntgttccacttacctcccatccatcactctcgagcttgtcacattataattttcacacaccacaaacttgcatntacaatatccatcaatacctacctccactattaagctcaatctatttattggaaaaataaattaac

SEQ ID NO: 106044 - DNA, 780 bp, Zea mays
  Clone ID: MRT4577_28215C.1
ctagcgtgcgtttcgtaagccgagtagccgaccacgcgaagcatccagcagtgctcaactctgttcgccaccgccagtctgccacactccatgccccaccaccacctcgccgcctcgaaggcagaaccctaggcagcccccaatgccgccccaccgcctccttccccttctcctcctactcctgcctctcggcgtctccggcgccgccgctgccggggggaacgccacgtcggcgccgctcccctgctccgagctctcgcgcgtctgcacggccttcatcgccttcccgactgccggcgcggggcccgccaatgccacggtgctcgagtccatgttcgacgccgcgccgggcgacctcacggccgacgccgcggccagcccgaggtacgccttcgtgcgtaagaactgctcctgcctcccgtcccgcacctacctcgccaacaccacctacaccatcccctcctccgcgacgacctccttccccaataccaccgccgccgatgtcgcggctgcggcgtactcgggcctcgccgtgccgccgcctggcggggcggcgcagcgaccgccgcgaccgggagcggttgtggcgctccacctgctctgcggctgctcgtccgggccctggaactaccttctcacctatgtcggcgtcgaaggggacacagtggaatcactatcgagtaggttcggggcgagcatggatgccatcgagactgccaatgccatggccggccccgaccccatcaccgcgggaaaaggtgtactacatcccactcaact

SEQ ID NO: 106045 - DNA, 113 bp, Zea mays
  Clone ID: MRT4577_28216C.1
attattcccaaacatgagggcggaactggctctccaccggttccaaaacaacaaatattccatttgattttgggagaaccaaatcccctggttgctttaaccggaatttttcc

SEQ ID NO: 106046 - DNA, 334 bp, Zea mays
  Clone ID: MRT4577_28217C.1
atgcagggtttaagcccaaaataatacaagaataataatcacatgtgcacatgtctatggaaattgaaatatgagggctcatgcccagtaaatcaaaaactacattggttggcatcactcttgttagtcgtctattgcaggcaaatatcatattcatgctaaactaaattatgaatgtttctacttggatgaaactatggtcaggagacttctttatacccatgctcttcccatatgccctcttattttctgtgtcatcccactgaccaccttcaacatgtaaatttgagatcaacacacgtgctcccacattataagaactaatttaattaca

SEQ ID NO: 106047 - DNA, 797 bp, Zea mays
  unsure (1)..(797): unsure at all n locations
  Clone ID: MRT4577_28218C.1
cattgggtacctcgaggccggccggggcagcgctctctcttggctcgctcgctcgctcgcccgcctcgcctgcgccctctctttcactcctggctcgcttgcgttgtggagctcgggactgtcgccattccgctacgagaaaccctaaccctagccctcgcaccgccgcgggaggccgcgggagagaccgtgtcgcaccgcgccgtcgatcccgatccagacgccgtcgcgccgtgccgcgctgatcgagtgtggaggaatggaggacgggcagaatatcagattgcttgcagctagtttatttttccagcccagggtgaacttctgggtagtgtagtttgtcgtgggtttatcttctgcagaatagaagcaaatatttgtaaaagctgcttatagttctatatgatatgaaagtttgggaactatcaactgcaaattggccactctttctcaggcattagaccctaagggatactcaaggaatgtcacattttcatcccacacagcatgctagtgacaatgattttcagatgtggcaacagcagatgatgttcaagcacttgcaggagtttcagaggcagcaacaactacagcagtctgatcatggagccaggatgcagccctcttttggacagtttcatgctcctgcaaaacctttgcctggtgatcaattgtcgacaatgtcaaatgaaatggtcaacaatgagaccatgaattctggatggccacataattttacaggtggtgacctgagtttgacgagcaactcccagatgttngacaatggtagcacaaat

SEQ ID NO: 106048 - DNA, 128 bp, Zea mays
  Clone ID: MRT4577_28219C.1
accaactagcaacatataaagctcttttacaattccaacaatggcagccatagggtgttgccttcttatgctacttggtctaacatctattgctgctactgttaccattttttcacattgcttacatg

SEQ ID NO: 106049 - DNA, 2532 bp, Zea mays
  Clone ID: MRT4577_2821C.1
atgtctgaggagaagaaagttgtggacccttttcttgctgggttttacgaatctatggcaaaaacaaatacagagaagatcacaaaggaaataatggcagatttgtctgaagattctaacgatagcgatgactatgatgtggaaagtggggatgaagattctaaagaccggccctggcggccaagccataccatcttcggaaagttgaccgttaaacaaagtcagattgacgccatgaagggaagatactttcatgatatgtctattgtgagggttggaggggacaacaccgcccctgctcctgaagaaaatgaggttgttgtctacagaagctttatgaaggcgggtcttcggttcccattgagcaaatttttggttgaagtgttgaagatatttcagatctttcttcatcaaattactcctgaagctataatcagaatgagtttgtttgtttgggttgtgagaagccaagggctggaaccgagtgcgaagtgttttttcaatatgcacgaatggttgtacgagacgatggccactagcaaagagaagtatcacaacaactttggttgttatggcttcgtagctcgttctaatgcaagctactcggttccaacatttcggaaaaggtggcacgaggcctggatggaggaatggttttatgttatgaataatctgattgaaagggaggacataaaggggattatccaatgccccatctggtctcgcttcggccttcgaaggccgactgtggcgattgaaaatgatgtcgaagcgtgtcaaaaggctttcagcaatgtctattcttttattggtacaagagacctgatccaagagcacatagcctacaggggaaaaaagaggaaaactgccacttcggccatctctgttgtgccgaagggcaagaaaatcaatgttttgacccaccgaccaagatatattgagacagccatagtgccaaagtttggtgaagagacatcttccgctgccgaagcggaacaagctgctcccaccgctcggagcgttgaggaatcgactatagtgctgaaggtgcctatatttgagccagtcaaagccgaagatagggcggccaaaaagccagagtttgaaaaaacaatagtgctgccagaaattctgagcccaccagtacaagcagaattaccgaaggttgcaaaagctcctgccacaactcccaagaggagaagaatggctagcatactagacgctgtcatggagacaacaagagcattaactcctgctcctgtaaaaaaggttgctgaagctgctacgactcatattgaaaccgaagttgggccttcaatgcctgctgagacaaagcctaccgtaactgaggaaagagctaagcaaaaatctccagatattggcatagctatggagaatgaagtggccaaagaagctaaatctcctgctcccaaagcaccgtccgaagatctagactatattattcgacatgcttcgggaaaaagtttatccgtaaaagaatttttagaagccaaacactatgcccgagaactgaaatatccgaagggggccttagtgttcaatggcacggacgaagatgatttcctgtactgtctcccggacaacaaagagatatccgtctgccgggagatggccaaaagtatgggatttccaaagctcgaagctggcctctctgccatgtcgaaggatgaccttgcggacagcctcgcatacaacagtatgaagggcttaatccttagcaacgtcctgagggcgcaaaagaatgctgaagacgaaagctgcactatagctctcggcaaccttcgatcagaaggcattaagctgagaaacaaagtcttggagaaggacaagattctactttcattggtggataaagtgaaagaatatgaagtaaaatttaacactcaattcgaagcttataaggccaaaattgaagaccttcggaaaaagcttaccgaggctaatgaaaattgtgcactcgcaaaagctagtcaagaaataagtgaatggtcgaccaccaggttggagaaaaatgttgaggagcttcgtgaatccaaggaaagatgctttgaaaaatccttggattgcgtgaaaaaactgaaaaccagctttgccaaagtaggtgcttattcttccaaagagaacttcattcgaggcgaccccgagggcgttattgattggataagaagggaagccaatgcttttgaagagatcctaagcgatcgtggggatatctatgcttttactggcgctcgaggtattgtggcaattttggagaaggctggttgcgaccatgttaaagctgcggcccaggctgaagccaccttctccacagacgacacgaaagacccttcggccaaagctactttggtgggcggaaaattttattccgatgtctgggtgaacggtggccgggaattggccaacaaaatcataaagaagaatgaaaaagaaacgcatgaagcccaagaagaagctaggcgagccgaagaagctgctgaacgtgaaaggcgcatatgtatttgtttttga

SEQ ID NO: 106050 - DNA, 374 bp, Zea mays
  unsure (1)..(374): unsure at all n locations
  Clone ID: MRT4577_28220C.1
aaaaacgggcagacacacgnaggaggagaggacngcggaaccccaacggacaancnacccacacaggcggggggacgnacaagcagggggccgggcaacgggggggggggggggnnncnanncacaaacagaggnnccgggcngggnaacccancgccaagcncagggnaaacaggcannangggggccaaacagaccagggaacacnncgnaagggccncangcgacaanaggggaggaggcacacgnagcaacaccggacagggncnggcccannnccagcngggaggaacccncancgccccagncagcgcccncagaggncnnggagagccagnaggggacaccancnncgacaccggagccaacagcca

SEQ ID NO: 106051 - DNA, 238 bp, Zea mays
  Clone ID: MRT4577_28221C.1
attattatttatgtattttacaaaaaatcgatttgtgttgtttacttttgacatacacttaacaaaatggggccccttccggtggcacattaaaaattgggcttacagcaggaaggaacttccccaaattgtacaatttaaatctcgttgatacatcttatggagctgtgattatttttcccgctgaacaatcccttccgtttttgtcgattgggggaacaatgtgccctataaactc

SEQ ID NO: 106052 - DNA, 463 bp, Zea mays
  Clone ID: MRT4577_28222C.1
ccggccgggggctccgcacggatcccccactcagaaaacccagccgccgccgcatgggcctcccaggtaagcagtgatcgtccaccccagccgacgccatgaagcgcaacccccgcgtcacgagctcccgccggaagtgacgcaaggagcacttcacagtcccgtgcctcaggctgccgcgtgctcatgtacagcggtgctatcgactgagctacggcaccagcacaatgtggggatgcatcccgatccgcaaggacgacgaggggcaaggcgtgcggggaacctacaagggtcgagagggcaaagtggagcaagtgtaccgacgttgctgcttcatccacgatgagcgagacacccgatggaaagcgaactgatccaccgcggacgggtatatccaaccttgcaagggcatggctacaaagctgaagattgacaaggtaccgaaggcgctcctctaccgcta

SEQ ID NO: 106053 - DNA, 525 bp, Zea mays
  Clone ID: MRT4577_28223C.1
ccgggtctcattttcctttcttcggtgcatcaggggggctgctatggaccgccaaggacactctcgctcttgatagatacatagccacagctgctggccggtggcacgttcgagggggtggcgcacttccatctgcgtgacttgcgactcgcttcgtgttaggtcctagaacggcacgatcaactcttgccaatacatccattacctacttgcacgcggctgctcacgtacagattatctgtcggaacttctactactcatggcctactcagaataagttagtccacagtccttggctagctagtcctctgaagtgtgccttacatacttgatcatacgctagtgtttcatccacaattgagtgagatgctgtgcctgcgctgacaaatactccagattgcgagagccatgcagaaaccatgtcatccctaccaatatccccaccggaagtagacagctcatacaaacaaaccatgtacttcgggagaactcccactggacacgtgattttttgttcgctacatc

SEQ ID NO: 106054 - DNA, 247 bp, Zea mays
  Clone ID: MRT4577_28224C.1
aattccgatatagccgggtcatgcatatcataacctatgcttaccgcgtgctaacaatggttgggggcgtgtccaactgctgaaagatgccccatctcgtgaagctgcaacacaaaggctctcagaatccatctgaggaccatcagcgtatactgttataacgttggctacaacaaccactgtatcctgatcttacattggcacacacttatcaccagaggggacaataaatgaaataacgggaccg

SEQ ID NO: 106055 - DNA, 372 bp, Zea mays
  Clone ID: MRT4577_28225C.1
gagtgctgcagccacagaatcagttgctgctgacaaaaagcttgctatatttgataaaatattttctgcataccatgatgctcggagctgcatccgcaatgacctggcttctgctggcaatgctgaggatataaaagatgacctgaatggtcttgacaaggctgttagtgctgttctaggattgagaactatagaacgtaaccagttacttgttagcattggtaaaagtaaattcacaaagcatcgagatgaaaaaaatgagcgaatcacaaagccagaagaacttgttcggctatatgatctgcttattcaggtatgtttgttttctgtcacatcctctttttagacatatttatcatgtctttactagac

SEQ ID NO: 106056 - DNA, 271 bp, Zea mays
  Clone ID: MRT4577_28226C.1
tgatcctgacgagccaagcccaccaacgggcgaatgttttgaaatcactggggggtttccacacctccaggaaatcaactgggcgccgttagacaacgtcccgactggaaaatcactggccttaccgaactcagtggccgtgtggcacatctgtttttccgcagccggcgccatatgtaacaggccccccccgcgctggctatccaacaggagggcaccctcaatggccaatggaacgacgcctgtagcaaggcatccatcgccggggacg

SEQ ID NO: 106057 - DNA, 764 bp, Zea mays
  Clone ID: MRT4577_28227C.1
gcactaatggtcaaattaagaaaagctagaagccacctaaacacgtatatttgagacatcacattatttacaatcactggttactggaataaagattagagaagcattttggatgtataggtgacaaacatgatgcaacaatcaggatgcatgttcatcctatccgtcttcacaagtttttccaacataatgtgacaataacgttctatctcggtggcataactatgtctctcgatatattgctagtcgtcagctacacatacgagtttgaagttagtgtacctgcagaaaatttcatcacaacccatttcccaatgatgcaattcacacatgacagtttatcacaaattatactccatatatttctatatggaggccagctcatcattaagcgccgagccacgcataggcaccgttgccacactttaaccatagggcatctcattatggtaactcaccttcttacctgagcgtaggtgcgtcgttgcaagtacattacacttctcagtattcccatgtctgtatacccatacacatccatggggtactgaattcccggaaaagtaaatactccacatcgcagccttcatatatacatatgtaaaacatgtatataatcaagcgttgtttatgctctcccctagaccgacgtttgttcggtcatgctctcacatctcaccttacctgagcgtcgatccattcaaaagtgaatggcctcaaaaataacattacacatgtatgcattacccttcccaagttgtggt

SEQ ID NO: 106058 - DNA, 312 bp, Zea mays
  Clone ID: MRT4577_28228C.1
gtattgatattctacaactacttatgggggggacacagggtttttaaggcaaggggaaacattggaccaccgccttaacccctaggcgagcaagacccctaaaattattcgagcgcctggacccctaggcgtaatttaggggcgacgccttaaaaacactgggggtatatgcatagcatgggtcataaacctgattactacctgggtgggtcgacccaagcttttaaatattcttaaccccaacatgcaacccaatcaaccaagatttcttgaattggttttggcaactaacaaaatgtaaaattggggaca

SEQ ID NO: 106059 - DNA, 308 bp, Zea mays
  Clone ID: MRT4577_28229C.1
cctcctttttttttttagcttagttcatcagagctgggtgcattagatgcccaaaagggggttcaacattgaatgggagagccaacattcttggatgtaaaggaagacctatggcagaaggatttaaaccatgcaccacatttaccacattgttaccgatgaacttttaatagggcacttgtatttgaggtgcttgcatactatgcaaaggattctagcagaaatgaggcacgggcccatgaatagaacaatgtccagcttgattatcctgagtatttccatttggcatgtctgaatttccaggaacc

SEQ ID NO: 106060 - DNA, 492 bp, Zea mays
  Clone ID: MRT4577_2822C.1
ttttatttttttgtctttttttttctcttttttttttcttttttttttatcttttttctttttgccagcaccggcaagctggccaaaaatacgttcttttagaggcccgcggaggtctccacgcaaaaaaaagagggggtcgtccttaacgggaaaaaagaacaccatgtgcctatgggctgccaaaccagaaggccggagcttttttccagggagtcacataacagggcgccgcccctacacctatttgaaaccggaacccaaacaagaccggtgaagtcaatgagaacatataccagtggctcccggagaccacctcgcaaaactttataaaaagctcgtcgtctaccccctccacaaaatacagcaagaaagggggttttccccgccgccgctttcgaggccgacatactcagtgacatagctagggccacagggggacggttttcacaacccctgttcgctggcctacacttgccactgctatggggg

SEQ ID NO: 106061 - DNA, 372 bp, Zea mays
  Clone ID: MRT4577_28230C.1
gttgatgcgttttgcatttacctataccgttgctaatgggggagtatatagcctatggaaaaaaaaaaaaaagaaaaaaaaaaaaaaaaaaaaaaaaaaagggaaataataaaaaaaaaaaggacaggggggggccaaggtagagaaagcatttttaaaacagcgtggaaggggacgtagacaatgtgatatggggtcaactaaatgaaatttaatggcggtagatttacaaggaggtgactgaaaaaaaccgggggagcctaaaagaaatgggaggggattaaaagcaactttggccaggtggcataataaaaaaaaggccctcacaggccgaccatcaaaaaagttatataaactgaaggagggaatggg

SEQ ID NO: 106062 - DNA, 510 bp, Zea mays
  Clone ID: MRT4577_28231C.1
cattgggtacctcgaggccggccgggaatgccctaaggcccggccagtgctctaaagccaggtcattgtccaagtggaaggatcaacatgacccttgttaagaagtataagcagtttccataactgcacctgtcgtcggctcaacaaagggacgtggtatatatggcacctgttcggacgtggcccacaatctcaagacatgtcttctgtgtaagctggtgccttcatgcatctcctttatatataaataacaaagcaataaaggaattagaatcagaccgactaaaaaaaaaaaaaaattattttctctgggaacggattaaaaagagcgaagctgaattgcttgctgagaagaaatgcgttgcccatcttacaggagaggggaatgcattttgtgatcttccggaagataccatgctaccaggagaagtgtaatttagctacagaagcaacagcagtgcaatgcatttgccaacacattatctcgaactcgaaacatctacttgcgac

SEQ ID NO: 106063 - DNA, 284 bp, Zea mays
  Clone ID: MRT4577_28232C.1
acaggatccacgaccagtgctgctgcctatggcacccacctgagcccacacgtgccccaccgcgtgctaagcacatcctccaccctcacacgggactacaactcactgacccgctcagaacactcacactcgaccacactgccgagggactactccaccctcacctccgtctcctcccacgactctcgcctgactgctggtgtgcccgacacgcccacccgcctggtgttctctgccctggggcccacatctctcagagtgagctggcaggagccgcggtgcga

SEQ ID NO: 106064 - DNA, 118 bp, Zea mays
  Clone ID: MRT4577_28233C.1
gccacttttccagccactgaagaagccagtcaacagggggttcttctacatactgccggcctggtgatctactccgcagagcatttcgcaaagcctactattgcggagaccatggaac

SEQ ID NO: 106065 - DNA, 546 bp, Zea mays
  Clone ID: MRT4577_28234C.1
catctcaaagaaaggaaaaactgcgactgagatggcggcggcggcggccacggcgacagcggcggcaacgccggagtgggccaccaaagagccttgcctcatgggcatcgacgaggctggacgcggccctgttcttggtcccatggtgtatggctgcatgtattgcgcgcgctcctaccatgacactcttgccaccctcagttttgcagattcgaagaccttgaaggaggagcaaagggaggagctgtttgaaagtctgaagatgaatagctccatcgggtgggaggttgatgtcatatgctcaaaagtgttatctgccaaaatgttaaaaaggacaaaaattaatctcaatgaaatatcccacaactctgcaatgggccttgttagaaaagctattgataatggagttctactaacagaggtctatatcgacacagttggagatcctgagaagtacagggtcaaacttactgaaaagattccaggcatcaaatttgtggttgccaagaaagctgatagtctctaccctgttgttagtggagcaag

SEQ ID NO: 106066 - DNA, 556 bp, Zea mays
  Clone ID: MRT4577_28235C.1
tccgcaatatcacccgcgccacggttcggtcgccatcgacaccggcgtcgtgcaggcgaccatcacgcggaccgtcttcgaccagaatcccgtcgccgtgttcgccgtctccaagtcctcctgtccaagagatgtacccgcacggcgggggcggcgacgacgactcctccatcgtggtcgccgccgccgccgcgtcctcccccccgccagccgcaacagccccggaggcctccgagagcgcgcagacgccgccgacaaagctctcctccccgcctgcactccgcggcggcgagcacgactacgacacggcgtcggcgcaagggatcggaatcggatggtggtgtatagcattggtgtatctacttccacatctcgtgtgagatccgggactcggtcagcccattgtcattccgcttgtgctcaatttttgccttttctttttgttttctcttgtcttttctttacttgtttgggttggctatgtacactgggaggtgagggaggtgaaatagaagattgagctgcgaaaacaaaggaaatgcagcaacctgttttt

SEQ ID NO: 106067 - DNA, 226 bp, Zea mays
  unsure (1)..(226): unsure at all n locations
  Clone ID: MRT4577_28236C.1
acccacgcgtncgcccatacccgacatgtctgagtcgcctgagttctacatgccaacaccgccggagttctcgcggtgcagatcgaacctcctgctcgccccnncaagggccacggacagagcacaaaccgatgaaagcgcccccacaaccgtagaacgagtacaagaggaggactaccgctttcgtacgccgacggacggagagagccaagttatgcctgcggtg

SEQ ID NO: 106068 - DNA, 313 bp, Zea mays
  unsure (1)..(313): unsure at all n locations
  Clone ID: MRT4577_28237C.1
ctctttctttttttttttttttctccctcctggctgnctgggtttagacgcggcccaaccggnctccctctcgccgggccctggntnttcttccagctccccgggcgccnggaagccctnaagcggcctcacgtcnggcttgcctcccaagctcgacccacccntcgggccctccaccccgnggcccgctccttctttntttcccgccccccggccctgccnctgccccgcggccgccccccccttgccccccccttccccggggccccccggggccccgggccccccccccggggcgcggggctgccccccc

SEQ ID NO: 106069 - DNA, 390 bp, Zea mays
  unsure (1)..(390): unsure at all n locations
  Clone ID: MRT4577_28238C.1
agagacaataccttgcaacactggctgttcctttctctttttttttgttttttcccgttcacaaatatgcttcttctgtagtcgtaattttacagttagctacaataatctaataacatagcaattccagaatttgagccgaagttgtggttgaagcctgtacttatcattattttccatatatacacaactaatacagaatatgacaccacanaaagtattcttcaagagaactaaatagatatttgcactaacacttgctcttgtctcatcctaaatttgacattatctgaaggttataaaatagtgagctacaactgatacaacccactgcaaccgaagaagaaattcagaattcctagccaccaaactacgaagacaaaaatgtcg

SEQ ID NO: 106070 - DNA, 221 bp, Zea mays
  Clone ID: MRT4577_28239C.1
cgacgggttcgtacttgtgccatcatccatatcgtcgagcacggttattaacaggcggcccgagtcaccgtctcactgacatgctgaactattaaaatgcttaatgtttgcacgctcaacatctaaaacgtctatatcaacacgacgtgtgttctacctcacgtcatcagttaaaccatgctagtatatatgtctccaatcacgatccactcgtatctcat

SEQ ID NO: 106071 - DNA, 3798 bp, Zea mays
  Clone ID: MRT4577_2823C.1
atggatcctaggggcaaggggatggtggtcaacgataaggagaaggagtcctttgtcaatgatccaaaggaggacaagcctactgactcgggctcgagccacaaaagaaaagatgggaagaagaagaaaacaaggcgcatcaaagagatagtctactacgacagcaacgaatcctcttcttcccaaaaggacgacgacaacgactatgagaaaaagaagacggttaattcaaacttctcttttgattattctcgtattcctcaaagtaccaatgctcatttactctccattccacttggtaaacctcctcattttgatggagaggactacagattttggagtcacaaaatgcgtagtcacttgttctctctccatcctagtatatgggagatagtagagagtggaatgaaatttgatagctcggatagtcctttgtttatcaatgaacagattcataaaaatgcacaagctactactgtgttgttagcctcattgtgcagggacgagtaccataaggtgagcggcttggacaatgccaagcagatctgggacaccctcaagatctcacatgaggggaacgacgtcaccatgctcacaaagatagagttggtggaaggcgaactcgggagattcgcgatgataagaggggaggagccaacccagacatacaacaggctaaagaccctcgtcaacaagataaggagctatggaagcacgcgatggacggaccatgatgtcgtccgcctaatgctaaggtcctttactgtacttgatccacatcttgtcaacaatattcgtgagaatcccaggtataccaagatgtcgcccgaagaaattcttgggaaatttgtaagcgggcggatgatgatcaaggaggcgagatacgtggatgatgcattgaatggcccaatccacgagcctcaaaccgttgctctcaaagcgacaaggagcaaggaggcactacctagcaaggtggcgcaagttgaggcggctgggcttaatgaggaagaaatggcccttatcatcaagcggttcaagacggcgctaaagggtcgcaaggagcacccccaacaagaacaagacaaaggggaagcgctcctgcttcaaatgtgtgaccaggaaaagaagagtggaaagtgggaaaagaagaagaactacaagaaggcgaagggcgaggcacatcttggaaaggagtgggattcagattgctcctcgtccgactccgacaacgaaggactcaccgccaccgacttaacaagtcatccctcttccccaacgagcatcacacatgcctcatggcaaaggagaagaagcgaggatgagtctagtgatgatgatgaaatagactattcatgcttattcaagggcttagatagaactaaggttgataagattaatgaattgattgatgctttgaatgataagaatagattactagaaaaacaagaggacctcttatatgaagagcatgataaatttgttactgcacaaaattctcttgctctagaagttaaaaggaatgaaatgctttcttgtgaactatctacttgtcatgaaaccatttctactttaaaaagtgttaatgatgatttaaatgctaaattagaagtagcaagtaaatctaactcttgtgtagaacatgttatgatttgcaataggtgcaaagattttaatattgatgcttgtagtgaacacttagtttgcatttctaaattaaatgatgaagtggctagtcttaatgcccaacttaagactagcaagagtgaatttgacaagctaaaatttgcaagggatgcctacacgattggtagacacccctcaattaaggatggtcttggcttcaaaagggaagtcaagaacttaacaagccaaaagacttccatctccaccaaggagaaagggaaggcccctatggctagtagtgctcaaaagaaccatgccttcatgtatcatgataggatacattctagaaatgtctatagaagttataatgattttgattctcatgccatggttgcttctagttcttctattatgcatgatagaaatttaactagaagaaatgttgttcatgtgcctaggaaaacaaatagtgaaccttctacaatttatcatgctttaaatgcttcctttgctatttgtagaaaggataggaagatagttgctagaaaattaggggcaaaatgcaagggagataaaacttgcatctgggtccctaaggatattgtcactaaccttgtaggacccaacaagagttgggtttatgcatccgggggctcaagctggattatcgacaacggatgcacaaaccacatgacgggagaaaagaggatgttctcttcctacgtcaagaacaaggatccccaagattcaattatattcggtgatgggaaccaaggcaaggtgaaagggttagaaaaaattgctatttcttccgagcactctatttctaatgtgttcttagttgagtcgcttggatataatttgttatccgtaagtcaattatgtaatatgggatataattgtctattcacaaatgtagatgtgtctgtctttagaagaagtgatggttcattagcttttaagggtgtattagacggcaaactctatttagttgattttgcaaaagaggaggccggtctagatgcatgcttaattgctaagactagcatgggctggctgtggcatcgccgcttagcacatgtggggatgaagaaccttcacaagcttctaaagggagaacacgtgataggtctaactaatgttacattcgaaaaagatagaccttgtgcagcttgtcaagcaaggaaacaggtgggaagctctcatcatgccaaaaatgtgatgacaacatcaagacccctggagttacttcatatggacctcttcggaccagtcgcctatctaagcataggaggaagtaagtatggtcttgttatagttgatgatttttcccgcttcacttgggtattctttttgcaggataaatctgaaacccaagggaccctcaagcgcttcctaaggagagctcaaaacgagtttgagatcaaggtgaagaagataaggagcgacaatgggtccgaattcaagaaccttcaagtggaggagtatcttgaggaggaaggaatcaagcacgagttctccgctccctacacaccacagcaaaatggtgtggtagagaggaagaacagaacacttatagacatggcgaggacgatgcttggagagttcaagacccccgagcgtttttggtcggaagccgtgaacacggcttgccacgccatcaacagggtctatcttcaccgcctcctcaagaagacttcatacgaactgctaactggtaacaaacccaatgtatcgtactttcgtgtatttgggagtaaatgctacattctagtgaagaagggtaggaattccaaatttgctcccaaagctgtagaagggtttttattaggttatgactcaaatacaaaggcgtatagggtcttcaacaaatcatcgggtttggttgaagtctctagcgacgttgtatttgatgagactaatggctctccaagagagcaagttgttgatcttgatgatatagacgaagaagatgttccaacggccgcgatacgcaccatggcgattggagatgtgcggcctcaggaacaattggagcaagatcaaccgtcttcctcaactatggtgcatcccccaacccaagatgacgaacaggtacctcaagtggaggcgcatgatcaagggggagcacaggatgatcaagttgaagaggaagaagcacctcaggcaccttga

SEQ ID NO: 106072 - DNA, 2498 bp, Zea mays
  Clone ID: MRT4577_28240C.1
cccccgcggtcgactggaccttcaagcgcaccgcgcgtcattgttctcgttggcctttcttcatcagcaaatgtcggatcacttgccaaggatcttttggcatttgcagaaggagatgatcggaaactgaaattatctaccattgcttctcctacttataagcttcgaaccacagtactgcaagcaccatatggtgatcttaccacatgcatggaactggcgaaggttgctgatttgttagcgttcgtactgccagccaattcattctacagtggtgatttgaatagcccaattgatgagtttggatctcaatgcctgtctgtatttagggccatgggcttacctagtacagctgtttttattcgtgatcttccagcggataataaaagtaggcaggaattgaagaaagcagcaacttctttcctttctgcagagctgcctgaggactgcaagttttacttggcagacacaaaggatgatttgcataagttcatgtggcttttcaaggagcagcatctttcctcgccacattggagaaaccagagatcttatgttatgtctgagcaggtctgcataaatcctgatgaaaatacgggattgtgcacattgctcgtgtctggatatttgcgggcccacaatctttcagtgaatcagcttgtccatgtttcaggtgctggtgattttcagttaggccaaattgatgtcctcaaggatccatgtcctcttagtgagcggaaaagctctgatgtaatggaaacagaagataatggaattcagattgttaacacttttgttccagacccttcaagtcaggaacccttacttgttgaaaatgtgccagatcctcttgccggggagcagacttggccaacggaagaagacatggaggaggtcgacataaacaacaaacagagaaaattggtaaagaggaagcttccccaaggcacttcagagtaccaggctgcttggattgttgaggacacagatgatgaagataacgactctgatgatgacaaccagactgaatctggaatggtcattgatgagcaaggtcactcagaccaaggaagtgatggttcagatatagatgcagtgtctcactttacggagaagtttgatggagaaactattggggatactgagatggcagatgaagaaaatttgacgaaagaccagatagaggcagagattaagaaaatcaaagaagctaatgctgatgatgaagaatttcctgatgaggtggagacaccattagatgtcccagcaaagaagcggtttgcaaaatacagaggactaaagtcatttaggacatcatcctgggatcctaaggaatcgttgccactggactatgcaagaatatttgcatttgataactttacaagaactcaaaagcatgtctttgctaaaattgctgagttagatggaggcatgaagaattgtgctcaagtgggatcatatgtaaggctttatgtgaaaaatgttcccactgatatagcctccaaactctgtcatccatcaagaagaatacctgtggttgtttctggtcttcttcaacatgagtccaaaatgtcagttcttcacttcagcataaagaaacacgactcttacgaagctcctatcaaatctaaggagcctttgattttcaatgttggattccgacaatttacggcaaggccactgttttcatccgacaacatcaactgcaataaacacaagatggagagatttctgcaccatggccgattttcggttgcatctgtatatgctccaatttccttccctccacttcctctaatagttttgaagaacagagatggcgagcaacctgccattgctgctgtaggttcgctaaaaagtgtggatccagaccggatcattctgaagaaaattgttctgaccgggtatccacagagagtctcgaaactgaaatcgatcgtgcggtatatgttccacaatcccgacgacgtaaaatggttcaagcctgttgagttgtggacaaaacatggtcgtcgtggccgcatcaaggagactgttggtactcatggtgccatgaaatgcttattcaatagcagcattcagcagcatgatactgtgtgcatgagcttgtacaagcgcgcgtatccgaaatggcctgaacagctctaccacgtataagattgcttgacgtttggctggatatgtaccagcaggcagaagcagaacgacgggaatgaaacagccttggagcttgcgtgccgtttagcttaaactaaatattttaggattaggaaaatgttttgttggtcgcctgagctaggaggccgaattttgtattggtccttcatatacttttgaacattctccttggacgtcctttattttagtatcaaatttaaattcaagtttaattgcacgttgagataggataatgccaacttaagctttaatatgttggcatatgtgctacacgcaaaaaaaaaagggtcttctttatcataagaaataggaggtggattagg

SEQ ID NO: 106073 - DNA, 465 bp, Zea mays
  Clone ID: MRT4577_28241C.1
caagcacaagccattcaatggggcatgttattaatacaaatcctttaacggtttggagccttgtagtacaagtttaagatactggaacttatagctactgtgaagcgtccttaaaaaagtggaaatactggtcagggtgtaaacactgttgaatgagaaatatcggggttagacgtaaaacactgttgatgctaccattttcatacattatacattttatcctgccacctgacacttttaatttgaaaaggatgatgtccccgtcttgtaccacataggttttcccctcctgtttgtattttccagcagtcttttcagtaaattccactgtccagttttttaagtatttcaaacttctttacttaatcgcatatgatacctctttaaaaattagggtgaattgatcctgaatcttggggagcttaagtcttggtgttgatctgtcaacatttaacttaataggac

SEQ ID NO: 106074 - DNA, 220 bp, Zea mays
  Clone ID: MRT4577_28242C.1
ggggacacgggccaaggaatccttggacctgagggcccacctcaagcaggtgaagaaggaggacattgagaaggaaaaccgggacgtgggagactagcgcaagaatatcgatgcactaagtggaatggaaagccgaaagaaaaagtgtgagggctcagcccatggctctcacactgtgctctgaagggcatctctgaggaataaatatctttaaactgga

SEQ ID NO: 106075 - DNA, 216 bp, Zea mays
  unsure (1)..(216): unsure at all n locations
  Clone ID: MRT4577_28243C.1
ccccccccctttcttcctttcaggtcctgtatatataacgttacgtagcagtggactatccacctaattgttgacactgcctcccacggagatgggtgacacatccgtcacctcatcacccatgtantgcgcagtgatacatacactagacggtgagggagaccattttaaatggttaacgaatattctacagggaaaaacagaacagacggtcga

SEQ ID NO: 106076 - DNA, 306 bp, Zea mays
  unsure (1)..(306): unsure at all n locations
  Clone ID: MRT4577_28244C.1
actcccccgggacggcagcgaggaggggttcgtgcaccagtcgtcgatcaagtcggagggcttccgctcgctcgcggagggcgaggaggtggagttttccgtctcggagggtgacgacggccgcactaaggccgtcgacgtgaccggccccgacggatccttcgtcaggggcggcggaggcggangaggccngcngcngcngctactgcggtggcggcggcggtggtggtggcggctgctacaactgcggccaggccggccacatggccagggactgcccaagccgtggcggccgtggcggaagga

SEQ ID NO: 106077 - DNA, 977 bp, Zea mays
  unsure (1)..(977): unsure at all n locations
  Clone ID: MRT4577_28245C.1
ggtcggcctcgccacgccgatcggcggcggcggctacggctcccgcggcggtggcggatctggcggcggcggtcgcagctacggtggtagctggggcggcggccggagatccggcggcgggggcggtcctggcgcgtgctacaagtgcggcgagcccggccacatggccagggactgccctagcgccgacggcggaggctacggcggaggcggctacgggggaggcggctacggaggaggaggaggcggcggtggcggagggaggttcggcggcggcgggggntggaggcgaccgctcctgctacaactgcggcgaggccggccacatcgcccgcgactgtcccacgtgaggtgtgtccgcgtccgtccagccagccagatcggatcggatcgctccaccacctgctggtctgatggcgccgcccccttctagatctcgcttaaaaaaacatccccctctcgctgtgtgtcggagtaccgctttagttttgccgatccgggcacgagtgcccgctgcctctttcctctcatgcgtaagaggatcccgtccgccgttttcagatttcgttcggttcgtagaagaactctcaagttaagttaagttatcatggtgtgtgcttggtcgtcgtccgtcgttcgtcgtcgtcgttaaggttttaagagatgatttggtcctgtgttgccgaggggaagtccaatctgcttttcttttcttttttgtggtttgttccatcagactgaggaaggagatgagatgattattctcccagattaaaaaaaaaaaaaaaaaaaaaaaaaaaaaaaaaaaaaaaaaaaaaaaaaaaaaaaaaaaacaaacaaaaaaaatacaaaaaaaatagactcttctatagtgaaaaaaaaaatataattaaaggggcccccgttttaaaatacccagactgacgaacaccctggtgaaacctaaattattttttttggagcacataaaattaatt

SEQ ID NO: 106078 - DNA, 2217 bp, Zea mays
  Clone ID: MRT4577_28246C.1
cttgccgggctttttttttctccctctgctggagcaccgccaccaaccgcaggctaaaattagcgagagaggtgtgcggtgggaaggcgtgcaggtatggggggaagcagcagggggtggcggcgaggtggcattagagattggaaggagggaaaggggaggaggcgaggtgagagaggacgaagagggcgcatcgtgggttgggtgatcacggcctgatggggtcgtggcgcaaggcctacggcgccctcaaggactccaccaaggtcggcctcgccaaggtcaacagcgaattcaaggaattggatattgcaattgtgaaggcaaccaaccatgttgaatgccctcccaaggaacggcacgtcagaaaaatactcttggcgacctcagcaaaccgccctcgcgcagacctctcgtactgcatatacgcattgtcaaggagattgtccaagacaaagaactggatagttgcgctcaagacattgatagtggtgcataggcttctgagggagggcgatcccatgttcaaggaagagttcctggcctactcatccagagggaacatcttgcacatagccaatttcaaggacgactcgagccagtcagcttgggattgctccgcatggattcgcgcctatggatgcttcctggaggaacggctcgagtgcctcagggttctcagatacgacatcgaaaccgagcgtctcgtcagatatccccagacttccagcaaggtacatagtaaaaccaggaccctgcctagcccggaactcttggagcagttgcctgcactgcagcagctgcttttcagggttgtcggcgtccagcctgaaggcgctgcctgctcaaattaccttattcagtacgcactagccctggttctgaaggagagcttcaagatctactgctcaattaacgatggcatcatcaatctcgtcgatatgttcttcgaaatgccgaagtacgacgcaatcaacgctctggcgatttacaaacgagctggcctgcaggcagagaaccttgccgagttctatgacttctgcaaacagcttgagcttgccaggacgttccagtttcctactctcaggcagccacccgcatcgtttcttgcaacgatggaagagtacatcagagaagcaccccgaccctcgatcaagagtgaggagagcgaggagccgaagctactgacctacgagcaagaagctccagaggaacccgaaaatgctgtggaagaggagaaagaagaaccgagtcaaaaaccagaacctcagcctgtgcctgatccagaaccccacccacagcaaacgactggagatctactaaacctggaagcagaggtgaatccttcggctctggaactcgaacaaagcaatgcattggcactcgctattgtagcaccaggtgactacaagccgccagcatctcaaagtatgtttgatgtcaattcgtctgggtgggagctggcactggtcaatgctccaagcacccatacaagccaagcagttgagaccaacttggctggaggctttgacaagctgctacttgacagcctctacgaagacgaggccaggaggcagcagatcgccggcgcgacctacaccggtagcctaggagcagccaaccctttctgcaccaatgccagcgatccgttcaccatgtctagcagatttgcaccaccggctaatgtgcagttggcactgatggctcagaaccaacagcagtattaccaggcgcagcagtattaccaggcgcagctgtatttccagccacagcagcagcagtattttcagcagcatcaacagacgttggcaatgccaatgccaaacatgtatcaccaccagtatcagtactctgtgcctacatctggagcttcgaacccatttggtgatcctttcagtgaccttgccccaatgggtgctcctgcaaaacagagcaactcagtttttctctgaactggttgctacttctgagtctgatcattcaattggtagagcagcaaacctgtacagcacttgttccttcgctaagtggaggtgttgtatattgtctttcttttgcaatatccaaatcttgaaatataacattagtaccagtactatgctgaatagtttttaatgaactagaagttccggtgtactataatgtaaccatgctgtcatactcatcacaagagtaaaactgtcactgtaactcacaagaccaggttaaactattaat

SEQ ID NO: 106079 - DNA, 1327 bp, Zea mays
  Clone ID: MRT4577_28247C.1
cccacgcgtccgcccacgcgtccggcgagagacgggcaggggagagggaaaaaaaaatctaaccctagcatccgcagcgctagggttcgggggttgcgatggcggcggcggcgagacagcgggggacggtgaagtggttcaacgacaccaagggcttcgggttcatctcccccgaggacggcagcgaagatctcttcgtgcaccagtcgtcgatcaagtcggagggcttccgctcgctcgcggagggcgaggaggtggagttttccgtctcggagggtgacgacggccgcactaaggccgtcgacgtgaccggccccgacggatccttcgtcaggggcggcggaggcggaggaggaggcggcggcggctacggctcccgcggcggtggcggatctggcggcggcggtcgcagctacggtggtagctggggcggcggccggagatccggcggcgggggcggtcccggcgcgtgctacaagtgcggcgagcccggccacatggcaagggactgccctagcgccgacggcggaggcggctacggcggaggcggctacggcggcggcggctacggaggaggaggcggcggcggcggtggctgcttcaagtgtggcgagcctggccacatggccagggactgctccagcggcggcggcggctacggcggtgggcggcggcggcggtggaggcggctgctacaactgcggccaggccggccacatggccagggactgccccagcggtggcggcggtggcggagggaggttcggcggcggcggcgggggtggcggcgaccgctcctgctacaactgcggcgaggccggccacatcgcccgcgactgccccacgtgaggtgtgtccgcgtccgtccgtccagccagatcagatcggatcgctccaccacctgctggtctgatggcgccgcccccttctagatctcgcttaaaaaacacccccctctcgctgtgtgtcggagtaccgctttagttttgccgatccgggcacgagtgcccgctgcctctttcctctcatgcgtaagaggatcccgtccgccgttttcagatttcgttcggttcgtagaagaactctcaagttaagttaagttatcatggtgtgtgcttggtcgttgttcgtcgtcgtcgttaaggttttaagagatgatttggtcctgtgttgccgaggggaagtcgaatctgcttttttctttttttgtggtttgttccaccagactgaggaaggagatgagatgattattctcccagattataatcctgcctgcttgtgcttgatttggttaaaaaaaaaaaaaaaaaaactcgagacctcgtgc

SEQ ID NO: 106080 - DNA, 179 bp, Zea mays
  Clone ID: MRT4577_28248C.1
gtacctgctagtacgtcggattccgggtcactctccgtcgggacgtccgaacaggtcccgacggcggagctggggtcggcgccgactacctcggcggcgtcgcactctagtactccaaggcagtgcacgcgtcctgctggcgaccggcttcggcgcgatcaccggcgccgtgctgggat

SEQ ID NO: 106081 - DNA, 197 bp, Zea mays
  unsure (1)..(197): unsure at all n locations
  Clone ID: MRT4577_28249C.1
cagttgcataacactaccatgtacccacagaggtgaacagctacgatagcttaccttattaccccatacctctcaccagcgcgtgtctttaatgtgtgaaaacccgggggggggggcctacangatccaacaggcaaattaaacaagcatcttaccattatgacccttgtttctccaacaaccgtgaggcctattac

SEQ ID NO: 106082 - DNA, 361 bp, Zea mays
  Clone ID: MRT4577_2824C.1
ctatgacgtaaagctgcgcgcgctccgtaagctcggatcctgtatagcgggcgccctccacgctgttcttaccatcaaggaccaagacagagcccagggcaggtggggagactctcgacgccggtggctgcaaccaccgcctttatcgacaaccccggccgggcggatgatgcaagaaatacaccccaatggaggtcgacacaacataagaaggatgcctagggtttcaaagcccacgactactggaaaagcacttcggctacggatccatgcttaggctgccgtaaaccgaagacgaggacgcctacgagggccacaacaaagaaacaccaacgccaccacacatgcttagacgcaagaa

SEQ ID NO: 106083 - DNA, 1300 bp, Zea mays
  Clone ID: MRT4577_28250C.1
ccattagctttatctactccagagcgcagaagaacccgatcgacaccatgagggtgttgctcgttgccctcgctctcctggctctcgctgcgagcgccacctccacgcatacaagcggcgagacagcgggggacggtgaagtggttcaacgacaccaagggcttcgggttcatctcccccgaggacggcagcgaagatctcttcgtgcaccagtcgtcgatcaagtcggagggcttccgctcgctcgcggagggcgaggaggtggagttttccgtctcggagggtgacgacggccgcactaaggccgtcgacgtgaccggccccgacggatccttcgtcaggggcggcggaggcggaggaggaggcggcggcggctacggctcccgcggcggtggcggatctggcggcggcggtcgcagctacggtggtagctggggcggcggccggagatccggcggcgggggcggtcccggcgcgtgctacaagtgcggcgagcccggccacatggcaagggactgccctagcgccgacggcggaggcggctatggcggaggcggctacgggggcggcggctacggaggaggaggaggaggcggtggctgcttcaagtgcggcgagcctggccacatggccagggactgctccagcggcggcggcggctacggcggtggcggcggcggcggcggtggtggtggcggctgctacaactgcggccaggccggccacatggccagggactgcccaagcggtggcggcggtggcggagggaggttcggcggcggcgggggtggaggcgaccgctcctgctacaactgcggcgaggccggccacatcgcccgcgactgtcccacgtgaggtgtgtccgcgtccgtccagccagccagatcggatcggatcgctccaccacctgctggtctgatggcgccgcccccttctagatctcgcttaaaaaaacatccccctctcgctgtgtgtcggagtaccgctttagttttgccgatccgggcacgagtgcccgctgcctctttcgtaagaggatcccgtccgccgttttcagatttcgttcggttcgtagaagaactctcaagttaagttaagttatcatggtgtgtgcttggtcgtcgtccgtcgttcgtcgtcgtcgttaaggttttaagagatgatttggtcctgtgttgccgaggggaagtccaatctgcttttcttttcttttttgtggtttgttccatcagactgaggaaggagatgagatgattattctcccagattataatcctgcctgcttgtgcttgatttgggg

SEQ ID NO: 106084 - DNA, 891 bp, Zea mays
  Clone ID: MRT4577_28251C.1
cacgcgtccgatcaaggcgttcgtcatcgacgtggtgacgtctggttcagacacgtcggcggccatggcagagtggatgctggcggagctgatgaaccacccggagacgctgcgcaaggtggtagaggagatcgacgctgtggtcggcggcggcaggatcgcgagcgaggcggacctgccgcagctgccgtacctgatggcggtatacaaggagacgctgcgtctgcacccggcggggcccatcgcgcaccggcagtcgacggaggagatggtggtgcacggtttcaccgtgccgccgcagtcgacggtgcttatccacgtgtgggccatcggacgcgacccggcctactgggaggagcccctgttattccggccggaacggttcatgccaggcggcgctgccgagagcctggagccccgcgggaagcacttccaatacattcccttcggcagcggccgtcggggatgtcccggcatgggcctcgcgatgcagtcagtgccggccgtggtagcggcactcgtgcagtgctttcattggtccaccgttgacggcgggatggacaagatcgacatgtcggagtcggacgggctggtgtgtgctcgcaagaagccgcttctgctccgacccacatctcgcctcacccccttcccgcccgtcgtatagcgtgcatatgcgtgtcttccattgcaataccagcgtataccaacctctaccgtaccattatagcgatcgcacttggatctcggtctatctctagcccctttacctgtccccgtatccatattcaaaatctactctacaaaatgtttatggtttagaaggcgaacagttggacataataaactttattatgatgttattaagtgtgcaaaattaatatggcattgtct

SEQ ID NO: 106085 - DNA, 752 bp, Zea mays
  Clone ID: MRT4577_28252C.1
aggacgcgtggggcggaggaggcggcggcggcggtggctgcttcaagtgcggcgagcctggccacatggccagggactgctccagcggcggcggcggctacggcggtggcggcggcggtggtggtggcggctgctacaactgcggccaggccggccacatggccagggactgcccaagcggtggcggcggtggcggagggaggttcggcggcggcgggggtggaggcgaccgctcctgctacaactgcggcgaggccggccacatcgcccgcgactgtcccacgtgaggtgtgtccgcgtccgtccagccagccagatcggatcggatcgctccaccacctgctggtctgatggcgccgcccccttctagatctcgcttaaaaaaacacccccctctcgctgtgtgtcggagtaccgctttagttttgccgatccgggcacgagtgcccgctgcctctttcctctcatgcgtaagaggaacccgtccgccgttttcagatttcgttcggtccgtagaagaactctcaagttaagttaagttatcatggtgtgtgcttggtcgttgttcgtcgtcgtcgttaaggttttaagagatgatttggtcctgtgttgccgaggggaagtcgaatctgcttttttctttttttgtggtttgttccaccagactgaggaaggagatgagatgattattctcccagattataatcctgcctgcttgtgcttgatttggttaaaaaaaaaaaaaaaaaaaa

SEQ ID NO: 106086 - DNA, 1302 bp, Zea mays
  Clone ID: MRT4577_28253C.1
aattcggcacgagggagacgggcaggggaggaaaaaaatctaaccctagcatccgcagcgctagggttcgggggttgcgatggcggcggcggcgaggcagcgggggacggtgaagtggttcaacgacaccaagggcttcgggttcatctcccccgaggacggcagcgaggatctcttcgtgcaccagtcgtcgatcaagtcggagggcttccgctcgctcgcggagggcgaggaggtggagttttccgtctcggagggtgacgacggccgcactaaggccgtcgacgtgaccggccccgacggatccttcgtcaggggcggcggaggcggaggaggcggcggcggcggcggctacggctcccgcggcggtggcggatctggcggcggcggtcgcagctacggtggtagctggggcggcggccggagatccggcggcgggggcggtcctggcgcgtgctacaagtgcggcgagcccggccacatggccagggactgccctagcgccgacggcggaggctacggcggaggcggctacgggggaggcggctacggaggaggaggaggcggcggcggcggtggctgcttcaagtgcggcgagcctggccacatggccagggactgctccagcggcggcggcggctacggcggtggcggcggcggtggtggtggcggctgctacaactgcggccaggccggccacatggccagggactgcccaagcggtggcggcggtggcggagggaggttcggcggcggcgggggtggaggcgaccgctcctgctacaactgcggcgaggccggccacatcgcccgcgactgtcccacgtgaggtgtgtccgcgtccgtccagccagccagatcggatcggatcgctccaccacctgctggtctgatggcgccgcccccttctagatctcgcttaaaaaaacatccccctctcgctgtgtgtcggagtaccgctttagttttgccgatccgggcacgagtgcccgctgcctctttcctctcatgcgtaagaggatcccgtccgccgttttcagatttcgttcggttcgtagaagaactctcaagttaagttaagttatcatggtgtgtgcttggtcgtcgtccgtcgtcgtcgtcgttaaggttttaagagatgatttggtcctgtgttgccgaggggaagtccaatctgcttttcttttctttttttgtggtttgttccatcagacttgaggaaggagatgagatgattattctcccagattataatcctgcctgcttgtgcttgatttggttaccacaaatgccttcaccact

SEQ ID NO: 106087 - DNA, 115 bp, Zea mays
  unsure (1)..(115): unsure at all n locations
  Clone ID: MRT4577_28254C.1
tgntaacggtggatgtgatgctaggtgtgtaattatgggaacgtaacggcattgccagacaagtagatgtaaaagggctgcgaatgcttgagttgttaggctcaactagagcaga

SEQ ID NO: 106088 - DNA, 233 bp, Zea mays
  Clone ID: MRT4577_28255C.1
ctcagttcaggagcatcacggccacctccagtgctgcggccagcacgaccactgccggattgccccagtgcgacgacgactgcgcacaacgccatagacctagcgctggctggcgcggaggagcgagccatattgcagcacatcgacaactatgcaagagacgcagggcgtcgcggacatcttcaatcaccagtgcttggctcaggtgtgtctgctcaggaacgcccagatcc

SEQ ID NO: 106089 - DNA, 430 bp, Zea mays
  Clone ID: MRT4577_28256C.1
gaacttaaggtggcctttattgagtaaagcacttgagtaataggagacccaccatagctacttgaagacttcctttcccattttccgttagttacctcaacatattagcccacaggcgctcttcatcggagtcaggtacagccccgtattgccagatgcaaagtctgccgtgtttggctttctcttcttctttttgaagttggacatagaagtctctatctgtaactctggtttgacctctgctttccactctcgcaagtccttcgattaccaaaattccgttgattataacttgcttctcctcgtcaccgagttgcacgtgccatacttcagctccctcatttagggcactgtactgaacaatcgcaggcaaagttttgcccatactaattctttgaaagtactgcggcattttaccaaattcatcagc

SEQ ID NO: 106090 - DNA, 322 bp, Zea mays
  Clone ID: MRT4577_28257C.1
ggaaacaaaaacttggtttccggtcaggccatggattttttaaaaaaaaaatttcataatttttacagaacatttggtcccataaggtacaaaatttaggtaactacttcaatttatcccagaaattcccggtttcaggttaaggattcgcctaaaaattggcttggcaaaggggggtaacaaaaggggggggggtttaaccccacaagttggggaaaaggccatatcatgggggatgaaaaggatttttcagggtttccccccaaatttaatggacaccccaaattttttttttagccgggggaggccaaaacattttttg

SEQ ID NO: 106091 - DNA, 238 bp, Zea mays
  unsure (1)..(238): unsure at all n locations
  Clone ID: MRT4577_28258C.1
acgcgccgccgacggccacgaccagcgacgcagacggaaacggagggggagccgcaggaccggcgcagaacacaaccgccggcgacaaancagaggacgacgggggcgagcacggaccgaacgccgaagggcgcgcggacgaagcaccgacgcggggaggaacgccaagggagcggggaagagccgccgaagcagcaccgccgaggcgccggaccgggggccgccggagagcgggacg

SEQ ID NO: 106092 - DNA, 200 bp, Zea mays
  Clone ID: MRT4577_28259C.1
tatatattagcaagctagttgtgtcattaaataaaggaacgctgtgtgactatgatgctgctgctgctcgttttgctatctgaatcgcacaccgttcaattcctcttctgtgtcgatcgatcgtgttcgattctttcaaaggctggcgtctgtgttttgtttatctagatatgcagcagtatgctactgtgtttggcttc

SEQ ID NO: 106093 - DNA, 3957 bp, Zea mays
  Clone ID: MRT4577_2825C.1
tcaatccaagttccgcgaatctaagacatttagctcactacgcagcctgcaaaaggtcttctcatctagaggcttggtaaagatatcggctagctggttctcggtgctaacatgaaacacttcaatatctcccttttgctggtgatctctcaaaaagtgatgtcggatgtctatgtgctttgtgcggctgtgttcaacaggattttccgccatgcggatagcactctcattatcacataggagtgggactttgctcagattgtagccaaagtcccggagggtttgcctcatccaaagtagttgcgcgcaacactgtcctgcggcatactcggcctcagcggtggatagggcaacggaagtttgtttcttagaattccatgacaccagggaccttcctaagaattggcacgtccccgatgtactcttcctatcgaccttacatccagcatagtcggagtctgagtatccaactaagtcaaaggtagacccctttggataccagagcccgaagcaaggcgtagcaactaaatatctaagaattcgcttcaccgccactaagtgacattccttaggatcggattgaaatctagcacacatgcatacgctaagcataatatccggtctactagcacataagtaaagtaatgaccctatcattgaccggtatgctttttgatcaacggacttacctcccttgttgaggtcggtgtgtccgtcggttcccatcggtgtctttgcgggcttggcgtccttcatcccaaaccgcttgagcaagtcttgcgtgtacttcgtttgagagatgaaggtgccgtccttgagttgcttcacttggaacccaaggaagtagttcaacttgcccatcatcgacatttcgaatttgtgcgtcatcaccctgctaaactcttcacaagacttttgattagtagaaccaaatattatgtcatcgacataaatttggcacacaaacaaatcaccatcacatgtctttgtaaaaagagttggatcggctttcccaaccttgaaagcattagcaattagaaagtctctaaggcattcataccatgctcttggggcttgcttaagtccatagagcgccttagagagcttacacacgtggtcggggtatcgttcatcctcaaagccagggggttgctccacgtacacctcttccttgattggcccgttgaggaaagcgctcttcacatccatttggtacaacctgaaagaatggtgagtggcatatgctagcaagatacgaattgattctatcctagccacaggagcaaaagtctcctcgaaatccaaacctgcgacttgggcataaccttttgccacaagtcgagccttgtttctcgtcaccaccccgtgctcgtcctgtttgttgcggaacacccacttggttcccacaacatttttaaatagacagttataccccatgttgcataattgactaacagatagcaaattatatcccaaggactcaactaaaaacacattagaaattgagtgctcatttgagattgcaattttacctaatccttttaccttgccttgatttccatcaccgaatatgattgaatcttgggaatccttattcttgacgtaggaggtgaacatcttcttctcccccgtcatatggtttgtgcatccgctgtcaataatccagcttgaacccccggatgcataaacctttctatcctttctacaaattgcaaaggaagcattcaaagcatgatatattgtagaaggctcattaactttcctaggaatattaacaacatttctcctaggcatattatgaacaacatcccttctaccaacatttctatcatgcacatatgaagaactagaagcaaacatagcatgagaaaaatcatcgtactcattataactcctataagcatttctagtttgtctcctatcatgatacaaaaaggcatggttctttttagcactagtagccataggggccttccctttctccttagtgggaatgggagccttatggcttgttaagttcttggcttccctcttgaagccaagcccatccttaattgaggggtgtctaccaaccgtgtaggcatccctagcaaattttagtttatcaaaattactcttgctagtcttaagttgagcattaagactagctaattcatcattcaattttgaaatagaaactaagtgttcgctacaagcattaatatcaatatccttacacctagtgcaaatttcaacatattcaacacaagagttggatttatttgcttctactagtttagcatttaaatcatcgtttatgctctttaagttagaaatagagtcatggcatgttgacacttcacaagcaagcatttcattcctcttaatttctaatgcaagggatttttgagcctctacaaacttatcatgttcttcatacaacaaatcctcttgcttttctaaaagtatattcttttcattcaaggcatcaattaattcattaattttgtctatcttagatctatctaagcccttgaacaaacatgaataatctacttcatcctcatcactagattcgtcctcacttgaagaagcataggtagagttgcgagtacataccttcttttcccttgccataaggcatgtgtgacgctcgttggggaagagggttgatttgttgaaggcggtggcggcgagtccttcattgtcggagtcggaagaggagcaatccgagtcccactccttgcctagatgcgcctcgccctttgccttcttgtaatgcttcttcttttccctcttgtttcccatttcctggtcactatcattatcggggcagttagcgataaaatgaccaatcttaccgcacttgaagcatgagcgcttccccttcgtcttggtcttgcttggctgccccttgtgaccctttagcaccgtcttgaagcgtttgatgatgagagccatctcttcatcattaagtccgaccgcctcaatttgtgccaccttgctaggtagcgcctccttacttcttgatgctttgagagcaaaaggttgtggttcgttgatcggtccattcaaggcgtcgtccacgtatcttgcctccttgatcatcattcgcccgctgacgaattttcctaagacttcttcgggcgacattttggtgtacctgggattctcacgaatattattcaccaaatgaggatcaagaacggtaaaggaccttagcattagtcggacgacgtcgtggtccgtccatcgcgtgcttccgtagctccttattttgttgataagggtcttgagtcggttgtatgtttgagttggctcctcgccccttatcatcgcgaaccgtccaagctcgccctccaccaactctattttggtgagcaaggtagcgtcatttccctcatgagagatcttgagggtatcccagatttgcttggcgttatccaagccactcactttgttatattcatccctgcacaatgaagctagaagaacagtagtagcttgtgcattcttatggatttgctcattaatgaatataggactatccgaactattaaagtgcattccactatctacaatctcccatatactaggatggagagaaaataggtgactacgcattttgtggctccaaaatccgtggtcctccccatcaaagtgtgggggcttgccgagtggaatggaaagcaaatgtgaatttgagctttgtggaatacgagagtagtcaaaggaaaagttagaattaaccggtttcctttgctcatagtcgttgtggtcatcgtccttttgggaagaagtagactcatcactgtcgtcatagtagacgatttccttgatgcgcctcgtcttcttcttcttcccttcctttcgtctatgacccgagccggagtcggtaggcttgtcatctttgagctcattgacgaaggactccttctccttatcgttgatcacgattcccttccccttaggttccat

SEQ ID NO: 106094 - DNA, 365 bp, Zea mays
  unsure (1)..(365): unsure at all n locations
  Clone ID: MRT4577_28260C.1
cctttgtgtttttttggcaccaccctcccggggcaaggatggggtatttgggcccccggcggcctccctggccggggcggccgttctaggctccctctcgggaatcgaaccctanatcttcgtcacccggtaccaccatggtaggcccctatcctaccatggaaggtggttgggcccacaatttaaatgatgcgtcgccggcactaaggccgggcgacccgccaaggtttcaggattattcggtcggggggcaaagcccgtgtccagccttttatctaataaaggcccccttccgggaggcgggggttggtgcccctattagctctagaattactacgggtattcgtttagcacgttccctcaaa

SEQ ID NO: 106095 - DNA, 256 bp, Zea mays
  unsure (1)..(256): unsure at all n locations
  Clone ID: MRT4577_28261C.1
ccggtaggcctgtccaatctggaanatcccgacgaaccctcttttctcttttagcacacacaaccncgcaccaggggaaggggcttggttattacaagaaccgcacctgcacccagtgataccaggccagtctccccatcagtggttgctctggaaaactaaagtcgcatagggcttgactgaggcagacgcatgggagcttgtaatacgtaataactcgcatatagtacctgctcagcagactctgaacccaacg

SEQ ID NO: 106096 - DNA, 335 bp, Zea mays
  Clone ID: MRT4577_28262C.1
aagaaatctgagggttattcctcagtttctgggatgattttttacccccaaatcatcaaaaataagatcttttaaaagtcacagaactagtaccttcgatatgcctccagatccaggacgcccgctggtgggctttttgggagtcggaagaaaccatgtacctccctaccataagaccattacaagaacataaaatccaagaatgaacctcatctagtatgcctatatctgccggaaaaggatgccatgaggccggccaaacttggaaactcccgactgcagggcaaatgggggatcagttgcgggccccctcttcggggaacccctgggggaag

SEQ ID NO: 106097 - DNA, 432 bp, Zea mays
  Clone ID: MRT4577_28263C.1
aaaaaaggttttggttattacattcacatggggggatgggcccgggttatttttttttttgggggggcaaaaaacaaataggccccggcgcattcacattggtggggggcatatggggggggcccgaggagtataggatagtatagtatatatttttatgaaaatgcaggagtcggggggccggaaaaattgccttaaccctagtttttaactttttccatggggggaaccctcctgaaacaaaatcgtaggggccccccatcaacttggggggcccatttggaagcccttccttgacaaagggggagggcttgggggtttccagggacacgttcacgggctcctttttgaaaatggggcactgggcattgaacgggcccggggggggccctttttttaccttaattttgggaatgaaaccgattttaaccc

SEQ ID NO: 106098 - DNA, 674 bp, Zea mays
  unsure (1)..(674): unsure at all n locations
  Clone ID: MRT4577_28264C.1
aattcggcacgagggttctgtcgatgcagctcatcaattccattcccagctccggaaaatcgagaaatttcgattggttatttgatttgatttgattctggccgtgccgaaccctagcttccatctcggtccaatctcagttccacatattgttactcctcggcagcagaggaggccgtcgtggaatgagttgaggatgacggcatactactcgtgctcctaggaaaggtcagggaaaggaagaattcgagccatggaggacgaggcggacggcggcggcgaatccttcgtgctgcgctccggcgtccgcgcgggcctcaagcgcgaattcgccttcgccatcgcctcgcaggccgtcctttcgtcctcatacgcacccctgggccgcacccgccgctcatcccgcatcctcaacccatcggccgcttcgaccccctccgtcgccggcgccgccgtctcgacatcctcctcctcaacccccgacacaaagccaaaagccaagcgcccgcgcccaccagatcctccccctccccctcccttcccccctccaccagactatgcccctgcccccggagaagaccatgacggggccgctgncggccccgngctcgccttgatggctgctgctgggcccagccctccggcgacgcctgggactgccgngccccgcgccc

SEQ ID NO: 106099 - DNA, 398 bp, Zea mays
  Clone ID: MRT4577_28265C.1
aaaaaaaaaaagtttatggggaaaagattccgccgcccggggcccccctggccccccgcaggaggctaaagggcgggcggccccccccgggtaacagggaaagaccgaagggggttatgaggggggggagggatcgcaaaagggccccccaaaatttggcccggccggcctttcccgttccgggccccgaacggaaccccccccgggggcccccaccgggggtaaagaaaaaataatgggggccctttttttttctcccccccatgccatgaagacaggcccctttacaagcagcccccgccatagccagggtttttgaacagccccggctttaacggggggggcctgaacatttccctcggcatcggggaaaacagggaaggagcaaactggggggg

SEQ ID NO: 106100 - DNA, 275 bp, Zea mays
  Clone ID: MRT4577_28266C.1
aaaaaaaaaaaaaaaaaaaaaaaaaaaaaaaaaaaaaaaaaaaaaaggacgggggatctgggggaaccaagattacgtgcgcgggcgtgccactttagagggtccacgttttcgtccccttgcttgcgggaactcgccttttttttagagcgccctaaattgggaaaactgggcggtttcttacaataatgggcttgggaaacccccggctttccccagcttaattgctttggaggaggtccccttttatcgcgctggccaacaattgaaaaggc

SEQ ID NO: 106101 - DNA, 216 bp, Zea mays
  Clone ID: MRT4577_28267C.1
ttttgtttttaccatacaatcgtaagcagtcaggggattggggctattttattaactgcaaaaactaaaaacaaaggacccgaaacaccaagattacgcttggagcacgggaccaaactcatgttggcaaacacatagcatcaaaggggcccactaaaacagggagatatctatcactggttaaccggaggaaaagatgattttcacgtgacaggc

SEQ ID NO: 106102 - DNA, 216 bp, Zea mays
  Clone ID: MRT4577_28268C.1
ggccgataaaaaaagagattgggggggtacaacaggcaaagctcgccgtaaataaaggctagggccactgctgggtggacgcccggcatgccgaatctaatcgggcagcccccccctgcgaagatgctgcccctttccccgcagcccggggcgctaccccctgtccccctgttccgggccccctcgctccccatgtgtgagggcccctcagcgccc

SEQ ID NO: 106103 - DNA, 412 bp, Zea mays
  Clone ID: MRT4577_28269C.1
taatcaaaacgaactctcactccaggcacctcgtgtccaatgacaaatgtgcaaagctgatggagtagtactgtagcgtaccaaccaataaaaatgccatcctaccttctacgaaaactagacaggaaggaacaccactgcacaccaaaagcggggcccaccaaaaaagcagagcacggaggcgtatttcgggctgccccatgccagtaaatcactactaatcttcttggatttgggagctaccgtgcgaaaagcagcagcctgccgtgcccgcgctgcgagcaccgtgcctcgctactctcctctgtcctctctctccagctaccgccaccacgtcctggcgcgcgtgcgctataactcacgaccgcatcattcggccagcgacctgagcggcggcacgccacctccagcg

SEQ ID NO: 106104 - DNA, 291 bp, Zea mays
  Clone ID: MRT4577_2826C.1
ataatattattttttttttgtttgtttgaaaaggaaaattagttcatgatggacaaaaaaatgaaatagttgcaatcttattaaaaaaaagaggcaaggatacatgatttgtttaactcaaaagaaaaatcacttgttatagaaaaagatgaaagacagcaataatggtttttgagtttaggaaaggaatggcaccagggatattgaccacatttggtctgttgggcacctttctcacctaattggaaaatggtataattcttatgcaaaaaggcaaaaactaataaaaga

SEQ ID NO: 106105 - DNA, 5134 bp, Zea mays
  Clone ID: MRT4577_28270C.1
tttgttcctcaagttcgtctaactcaatgggtagtgaaaactggaatatcgaggtagacgagggtgatggcattgattcttctgttggttgttcgctggatactcattccaggagcaatatgcgtaggtctggatcacctgaggttgcgcgaacaccacgtaggtgctttaacatgcttcagggctgtaggagtattgatgactttgagaggatcaacacaatcaatgagggtacatatggagtcgccggccggggtgtctcgtgtgttactcgcgttccctgcctgtttcgagcctcccttaataacccggcattctctccgccgctcgcccgctccgcgtccgcggcccgcgtcgcctccactcccaattagcttatcgtgttcgacgcgagcgaactcgctcagatcagagtgttccctgatccggtcccaatcttttattggattttgtgttttggtaggggatctagggtttgtcgtcgaattccgcctcgaattttagggtttgcttcggatcgattccgttccgtgggattcttgcttgcagcactccatggctgcggcgcggcacgggggttataggagcttcgacgtggccaggaggcgggagttcgacctggagcgttctaggaggagcaaggagtaccgctactcgagccgccaccgcgagtcggatcgccaccgtgatggcagcaggggccgtgaagtgcccaacgggtacatccgccaccgctcgccgtatgcgccaccgaagagccgaccttcaaaaaggaaggacgataaggagcctggtgaggtctcaagcgatagcggctcggagtctggtgggcgcccaccagtgctgagggaggatgggggtcttggggtctgcagggatggaggtgcgttgccagcaagcaagaagaggaagcactcacctggattccacgatacgaatgtttcaaagctgcgggcaagagatgaggtgtggagcaggagaggacggactctctcggcaatatggcagcctgctaaagccttacacccaaccagttgtgactttgtggtacagggctccggaactactattaggagcaaaggagtattcgactgctatcgatatgtggtcattaggttgcataatggcagaactcttgtcaaaagagccactcttcactgggaagtctgagatagatcaacttgataagatatttagaatactcggcacacccaatgaggagcggtggcatggttgttccaaattgcctggcttcaaaggcaacttcgtaaagcgaccgtacaatagattaagggacaaatttccagctgtatccttcacgggaggcttgaccttgtcagaagctgggtttgacctgctaaataggttgctggcatatgaccgtgagaagctcatatctgctgctgatgaggtgaactatgagtgggtccgtgaagttcctctgcctaagatgaccaagtacatgccataacttgcttcactgtatgagagtattgatgactttgatatttagggtgagagacaagaaaactggtgagatagttgctttgaagaaggtcaaggtagataaggaaaatggacgggaagggtttccattgacttctctcagagaaatcaatatccttctatcctttgaccatccttcaattgtggatgtcaaggaagtagttgttggtggtcatgacgatgatacttttatggtgatggaatacatggagcatgaccttaagggtgtcatggaggcgatgaagcaaccatatagccaaagtgaggtcaaatgtttgatgcttcagctgctagagggcgtgaagtatcttcatgacaattgggtacttcacagggatctcaagacatcaaatctcctcttgaataaccgcggtgagttgaaaatatgtgactttggactctctcgtcaatatggcagcctgctaaagccttacacccaaccagttgtgactttgtggtacagggctccggaactactattaggagcaaaggagtattcgactgctatcgatatgtggtcattaggttgcataatggcagaactcttgtcaaaagagccactcttcactgggaagtctgagatagatcaacttgataagatatttagaatactcggcacacccaatgaggagcggtggcatggttgttccaaattgcctggcttcaaaggcaacttcgtaaagcgaccgtacaatagattaagggacaaatttccagctgtatccttcacgggaggcttgaccttgtcagaagctgggtttgacctgctaaataggttgttggcatatgaccctgagaagcgcatatctgctgctgatgccttgaaccatgagtggttccgtgaagttcctctgcccaagatgaaggaattcatgccaacttttcctgctctgaatgaacaggacaggaggatcaagagatacatgaagagccctgaccccttggtggagcaacagatgaaagaacaagggagcataggagatcatggcctttttgactgatctgaaagcagacaagtcttgctgcaaatgacagtttttgagtgagtaaacatgttgcaaggctaagagatcaaaggggaacagaaattttacttaagttccatgcagctagtgttcaaatggcagggttagctctctacgagaactgtcatattctaacctatcatcattataagttgcagatgtaatgcagttcgtctaaaaggtttggccttgcgtacacccagcattacctctgatacttgtaaagtattataaactgttgacttgtaatcagtaatcaatgagatattagtgacatcgtattttattttctctcttcgggcggtggggcttcttttgatcttttgattgtctttgcaagagttgaatgaagtgaaggaaccggtgcatttttattttcgcaaggaaatcgatactctcttaatgggaattgtaagcttaaagctgtggctgtatcaagagatgaagggttcacggatgccagattacatacctaactgactttttttgtggtcggtcctccaaaggtctcatctgtaattgtgaatccaagtgagttgagctcagctcttttgaatactttggtaatccctgccctcttcatcttcccactccagttctgtttcatcagctcatcatgatttatttatcattcctgtgattcattgcacgatcattatcaatttgtttctttatttgcatggacattaactgttacaaaatgccgccttcgccctcctgtgcccaccatagttattgaggcaggtaaaagaataaggttaagaatatgttaaattactccttgtgctttggttagatgatattaccaaaaatatatgttgaggtgtaagacaattctgggtttaagtgtttattctcaaacggttgatcaatcatggttttccacttccaagcttgatcctaaccaatccttatgtgatttaattgtcatattttgccactccttcctatcataaaaacatgccgtttaggacaagatttgatcaaaccttaaaacttaaaagctacaaacatttataacttctaatttatttagtttatgattgctgtgtcttgctttgtcagctaccatttttttcatgccataaaatggtggaattgcctgtagagttacataaatgctttctactaacctaagttgagatgtgtgccaatgtatcactgtatcaggtcccaattccacttgttataccatcttttttcttcactggggattgtttttgaataatctgctgataataccgctccgttcttttgagcttttataatctgccagaggtaactagttgactataaaatctgggaggatgctaccatgtgaattatgtctttctttttacctagttgggtaaaatgcgctaatggtttgctatgcctaaatatgaattcgagttgactatgttcctcattgcaatgtttgtggcacacaggtatagcacttctaattactcctgtgagatggctaatatttccgtgtttcttattgggttgatgtgttatatgattttggtaagaacaacagtaaaatacaatgaatcctggaaagcaagttgtgctaagttatataattttagtaaaacgtattcatgtctttgatactgatgtaattctgaatttctgatgtgagattccaacttaagtacctaactgctttcccagttgcctgaacttgtagggtatttaccattcttatgtcacttctctgaacttgcatgatattcaccattcgtatgtcattatagcatcttactgtcccttgcatttgtagttgcttggaattatgacgtctttagcacgatctgaagtagggagtatatgtaccacagaacgtctaggaattttgttgtagcagttcatctgagtatatccacttactcttaccatgtgcgattaaagtgcacttgagtttgtttacagcttgaaatgtccgcactggtagcagacatggcagattgttagggcacctatggagacgacgtcaaacacatttgaagttaggtgaacttgaatatcgacggagggcagctgataatttatgttggtcagtgaattgaataactatcttgacttatacctccgaactaggaaagcgcaattctagttctcctgagtgaaaccatctaaaggcagatcaaattcatggaaaaaatatcaatatttatgacatgtaacaggtatattatgagagtattttttaattaagaatctaatatttttattttgtattgtcaatattgatactttatataaatttggtcaaacttgatgccatagctgcggagctccctcttccttcgccgccccctatgtctgcggttggtgggtgctcaccaatggatccagaagttttggtagttccaaatgatgctgaaaggatggacgcgattactgagggggaagaggattgtgcaacgagaaacatttttacttcaaggtgggcggatgctgctgaagaggaggaagtggtgattgtgcctaagaagaagaaaagtgtgccacctgctcatttgcctgaacagaaatccacaaagaaaatcatgggctcacagctgggagaagcgatgggcagtaaaacatcaagaagttcctcaagttcgtctaac

SEQ ID NO: 106106 - DNA, 1057 bp, Zea mays
  unsure (1)..(1057): unsure at all n locations
  Clone ID: MRT4577_28271C.1
ggtaccctcggagtcggccgggcggcgtgcgtcctctgtcccgtgatcccttcctgtcgctgaagggagcggcagctagggtttcgaccatctctagcagtttcgccgtcctccagcgagagctcttctgctatcctgcggttcccaggcacgtgcttcttcttaccatgtgcttgcgtgattcctgcttgtctgctctgctctacggatcccggcgttctgctctgctctgctcgtcccagccgctctgcttcggatcgattccgtttcgtgggatttgcagcactccatggctgcggtgcggcacgggggttataggagcttcgacgtggccaggaggcgggagttcgacctggagcgttctaggaggagcaaggagtaccgccactctagccgccatcgtgactcggatcgccaccgtgatggcagcaggggccgtgaagtgcccaacgggtacatccgccaccgctcgccgtatgcgccactgatgagccaaccttcaaaaaggaaggacgataaggagcctggcgaggtctcaagcgatagcggctcggagtctggtgggcgcccaccagtgctgagggaggatgggggtcttggggtctacagggatggaggtgcgttgccagcaagcaagaagaggaagcactcacctggattccacgatacgaatgtttcaaagctgcgggcaaaagatgaggtgtggagcaggagaggacctgatgccatagctgcggagctccctcttccttcgccgccccctatgtctgcggttggtgggtgctcaccaatggatccagaagttttggtagttccaaatgatgctgaaaggatggacgcgattactgagggggaagaggattgtgcaaaaaaaaaaaaaaaaaaaaaaaaaaaaaagtactctgcgttgttaccactgcttaaggaaaaccccatcggacgctggcagtccttcttgctgttgcacctgtagtatccncagcaccaacaattcagacctctcgatcagaattttgnagaatcaaaaatgtaatttatctgaataacaatggtcaaa

SEQ ID NO: 106107 - DNA, 1068 bp, Zea mays
  Clone ID: MRT4577_28272C.1
atggcagcctgctaaagccttacacccaaccagttgtgactttgtggtacagggctccggaactactattaggagcaaaggagtattcgactgctatcgatatgtggtcattaggttgcataatggcagaactcttgtcaaaagagccactcttcactgggaagtctgagatagatcaacttgataagatatttagaatactcggcacacccaatgaggagcggtggcatggttgttccaaattgcctggcttcaaaggcaacttcgtaaagcgaccgtacaatagattaagggacaaatttccagctgtatccttcacgggaggcttgaccttgtcagaagctgggtttgacctgctaaataggttgctggcatatgaccctgagaagcgcatatctgctgctgatgccttgaaccatgagtggttccgtgaagttcctctgcccaagatgaaggaattcatgccaacttttcctgctctgaatgaacaggacaggaggatcaagagatacatgaagagccctgaccccctggtggagcaacagatgaaagaacaagggagcataggagatcatggcctttttgactgatctgaaagcagacaagtcttgctgcaaatgacagtttttgagtgagtaaacatgttgcaaggtgaggtgtacaactggacagagaagtatcccgtctacttggtgtgcggtgacagcttattgtgttctataacaggctaagagatcaaaggggaacataaattttacttaagttccatgcagctagtgttcaaatggcagggttagctctctacgagaactgtcatattctaacctatcatcattataagttgcagatgtaatgcagttcgtctaaaaggtttggccttgcgtacaccaagtttcacctctgatacttgtaaagtattataaactgttgacttgtaatcagtaatcaatgagatattagtgacatcgtattttattttctcttttcaagtagtgcatcttcttttgatcttttgattgtctttgcaagagttgaatgaagtgaaggaaccggggccttttttttttt

SEQ ID NO: 106108 - DNA, 895 bp, Zea mays
  Clone ID: MRT4577_28273C.1
cattgggtacctcgaggccggccgggggctgtttattcgtgatcccatcacaccagccgccgtcttctccctcactccgccacgccactaaaaccctaatccctcgccgccatggctgcggcgccggccgccacctcgctcctcatacgccacaaccgcaacccccacctcctcctcctccgcgccgcgatctcctcctcccgcgcactgtcccagcagccggagctgtctcctgacccgaccaccggcgcccccgaccccgccggcgccgccccactccccccaaaccccagcacggggagccccttatacagccagaactggcgcaaccccgccgcagccaacccgccctcttcgcttctgcccaccgtcgccgccggcagctccttcggagcgcagcaccgcatggccgccttctacgataagcccgacgccgcggggctcaaggaaacgtttgccaagtatatggcggagcagcggtgggaggacatgaagcttctgttcgaccactgggtgcgctccctcgacgccgccacggggaagcccaaccaccccgacgtcgacctattcaatcactacctccgcgccaacctcatgacgggtgccgtaccgcacgagatgctcgatctcgccgatcacatgcgcgagttcgagctcgagcccaacagtgcatcgtacaacctcgtgctcaagagcatggtcgccgataaggagtcctacggcgccgagaagctcattgaacggatgctgcaaacaggaacagttccagatgaagaatcctacaatttgggtgtaggcctgcttattagacagaaccttgttgactcatctctgaaggatttggatctgatgcttaaaatcggctacacgccatcactaactgttttcctgatat

SEQ ID NO: 106109 - DNA, 263 bp, Zea mays
  Clone ID: MRT4577_28274C.1
acaaggggatgggttttttaattattcccgaagaccacaccaaattttttccaaagaccaaaaaagcccgccgcaaaagttgccttggaaatttcacacaggattttttttttttttttttttcaacgcccccccatttaattgtggactttttttttttttttttttgactggttttttgcaagcatgaacttacccttttttccaaccaagcttttcccggggggacaaattttttccaccgttttttttaacagtttgtt

SEQ ID NO: 106110 - DNA, 374 bp, Zea mays
  Clone ID: MRT4577_28275C.1
agcagtggtaacaacgcagagtacgcggggcttgcagcactccatggctgcggcgcggcacgggggttataggagcttcgacgtggccaggaggcgggagttcgacctggagcgttctaggaggagcaaggagtaccgccactcgagccgccaccgcgactcggatcgccaccgtgatggcagcagggtttttgtagtgcccaacgggtacatctgccaccgctcgccgtatgcgccaccgaagagccgaccttcaaaaaggaaggacgataaggagcctggtgaggtctcaagcgatagcggctcggagtctggtgggcgcccaccagtgctgagggaggatgggggtcttggggtctgcagggatggagggg

SEQ ID NO: 106111 - DNA, 378 bp, Zea mays
  unsure (1)..(378): unsure at all n locations
  Clone ID: MRT4577_28276C.1
ctgctcgtttgttgcccctttccttccacgggccccctctccgntgcgacggcgagcccaagaaactttcctctaggagcgcatggaggtgtccgctgggctccggncgncgcccgncgctgnggcagcgnngctccgaggccgnnggtttgtgtttgtgtcgncgntngnggtttnnnattgggggcgggccgggccccccttttttcagtacaaagcaagngcaanncgagacccacaaagaaaanaaggaaananaaaaaaaaaaaaaatttttttttttttttttttttttagttttttaaanngggggtttttgnngnnggggggggggggggnggggggggnnngggggggnggggggggggnnnngggggg

SEQ ID NO: 106112 - DNA, 369 bp, Zea mays
  Clone ID: MRT4577_28277C.1
tgaggccgtatacggaggaggaggaggcctttacgacggccgactgcggttcggcgtcggtgcattcctcgaggagggagacgaggccttcgaccttggacttgacgtactccgccgggttcttcatggcataccgcacgtctgtctgcgccgcgaggtggatcacgtgggtgaagggcacgacgtctaatagcttggccagtaagcggccgtccttgatgtctccctccacgacgaaactcatcgtggctggccatcaacgcgcgctgcgcctttttgagcgatgggtcgtagtaggagttgaagctgtcgatgcctaccacacccttgccgcgtttgctgagcgccagcgagcaatgctctcccact

SEQ ID NO: 106113 - DNA, 365 bp, Zea mays
  Clone ID: MRT4577_28278C.1
tgggtaccccgggcccctcctcgagtttttttttttttttttttttttttaacaaagccttcagattgcacgcgtcgattgggctattatagataaccaatgataactatgtctcggcaagtgtactttccagcaggaacataaaataaaactgcaatccaggctcagtaaatctcaaagcagatgttgcaagggacacggcaagttcgacaaacatagaacaaaattaacagaattggggggcggggcaccagggcttcagggcagtctgctggcctcccggtcagactcgagcggggggggggtgtatccctcacgaacggggcgcttggcgggcgtcgtgatggagacgggggtggggatgc

SEQ ID NO: 106114 - DNA, 685 bp, Zea mays
  Clone ID: MRT4577_28279C.1
tttttttttttttttttgacaagcatctagatcttacctttattctttatttgcatctctttaatacttggcgcacatcactttaaaacaatgtgtgttgggcatctaatcaccaaaatatttattgaaatggcccaagggcacatttccctttcaaaactaatcgagcataccaacgaatgcgatgcctatacaaaaacacgatctaaccagttgaataaagtggacaggcagagtgatagtggccaaaaccaacctgtatccacggacgccttcgccagatctaggtcacgcacgccatcagcagcagaacaggagacccttcaggaggtgttggtggacccaaaaaaccgaaaacacacgaatgaggacgacggtagatgtatataggctgccacaatgcgaagaggggatggagagaggccgtgtagtacggggaggcatgtaaataaaaggaagaaagatacaaaccctgcgggtgtggaatggtgagcattatcgaggaccataacacgatagtgccgagacctattcgtcctgtagatctgtgcggcggcgaggtatgtgaggagcgtcacacattgtatcccatcctctctcgcagcagtagcaactgcgctgttttggctgaacaagtccacagaagccacacaaacattttctagcacgcatcgcaccgcgatca

SEQ ID NO: 106115 - DNA, 2973 bp, Zea mays
  Clone ID: MRT4577_2827C.1
atggatcctaagggcaaggggattgtgatcaatgacaaggagaaggagtcattcgtcaacgagcccaaggatgacaagactaccgacttgggctcgggccacaaacgcaaagatgggaagaagaagaagacaagacgcatcaaggatatcgtctactacgacgacagcgatgagtccacttcttcccaaaaggacaacgacgacaacgactacgagagaaggaaaccggttaattcaaacttttcttttgactactctcgtattccgcaaagtacaaatgctcattcgctctccattccacttggcaaacctcctcactttgatggagaggactacggattttggagccacaaaatgcgtagtcacctattctctctccatccgagcatatgggagattgtggaaagtggaatgaaatttgatagctcggatagtcctatgtttatcaatgaacagattcatagaaatgcacaagctactactgtgttgttagcctccttgtgcagggacgagtatcataaggtgagcggcttggacaatgccaagcagatctgggacaccctcaggatctcacatgaggggaacgacgtcaccttactcaccaaaatggagttggtggagggcgagcttggaagattcacaatgatcaggggagaggagccaacccaaacatacaacaggctcaagacccttatcaacaagataaggagctacagaagcacacaatggacggaccacgacgtcgttcgtctaatgctaaggtcctttactgtacttgatccacatttggtgaacaatatctgtgaaaatcctaggtacaccaagatgtcgcccgaagaagttcttgggaaatttgtaagcgggcgaatgatgatcaaggaggcaagatatgtcgacgacgcgttgaacggtccaatccatgagcctcaacccattgctctcaaggcaacgaggagcaaggaggcgctacctagcaaggtggcgcaagttgaggcggccgggctcaatgatgaagagatggccctcatcatcaagcgcttcaagacggcgctaaagggtcgcaagggacagccaagcaagaccaagacaaaggggaagcgctcatgcttcaaatgtggtaaggttggtcattttattgctaactgtcctgacaatgatagtgaccaggaagaagggaacaagagggagaagaagaagaattataagaaggcaaaaggcgaggaacatcttggcaaggagtgggactcggattgttcgtcgtccgactccgacaacgaaggactcgccgccactgccttcaacaagtcatccctcttccccaacgagcatcacacttgcctcatggcaagggaaaagaagggtctagatagagccaaggtggataaaataaatgaattgattgatgctttgaatgataagaatagattgctagaaaagcaagaggatctcttatatgatgaacatgacaagtttgtagaagctaaaaaatcccttgctttagaaataaagaggaatgaaatgctttcttgtgaattgtctacatgccatgactctatttctagtttaaaaagcataaacgatgacttgactgctaagttagaaatagctaataaatcaacatcttgtgtagaacatgttgtggtttgcactaggtgtaaagattttaatattgatgcttgtagtgaacacctagtttcaatttctaaattgaatgatgaagtagctagtcttaatgcccaacttaagactagcaaaagcgaatttgataagttaaaatttgcaagggatgcctacacgattggtagacacccctcaattaaggatggacttggtttcaagagggaagccaagaacttaacaagccataaggctcccatccccgccaaggagaaagggaaggcccctatggctagtagtactaaaaggaaccatgcttttatgtaccatgatagaagacagtctaataagagttgtaatgcttatgatgcttttgactctcatgccatgtttgcttctagttcttcctatatgcatggtaaagatatgtctaggagacattttgttcatatgcctaggagaaatgttgttaatgttcctaggaatgttaatgaaccttctacaatatatcatgctttaaatgcttcctttgctatttgtagaaaggataggaagatagttgctagaaatataggggcaaaatgcaagggagacaaaacttgcatttgggtccctaagacaattgtgactaaccttgtaggacccaacaagagttgggtttatgcatctgggggttcaagctggattatcgacagcggatgcacaaaccatatgacgggggagaagaagatgttcacctcctatgtcaaaaacaaggattcccaagattcaataatattcggtgatgggaatcaaggcaaggataagtctgaaacccaagggaccctcaagcgcttcctaaggagagctcaaaatgagtttgagctcaaagtgaaaaagataaggagcgacaacgggtccgagttcaagaaccttcaagtggaggaatttcttgaggaggaggggatcaagcacgagttctccgctccctacacacctcagcaaaatggtgtggtagagaggaagaacaggacgctcatagatatggcgaggactatgcttggagaatttaagacccccgagtgcttttggtcggaagccgtgaacacagcttgccacgccatcaacagggtctaccttcaccgcctcctcaagaagacttcgtatgagctactaaccggtaacaaacccaatatgaagaagatgttccgacggccgctatacgaaccatggcgattggagaagtgcggccacaggaacaagatgaacgagatcaaccttcttcctcaacaacggtgcatcccccacctcaagatgatgaataggttcatcaaaaggagacgtgtgatcaagggggagcacaagatgttcacgtga

SEQ ID NO: 106116 - DNA, 247 bp, Zea mays
  Clone ID: MRT4577_28280C.1
gccacgcgtgcggccacgcgtccgcggacgcatagtgcgggcgaggtgcctgcccggcgacggcatcctcacggtgtccgagaagaggcacccggacttcaaacggatgggcgacgacctggtgctcaaggccgaggtgccgctgatggacgcgctcactgactgcgccttatcgatccgactactatgcggatggaaggtgagctgctcaatcccagacgaggtcgtgcggacctgctacgagaag

SEQ ID NO: 106117 - DNA, 223 bp, Zea mays
  unsure (1)..(223): unsure at all n locations
  Clone ID: MRT4577_28281C.1
atttttggtggtaaccccaggacaagatacgtaannaagggggacctttttatgaaaacagcgggaaattcacccacaagggggcagaaagggacgacggcacaaataaacaggggggactccccaaacgaaaccaaagtgacaaacactggggggaaacacaccaacggccccaaatgcgaacagggagaaaaacgcgagagacaccagccaaaacgaaaaa

SEQ ID NO: 106118 - DNA, 452 bp, Zea mays
  unsure (1)..(452): unsure at all n locations
  Clone ID: MRT4577_28282C.1
gtgccgccgccgcccgggcgtgtggtggcgatggggtaccgggcgggcgacgactacgactacctgttcaaggggggctcatcggggactccggggtggggaagtggaacctgctctcgcgcttcacgcgcggagggttgaggctcnagtccaagtccaccatcggggtggagttcgccacccgcagcatccacgtggaggacaaggtggtgaaggcccagatctgggacaccggcgggcaggaaagagaccgngctatcacgagcgcgtactacctgggagcgggaggggcgctgggcgtgtacgacgtcacgcgggacgtgaccttctagaacgtggagcgggggatgagggagctgagggaccacacggacgccaacatcggcatgatgctggtagggaacaagggggacctgcgccacctnaggggcgtnccgaccgaggacgccaag

SEQ ID NO: 106119 - DNA, 236 bp, Zea mays
  unsure (1)..(236): unsure at all n locations
  Clone ID: MRT4577_28283C.1
gccttagtttgtgtttggttttttttcgcaaaaaaaagagaaattttattgggctggtncacattttctgttgtgaagacaaaggggaacacaaatagcatcgatcgcgtcacacacacaaagaagtaaagcaaacgagctagctagctgatcaacagacgatggctcaggcgctcaggtgnngctggtgtgctgccgcaagccgacgccctcgttgacgccggagacgagctcgg

SEQ ID NO: 106120 - DNA, 160 bp, Zea mays
  Clone ID: MRT4577_28284C.1
gcgtccgcacatatgtccgcggacgcgtgggcagacgtgtgggtcgccatgccaagtgcagctggtcatctgaaggagtgctcaagaaccagcaattttcgtgggtgcacgacactctgggagataagcttctgcatttacatgatgcattttgcatgtt

SEQ ID NO: 106121 - DNA, 1179 bp, Zea mays
  Clone ID: MRT4577_28285C.1
cgagcgccgccggccggctgcaccggcgcgcccgctgcgaccgaccccgacccgccctcttggcagcggacagcggagttcaccactcttggcgaagcgaaatccaccgtacaccgctgcctccctgtccctgtctcgtcgaaccagccgagcaagccaaggggggcccagcgatcctcgtcgtgcgtcctcctcccccacggagggaaggatggcttggtccgaggacatggcggaagccgacgagatggagagcaggggtgtgcagagctcggctagcccgtgtcgccgccacaagcgggagattggagacgacgacgacgacacggaggaggagggctagcccgtcccaccggcacaagcgagagatcggaaatggcgaggacgcggaggcctcggcgtcgttgtcggcgtccgccgaagtcctccccgggggcgaggtcgaggcgatgcgcccgttcctcaagttagtgagggccaacaagggggctccatgtttgacgctggctcaagagctagccttgccgatcactgggggcctgacctcctccggggctcaccggttttgtgcccgcatgagaccctccatagtctaggcgaccaatgttttttcagcacccacacccagcctgggtggcgcccaaagatcaagcgggagatttagactatgaagttgatcaaacatcccaatatggtccaactgcatgaggttatggcgagcagaacgaagatatacatggtccttgaatttgttgatggaggtcaattctggaaggctaggagaggatgaatctaggatatattttcatcaacttataaatgcaattgattattgccatagccgaggagtgtaccatagagacctgaagccacagaatttgcttctggattcaaatggagctcttaaagtttcaaacttcggcctaagtgcatttgcaccacaaacaaatgtatgatctctagtcagtaactagaaacaaatgtactatctaggcactctgtgtcacgcatgtgacccggtcccggattcatgacccatagtcatacgagtgtaccctctttctaaccatccaagcactccatgtcatgtatgttgtacccagaatgcacgatccatagtcatatgaggtagaacaacccacatagtactggatgatgagatgggtcttattatgacta

SEQ ID NO: 106122 - DNA, 471 bp, Zea mays
  Clone ID: MRT4577_28286C.1
atttctaaaaaaaaaaaaaaaaaaaaaaaaaaaaaaaaaaaaaaaaaaaaaaaaaaaaaaaaaaaaaaaaaaaaattttaaaaatataaataaaaaatgacccaaagataaaaaaataaaaataaaaaaatgtttttccctccccggggggccttttaaaggggcaatttttgaatttttccttccccttgggggcgtttcccctttttttttagggggcccttttccccttttagggggtctttttccatttctttggccggctttttacaccttcgcgtttgggaaacccttggttttccccacttttttcgcttggggcccttccccttttccccagttggggtttttgcaaatgggccccccccgttcccctttccaaaaatttgggcatcttgattggcaatgtgcccccccttttcctggccttttatccccgggggttgtgggggttccccccacggtgccctt

SEQ ID NO: 106123 - DNA, 789 bp, Zea mays
  Clone ID: MRT4577_28287C.1
agagcagtcacaagcatcggctggatggagaaattaaagcatcggtcaggagctaaagagaatcacgtagcgtagtacgggtaggcatagatagcatgttcatgttctctccaacaacagtcagcagatttgtctgtctctggctctctgcactgcaaatctatttattttccaacccaactacaactatatacatgcattcttacgtagcgcgtgcttgcttgtttccgatgaattaatggcgggcggcattgcatgcatgtatagggccggtgaagggatccaagacgtcgatcaatggatcgatatgaatgatgatggcgaaggagtactaagcatgcaagcccctccccgcagcagcaggctccggtgctgccatgggggtttcctcctgctggtcgcagcacgccgccccgcacctccggcacagcggcgatacgacggagacgatggtggcgcggcaggaggggcagctggcgtgggcggcgagccaggtatcgacgcaggccgcgtggaagccgtgggcacagcgcggcagcacacggagctggtctccctccacgaacgccgccaggcagatggcgcactcctccttgtcggcggcgtctcttctacttgcttgtttcagggaagaagagacggagacggtgggcagcgcctcgatggccgccttctccagtccgctgggcgcctgggcggacgacctgccgccgctggtggtggccgacactgaaacagaggctcctcctcctctacggcaggcgcaccgggcgacaagcgcgaggccag

SEQ ID NO: 106124 - DNA, 501 bp, Zea mays
  Clone ID: MRT4577_28288C.1
ggccgctttttttttttttttttcgatataaaaattttgtgatacttataaaagcttatacctgcgaataggaggaacaacagttagtttgtaactacacccgcacgctttgatctgtgaagctgctatggttatatcacccacgcacaacgaatcatagttttcggtacgaaacccaggtttaatactgaatccaatgaatgaaccctacgcatctggctacggttcgaccatagaaagatccgcgaggtatcatcagagtctgcaagacttacacactgtatcgagcgaccttataagcatcaggtcgtagacatttatatatcatacacatcaaaggtactgccgaactataatatcagcaaacgtgaagcacagctatcacgaatatgctagatcgtttgtgaatcagcgactcactatattcagcccagcgcttgattaataacgagctcacagctttggcctcagccgaatcttgagatttaatgttgttgcaca

SEQ ID NO: 106125 - DNA, 350 bp, Zea mays
  Clone ID: MRT4577_28289C.1
tcacgttcacgagactacttggtgtatgggtgcgcgatatacccccgggttgatcttgtttttattaggcactaccctgaaacccatgaagaacagagcgggaatgcttcatgacttgccattcgagatatttcaagagaacaacaaggcaaggctgttaatgtttgaatgggagatactcatggtaaaaggatgcctattcggatgcctaaagaaatcactacgccattgctggaggagttcctttctcacgtgaatatggattaagaaggcgatcatgctgatatagaggacgatatactacgggttcttattttatctatactgactgcaaaaaatgcgagatttga

SEQ ID NO: 106126 - DNA, 650 bp, Zea mays
  Clone ID: MRT4577_2828C.1
cccacgcgtccgaactaacaacagctcaggctgaaacagcgatgacgacgacgacgacaacgctgccgacggggcgcgccgtggccctgctgctgctcctgctggccacgacggcgacggaggccgcgaacccgtgcaacccggcgcagctgacgccgtgcgcggggccggcgctgttcggcggcgcggtgccgccggcgtgctgcgcgcagctgcgggcgcagcaggggtgcctgtgcgggtacgcgcgcagccccaactacgggagctacatccgcagccccaacgcggcgaggctcttcgccatctgcaacctgcccatgccgcgctgccgttattagcgggcagtagtatatatactagctagctattccaatacaatcatgctcagtcgttggtatatcgtaagtactcatgtgaagcatgcggtgcacaccatggatcatgtaggacgttctgttacatgaataaaatccaggacgtctgagtttgtgcggcaatataggtgtgtagggatggaaaaaaaaaatcgcgaatcaatacccgcgaaacaaaactcaactcatatctgtatctataaacgttcgtgggtatggatctctacttatatccgtatccgtcgggtattcgctattcgacggatacccgtt

SEQ ID NO: 106127 - DNA, 196 bp, Zea mays
  Clone ID: MRT4577_28290C.1
acgcgtgcggacgcaacaacctgcaagccaacagtcctgctgctgctattgcgtccaacctgtcgggggagcaagacgcgcctctctggctgctcaacagccgtgctccgagctccggagtgtatgtaacttgcgagcatacaggatgtcaacacaaatgtctagtccgaatgctgacacaccgctactacttcta

SEQ ID NO: 106128 - DNA, 410 bp, Zea mays
  Clone ID: MRT4577_28291C.1
attcggctcgagggacgccggggcgaccgttttttcgccctttctgtcgctactatcacgggtggcgcagtctcggaccggcctgttcgcgacgactgcctgctgcgcaccagaagagatcactgatgctggtgcgcaaacgccgagacttaaggacatagcgggctctatagaaccggacacccagaattacgacaccagatacgacccccggctacgtctctgacgtcgtgctaggattaaaggacggaatcaccaaccccatggggggcgccgtcgtgaagcacatgatgatcgtgccgatcgtcccgaccggcaagaaacggtgcaagatgaagggcggcaacaacgggtggacccactaggcctgcctgaagggcaagaagaaggcgaggctactggtcgggctc

SEQ ID NO: 106129 - DNA, 471 bp, Zea mays
  unsure (1)..(471): unsure at all n locations
  Clone ID: MRT4577_28292C.1
ggcgctcgctcagaccatcatgaagcaggacgtcgccgtcaacctcaccaagttccggcccgtcctgctgcaggcgctcgacaagctgcagcagtgacggactggggttccttttcctgttcatcttcatcttcctcttcctcttcctaggaatgatcgaatgaattcgccattgccgaccggcaggagaagctcagctcgtcggccatgagatggccgggattgaggaggctagctgctgctgctggcctgctgctgctcctaccaagtacagtactattgctagaaaaaaagaggggaaatcagggaggcttcaactttcaatcaaattggtaatttgattggttcatcggccgccggtttgtcttttttttggtttgtaactgtagtagtaacaagagaagagcttggatagtgcactacatacactacacacgaacaggaattatgttcattctttcaaaanaaaaa

SEQ ID NO: 106130 - DNA, 319 bp, Zea mays
  Clone ID: MRT4577_28293C.1
tggggggggcaacgggagcatttaataccatattgggttttttacaaatgtgttttacactgtgataagaaaggtgcggaagcaccatgctggcttaagtgactggtgatggagacgttaccagctatggcagcgcgcgaggtagggccaccagagtatggctgtttcagcccttaaagttgttccgtgaggaggtggttttaccatgggccgctgaggtggactagacaccaagaggagcctgtgacagcaggcctagcatgttattgccacatcactggccataacagattacctctattagcgggcttccgccaca

SEQ ID NO: 106131 - DNA, 165 bp, Zea mays
  Clone ID: MRT4577_28294C.1
gccagagagcgggcaaaacacccacagagagggcgcgggcgagggacgcaggacgtgccagcagagacacccagaaaactgaagacggaccctcagacaaggaccggagagggggcggggctggcagcgcaaacaacaatgcgagcagcaccgatgctgacaagg

SEQ ID NO: 106132 - DNA, 855 bp, Zea mays
  Clone ID: MRT4577_28295C.1
agtatatagggtgcatcacatgcggccgctgatacatcttcatttcacatcaaaatttctcctctttctatccatggccacggacgcacagcaccagcgacacagccgcaacggcggcgtgcacaccggccaccacttcctcatcgtggcctacggcatccagagccacctcaacccgtgccgcgtcctcgcgcaccgcctcgcgcgcctccacggcgtcgacggctccggggccgtcctcgccacggtctccctcccggtgtccgctcaccgccgcatgttcccttcgtccggagacgtcgacaatgatgataaagccaccgacggcgtcgtctcttacgctccatactccgacggcctcgacgacggctccatggccagggacggcgaggcgagggcgcgcagccgccaggccacctttgagagcctgtcagccgtcgtcgccaccctcgccgcacgtggccggccggtgacgtgtgtcgtttgcagcatggttctccccgcggcgctggacgtcgcgcgtgagcacggcatcccgctggccgtgtactggatccaaccggccaccgtgctcgccgcgtactaccactacttccacggccacggcgacctcctcgcgtcccacgccgccgaccccgcgtacgaggtgtccctgcccgggctacaccgccctctccggatccgcgacttcccgtccttcctcgtcgacacgacgggcagcgagctggccaaggtcttcaacgaagcggcccgagaactgttcgagcacttgggcgatcacggctgcaccaaggttctcgtgaacactttcgacgagctggagccggcagcgctggcagccatgaaggagcacct

SEQ ID NO: 106133 - DNA, 1281 bp, Zea mays
  Clone ID: MRT4577_28296C.1
ccgggacgcagagcccgctagcttgtagctacacactcctgcttccgtatactatgctcctcgtcctgccccctggcggccccccatttagtttgaagcggtgctagctagctagctgctttgctcagctcgcaagcatgcatataaactcttgtctcttctcacgcagtgacgcagagctagctagctagctgcgcatcggcagtacgtagatcccgggcggcgggcaatcgaaccgcaaacgcctctgggtttcgggaagggtgctttgctctttgcagccagctggccggcgcccctggtgttttatataacttggaaggttcagtcgctgacagagaggaagaagaagaagaaggaggaggaggaaagatggggaggaagctgggcctcgacagggtcctcgactgcttctcgctctccctgtgctccagcgcctgcgcctgcgtacactccgtggaggaggaggagcaggaagacgaggacgagcggaaggccctggtgagcagccagctggaagagctggtgaagctgagcagggatctcgtcggcggagccgccaagaccctcgctttccatctggaaccaaagaccgtggagctcaaggtgtccatgcactgctacgggtgcgccaagaaggtccagaagcacatctccaagatggacggcgtcacgtcgttcgaggtggatttggagaagaagaaggtggtcgtgatcggggacgtgacgccgtacgaggtgctggcgagcatctccaaggtgaagttcgcggagctgtgggtggccccccaacaaccccaagcagcaagccgctgcggaaaggcgcctgcaggtggtgtagtgtagaagatctcccaatggatgctcatgtgttctcttgtattcatcctgcatgcatgggcatggctgtagctcaggcgggcgggcgggcgggcaaaaccactcagaaatgtaagccaccaggaagcaatgcaagcaaccgtgtgtgcgtgcgagtgcaaacgatttggacgtgggggacacctcacgtacgccttgcaacatgttgctctgcgtttttttttatgtaaaagggcaattggggtaacgcggcgagcccaattataccgttgatttgatacgggtgagggagagaatgaggaggaggaggaggaggagctcgggcccgctgctaaatcctagatttagcttttataaatagctattagtttgatactcgtttcattatattaaggataaaatatatccgcaattcatttaaaataaattatttaataaaaa

SEQ ID NO: 106134 - DNA, 875 bp, Zea mays
  Clone ID: MRT4577_28297C.1
cccgggcagctcgcaagcatgcatataaactcttgtctcttctcacgcagtgacgcagagctagctagctagtagctagctgcgcatcggcagtacgtacgtagatcccgggcgggcaatcgaaccgcaaacgcctctgggtttcgggaagggtgctttttgctctttgcagccacagctggccggcgcccctggtgttttatataacttggaaggttcagtcgctgacagagaggaagaagaaggaggatggggaggaagctgggcctcgacagggtcctcgactgcttctcgctctccctgtgctccagcgcctgcgcctgcgtacactccgtggaggaggaggaggaggaagacgaggacgagcggaaggccctggtgagcagccagctggaggagctggtgaagctgagcagggatctcgtcggcggagccgccaagacactcgctttccatctggaaccaaagaccgtggagctgaaggtgtccatgcactgctacgggtgcgccaagaaggtccagaagcacatctccaagatggacggcgtcacgtcgttcgaggtggatttggagaagaagaaggtggtggtgatcggggacgtgacgccgtacgaggtgctggcgagcatctccaaggtgaagttcgcggagctgtgggtgggcccccaaccccaacaaccccaagcagcaagccgctgcggaaaggcgcatgcaggtggtgtagtgtagtgtatgtgtagaagatctatctcccaatggatgctcatgtgttctctagctcgtattcatcctgcatgggcgggcggtcgggcgggcaaaaccactcagaaatgtaagccaccaggaagcaatgcaagcaaccatgcgttcgtgcg

SEQ ID NO: 106135 - DNA, 292 bp, Zea mays
  unsure (1)..(292): unsure at all n locations
  Clone ID: MRT4577_28298C.1
cctggcttggtatcagatgctctggcgcaatatgtgttccagtgacatgcccttttcggcgcgtgcttccctgctggtgtcgcgtgcgccttttcggttggaacattttctgcctttcttggtgcggtctcaananaaatcantgctnnanatnananaggggcancctgcaccagctganagaccacgnnggatanngcnnctagaatnacatgtcangnatgcagagnntcncgaaagaactcttgaagaanctttagaagcgaaaggagtnntccttgctcngctcaaa

SEQ ID NO: 106136 - DNA, 313 bp, Zea mays
  Clone ID: MRT4577_28299C.1
aaaaaaaaaaaaaaaaaaaaaaacacaaaaaaaaagaaaaaaaacggaagggatatactggggaggggtcttcgatatttatgggattctaattcattttttaaattaaaaagggaccgcttttcttttttctggcctttgttttcccctcgagggcactgagttgttccctgtgtttattccaatttattggggcgtcgctctcggggctccttttttcagcagccgtgtttgtgaccaggctggctccccttgtttctcccccctgttttcccccctggttggcttttgggggcgtccttgtaaacgggcc

SEQ ID NO: 106137 - DNA, 2703 bp, Zea mays
  Clone ID: MRT4577_2829C.1
atggatcctaaggggaagggaatcgtgatcaacgacaaggaaaaggagtccttcgtcaacgagccaaaagatgacaaatccaacgactctggctcgggccatagacgtaaagatgggaagaagaagaagacaaggcgcatcaaggagatcgtctactacgacagcgacgaatcctcttcttcccaaagggacgacgaccacaacgactacgagcaaaggaaaccggttaattctaacttttcctttgactactctcgtattccgcaaagctcaaattcacatttgctttccattccactcggcaagcccccacactttgatggggaggactacggattttggagccacaaaatgcgtagtcaccttttttctctccatcctagtatatgggagattgtagatagtggaatgcactttaatagttcggatagtcctatattcattaatgagcaaatacataagaatgcacaagctactactgttcttctagcttcattgtgcagggatgaatataacaaagtgagtggcttggataacgccaagcaaatctgggataccctcaagatctctcatgagggaaatgacgctaccttgctcaccaaaatggagttggtggagggcgagcttggacggttcgcgatgataaggggcgaggagccaactcaaacatacaaccggctcaagacccttatcaacaaaataaggagctacggaagcacgcgatggacggaccacgacgtcgtccgactaatgctaaggtcctttactgttcttgatcctcatctagtgaacaatattcgtgagaatcccaggtacacgaagatgacgcccgaggaggtactcggaaaattcgtaagcgggcggatgatgatcaaggaggcaagatacgtggacgacgccttgaatggaccgatcaacgagcatcaaccccttgctctcaaggcaacaagaagcaaggaggcgctacctagcaaggtggcacaaattgaggcggctggacttaatgatgaagagatggctctcatcatcaaacgcttcaagacggtgctaaaaggtcacaaggggcagccaagcaagaccaagacaaaggggaagcgctcatgcttcaagtgcggtaagattggtcattttatcgctaactgccccgataacgatagtgaccaggaacaggggaacaagagggaaaagaagaagaattacaagaaggccaagggcgaggcacacatcggaaaggagtgggattcggattgctcctccgactccgacaatgaaggactcgccgccaccgccttcaacaagtcatccctcttccccaacgagcgtcacacttgcctcatggcaagagagaagaaggtaatcactcgtaatgatgtcacttatgattcttctagtgacgatgagtctagtgatgatgaaatagattactctagtttgttcaagggattagatagaaataaaattgataaaatcaatgaattgattgatgccttgaatgaaaaggataggcttttagaaaagcaagaggaccttttatatgaagaacatgataagtttgtagaagcacaaaaatcacttgctttagagattaagagaaatgaaatgctttcttgtgagttgtctacatgtcatgattcaatttctagtttaaaaagcataaatgatgatttaaatgctaagctagaaaaatctagtaaatcaacatcttgtgtagaacatgttgtgatttgcactaggtgtaaagattttgacattgatgcgtgtagtgaacatctagtttcaatttctaaattgaatgatgaagtggctagtcttaatgctcaacttaaggctagcaaaagcgaatttgataaactaaaatttgcaagggatgcctacacagtgggtagacacccctcaattaaggatggtcttggcttcaagagagaggccaagaacttaacaagccataaggctcccatctacgtcaaggagaaagggaaggcccctatggctagtagtgctaaaaagaatcatgctttcttgtactatgataggagacatgctagaaatgcttataatgattttgattcacatgcttatgattcttatgctatgactgcttctagttctcatgttgtgcatgatagaaaggtttatgcatccgggggttcaagctggattattgacagcggatgcacaaaccatatgacgggggagaagaaaatgttcacctcctacgtcaagaataaggattcccaagattcaatcatattcggtgatgggaatcaaggcaaggataaaacagatacccaagggaccctcaagcgcttcctcaggagagctcaaaatgagtttgagcttaaagtgaagaagataaggagcgacaacgggtccgagttcaagaaccttcaagtggagaagtaccttgaggaggaaggaatcaagcacgagttctccgctccctacacaccacagcaaaacggtgtggtagagaggaagaacaggacgctcatcgacatggcgaggacgaggcttggagagttcaagatgcccgagaggttttggtcggaagccgtgaacacagcttgccacgctataaaccgggtctaccttcatcgcctcctcaagaagacttcgtatgagcatctaaccggtaacaaacccaatgggtcatactttcgtgtttttgggagcaaaggttatattctagtaaagaaagggtag

SEQ ID NO: 106138 - DNA, 166 bp, Zea mays
  Clone ID: MRT4577_282C.1
atattgaaaagccaacacttattttggagcacatcagacacatttagttccatgacatggtaagctaaacatacccaaggatagcaaatatcgctgaacttcaaagggccaaccttcgtcccaaccatgcatcaggacatagggcttgcaaactctaaaaacaata

SEQ ID NO: 106139 - DNA, 386 bp, Zea mays
  Clone ID: MRT4577_28300C.1
attctcgggggctagccacgggaaaaaacatcataacaatacaaacaaagcaaggaaaatatttctacacaaacaaacaaaaaatacaaagaaatatccaagcattcctgcacaaatcgaaacggcatcacaaccgacgattggacagacacagcaggagcagaatttacaagagattggaaagatctcgcgttcgcgaggaatttccgcacgattcgtgatgcaagcaatcccctcaaaggaggcgccgccggagggggagcaggaggggcgaggcgagaacgcgcaccttcttaataacgagcgggccgaggaagaccacggcagcagctccggcccctgcaaggaagatcccaagcacggcgaccttggcccaccaccggatc

SEQ ID NO: 106140 - DNA, 294 bp, Zea mays
  Clone ID: MRT4577_28301C.1
atgatcttggcgacgccgctacgtagcttagatacgctcgagtggcaattttggcatccataggccgaacggacgttccagatcgcttcgctctcctcctcaggcgaaaagccgcggaccgcgtgccagcccataacgaaaaccagcgtctagtccacccagctaagccaggggaggcgaacgcaaccgcaagagactaccgagagaggaggcagccgcaaaaaggaaccaattaactagaaaatttattctcgcgtgcgacgaaacctcgagacgccgaggcagacgagacga

SEQ ID NO: 106141 - DNA, 1329 bp, Zea mays
  Clone ID: MRT4577_28302C.1
ggtcgtctaaaaaagcagcagctgctcttctcttctgctagcagctttatttgcctgcctccctaccggcgagggaggtacgtgcgccgatcgagaagcagcagcagcaattaataactaaacatggatcaggcggcggaggagtcttgtgttcccccaggcttcaggttccaccctacggaggaagaactggtgggctactaccttgccaggaaggtggcctcccagaggatcgacctcgacatcatccaggaggtggatctctacaggatagagccatgggatctgcaagagcggtgcaagccgcagcacgccggcggtgggcacgacgagcagacacaggagtggtacttcttcagctacaaggaccgcaagtaccccagcgggacgaggacgaaccgcgccacggcggccggcttctggaaggccaccggcagggacaaaccggtgctgtcgtcgtccaccaggaccaccaggtgtagcagggtcatcggcatgaggaagacgctggtgttctacaagggcagggcacccaacggcaggaagagcgactggatcatgcacgagtaccgactccaatccaacgagcacgcaccggcgcaggaggaaggctgggtggtgtgccgcgctttccagaagcctatccccaaccagcggcccttcttccccaccagctacgccggctactacgaccacaacctctcaacgacggcacggctgcacgtagacggcgaccgccatttcctggcgggctcatcagcagcagcagcagcactgctacagcagccaccagggcttgcaggcagcagcttcccgcagctgtactccgacgacgacttggagtccaagaagcagctgttgagtatcccgccgctggagagccccactgccatggcctgctgttccgacgccggcggctacgcgcagagaagcagctacgatgaacatgagatgatgatgatgatgatccagcagggaggaggaggaggagagcaagctgcagccgccatcgactggaactttctggacagcctgctgtccgcgacgtcgcaactccatgggccctcgggatccttgttgcagtgacctccggccatcgtcgatcgatccatctttctttgatccagcggagaacattattcattcatcggcattatacaatatatttattagttgcatacacacacagagtatacgtatatgctaataattcagatgtgttcatacacacttccattgtcatgtgtagttcgttgcgacttacattacagactgccttagatgattcaggtatactgtatacaacatgatgcacagtatagtaggagt

SEQ ID NO: 106142 - DNA, 358 bp, Zea mays
  Clone ID: MRT4577_28303C.1
attcataaacacaccaagcggagcgcactagtaacgacctaacaacaacggctgcgaagaggttagccctccttgcggtgcttgccgtttttgtgagcggcacaaatgcggtgattattatacaatgctgacttgttgctagtggcgttattacacaactgctcccaccagctacttcaatggggtgcgaacacctagctgttgaagccgacatgctgcaacaagcggttgttgcgagcggcttacaacaaccacattgcgaattgttgcaacaatccttgtcgcatcttacaatactagccgtcataacgcagcagcagcaacagttgctaccagcactgatgcacctagtcatggt

SEQ ID NO: 106143 - DNA, 296 bp, Zea mays
  Clone ID: MRT4577_28304C.1
tcttgcggtcctgcccctttcgtctcttcgcctccgcccccgcgcggcctccgcccccgcgcggcgggtgaatgccgatggttgccgcctcgccagagaagctccactgcggcgaggcggggtcaggtgacaaagaaaaggaggtggcggggagggatgatgccgaggttatgtcgccgcagctctcggatgagccgctgcgggataaggcgcaacgcatccaggtcatgctcaccggatgcatgtccgaacgcctccctgaccgcggcaagaagctgctcgccacactcgatgcc

SEQ ID NO: 106144 - DNA, 245 bp, Zea mays
  Clone ID: MRT4577_28305C.1
cccacgcgtacgaggacgcgtggcctgcagttcaccagcaataagagtctctgatattgtcaacatactgaataccgaatatccaacatacacttaccctaaaaaattccgttgacgcggaatgtagcaacacatacaacacggagaagcttcgtaagctagggtgaacctctaggccaatggaggacaccctacaagacagcaacgaatgctacagagctatgggcttcctgaactgagcttcc

SEQ ID NO: 106145 - DNA, 704 bp, Zea mays
  Clone ID: MRT4577_28306C.1
gggggtgatatactttattgttccttaatttgcttagcatgttcggcgtcatgcaacacactggttttacatgtagtccaacagtcgtcgccatcgaagatgttgggaacgcctcttgggggcgacgaagacgacggcggtagcagtggcgcgaagaaatagagggtgcaggagcagtcgcaccaccggagtcctcccaaacccaggcttagcttcacctgtatggcgtagtagccccgcgcggcgtcgtccgcgtacgtcctggcgacgaccgcgccagcgggctgctccccgcgcacgtcccagggaaccgtcgccgtctcccaataccccacccggaaggccgccggcaggctggatcccggccccagctgctggccgccatacatgggcgccacggcaagcttggcgaccctctcggcgtcacggtggtagtttttgttgcggaagccgtatacagcggagaggctgtatgtcagggtggagttgctggaggaggagtccaccatgtccatggcgtggagggttccattctccacccaaacgtcgaagatgcccggctcgggcgcccctacgaggatcagaaacccgaaaaccagcaccaaaaaggataccataccagcgaaataaaagcagccagtaccgtcgttccctgcttcttctggcatggctctctgatgatacgatcgatgttaacttccttc

SEQ ID NO: 106146 - DNA, 1799 bp, Zea mays
  Clone ID: MRT4577_28307C.1
taataataaaaagattctcgattcgatttactcgcccccacgcgtccggtgggttgcagcgctgcaatcattcttcttgagacatttgacaatttgttccttttaggagcacctaaaattctcccgggctccgccaagaaaccgccccggcggggctcgcctcggctcatctcatttttctatttcggcccctctactgttccaataataataaaaagattctcgattcgatttactcgccaattttcagtgagcggcggcgatcggcttcggatcggcgcagcgcggcggagcggagatggttgccgtggcggtggatggcctgatccgcggtgcggacgccgtgccggcggcggagagggaagcggtgagggcggcagctgcggaggcggcggccaagggcggtgagggggaatcggggaaggaggaggtgagggagtatgagagcgacatgaggaagctggaggagctgctttctaagctgaacccctcggcggaggagttcgtgccgcagtcccgccgccgcgtggacggcggcgctccccgcctttcggccgacgcgcccgtgttcgtgtcgccggcgatcgactactacgcgcgccaccaccagctcccgccgccgccgcttctgcagcagcagcagccgatgcacgtgctgcagtttgtgggtggcgtcggcggggttggcatgggtggcggcggggggatggactccagcagcgacggatccgccaatggtcagccgaatcgacggagaaggaacggtttcatccaggggaggagaaggatgatgggtgcccggcctcgtcgagctgacagggaggatagtgtgcggcggacagtctatgtctctgacgttgatcagcatgtaactgaacagaaacttgctgaagttttttcaacctgtggacaggtggtagattgccgtatctgtggtgatcctaactcagtgcttcgttttgcttttatcgagtttgctgatgacgttgctgcacaagcagcactagcacttggtggaaccgtgcttggcttttatcctgtcaaggttctgccatcaaagacagcaattttacctgtgaaccctaaatttcttcctcacactgatgatgagaaagaaatggtatccaggactgtgtattgtactaacattgacaagaagatcgcagaagatgaagtgaagcaattctttgagggaacatgtggtgaagtttctcgtctgaggctacttggtgattatgtgcactccacatgcatcgcttttgttgagtttgtccaagcagatagtgctattctcgctctgaactgcagtggcattgttcttggaacgcttcctgttagggtgagcccatcaaagacaccagtccgctcgcgatcgccccgtgtgacgtcatactgaattcggctcatctgaagccgtcgtccagggcagcaaatttctgggcaacaaagccctagtcgtgtggccttagagactgccgcatcgcggataagtaattgtcgttgagcagagttctcgttggttaaagtccagtctagtaggaggcgcagagacccgtctgtatggtcgctgggagatctatcttgacctcctttttctgttctttttggtcttagttatcgtggttggattctatagcagccttgacaggcattcgaacaacaatgtttatggttatcctatccgctttggactcttaagcatgttttcccagtctttaaatattaagagatagtttggtaactaaatattttgaagggattcaaattttttcaagggaaaataaactaatttctattgg

SEQ ID NO: 106147 - DNA, 717 bp, Zea mays
  Clone ID: MRT4577_28308C.1
gagggaacatgtggtgaagtttctcgtctgaggctacttggtgattatgtgcactccacatgcatcgttaatgttgagtttgtccaagcagatagtgctattctcgctctgaactgcagtggcattgttcttggaacgcttcctgttaggcaagaacatattttctgcatgtgctcggaagttctgatcatggtaagggtgcctgtctcccatgtttttttgcttactctctgctctgtactgttggtttttgcagggtgagcccatcaaagacaccagtccgctcgcgatcgccccgtgtgacgtcatactgaattcggctcatctgaagccgtcgtccagggcagcaaatttctgggcaacaaagccctagtcgtgtggccttagagactgccgcatcgcggataagtaattgtcgttgagcagagttctcgttggttaaagtccagtctagtaggaggcgcagagacccgtctgtatggtcgctgggagatctatcttgacctcctttttctgttctttttggtcttagttatcgtggttggattctatagcagccttgacaggcattcgaacaacaatgtttatggttatcctatccgctttggactcttaagcatgttttcccagtctttaaatattaagagatagtttggtaaacagacatgctggccgacgccctcgctggcaagctcgacaatagaggctgcagcctct

SEQ ID NO: 106148 - DNA, 850 bp, Zea mays
  unsure (1)..(850): unsure at all n locations
  Clone ID: MRT4577_28309C.1
aattcggcacgagggcggcgcctgccccctccgcccatgcgacgcgcgcccgcgcaaactacccgccttcgcagtcgcccgcgcgggaaacgtgaagctaatccaactccaacatttcctcccgctgcgctgtgctatgctgtactccttcgcagggttctctcgaaacccaaaccctagctctgacccaccgcgattccccatttgatttctcgtacccatgggtggatccgctgatcccgaggcgccgtcgccgtctccgacgaagccatcgccctcgtcggctgacgggaagccgccgaggcggtgcgtgcagtcgaaactctcgtgggggcttgtcaaaccagccggcggcggccgcgaaggtggaggaaaaggaggcggcggtgaagcaggaagaggagatgccgaggctgttcctcttgtgcctgcggccggggaggcggcggcgacggaagttagagaggggctggagaaggggaagaagaagagaaagccgcggaaatcagaggatggcaagaagggctcttcaagcaaacagaaacaagggcaggatcaatcgaacaaagatggagtcattttggttgatgaaagccctcagaaaaagcaacgtaaaggtagaaagcaagatgcaatactgaaggagcctaatgctagcagaaagcgttgcaagacatcggaagctcctgatggtcctggaagctgtcagcaattgcatatcagccagattgaagccagctcgcctgtagcagcgccagtaataattgacgttgatttgatgagtacgccttctaaagcaggacatgctaattcaatcgatcaggatatatcanccgttgaaagttgacct

SEQ ID NO: 106149 - DNA, 221 bp, Zea mays
  Clone ID: MRT4577_2830C.1
gctaaattcaaagttgttgctctaacagtaaggcttcaaatctgattatagataagtgtatataagtagacacagcttgtgtttctctttctagccctgatttactgaatgtatgtctacatcaggatccgattaatctggttaagaaagaaggtgcctacttaagttcttaacaaatacttgaggacgcctcaaatgttataaaacacagtgcgtatcta

SEQ ID NO: 106150 - DNA, 1072 bp, Zea mays
  Clone ID: MRT4577_28310C.1
cccacgcgtccgcccacgcgtccgcccacgcgtccgcccacgcgtccgatttttctatttcggcccctctactgttccaataataataaaaagattctcgattcgatttactcgccaattttcagtgagcggcggcgatcggcttcggatcggcgcagcgcggcggagcggagatggttgccgtggcggtggatggcctgatccgcggtgcggacgccgtgccggcggcggagagggaagcggtgagggcggcagctgcggaggcggcggccaagggcggtgagggggaatcggggaaggaggaggtgagggagtatgagagcgacatgaggaagctggaggagctgctttctaagctgaacccctcggcggaggagttcgtgccgcagtcccgccgcctcgtggacggccgggctcctccaagagagcttctcgacgcgctcttgctcgtccaaccttctccatcgtctcaccttaggtttcgctccccgccgccgccgccatgatgccgcagcagcagcagcagccgatgcacgtgctgcagtttgtgggtggcgtcggcggggttggcatgggtggcggcggggggatggactccagcagcgacggatccgccaatggtcagccgaatcgacggagaaggaacggtttcatccaggggaggagaaggatgatgggtgcccggcctcgtcgagctgacagggaggatagtgtgcggcggacagtctatgtctctgacgttgatcagcatgtaactgaacagaaacttgctgaagttttttcaacctgtggacaggtggtagattgccgtatctgtggtgatcctaactcagtgcttcgttttgcttttatcgagtttgctgatgacgttgctgcacaagcagcactagcacttggtggaaccgtgcttggcttttatcctgtcaaggttctgccatcaaagacagcaattttacctgtgaaccctaaatttcttcctcacactgatgatgagaaagaaatggtatccaggactgtgtattgtactaacattgacaagaagatcgcagaagatgaagtgaagcaattcttt

SEQ ID NO: 106151 - DNA, 442 bp, Zea mays
  Clone ID: MRT4577_28311C.1
gctacctaccatcttgccttcataagtctacaatttcgagactgatcattgtgacactatgactgtgtcttcactgctgaacttccaaatataaaggcgaaaggcatgaaaaatctaacaacctgatcacttcttcaacgatataatatatatatcagagaaaaggtgaaagaataggatatccaacccccaactaaatatccactagcaaaccgggagtttgaaactaggcttgatacacgcgaatggatattcacatggttagaacgaactctctcctctttctggatctcgcctgccccatggcgccctgccacggaacgcacagatgctcctggtcagtgcttggcagctccacccttgcgctgtctgggtcgagccgaagactcacctgaccctagcaaggtatactaaaccgtgccttctttgccttaaaacctat

SEQ ID NO: 106152 - DNA, 762 bp, Zea mays
  Clone ID: MRT4577_28312C.1
cggacgcgtgggctgacgcgtgggcggacgcgtgggcggacgcgtgggctcgcctcggctcatctcatttttctatttcggcccctctactgttccaataataataaaaagattctcgattcgatttactcgccaattttcagtgagcggcggcgatcggcttcggatcggcgcagcgcggcggagcggagatggttgccgtggcggtggatggcctgatccgcggtgcggacgccgtgccggcggcggagagggaagcggtgagggcggcagctgcggaggcggcggccaagggcggtgagggggaatcggggaaggaggaggtgagggagtatgagagcgacatgaggaagctggaggagctgctttctaagctgaacccctcggcggaggagttcgtgccgcagtcccgccgccgcgtggacggcggcgctccccgcctttcggccgacgcgcccgtgttcgtgtcgccggcgatcgactactacgcgcgccaccaccagctcccgccgccgccgcttctgcagcagcagcagccgatgcacgtgctgcagtttgtgggtggcgtcggcggggttggcatgggtggcggcggggggatggactccagcagcgacggatccgccaatggtcagccgaatcgacgggtaatcgttgaattgccgagtccgattcggtgtggatagtctccgggtaggggtttgcagtgggctgtttctgggtcaatcaatcggtggcctttggacttttccatgatgttga

SEQ ID NO: 106153 - DNA, 440 bp, Zea mays
  unsure (1)..(440): unsure at all n locations
  Clone ID: MRT4577_28313C.1
cctgctgtcgcacttgccgttataataggcattggaacattgccgatttcggtagctgatctgctcgagccgcatcgtcattgatgttaagatgtccttgtctttgataactgctgtatacgttcaatccatggctcattaccgtctgccgcccanaaaaaaaaaaaaaaaaagcgcctcgggcgcggccccgctgngggcgagtcccagcgcactggcggccgggtctnnngcntncnnnntnnncnccccgcccgcccccccccccccccccccccccccccccccgccnncccccccccnncccccccccccccccccctccccccnccccccccncgcccccccccccccccccccccccccccccccccgccccccccccccnccccccccccccccccccccccccccgcnnccgccccccccccccccccccg

SEQ ID NO: 106154 - DNA, 3686 bp, Zea mays
  Clone ID: MRT4577_28314C.1
ccgtctgcgccccccactcctcatccgcatccctttctaggcatccccaattcccccctccaggggttcttgaatagcgtccaatataactccttctgcttcagatccgagctgagcccatccttggatcttgattcctctctccatcaattcctgctaccagtcgtgaatcgtttcacactcgactccgacggaacaaccttcgatctacgggcgtcctcgccacgtcacccccgtctccttggattaaatagttctaggtcttgtgtccttacttatctggggtcggtcaaatgctagaggatttcccgcagggttcgggaattgcctttgtattttgtcgccctcaagatcgaggtcaccctgaagatcgtcaagtactctgactgtctgctagcgtcctcaatgggcgaagttgcacgatagatgcatagatcatggttaattgagctcttaattgcatagacgagagattactcttttttgtcacaggatgaaactgtcctcgttggtgggatctgatcagagtctaatgctacccacttcactaaggtttatagacaggcaatttctagagccctcttgttcaggactttatctttcttctgcagaaggatagatgacgtgctgcatgacatgatgtcatgtgatgcatcaacctcttctccgccaccctggtaaagccctggtaatggtgttctaggaaggagcacaattttatgagggcccccaccagccttggggtgcctttcatgtggagaagcttagttctctggctgcatgggttggttatacagttcctggtggtgattattgaaattgtatttaactattttacaatatttggaaagcctatttggtttcaatagagttcatgtatcttttcattcttgatgaaattctggtatagagtttgatgtttgaagcacccaaatgtaactatgtttatgaactagcgagtgatgttttagtcaaacatgaactagcgcctgataaaaattcgagaacggaaatagtataatataattcagtaaaaccatttgtagttccggaacaccatatttgtttgataaacctcataaactaagaactgaaacgaagggattttaccaaagataataaagagcacaaaatgatttaaagaataaggtgtaaaatctaaccaaagtaaaaaatgagactttagaaaattaaaaactatgcttctgttttatcagattgggtggggttactggtcaaataattacatcgggcctgggttgcattatctgatgacgtcactgtcttggcatgttttattcccacaatgtagtgatcatgaacttataccattgaaatcctgacgggcctcgagaggccaggaggtggagatgagttcaacaagtactacatcttgtcagctctctcctatccgtggattggtgagttagtttggatgtttgcactggtattgttatccatcaaccccaaaccaattgcagttccttttagtcatgtcatgtttaatttccctaaaaattgcgtactgcatttcatatatatgtatcaaatatggaccctaaaactgaagcaggcgttccttttcaattcgtgttgcttcttcatttcctttatcagtaagggcatgtccagatccattagcactaaaatttagcagctaaaattagtacgagtgggtctaaacggacctgctaattatttgttgaagggcgtgaagggctgctattagtttcattagcagatttggagttgctaatatgtgataataattcatatgcatcttctactcactatctaactacctattagcaggtgagtgcaaacagcttcctgctaaaagttagcaaggaatcggttgatacttattgatgtacgtgtttgttcattattattgtaccatgtttggttggaatgtttttaaaagaatgttgaattctaaacaatatgagttattttatattctatattcttttggtttctgaaagggtgcctgaaatatcctatagatgtctttagtagagggtccaaataatggcctgcaaggtttcttgaattggatcgcacaaaattccatctgcttcagaattgagctaagcgcatcctaacatcttgactcctaataccgactaagaattactagcatttcatctcgaaagatcactctgtcgaccaatccaaggaaggcacctgaagcttagggaggacacctcacaagtcacagctgcccgtgttgcatctgtgtgattttgtaatttgaatgagcaaatctatctggcgtcagtgcggggttgggtttcctagagggaggaacatcgtgggatgcaggtcccaaggaacaccagatattttgaggcagaccgtggcgaggtgcccaagggcagcgcctagatcttcttctggatggtcaagttctggaacgataatgtggcagaggagatgccctggtcttcgtgttatgcaatgacatgtctttccctaatgcaccgaagcttggatgggtccgttgaaggttgtgttgtttagatgtcaaaaattgattggtgactatgatagggtagtcaggtggtggctataattcctagagatgtgtgagggcacatatctagaggacgtccacaccatgcctccaccccctggccctagccgcctcgcgtcgtcagtgcctccctcgcctcacccccatcatcgacgttggaaatcgccccgaccctggctcccagatcggcgttcaccctagatcccccggcgcgatgcggcaaccacgtggtctccccttcaaggaagtggaatgggggccttgaccaccaccactcgtgtctctagctgtttttgttatatcatttcatttttccataatagtgaatttgtttgtgaggtatagtctttgttggcttaaaatggtaattttttgtatttttcacatgagataatttatgccgagctgagcaattgtcgtttatcttagtgcaactgatgctggagctgaagttagcgtctgtttctaatttctaggtttctgtgtttcaatggcctcttgaaaattgaaaatggcctcttgtaggttgaaggatgtatgcatggaatagaagtcagataacacttttgtgcaacaggctgaagtcattcttgttgatgggaaattaatagaggctaatgctgaccaacttgctaaggtttaaatgcaggttggagaactcccttgtttaggcttttgtcttgcttctgcagaaggagagatgacgtgtttcatctctgcatgacatgatggcatgtgaggcagcagtctctgctccgcaacccttgtcatggcttggagttggtattctaggaaggggcacaattttattagggtagccaccagagttgaggtcccttttcaatggacgaacttggtgttgtggacgacatctgctattgtagctaggcgcatacatgttttcctataaatgctagctctgcaatcaccaaaggaaaacacaagagtactcttggaggaaagtttagcattcaatttaaaaaaccttaccaactcatgccttatttgaatgcaataatgcatgttctgttgccatgctgttgcttggacacatgcttggcatggctattttctggttatgtcacaactcatatctcccatgtaaatttatggctatgatatgcatcaaacaagcttatattttgctctc

SEQ ID NO: 106155 - DNA, 400 bp, Zea mays
  Clone ID: MRT4577_28315C.1
agcagtggtaacaacgcagagtacgcggggtactcatggaacaaagcatcttcatgatcatttgaagatttgtgttttgcgcaagataaagctcactagccagaacaagactatgtcacaatcatctttgaggtttagttcacaagaaggggggaaagtatccgtggagagctacacttttgatcctgaagttgctagaaaggagcttgctgctatgatagcattgcatgaatatcctttgtgcatcgctgagcatattggctttcgtcgatttgtgagtgcatgtcagccattattcaagatggttagcaggaatactattagaaaggacattatggatgcatatacaaaaaaaaaaaaaaaaaaaaaaaaaaaagtactctgcgttgttaccactgct

SEQ ID NO: 106156 - DNA, 510 bp, Zea mays
  Clone ID: MRT4577_28316C.1
attgggtacctcgaggccggccgggatcagatgttaggagccagtgtctccaacaatccaccggatcctacccatgcgcggctctatcggggacccggaccccctcctgcggaaaaagtagccgaccgagatgaccgaggagcgagtgcgtgcgtacaacggcaccgacccgctcaaagccatctacgtctacaacaggtgcaaggcgttcaaggtccgcttcgggcgcgacttctaggggaccggcgacgcgtacgccaggatcgcgggccgatagggcacgagggacctcagcaagatgttgaatgacgaggctgacgtctccgtggacctctccgggctcatggacaaggagatcgaggaggtcgtcgactgccacacttaggtccatgtctagcacctcgtggtagtccgagtcgccgacgacacctgagctcctgagattcgctttaaatttactatggactgcctcttgcagcgcccaccggtgggcttgcttgctggtggcta

SEQ ID NO: 106157 - DNA, 378 bp, Zea mays
  Clone ID: MRT4577_28317C.1
ctactccccatcatttctggtgttcataactcttcgcgacactgatattgtgtggtatatcaacaggctcttgactcctacgctgctcaacgctgctatgacatctacgcatatctgactcatcaactacatgttctacagaactcaccatacttcgtgcactcgaggcatctagtccaaccaaaggctagactcccctcagttttagtctactcgccccaacttacgcaagcaagtacatgctaatcattgctagagtgagactacaccaacctcctacctggccactcgattttatgacacattaaacagtaggactgcctgaatcctgctgggattattgcatgcttctcgcctatgtatgacgcaagctacttt

SEQ ID NO: 106158 - DNA, 217 bp, Zea mays
  Clone ID: MRT4577_28318C.1
ctcgtcctttgtttttctatcggccaaagcaaggaagcaacattcgagaaaatgcagggtacacttatccatgtgccatgtaaagtcctctgttgggttaacgataaactgaaaagtatggaacaaacattggattgatgagtacgactggcctttaccatctcagactgggtactagggttgtcagagcatggctacatcacaggagaggagctca

SEQ ID NO: 106159 - DNA, 270 bp, Zea mays
  Clone ID: MRT4577_28319C.1
ttagcgggagaacgataatgcaaagtgctatgttcttggctgttcaacacgactgcagacccatggacaagagcgcaggcagtggccacaagagcgaggagaagcgagaaaagatgaaacggacccttttaaaagattggaagacccgtttgagctacttcttacaaaattcctctactcctgggaagcccaaaaccggcaaaaaaagcaaacagcaagctttcatcaagccttctcctgaggaagcacagctgtggtcagaagcattga

SEQ ID NO: 106160 - DNA, 275 bp, Zea mays
  Clone ID: MRT4577_2831C.1
ccggaacgacccactcgtccgacgcgtccgaccacacgatcgacgtctagcatgcgccgcgctacctatctacagatgagctgggtacgaggcatatcaacattgaccagctcagacgccacttctaatgcccctcaacatggtacttttcacattatgcaacgcatgcgactgaaagttcgcttcatcctagactattctacacttcatacactcactcctattcatgatcatgtagtcaacaatctcaaagccggttactagagagaattttt

SEQ ID NO: 106161 - DNA, 248 bp, Zea mays
  Clone ID: MRT4577_28320C.1
ctgccacctacatttcatctcccaccgcctgtccacctgcctcctccggtccacctggccgttcttccattgccgccgccgttcatctgcctcctcctccatgccactaccctactcaaccgtcccggcctcatccttatccccagccacacccatgcccgtgccaacagccgcatccaagcccttgccatctgcatgtaacctgccgcgtttgcacacaccccgatcctgggccattgcgtctagtt

SEQ ID NO: 106162 - DNA, 409 bp, Zea mays
  Clone ID: MRT4577_28321C.1
ttcggagtaactcagtcctcaagagtttactcgacctctcgcaccgtccaccatggccacctcccagatcatctcgaagcgcagaaagttcgtcgctgacggtgtcttctacgccgagctttccgagttcttctcgaggactctctcgtccgagggatactctggctgcgaggttcgcgtcacgcaccaacgcaccgaggtcatcatccgtgccacccacacccaagaggtcctcggagagaagggtcgccgcatccgcgagttgacctcgctcgtccagaagcgtttccgcttccccgagggttcggtcgaactctacgccgagaaggtccaaaaccgtggtctcgatgccgtcgcccagtgcgagtcgctccgctacaagttcctcggtggtcttggccgttcgtcg

SEQ ID NO: 106163 - DNA, 192 bp, Zea mays
  Clone ID: MRT4577_28322C.1
cggacgcgtgggttccaggtctgaagtaacaaaaagccaaaaaagccgggcttcataacacaaattggtgcacaaaactggtgtagaaaaattgaaggtttattttgataaaaatcatttgagggtatttaacatacagggccacattactagggatttccacatgcaaacacatcttttgattcctttaaa

SEQ ID NO: 106164 - DNA, 811 bp, Zea mays
  Clone ID: MRT4577_28323C.1
ggtaccctcgcgccgggccgggactcagccattgtattgtatgtgcgtgcagtacacgctcgatggctgccgcccttcaagtgttcgtcgctgtcgtcctgatggcgtccgctcttgtgtcggcagagatcggtaagaaggagtgcaccgatgtgaattacgactgcaaccgtttcccaggttcccgaaagtgcggagactcgtgccgggacaaggcccgcgccgagggcagcagcaactacgcgtcagcgtgcgagcctgccgtcgcgcccttcaagtgctgctgcaccgtcaaggacccacaccacccctggcctccaagctcctcctccaagaccaacgcctaataaatatgtccagtccaaacattatatttagatagcatgcatatagtgtgcctgctgctatatatatatgtcatcgaattaataatgaagatggggtggtttaattatattccacaataccatgacataaaattagcgacaaacatttgtcggtaaaaataggcttttggcgacagccagtctgtcgcaacataataccatcacagcatccgtcggcatatagtattttggtgtcaaacaaactgtcggcaaaaatttgtagctattgtgatagactatctgtcggtataaataattattcgtgggctatccaacatgcacatgcatgtactaaagatccagagctagcacccccaggttgttgccaattgctagagcatgcatggctcctctgtgaccttggtggctagaatttgagcatatatatgaagcatctcattaaaaaaaaaaaaaaaaaagcggcc

SEQ ID NO: 106165 - DNA, 240 bp, Zea mays
  Clone ID: MRT4577_28324C.1
gctccggacacactcgtccacagctaacgcgattttgcgctttacacccggagacccacgatccctgggcgatggggactcctgctgattaaggcggtcacccagacgacgaccactacagataatgatacgcatccgcagacgaccccatgggctgagcgtatacactccgtgaaggacacaaacctgaccaactacacctaagcctgcacggtcccacacgtgcactggacagacctc

SEQ ID NO: 106166 - DNA, 1392 bp, Zea mays
  Clone ID: MRT4577_28325C.1
ctcgaggccggccgggatgaaaacatgcgacacggaatagtagaaactcacctcaagcagcaagcacccgagcggccagctccagccccaccagagaaatacggcgtaaacgccgccggggacaaacccaggcgaccggggtgcctagctcgccgtttcttttcgccttctcctcgcaatttcttaggatcaacgccctactacacgacgggggttttccccttcggctgccactccgtcctttcgcagcctgccgccggcgccatgctgtacatcgtgggcctcggcctgggcgacgagcgcgacatcactgtgcgggggctcgatgccgtacgcagctgctccaagatatacatggaggcatacacatccctcctctccctcggcctcgacccggccgcgctcgccaacctggagaagctgtacgggaaggagataacggtcgccgatcgggagatggtggaggagcgtgtcgaccaggtgctaagcgaggctgccgacactgacgtcgccttccttgttgttggcgacccgttcggggcaactacacatactgatctggttgttcgtgccaagaaaatgggagtagaagtgaaggtgatccacaatgcatctgtcatgaatgcaattggagtttgtgggctacaactttaccgctatggagaaactatctcaataccattcttcacagacgaatggagaccagatagtttctatgagaagattcagaacaatcgccagcttgggctgcacacactttgcctgcttgatatccgtgtcaaggagccaacatgggaatctttagccagaggaaagaaagtctatgaaccaccaagattcatgactgtaaacactgcaataagtcagctttttgaggtggaggaagcacgtgggggatatgcatatcgcagggaaacattgtgcataggagtggcacgacttggaagtgatgatcagaagattgttgctgggcctatggagaagctactagatgttgattttggtccaccccttcactgcctgatcatagtgggagagactcatcctttggaagaagagatgctagagttttacatgatcaagtagtgatatacacaccctacacatgtgagttttcacttgtattgactaagggaatgcttagacttctgtccttgtcaatattggattgttgaatacttagccatttggatgtagaaccccaggaaatggtgcagtatgcgatttggagtgctggcagcttgtaaaacaaatctgtgctagcagtctaccattagtttacgtctccgaatcttgtttgaaacttgcatgtgaacgcaggcctccgtctcaaaatataatttgttttagattaaaaaaaaaaaaaaaaaatcgagagagggcgccggtacc

SEQ ID NO: 106167 - DNA, 868 bp, Zea mays
  Clone ID: MRT4577_28326C.1
tgctgagtttggccgtctgaagaaagagagagatgaacggatgaatcggttgatatcttcaagaaagcatgaaagggagacagtaaggaagttgatgttttatctgaacctggaggaacagcggattgaaatgcttcgtgaggaagaggaagctagaaaacgtgaagcggaagagaggaggaagagagaggaggctgaaaggaaagctaaacttgatgccatcgctgaaaagcagcgattgagagagatagagctggaggagaaggcaaaggcaacaagggagaagctcttaaagggatccgaggctgtgcgcgctccagattctgcacctgttgcacagccacctcgagagtcagcagcagcgcctgcagctgctgcggcggcggctgctcctgctcctgctcctagtaaatatattcccaagtttaaacgcggtggtgatagcagcagcatcccttctggcagccgcgatgaagatcgctggggttcacgtggtccgctcaggcaagatggtcctcctgcacgactggatgcaccctcatcacggcaagatactgatcgctggcgtggatcaagatttccctctaactcaacgtcctcttcatcaacctggagccgttcacggaactgatcctatgctgcaggacttttttctagcccatgtgtcgacctccgtgcacaatgtctaatcgtacctttccaggcactgcactccatgcatattgtcgctgttttgtacttttgtagtaatactctacaatccaagattattgtccctgtttgttagtaaaaaaaaaaaaaaagggcggccgccgactagtgagctcgtcgacccgggaattaattccggaccggtacctgcaggcgt

SEQ ID NO: 106168 - DNA, 278 bp, Zea mays
  Clone ID: MRT4577_28327C.1
gggtacccctcgagccggccgggatacgccgtctattcgcaatcaccgcaaccgaatctcgctcttcgcagccgcccccgaccacgccgcctctgcgatccccggagggtcgcgaccatgtctaccctcgctcacagcgccacgacccagcgagcacgtgtcccgtgctataagaaggaataatacctgtgcgatcgtcacctacaccacgacagccggcggctcttatttccgtgaaccgcgtacctattgaagtcatactgtccgcaatgctccgc

SEQ ID NO: 106169 - DNA, 367 bp, Zea mays
  Clone ID: MRT4577_28328C.1
gcggtaacccatgagttatgctagggcaatgggatgcagtttcaccaaggggcggactgatgtactgacttcaaaggtaacactactgacacataatgtggaagccgcccagggaggtgatgctatggacgagagatcttgcatgctgcattcatacacgcttcttccgaatctgcgtcactgtgcttagtgtatcaacttgaacatgaaaaaaaaaaatctggagatctttactgtactcgctggaccaaagccatagcacttatgctaaatgcgtcaataatgatagacacattttaaattgcttgttgattccgactgttgaaaaccgatgacggtatgccatttacccagtgaaaaactccac

SEQ ID NO: 106170 - DNA, 457 bp, Zea mays
  Clone ID: MRT4577_28329C.1
ctggctagcccaaactaaatactggaccaatccggggcctgttggaaccaccaaataaaagaaggcgacccgactagagctactttaacatgacaccattttttcatggcccactgaaaaataggtagctactactaaaaccgtcaacaacaatcgaatcgatgcctggtttttactttccacaactagggatcgggcttggttttgatgcccaacggacgtccaaacaaacctggttccttaaccggagcttgcactcgggggccaccccctgcggaaagcgcttggcgtcggcccataatttgaaaataataaacttgcgctgaacccagcgcatgcgggggaagctaatgtcgctaacctgttggttccaccagccggggccggaagccggaacccgcaacggggggggcctccatggggccctaagggaagcgttgcctgccgccgtccaaaa

SEQ ID NO: 106171 - DNA, 379 bp, Zea mays
  Clone ID: MRT4577_2832C.1
cactcatcatgcattggtcctcacgagcaaccgctaatcctccgacgctgagaggctggcttatcaggatcttctatctggcgaccagctcctcgtagattcattcaccttcaaggagctctagaacggcgcactgtgggaggtaccgggaaagtgggtcacccaaggtcctgttgatgtggacattggtcccaatccatcccccgcgggtggtgtggacgaatgcgttgatgacacaagtgtgaaggtacgttgatattgttgacacattccgtatacaggagcaaccttcttttgacatgaaatcatttgtcacttacatcaaaaaatacatcaagaatctcactgctctgttggagcctgagaaagcggatgagtt

SEQ ID NO: 106172 - DNA, 467 bp, Zea mays
  Clone ID: MRT4577_28330C.1
gctggaattagatccgtgtttccgatggtgccgtcggggagggtgccgatgggttggcggtcctggcggttcgattttaaccccacatcaatggagtcgatcctgccccggacgtcgagcaggaggcccctgagccgacctcggcgtcgatcctgccctggacgtcgagcaggaggcccctgagcctcgccacctccgcatccagagctgcgtggtcctgcagccgccgcacgagccgtcgtcctccccgccgctgcccaggacctgggtgtgcgtgtgcggagcgcggagcgggacacgcttcctctagacttagcttgtggtttgtgtaacgcaggtttacaggcagtctggtactagtagggggtatctaatagtttggccttcagatttacatgttataagcaattgacaaaaacaagcatttgatcgagctaaaaaaaaaaaaaaaaaaggcccctagggcc

SEQ ID NO: 106173 - DNA, 447 bp, Zea mays
  Clone ID: MRT4577_28331C.1
gagagaggggctgggattggcccctctgggggggaccaaaacccaaccgggggggtccgcctttggggggccccacaattcagcaaaacccgaaagggaaaacccggcaccccttaaaaaaaaaggggaaccccaggcccaaagggcattttttaaaaaatcggggggggaaaagcccccaaaagggacccgcccccccaaaacaaaaaaagttgggggggcccccccaaaacccccccccccgggggccccgccccccccggggcccccccccccaaaggccgcgccgccaaagcccccccccccacggggcccaggagggtttttattagcccgggggacccccccccgccccccaaaaaattcctggcccaccatgggaaaaaaaacctcctggggggcaaacctggggagagggttaaaaaaaccaaaacccttgggcccccc

SEQ ID NO: 106174 - DNA, 352 bp, Zea mays
  unsure (1)..(352): unsure at all n locations
  Clone ID: MRT4577_28332C.1
accggaccggaacccccgggacgacccacgcganttcccaagaaccagacaaccagagggctgggtggaagcatggggaacgacccggggagcccccaacggcaaacgagagacaaacaccgacgaagccggaacaggggcgcacacaacagcagaagaccggacgaaaggcccgaaaaggagaggagcaaagacacaaacccgccccaggaccagcgccgagaacaaaatgggacacgggagggaacacacaaccacaacgaggaccaagaccaggccagcgaaggcaacaaggcacacagcaacgggaacgacccccagggacccaacagagggcagagcgcggaacaga

SEQ ID NO: 106175 - DNA, 165 bp, Zea mays
  Clone ID: MRT4577_28333C.1
gaaatccaggccacgacgccacgcgtccgtgataatgctaatctgtggtggacacattttagcgttaagggggcacacgtagttgtggtgttcttcttgctgttttatttctacgagcttctcactgtatttttagtccacacaaaaaaaaagacacatattcat

SEQ ID NO: 106176 - DNA, 199 bp, Zea mays
  Clone ID: MRT4577_28334C.1
ttttgtatgccccaagggaaggggtccgtgcgtcctcagactttatgttcagggcaaggaagtcaatggcgctggcatcaactctagcttagctgtgcaccaggatactgatggaagggcaactgatgttactttagcatggacagtggcacttggtgcccccttcacgtttgctactacttctgaacacgtgtacaag

SEQ ID NO: 106177 - DNA, 298 bp, Zea mays
  Clone ID: MRT4577_28335C.1
aaaaaccaaaaggggttaaagggacaaactttaattacaaaggcaaaaactaaagcagttcaacagggggggggggaaggaaacccccaaactttacccaggacacaaaaaaggggttttaaacaccaaaaccggggtcgacagccaaacaaatttaggccagcaaataagttttccccccccccggggccgaaataactgccccccttgggggggacccccttggaatccttttccaggggggccaggcccccgggggcccaggaaaaacccccctcctccatgccctaaccgaaga

SEQ ID NO: 106178 - DNA, 1103 bp, Zea mays
  Clone ID: MRT4577_28336C.1
cctcgaggccggccgggccgggactctgtagagcaatcgccaatcggcagcttcgtcatccctcgtcgtcggattgtacgctccagctctccaagatttgccttggcttgccgtgccctgcgggagccaagccaaggacggctagcgctcgccacgcgcgatgtccgggcttcctccggccgcgcgaccgctgctaccgtctccctgcgcctcttcctccgttgttcgggcgaaggcagcgtcggcatgctgctccagcctaaagcagtcgcgcccaggccgaagtgctgccgccccttccaccgtcgccgcgcgtcaggccgcgccgctcttggctgcggcgctcgtccttgtagcggcaccccctggcctgcctgctgctatctcaccagcatttgcacagccagtttcagaaggcgcagcgctgttccggaaggcttgtattggttgccatgacatgggaggaaacattctacagccaggagccactcttttcctgaaggacctcgagaggtatagcctcgtaacctgtcactcacatccggcaaactgaagaatgtgctgcggtttcgccgctcccggttactgacgcgaaggcagcaaacctgttgcagaaacggagttgccacggaggaggaactgtataacatcacatactatgggaaaggaagaatgcccgtcagttctgccttctgcagtgaccaatccttttgttcttcaatcagcaaaaagctacttgtttatgagaagtaaatgggttttaatatgtttcgttttgatcagggttttggagagaaatgcaccccaagaggacagtgcaccttcggcccccggctatcggaagacgacatcaagatcctagcttcgtttgtcaagtcgcaagcccagaacgggtggccgaagattgagggggatggagattgatcaaactgaaaaaacgatgagaagacggtgcttgttagtcagatgaaaatggtgacgggaagatagtgtttgtatagtttaggaatctggactttctgaacttgtaaccttttagtctctgtttctgaactgaacttgtaaccttctggtccgtgtttcagttttctgaacttctattc

SEQ ID NO: 106179 - DNA, 571 bp, Zea mays
  Clone ID: MRT4577_28337C.1
cattgggtacctcgaggccggccgggaaaactatctaacgcaagggaagtccctagacgacgaacacgatgccgccccaccgtgccggatgggccgcaggcggcggagtacacaagcgcgttacttcgcggcgacgctagtgctctgggctagtgtctgaggagttcggagatcggcgtccgggggcgtacgtgagctgggaccctgggtcggcggatatcacttctgtccaagtcggcaacgactgggctcgatgatgggcctttcacaacccgctctttctcagagcgtggcatcgctcctgcagtcctacatcacttcctggactggtggagcccatataataacgtggatatcaagcgatggaaattgcatgtatttcaccattacttggaaacctgctgaacttgtaatggatacttgactgtataagcaatgtggcgactacggcgggaagctataacctgaaaacttacaatctctgctgtgaggcccacaaatttgggaaggggattgagcttcctctagctcttcttggtatggcagggatgaatctgctccacatatttct

SEQ ID NO: 106180 - DNA, 347 bp, Zea mays
  Clone ID: MRT4577_28338C.1
gcactgatgagtttaagcaatacgacagtctatatgtgggtaacaggagacacatatggtcatgttcttgatcatatattgatgaaaacgttcataattgatgttgctgatcctacattgatgaaaacttcacaagtattatatacccatgctgtatatgacattgcattgttgacacttacctaatagcttttattttcacacttcttttcatcttttgcatgctttgaatcctaattgcctttgtcctttgcatctgctttcctttcccagcttcttcttaaggcctagtgcccagattctaaactcatcaaggtgttactaatggatttacccaaggaggactt

SEQ ID NO: 106181 - DNA, 608 bp, Zea mays
  Clone ID: MRT4577_28339C.1
cctcgaggccggccgggattcgctacgaaccaagctagagataccgctgtgtaaacgaataccatcggcatgatcgtctcgtgtcgatatggcggcgtactcctcctccccattctcctcagagttccccgtcgctcgcattaatctatcaccgagtccatgacggtgccgtgtacgaccatgagtctgagaaggtgaccttgtggaaagatgctgtgaaccctagcaacagtaaataagacgactttggtgtagaaagactctcaatgggcacagctattaattatggtgataacgatgacactatcggaaaaaaggaacacactactgatgacaaaacaccacttgcgtatgagatcaaaatgtacatcctacaacactactctgtgtgcgtgtgaacactgataaatagaatgaatgctttatggtgggctaggaagcagacaaattgcgccttaaggagatgatggttcacctattttatatagtggaaagctactctgactcatccaccatgaataatctttactgcaaggaagctgcctgtaatccaacaatgcacaatttgtactacgttcatgaggataacaagtggatgttgtacttct

SEQ ID NO: 106182 - DNA, 251 bp, Zea mays
  Clone ID: MRT4577_2833C.1
actggctgcccagcccacaggcccatgaggggatgcagttatgagctctgtcgccgtggattgttattttgtgtcagtaagtaatccataaagtgccaacatgggaaagaaacggacaaagggaaaaactgttccaatcgatgattcctctgaaactttagaacctgtgtgcagacacattagaaaaggattggaacaaggtaatttgaaaaaggctttagtgactgtggaatggaatatctgccaagact

SEQ ID NO: 106183 - DNA, 794 bp, Zea mays
  Clone ID: MRT4577_28340C.1
gtataggctgtccagggaacttttagtggctgttgccagtggatgggataagcatgtggttatcatcgacaaaataattccccaggcttggaaggttagataccttttcctaatcttctatgttgattcatcaatcccttctacatgcatcacagcatcaaactatttatatgttcagcagtctggttcaaacatgtacttattctgtatattacaccactgtttttcacactacactgtactagtgaacaatcactctgatgcataccagaagctgtttacagtttggtttgaacatatccttattctgtatattacaccactgtttttcattgcactgaaatagtgaacaagcactatgatgcataacagaagtgtatgaccatcaaggatgattttctgccttgtgtttcagatgcagtgaaatattgagatctcacattgttatttaattattttagactaatgccttaccttattacgaattaattttctagcatagttaattagttatttctgtttgtgtaacaccctgaatttgggggtataaaatttcttttctgatatccaccaaattcaggtgttactttcctcattccttgcttttcttccttttttttaaataatggagaactattttgttttatatatctataagcctagtaaaataaaaccctaaaaagagttcttgattgctgcataacatgccgagacactttttgaattgttatgtttgtgcatcaatttaaaatccttaaatatatttgaatctttgattcaaaaactatatttag

SEQ ID NO: 106184 - DNA, 366 bp, Zea mays
  Clone ID: MRT4577_28341C.1
ggaacctttggtctgatttatgtgcttgttgatgtgcttgtggatgtgcgggtcgcgcatatggctctttctccttcgctagcaggagagcgagagcgaggtagtgagcaggagataaggggaaacggggaagggagtgtaagggagtgacgtggtggtggtgggtggtgaggcggaggagaatacggtggtgcggtcggccgttaagaatatttctaagactacgtttcctaagtctttgtttgctggtttccacgacgcttgtgcgtgtacgaaggtagcggggacccgtggtagtgacgcgtatcattctagggagacgtgtactgtgtatcctgcggcgaaagaattgacggcgactgggta

SEQ ID NO: 106185 - DNA, 514 bp, Zea mays
  Clone ID: MRT4577_28342C.1
aaaataaatgaacgatatcttactgttgagttctaacagccaacacaggtgaaacgactgttagggttcaaagacacggtgagatggtaagtgaatatgaaagatgatgcacagatcttgccaacatttcatcaaacagccaactcaggtgaagcgacggagggtggcaaagaacacggcttgatggcaaatgaataggaaagatgcacagatcttgcggacatttctcaagcattcttttttactctttctgtacgcattctgctgttgtgtgccttccaatttaaacttgttgcgctgaggcacacaaataaatatcgacctttgcatttactctcaagtggaagcagaaagctcatcccatgtcaggtttgaacagagtttccaggtcatctcagcggtagccaccccaccctcttcgtcctcggccacccctgccacgccccctttcagtgcctctaccaccacgagacagttcttcaaaagctctgttcacaagctggttgtgcattcc

SEQ ID NO: 106186 - DNA, 206 bp, Zea mays
  Clone ID: MRT4577_28343C.1
tggctattagctcatcgactccagattggagaactcgacaccatgaaggtgctgatcgttgcccttgctctcctggcgttcgttgtgtgtgttgtctccagtacaagtggtggttgtggctgtcagacaccactgtttcatctaccgcctctgttctatatgtcgtctccgttctatctgtcgttgtagcagtagtcgcagtcatg

SEQ ID NO: 106187 - DNA, 347 bp, Zea mays
  Clone ID: MRT4577_28344C.1
ggcgcggatcgtggcgtcttttctgggccagtcctagagatgatcgactacgtttaccttaaactgacagcctctgtgctccctactaacactctactttctttagctacatcatgaaatgactcgcccttccagaactctgcccgaatcattcccatcaaggacggggggctgctctacctaacacgatatcagtgtacaataccgtcccggccacgtgcacatgctcctaacgcactaaacaacactactcatgcagtattgttgaacttaacgctgttctaacgagccgctcaaggcgagggtcagggacccacgtgtgcgtcgccaagtatgcactgctgagc

SEQ ID NO: 106188 - DNA, 114 bp, Zea mays
  Clone ID: MRT4577_28345C.1
cccctatacagtttgagacggatgatgataccaatttccatatggacttgatcgctgggttttgcacacatgcggggccaggaactacggcatccctgcagttgacaagttgaa

SEQ ID NO: 106189 - DNA, 240 bp, Zea mays
  Clone ID: MRT4577_28346C.1
ccggccgggggaaaaaaaaaaaaggcgcacacctccaccggccggcgcgaccttgcatccaccagactgccctctccttcgcgagaggcgagcacggcgaccggggcggcagtgcaagaccaaaccgaggcttctaccagtggaagggtccagacatggcaagcgccgatctgctgagcaaggaagagaagttctagtatcgaggtctttgattcacgaaaaagcgaccgcgtcaagcgg

SEQ ID NO: 106190 - DNA, 1587 bp, Zea mays
  Clone ID: MRT4577_28347C.1
gcacaactgcgtgctccgtgttggcagagtcagttggcggcagacacccaagggtttgagctgctgcggttttttcatcatcaagaggttcacgcccgccggccgtgatggatctggatcgctgagactgttcttcctcggccttgtgcagactgtgagctggttgatatcttcttgcctgcttagtccatggcttaccctcgatgccggggtgtaagaggtactccgggctgcaagggttgtctttacatgacagaacaaactgcagcacaattcggaaagcgtaaacaatggattatgtgccccacatgccgccagcgaacagatattgagaacattgcttttgtagttgagaaaccttgggacaaacatgaaaagagcattgaagatttggctgaaagcactatttctgtccaaggttcatatggaacaaagtttgaagctgtcacaagaagaatcttgagaatcacttcaactgatggaacagctaaagttcttgttttctcaagttggaatgatgtactggacgtactagagcactcccttgctgctaacaacatttcatatgttcggatgaaaggaggaagaaaatcacaggcagcactctcccaattcaagggtcaggagagcaatataaatgtagataaagtgaacagggcagcctgcaaaatgcagcctgttcaagtacttctgatgcttatacagcatggagcaaacggtcttaatctactagaggcacagcatgttattctagtggagccattactaaatcctgctgctgaggcacaagctatcagcaggatccatagagttggacaagacaaaagcacatttgttcaccgttttatagtgaagaaaacaatagaagagagcatctacaaattgaacaggagcagagctgtctgctctactataaaccgtaaatccaaaaacttcaaagatgagcctgttttgacgctgaaggatgtggagtcgctattcccgatggcaggacctgatgaacccctagaacaggcagatcaaaattacggcgatagcttgaggagtttgcctccatctgttgccgctgggttagctgctgaaagaaggcgactaatggagcaataagttaatggagtttgcctccatctgttgccgctgggttagctgctgaaagaaggcgactaatcaagggacctccatccatcgttgtggcagttgtgctaattttacttgatcagaatttctcttcgcagcacagtaacgacagtaggagaatgatgctccttagttatgaagcacccccatcatgagaatcaggctatttacgttgtaactttaggattttttttttatgtacctgtaggccttttagactcttgtacataagcttctagttttagttcgtttatacggcccatcctgtagttttgatgtagcagctctcagctctgccactgctacaccaacttatggcatgtataagtgtactaatacatggtcatcagcatgatacattctttagatgcttggtcaattttttagatgcttggtggtggcttgtgccagtagtcattatggtagataattgttggttgtctaattttt

SEQ ID NO: 106191 - DNA, 157 bp, Zea mays
  Clone ID: MRT4577_28348C.1
taatattgtaccaacaatgtttttctataatattaccgcccttcttatgctcgcggcgcgctttcatgtcaagtgctgtctacctccacctatttttccacaatgcatcacaatgtctctctattgcatttcctttttatctctcgtaccttctcac

SEQ ID NO: 106192 - DNA, 269 bp, Zea mays
  Clone ID: MRT4577_28349C.1
caaacaagatgcccttgggagctgtgagggaaagaggacctgcgggcttagatcaatctcaattccttttcatgccctcctgcattgctgctgcgtgggtatttgtctccttagccatcaggtacagtttacactacaatgtaagctataggtggagcatcagcagtgagtgaggccattcttcatccttaggatgtggcaatgaaatgatggtgcaagttcctttctcttttgtgaatctttccccccatttcctgtttacatgtaac

SEQ ID NO: 106193 - DNA, 357 bp, Zea mays
  Clone ID: MRT4577_2834C.1
gttgagctgctcattggcccgcccgtgctgctcgtggggctggcaccctgcttatccagccatgcgctcgccccctcgtattgactcactcgttccgcgaagaccggcctcttttggcccctcggaacgttacgcctgcctttggggggtggggggccccgtgccggttgccaattacgcgtcgcgtttaggcgctgcggcctgtgctggtggcgacagcctccgcggaggcatcccctcctaggcgctgtcgatcgtgctgtcccccccagacggcccgggcgccccaccgccggtgctggtccctggccgtgttgcctccctaggggcctcgcctgccattccgggggtgctggg

SEQ ID NO: 106194 - DNA, 240 bp, Zea mays
  unsure (1)..(240): unsure at all n locations
  Clone ID: MRT4577_28350C.1
caacccccgacacccaactgaagccgtaaccgaagccgtagagagggggagccaaagcttactctttagaccttcctacttcataggatttcgggactatcctccctcgattcgtgtcatctacctcgcggtcccgcctcaactgccgcctgtcgattagccgctcggagccccaattctatacggctcttcgatctgggnatncncnngctagnnattcgccggggcggttattgagga

SEQ ID NO: 106195 - DNA, 598 bp, Zea mays
  unsure (1)..(598): unsure at all n locations
  Clone ID: MRT4577_28351C.1
gccggccgggccggngacatcattatcatcatcaatccaattaccaatcaatcaacaaactctaccaaccacacaaaaccgtcaccatgaagttctcacaagtcgccatcctcgctgccgcgtccctcgtcgccgctcaagagaccaccaccactggtggcggtctcgtctcctctatcaccgctgccccaagctccgttcttagcagcatcaccgggtctgcttcatcttccgcttcttcagaatcctcctcagcctcctccgcagcctcgtcagcggcctctgagtctgcctcgagtgtctccagcagcttgagctctgcctccagcgctgcctctagcagtgccagctctgtctcaagcagcctcagctccgctgccagctctgcttctagcgcttcgtcttcgggctctgctgctatggctactgcccttccaggtcttctcggtgctgccggtctcgttgctgctcttttgtaggcgagttttgacaaccgttgagcggtatacgatgggaaggttgccggtaggcgtatgtagcatgatgttgtaatggaaatggatatcaaattgaaaaaaaaaaaaaaaaaaggccctaa

SEQ ID NO: 106196 - DNA, 307 bp, Zea mays
  Clone ID: MRT4577_28352C.1
ggaaagaacacacgagcaggcaggaacagcaaccttttttgggcatgagccctcctacctaataggaagtccgtttaacctttggggcggctaattgcccatgctttttgaagtaaaatactacaacttagttggcgcctatttaaatagaaaaatgacttaccggggcaaattttatgttataactggaaagagacggccactgatcttggctccaatctaccactgcgttgagttcgttcttttaaaatcccctgaagggtttttcctcaaaaagaccggcctcacccggtccaagagcttttta

SEQ ID NO: 106197 - DNA, 306 bp, Zea mays
  Clone ID: MRT4577_28353C.1
ccatttacctttttctactaatacaactccgaaccttttttatttttttgcacatttaaattttaaagatacatggcataatgttgccaatagtcagtttagagtcaaaaaaaaaataacctaagattttgcattattgcaagatttctatcttacttggtagaaaattgtattaccgattatattataagttgggcactttttttattttttcaccatatggctaaaccacatttcctatcatcaaatatgttaacacaatgttcccaactttggagaaaattgcacagagtgatcctaaaactg

SEQ ID NO: 106198 - DNA, 545 bp, Zea mays
  Clone ID: MRT4577_28354C.1
gtaccctccgggtcggccgggaagagaaagaagacgaagaacaaaattccttgcttttagggcagcaccaagaaagaaagaagacgaaggagaaagttgcttgcttttacggcagcatcgatctatccgcactggcagcttcacagagaattgtgtatgtgtagtccagttacgaacgcggagctgggggagacctgcccaagcctctcgttgtggccatccgtgcgctccgcagcttcgtcggcgtgggcgccgtcgccgcttgcaaggtcgccgccgaggacgcagtcgactgcctcagtgaagggggtgtttcgaggcatcaacctgggcgtttgtcactgaagaagatttgcagggagggtgcatactggggggctgctgccggagcttttgagacccttgagtttggagcggagctgatgcgtggccgctctgactggaagaacgcggtgcttggaggcgccttggcaggtgcagactgtgtcagagctccgcgcttactacgactggagcgcgtggcgcgaatgatggcgcgctggatg

SEQ ID NO: 106199 - DNA, 213 bp, Zea mays
  Clone ID: MRT4577_28355C.1
atcacagagacctccgaacatatgaaccacgtccacagcagctagctacaccgctagatacactatgcaaacatcgcatctctgcacgctgtgctctacgaagcgctgcgcgcgcacatggatcgactgcataaatcgcgacctggcaacgataccgacctagcatgtgggacatgacggtatcatcgcggacggtgtatagcatcacgcaca

SEQ ID NO: 106200 - DNA, 155 bp, Zea mays
  Clone ID: MRT4577_28356C.1
ataaaggcgataataactataattcactgcattggcttagtatgcaacaaagattatattgacgactacacaagagaactgcacgcgcagtagacgactctttatctgtagttcagaagaaagaaacaatgtacgctattaagccttactaagct

SEQ ID NO: 106201 - DNA, 386 bp, Zea mays
  Clone ID: MRT4577_28357C.1
aatgcattactgggggatctaccgccgccttttcccgcgagagcagtacacatgcacgctagttatgactcaaactagcggactgcggcgatggcggtgtccatgatctccacgacagctatggcgtggtggccacacggcatgacgatcccgcgacagccgtgcctcctcctgcgccggcgagtgctccgagaagaagatcaagaccgagcagccctagggcattgggcgcgagcctgaacgaacgacgcgggacgcagaacggccacaaagggcacgggcaagggggtgcaaaagcacgtctaccaggacggggcgaccgtagacggagacaggcaagtgtaggacgaggaggactgtctctcccagaggcgacgtctacgtcg

SEQ ID NO: 106202 - DNA, 231 bp, Zea mays
  unsure (1)..(231): unsure at all n locations
  Clone ID: MRT4577_28358C.1
cccggctcgaggggccggccgggnncgggaagtatatgaangagatgccctccagatattattctgtatgttgataggcttgatacaccgcgggaggaggcaaatagcctatccctcttgcgatgcattaccagtgtgctaggcctgtcaatatggcccagaacaattattactctcactcactcaggagcagcttcccctgaaggtcctaatggcttggaagtgctccat

SEQ ID NO: 106203 - DNA, 199 bp, Zea mays
  Clone ID: MRT4577_28359C.1
gaaagggaattacgttgcaagaatattacagcattaccatcgcaccgtaattggtcttacatactcataaaccatgagctagaaatcttcattacggatagccccggcccggtacactaaccagctggaattatgtgctagcaataggaccttgctataaagcaaactggatataactcgtatggaggccagaccgatt

SEQ ID NO: 106204 - DNA, 142 bp, Zea mays
  Clone ID: MRT4577_2835C.1
ccctcgagccgcatcggctcgagagcgcggtccggtgcctgtggcacataggatcttcttccacctgtatgacactctcttggaagcgcacctctgcaggctgattaagccctactcaagggtggagattgctcacatagca

SEQ ID NO: 106205 - DNA, 1145 bp, Zea mays
  Clone ID: MRT4577_28360C.1
cggcaggagaaagcccaagcgattggttgctgttgcttcctgctttcgcttcgccttcacccgttcgccgtgcggccgagctctctagctccgccgcttgctagtcgccttcctcccaaatggcgaccgccatgcggggcagcagcctcctgcggttcggtttccgccatgcttcctgcctcctgttccagtcccctcggtgtcctgccccgagcctgggtctgaacctggccgttggccgcaccgggcttatacgcctccgatgctcggcggccggggccggcgacgccggtggaaagaaggtgtcggctcggctggctctgacgcagcaggtgctgcggaacgccgaggagcgcgccgcgtcggcgggttcggaccctgcccccaagatcaccctggatcatgttactgttaattttgcaagaagtggtggtcctggtggtcagaatgttaacaaagttaacacaaaggttgacatgcgattcaatgttaaggaagctcactggcttggggagagaatcaaggaacggatattacaagcggagaagaataggataaataaagatggagagcttgttatatcttctacaaaaactagaacacagaagtaattattgttctattatccttctagtctttttttattgcaactgatttgatttaccatcttaggggcaatattgaagatgcattgcagaaaatacaggcaatcattgatgctgcatcatatgttcctccacccccaacagaagaccaaaagaaaaagattgaaaaaattgctgcagtcgctgaaaggaagagacttcagaataagaaggtgctttcacagaagaaggaatttagacggaacagaactagctgggattgatgcaagcttgttctcggggtagcaaaagcattcggctgatccttacagcagtggtgtacagagaccgacgaaaaacaagggtcagacttgctgaaggcatcttggtgaagaagatatagctaagtttcgtaggcatctccagtttttgtttcgtccattagtagggatagattcggatcgaatactcatgaaaacagatccgaatgtcactatttatcatagtttgatctgaatacgaatactatcagatacgaatacaaaacggatagttcgaatt

SEQ ID NO: 106206 - DNA, 797 bp, Zea mays
  unsure (1)..(797): unsure at all n locations
  Clone ID: MRT4577_28361C.1
gctcattccctccactcctcccagccgcattaccgttgccgttgcgattctcgagtcctccccacactacattagccaggggctcggcgacccggtgcggcggtgccagcagccgcagccggcaggcagcatctcggcctcggcgtggcccggtggccgcgtgggcaggcagcagactgagccctgcaaaccgcacgcacgcacgccacaggcaggctagcaagcagtcagctctgtattgattgtgcttttggagtggcattagacgtggaaatcgacgggctccgctactggtagccgttgccgtagatggcgaggggcatcaccaccatggaggtgcgcgccgacggcgtggccgtcatcaccatcatcaacccgcccgtcaacgccctctcgctcgacgtcatagctagtttgcagaggaactatgcagaggctctaagcaggaacgatatcaaggcaatcgtcctcactggttccaaaggaaggttttgtggtggattcgatatagccgcgtttgaaaataagccaaaaaatgagaagcctggatccatgtctattgattttttgactgacatagtggaagatgctcacaaaccgtcagtggctgctatagatggcattgctctaggtggtggnattggagggttgcgatggtttgccatgctcgcatttcaacaccgtcagctcagttaggactacctgaacttcactttggatcattcctggatgggagggaccaacgtcttccccgtcttggtgtctgcaaaagcccttgagatgatgtgactcaagac

SEQ ID NO: 106207 - DNA, 401 bp, Zea mays
  Clone ID: MRT4577_28362C.1
cggacgcgtgggcggacgcttgggttgaactctgctgcttatttgcaacaacagcaactactactattcagccagctagttgctgcctaccaccagcaatttcttttattcaaccaactggcagtatggaacttttttggttatgttcaataacaactactaccattcagccagttagctgttgtgagccctgatgtcttcttgacacagtaacagttgttgccgttctacctgcacgctgcgtctaacgttggcactcttttacaactgcatcatttgttgtcattcaaccaacatgctttgacaaactcaacagggttctttcaacatcccattattggtggggccctatttgagatggtttatgagttatagtttaataataaagtttgttttttgat

SEQ ID NO: 106208 - DNA, 898 bp, Zea mays
  Clone ID: MRT4577_28363C.1
tttatatttgagggatggatcagagttttccgtgtacaagaaacaaggaaaagaaagattcatagaaattgtgaagcaatgttttggaggaccctcataaaatcaatcatatcataaaatataaaatctttagcaaggtttgaactaagccacttttctaacttggacaatccacatctataaattcatctagattgaaaacactatattagtagatattgctagtcaaaaaaatagagaactctaataacattcatgcttctgcaaagacctcagttaatttacaaagtagataattggattttaaaataacaatagggtggtaggttgctagcattagcaacatgtaactagaaggcaacatgtatgtgcttcaacaaacataaagtattctctaaacatcttcataaaaacaaattaagtatgagagctttgctaagatgactatatgaatctatagtcttataattacctgtgttatttgtggggataaatatatatatatatatattctatagcatctttttatccactacatttctatgtataggaaaacttagggagcagttaatgttacccttgttcaaggaactcaaaatcatgagttgaagttttttcctattcagctagtaaaaaaatattgcatcataagagaaattttagttgattacaaagtgtaaacaaacatagttcaaagaaacatttctcatggttgtcattgtgcaaagagatatctacaagtaactacacaatatctagagagcattatataattttgttgatcttttttgtgttttttattttttgatcttttgtgtgtgacatcatgtctctttttaatgtattataatcaatagagacatgtccctcctattgcttaaaaatgctcgtgccgaat

SEQ ID NO: 106209 - DNA, 152 bp, Zea mays
  Clone ID: MRT4577_28364C.1
caaaaaaaacacatgaaaatgattactaccgattaccacgaccccgaataatcgcaccaattgtgcggcgtactaaagggggtgcaccggtacttcggatccagacgcgccgatggacgtgcgctagcggatcgcttacctattcgcgatcc

SEQ ID NO: 106210 - DNA, 489 bp, Zea mays
  Clone ID: MRT4577_28365C.1
atcatcattcatcttactggtatatgcgccaaatcaaatgtgccacatcaattatctaactccaaaaaccatagaagctggtgcgttgaggttgttgctttcattgattaagtatcaagtgtttcttgtacacagacaggcggatgcagctgtggtcaacatcaaagccatcagcagcaacattatacacaacaacatgattcacaaacacaacaactttaaccaccaccacaacatcaccagctgctagctactccaacaacaacacgttcacatgcacctccacaatcatcaccgccagcaggaaggtgatgttgaacaacaacagcaacaaccgcagtagctcgccctacatcagcaacaacgagcccaacaccggcctccttgtgaaggccgaccacttgttggcctacaatcacatggcgttgtgcaacatctcgaacagtgtcctgagcaacatcaatgacagagtcttgattttctaacttt

SEQ ID NO: 106211 - DNA, 499 bp, Zea mays
  unsure (1)..(499): unsure at all n locations
  Clone ID: MRT4577_28366C.1
tcgaggccggccggaacagctctccatccattacatcccggtattttcctctgcccgacgtgctctccctcccatttcctagacgacgtcggctaggtggctgatcgtgctacagagctcgatcaccaagcccgcggcggcgtcgcccgctgctgcttactggggagatctcgcccgggggccgcagggnacnagncgcgctgccttcggaccagcgcccaggaacaaggccctnnnngnngccccacaactccccaacgcccatagcctaacccccccgnnttccctccccccgccacaccgacacccgcatagcatcccccccccccccgcccccgccannaccccccccccctatattggccccccccccccccgccccancgccccccccccctagatnnataccccccccccccgccttacgccccgccannnnanancacccccccccccccccccccccccncttaagccctccccctcccccccccccccc

SEQ ID NO: 106212 - DNA, 269 bp, Zea mays
  Clone ID: MRT4577_28367C.1
gaaatagatacgccaatggcactgccaggaatctaacaacaagggctgccatgatcttatggcctattggggctcattgcgttcatgagcagctctacaaaatgggtccattatataacacagcacgctcactaccagcatccttgtgagtaatgtggtcccaaaaaggcttctaaaggcgtggaaacaaccttcagagcaggcctataggtaccatcaatgaagggctggcaccatttatcctaaaaaaattgtccatgcagcaccaa

SEQ ID NO: 106213 - DNA, 1295 bp, Zea mays
  unsure (1)..(1295): unsure at all n locations
  Clone ID: MRT4577_28368C.1
ngaacgaaggaaaatagagcgaagaagagttggtggtcggtagctactgctccgttgcccaattcttccctcctcctccctactgattccagctatcagtcctctccgccaaaagacaagaccataaagattactcatagattaaagtagggtttggacgtctgcctgtccatttcggcgtctgttcttagcggccgacaagcggaatctggatcaagtcccctgcttcaacccatcccctctcatcgattcattgccacaaggcagctgattgctcacagcgttggatgtgagaattggattcggacccaccgatcgatatgccgttcggccacacgcggctcgatgtccggcgtccgccgcagtcgtcctacctctgctgctccacaaccaccgtcgccgtattcgtcgcgctctgcctggtggctgtgtggatggcgtcgtccatgctcgtcacccctgccgagttccctccatttcagtccaaagtgcgtccactgaggcctcatgactctcctcctgccaccggaagcttaaccagtgctgatcagggcgatggcatcaccacccatgatgatccaccacctgctacacaacaattgcctcctgtaacagacagcatggatggtgaaaatcagcaacaagaacttttcactacagagcgcggaccatggtcaaccaaggctgaacaatctaacaaggacgctaaagagcaaaccttgacgtccagtagcccactgagcttccgttgggcgttatgcaacgtcgatgctggagcagattatattccatgcctcgacaacgtagcagctatcaagaagctccgttccaccaagcactacgaacaccgagaaaggcattgccccgagaaatctcctacctgccttgttcctctaccagagggctacaggaatccaattaggtggccaaagagcagagatcagatatggtacaataacgttcctcatactaagctggttgaatacaagggacaccaaaactgggttaaggtttctggagaatacctcaccttccccggaggcgggactcagtttaaacatggtgcgttgcactacattgattttattcaggaggcaaagaaggatgtagcatggggaaaacgaagccgtgtagtgttagatgttggttggtggagtagctagctttggaggatatctatttgacagagatgtgattactatgtcatttgcacctaaagatgagcacgaagctcaggttcagtttgctcttgaaagagatacctgctatatcagctgncatgggtcaaaaaggct

SEQ ID NO: 106214 - DNA, 490 bp, Zea mays
  Clone ID: MRT4577_28369C.1
agcgtggtcgcggccgaggtactcctcatcacctttgttgcagtgaagaggctctagatccctctatccaatacacagttagatggctcctccacttgatcagtagccactggagtagactccttcaaacaccacttcttctaggtgttcctccaggcacacggtgctcacacgaagtcagccggagaagatgcggttaagcgggttgacggtcaggttgccaacggcgccgatctgcggtggtgagatccttactgagttgtcctggccacggcgagatggccaaactgaccggcgtggtcactactggtaggtcatggcgtgcaagcttggaattagcagagaccagcacttaagtataggagtggagctaaggacagattcaatggacttgcctacctcgctgtgatgaaaaactaacagggcgccatcactgcagggtcaatacacctggctcccatcccgcgtacctgcccgggcggccgctcga

SEQ ID NO: 106215 - DNA, 1140 bp, Zea mays
  unsure (1)..(1140): unsure at all n locations
  Clone ID: MRT4577_28370C.1
gttgcagcggaaatcttactaccaaattttacaggttacaaaaaatttacattagtttatcgaagtgattacaaaagtataagttggaaatatatgctagctcaagggatcatcctcaataagaagtatagatgggttacttagacttataagaaggtcgagcccaccggcacttaacaccatcaacaacagcacaagactataacctttgttgcagtgaagaggctctagatccctctatccaatacacagttagatggctcctccacttgatcagcagccattggagtagactccttcaaacaccacttcttctaggtgttcatcctcagtaagaagataaagacgtggtatacttctttaagaaggccgagcccaccggcacttaacaccatcaacagcagcacaagactataacctttgttgcagtgaagaggctctagatccctctatccaatacacagttagatggctcctccacttgatcagcagccattggagtagactccttcaaacaccacttcttctaggtgttcctccaggcacacggtgctcacacgaagtcagccggagaagatgcggttaagcgggttgacggtcaggctgccaacggcgccgatctgcggtggcgagatccttgctgagttgtcctggccacggtgaggtgagcagttgggtgagcgtggtcaccagactgggatgttggctgtgcnnnncnnnnnnnccnnnnnnnnnnnnnnnnnnnnnnnnnnnnnnnnnnnnnnnnnnnnnnnnnnnnnnnnnnnnnnnnnnnnnnnnnnnnnnnnnnnnnnnnnnnnnnnnnnnnnnnnnnnnnnnnnnnnnnnnnnnnnnnnnnnnnnnnnnnngatgaacatgggaaattcgaactgatggcaaaggagaatagctatcaccgtcatggacacaggatttacaacatacacgcagtagctttggctagagcttgagggcagaggggaagaacttcactgaatcaagtccaaggcgatgaatatatggcagatgcagtggagctcatcgacacatgataaaggagaacccatatggtgccagcagctccacaaacatggacactcagcagcagtgcatggacagcacgtagcagctagcacaggggtg

SEQ ID NO: 106216 - DNA, 471 bp, Zea mays
  Clone ID: MRT4577_28371C.1
caggaaacactagcccgattcaattaatatatcactttcattgctttagcattatggctgttacatagacttctccagccgacctagatcgcctgaacttcagcacatcacgttcttgacacgagcagcagccaaggtgtggttttttcaggcatgcttcgatcaaattcagtgcacacggcaacgcatcaccgatgaatgatgccacggtgaggtggtaggtcggctaggcgaccggcggccagtgtgcggggtccttggtcgtgtcgagggacgtcggcggtatccactggatctcctcctccaccagcgcgtagtcgagcaggcacccgccgggctgccccgcgcagctcatcggcacccccactcggcggcgcggctcgagcgagcgagcgaaccagcacatatcttttgcgggtcgtggggcgagcactagccctgtgcgttgtttgccgtgtgtggatctcttgg

SEQ ID NO: 106217 - DNA, 929 bp, Zea mays
  unsure (1)..(929): unsure at all n locations
  Clone ID: MRT4577_28372C.1
gccaaccgggtattgtgcataggagccaggtgtattgaccctgcagtgctggccccctgttagtttttcatcacagcgaggtaggcaagtccattggatctgtccttagctccactcctatacttaagtgctggtctctgctaattccgagctctagccaaaaacctctacaaagatgttggagacctggtgttcatgctgatgttaactctccccagcccctcccaagttggcactgtccaaagcttgcacgccgtgacctaccagtagtgaccatgccggtcagtttggccatctcgccgtggccaggacaactcagcaaagtacacgatcatgctatgtttgttctgtgatcaccttgtcatggccagaacggagtcacgtcatcgtggaactagcgctgcgggcagcctcaccgtggaccgatcgactggagtcatccctggtcaatctcgcgcacgcaccgagactttggaagaacacctagaagaagtggtgtttgaaggagtcaactccagtggttgctgatcaagtggaggagccatctaactgtgtattggatagagggatctagagcctctttactgcaacaaaggcaagccccggtgcatttgccccttccttgtattttaaatgacttttatacactttaagactaatgaaatgtgcattaagtttataggagttgcttggaaactattggatgcattgcctaccttgatatccatacctttatagataattctaatgaagtatcaaaatatgatttacaaaaatgatagccctgcttagatcttgtggatagaggttgtcctttgcaataatgcatacctcaggggttatcctgacgaatgatggcttctacttgncagaatattttcattgggagaaatggtgggatcacaaaaaaaaaaaaaaaaaggccccta

SEQ ID NO: 106218 - DNA, 423 bp, Zea mays
  unsure (1)..(423): unsure at all n locations
  Clone ID: MRT4577_28373C.1
attcggctcgagcagacggntacagtgcaggttttgatggtgcagctttccttgcgaacatagctgggcaagatgatcaagccgctgccctcgctgggaaacgaccaggctccccgcttgctctgtcagactgctccctgactgctagaatggggtactaactacagctcagttcaattctaaaacgacacgttcagaattgagtacctgggaatgcagcaaacgaccgatcacatcgactcactttggacacgctaactgtcacgatctgactggaccgtacgccatatagcctgtacgaatgacaaacgccagtgcagttacaagggcctaactggtggagcagataaacactacagcagatgccagcgatttcctctagcacttaacaagcattatactgaaacgtgaccaacactatct

SEQ ID NO: 106219 - DNA, 1457 bp, Zea mays
  unsure (1)..(1457): unsure at all n locations
  Clone ID: MRT4577_28374C.1
ctcgaggccggccggggtagtcccaccgcacccgactccttcgattatttgaatatagattccgtcggaaccatccgcccgctcgccggggtccagccgggcaacacatacacgcgcccgcgttggcgtattctattcgccaagagccaaggggattggggaggccgtccatgttgcgtgttgtttagacgcgccaaaaggcaaaagcgtggaggaggctcatcaagcacaagcacgccacgcgatccacacacggcaagcaacgcccagggctcgtgctcgccccgcgacccgcgaaagatctgtgctggttcgctcgctcgctcgcgccgcgccgccgcgtgggggtgccgatgagctgcgcggggcaggccggcgggtggctgctcgactacgcgctggtggaggaggagatccagggctccgagttcatctacatggtcgacgacccggccgtctccagnaaggaggacggcgtccaggacaaccccggcgccaagaagaagatcccggccggagtccagcgcgccacccggcaccaagggctttgccgtgagaagctccnggcgagacaggctcaacgaaaggttcaacgagctctgcgccatcttggaacccggcaagccacccaaggccgacaaagtcgctatcctaagcgacgctgcccgtctcctgaccagctgcagggcgaggcccagaagcttaagcaatcgaacgaatcgctccaggagtccatcaagagttcgaacggctggctcattcggctcgaggtggcgctgcaggctgagaggtccgagctgcgagacgagaagacgaggctcaaggctgagaaggagaggttggagcagatgctcaagggcgtcgtcagccacgccgcggtggctgctccggggcccttcgtcccgcaccctgctgcggtcgctccatctttccaccaccacccggcggcgtttgctcaggctggaaagttcgtcccgtaccccagctacccgccgccggctgcgttctggcagtggataccgccgacgtccctcgacacgaccaaggaccccgcacactggccgccggtcgcctagccgaccaaccacctcaccgtggcatcattcatcggtgatgcgttgccgtgtgtactgaatttgatcgaagcatgcctgaaaaaagaaaccttggctgctgcttgtgtagagcagtgtttatgcttgtgtcaaggacgtgatgtgctgaagttcaggcaatctaggtcggctggagaagtctatgtaacagccataatgctaaagcaatgaaagtgatatattaattgaatcgggctagtgtttcctgaaactacggttattttagacaaagatcattgcctagaaaaggctagaacaatgcaaacttgggtaacattgtgacaaagatctttagtagtttactcatctccatatcccaaaaaaaaaaaaaaaaaagcggcc

SEQ ID NO: 106220 - DNA, 549 bp, Zea mays
  unsure (1)..(549): unsure at all n locations
  Clone ID: MRT4577_28375C.1
tacaatgaaagaaagaaccccggcaggaaccggaccggaagaaccggggcgaccaaccaccccaaataaacacccccngggacacaagaaaccagcgaggggcaaccagagaccaaaccgcgggacacaacacacgaccggggaaaccaaacaaacaaaaaaaaaaaacgaaaaaaaaacaacaacaaaagaaaaaaaaaaggaacaacaaaaagcaaaaaagaagcaaaaggaaaagaaaaagcaaaaaaagaacaaagaaaacaaaaaagaaaacaccaaaacaaaagcagcgaacaaaaaaaaaaaaccaaaagaaaaaaacaaaaaaaaaacaacaaacaaaaaaaacacaaagaagcaaaaaacgaagaaagaaaaacaaaaaaaaacaaaagaaagaacaaggaaaaaaaaaaacgaacaaacgacaagaaaaaaaaaaagaagaacgaaaaacacacaaaaccaaaaaacaccaaacaacaanccaaaaaaaaacaaaaaagacaacgacagagaaaaaaaagaaccgaaaaaaaaacaaaa

SEQ ID NO: 106221 - DNA, 1685 bp, Zea mays
  Clone ID: MRT4577_28376C.1
tcgaggcctggcacgggtagtcccaccgcacccgactccttggatttgaattagattccggtttccctttctccgcccgctggccggggcccgctcgccgggcaacacataagcacgcgcccgcgttggcgtattctattcgccaagagccaaggggattggggaggccgtccatgttgcgtgttgtttagacgcgccaaaaggcaaaagcgtggaggaggctcatcaagcacaagcacgccacgcgatccacacacggcaagcaacgcccagggctcgtgctcgccccgcgacccgcgaaagatctgtgctggttcgctcgctcgctcgcgccgcgccgccgcgtgggggtgccgatgagctgcgcggggcaggccggcgggtggctgctcgactacgcgctggtggaggaggagatccagggctccgagttcatctacatggtcgacgacccggccgtctccagcgtgatactggggtttgatgctcccaggaaggaggacggcgtccaggacaaccccggcgccaagaagagatcccggccggagtccagcgcgccacccggcaccaaggcttgccgtgagaagctccggcgagacaggctcaacgaaaggttcaacgagctctgtgccatcttggaacccggcaagccacccaaggccgacaaagtcgctatcctaagcgacgctgcccgtctcctgaaccagctgcagggcgaggcccagaagcttaagcaatcgaacgaatcgctccaggagtccatcaagagtcttaaggctgagaagtccgagctgcgagacgagaagacgaggctcaaggctgagaaggagaggttggagcagatgctcaagggcgtcgtcagccacgccgcggtggctgctccggggcccttcgtcccgcaccctgctgcggtcgctccatctttccaccaccacccggcggcgtttgctcaggctggaaagttcgtcccgtaccccagctacccgccgccggctgcgttctggcagtggataccgccgacgtccctcgacacgaccaaggaccccgcacactggccgccggtcgcctagccgacctaccacctcaccgtggcatcattcatcggtgatgcgttgccgtgtgtactgaatttgatcgaagcatgcctgaaaaaagaaaccttggctgctgctcgtgtcaaggacgtgatgtgctgaagttcaggcgatctaggtcggctggagaagtctatgtaacagccataatgctaaagcaatgaaagtgatatattaattgaatcgggctagtgtttcctgaaactacggttatttagacattgcctggaaggctagaacaatgcaaacttgggtaacattgtgactgaaaaatgaaaccttggcgctgctcgtgtcaaggacgtgatgtgctgaagttcaggcgatctaggtcggctggggccgtatatctgaccgcctggtggtctaaaatgcaaatttggctaacattgtgggctgcaataccgatactggggtttgatgctcccaaatcagatcaaggaacagggcggtttttccacataacgctgtgtgtaagaaagacaaagtgccaagcggcgtatacgccaccaagatctcgcaggaggagtacctcaacgcgccaggcgagacctactccgttaccctcaccgtgccgggaacctacggctt

SEQ ID NO: 106222 - DNA, 755 bp, Zea mays
  unsure (1)..(755): unsure at all n locations
  Clone ID: MRT4577_28377C.1
ggagtatatgaacagaatacacatttaataggttatttggttcgtggtctaagaacgagtctcgtccaggcaaataccatcaacccgtgccaaaacccataatctcatcccctcaacggtcaaccatgtgatgttctcatgattcgacgaggtcccataaaaatcataacgatgatattattctcaacggttcgtgctctaaaaatcttaatcataactttattaattataatgattctgaatggtttgctgcctttgctaagacaaaaggttgcggagcaccaccttttgtagctgcccccccaaccaaaacgcccgaaagaaaacacattggtcacatgaataggcattgatgagcaaggttatgttaaatagaaatgacctgttaataaaaagaagggattgaaccggttctaactcaagtagtaaaaagtaagagccggtatttcgaatcaaaagacaactgatgttgctattttgagatgaaggtagtacatgtatttcattggaaacaggtagtcactctcccattaaagtgttatcatcactttgaaaaagttacatatttcaattttgatcaaataatgtaagagcacgtttatgatatataaagttaaatatttcaactttgatcgaataatgtaagagtatatttatggtatataattagtatgactagatagattgctggatataattntataacaagtttatccaaaggtataaatatcgaaaatgttttctatagtcaagct

SEQ ID NO: 106223 - DNA, 423 bp, Zea mays
  Clone ID: MRT4577_28378C.1
gacccttcgcaggaccccaaaactcttggttctaaaccgaagggttttgttgggggcccaaatacttccctgggaaggaaaaaacaatacttggaaaatttgcaaccttggaacaaaacggggaacacccttggctgcccgaggtttttatagcaccccgaaaaaaaaggccgggacaaaagacccagccggggcaataaaacgccaaggactgaaattgccctggagggggggctctttgagccttacaagaagttcaacaggttggtgaaaacaacttttaaaaacttggtcgggaaaaaaggctcttcctccgggggtgccaaactggccaaacaagggtttggccttggaactggttttcttggagcctccactccccatagggggaaagagacctgggttgaaaaccggggggggaac

SEQ ID NO: 106224 - DNA, 409 bp, Zea mays
  Clone ID: MRT4577_28379C.1
gctgtttttatgattccattaacagatctattatattattaacattgtcaaagatgttttttattttcagcaaccctaaacacataatctcttccctatggaaagctactgagtgaattctgcctgaaagctctgatttaaaatcttcaggccagcctttatcaactgctgggtaggaaaaaacggggggacaaacagcatacatgcctgaccggaaatacccacttacagaccgggctgtaatgccaatgggacaatatcagcggccttggaaacgactgtccagacaactgggcaccgggaaccccccccgagccacgaacttaagagagatggggggggggtttctctagaagggctccgaacccctcaaagaactgcgcagacccgactttcacgccgttttgga

SEQ ID NO: 106225 - DNA, 229 bp, Zea mays
  Clone ID: MRT4577_2837C.1
ttttcagtaatgccactttattgccttgcgaccctataccattttagataggcgaagccttcgaattcaaaagcctagacagtttcttagtctaaatcgtgaatgctatgaagattcgtagagtggactttctgttgacacctaaaaccacaggtccagttggttgacatcctataccttctttgcttgaacatagcatgcttgaaccaaataattgattccttgggga

SEQ ID NO: 106226 - DNA, 1150 bp, Zea mays
  Clone ID: MRT4577_28381C.1
acccgggcgagctcatgtacaccgccacacgggactgccaccccaaaacgcgggacgcggattgatgatatcggtcgccgacgagcggggccggagcactctctgcttctccccctacttcccctacgtaccaggaagctaccactcccccagagtgaaggaagagagagctctccgcctctctcctccgccttagagcgacgtcgctgccggagctcgatacctatgggtggcttcgggacctcgcgccctgcctccgtcgccctctgcgccttcctcaccttcctcaacctcttcgccgtccttctcgccgtcggcgccgagcgccgccgcagcaccgggaaggtgatgccggacgagtacgacgagcggtcctactgcctctacgacactgacgcctccacggtgtacggcgtctccgctttcttcgtgctcctgctccagcaggccattgtcaacgtcgccacgtggtgcctctgcttcggacccgtgctctcctcccgcggctgtgccgtaacggcattcgtcctctcctggataacattcctcgtcgcagaagcttgtctcataggaggatcggtgaggaatgcaaagcacaccaagtatttaggctactacatgaagcatgatttggtgtcgtgcgccgcccttcgcaagggagtctttgcagcagctgctgcaatgatgatcatcaacctcctggcgtccctggtgtactactggagttactcaaaagctgcgacgggtgggttcatgaagcaccaaaatgaggttggtgtgggcatgacggattacggccttgacaagggtgtttctgggccctgagtgagatggaatcttattggcctctgtgcggtattaatactatcgtcgaaatgtatgtggatgaagttgagttgtttctctacggtgtgctgtgaatgatataccataactgtacaatggcatgggtggtgatattgtagggttcgtgctgtgaaaaatgcggtagcactagttgtgtttggtgtgctgcacgagcacgacaccgacttcttcctgctcgctgctggcggtggttgttcgcaacacaaatgcgggacttcaatgttcttggctgtcattaaattatgcaaggtggtactgtactgattttgcactaaaagcggcc

SEQ ID NO: 106227 - DNA, 263 bp, Zea mays
  Clone ID: MRT4577_28382C.1
gcagcagcagcaaggaggttcccaaagccagaaaggaaagcaacaagaagaagaaaacgaaggaagcaatatattgagtggcttcgcccctgaattcttgaaagaagcgttcggcgtgaacatgcagatagtgagaaacctacaaggtgagaacgaagaggaggatagtggagccattgtgacagtgaaaggaggtctaagagtcacagctccagccatgaggaagccacagcaagaagaagatgatgatgatgaggaagagc

SEQ ID NO: 106228 - DNA, 477 bp, Zea mays
  Clone ID: MRT4577_28383C.1
ggaagggggaccttttatttaaaacgtataaaaaaaccaggaaaaggagcccccaaaaccggggaaatcaacggaaacccccaatggggaagggcaacggaaaggaaaaggattgggcaaacggggggggccggaaaatgtcccccaaactaaggcctttttaattaagggggggggcccagggaaaaaaaagggcaacaaaaaaaaaacggttcaaaagcgccccccaaaaaacccccacaacttcggcagggatttaaaaggtccaagggggcccccacccttgatctgaccccgtaaaaaacagggaaaaaaaacccccccgggtcaaggaaagggccccccgggaaattgaaaaacccggaaacaaaaagggcaaggcccttggaaattttcccaaactcgagggttccaacgcaggcagcccaaagctttggggggaagccaagaagccaaacatgggaaaaaagcttggcc

SEQ ID NO: 106229 - DNA, 995 bp, Zea mays
  Clone ID: MRT4577_28384C.1
cacacacttggctcttcgcagcctcttgttggtctcctcagccaccttggaaagccatacgtgcaggaattagcaagaaggaaggaagcatgtggaagcttgttgcagcagcagtagcgctaatcgtgctgtgcgcgtgcacgacgccagcgcgcggcggcgacgactacacggcgttcgtgtacgccgggtgctcgcaggggcggtacgaccccgggtcgcagtacgccgcggacgtggacaccgcgctgtcgtccctcgtgaacagcgcaggcttcgtggcctacgcaaactacacctcgccggggcagctggtgggcgtgtaccagtgccggtccgacctccccgcggcggtgtgcggcggctgcgtgaggtcggccgtctccaagctgtcctcgctgtgcaacgcggcggcgggcgccgcggtgcagctgcgcgcctgcttcgtgcggtacgggaacgactcgttcctggggaggcaggacacgacggtgctgttcaagaagtgcggcggcggcgagagcgcggggggcgacacgggcgtggtggccatgcgcgacgcggcgctcggcgcgctcgtggccgccgcggcacccggcgccggcgagggctcgtaccgcgccggcgcggcggggtacgtgcaggccatgtcgcagtgcgtcggggacctcggcgccaaggcctgcaccgactgcgtctccgccgcggcctcgcagctcaaggccggctgcggctacgcctccgcgggggaggtgtacctcggcaagtgctacgcgcgcttctggtccaatgccgcccccggcggcggcggtggcgaaggcaccggcactggcggtggattaccggtggtcggaggtggcggcggcaatgtcatcggcggcggcggcgtgggaggagcaggcaacggatacggatacggcggattcgtgccaaacacgtacgggcagcacgatgaatctgggaaaacccttgccatcatcatcggcctggtggca

SEQ ID NO: 106230 - DNA, 403 bp, Zea mays
  Clone ID: MRT4577_28385C.1
tggcgcagagggacatccgggggtccaagagcgggtaatagctggcgcgacgcacggacatcgagagcaggaactacaggaacacggacaggacggagatgctgcagcagatgggcatcgaccctgcgacctacatgacgagaaagccacaggcagcatatccttctgcgactgatcaggaacaggacacggtctgttcgctcgaagaggagggggagaaggcccacgcggtcatgatggcactagttacgtcgattatcgggctcaagacggagcacatatttaccgacgaggaggagatgctggagcacctgcttgactacaatgacgactttcgaaacgaggcttattatcccgacgacggtgcttgaccatgctgcggctactaagaggagcgggagac

SEQ ID NO: 106231 - DNA, 227 bp, Zea mays
  unsure (1)..(227): unsure at all n locations
  Clone ID: MRT4577_28386C.1
cgcccgaagtggggcaccgtcgcctgggccangcagaactacntgcnctacnactactgcnatgacggctgnngcttcccgcatggttccncgccgagtgctctcgcaactgattcannggntngnttgntnnccccgantcgtccgggggtcggcgtacgtccaaaaaatgccctgccttgcccccccgaggatttttgnttcctgtccctnatcnaataaaccat

SEQ ID NO: 106232 - DNA, 213 bp, Zea mays
  Clone ID: MRT4577_28387C.1
ctcagagggggatgatagttgcgtaaacttttgtccgcggaagaatgccgaatcgcactccagatcactcgtaaaactttggagagttcggatggctgtttcttgcgcagacctcaattgcgcagcacgtcttcaagcgcttgatgagtacctgatcagtcgcagctacatcactggctaccaagcttccaagcatgacttggctgggtacac

SEQ ID NO: 106233 - DNA, 407 bp, Zea mays
  Clone ID: MRT4577_28388C.1
attcggctcgagcggatctagcggcacctttttgcacgcagagtcctccgcaggcacagggacaagtgaaggacccgtcgagatacatttttgggttgatctaagtcttgggggtggaggagcagccacaggacaccccgcagctggcaaccggtggaccttgatgatgtgctggacaactacatctgtggtgaacgactaccgtacctgtgaacgcaactaagcacgctatgtacctactcgacagctatgggcgtgactcaaagaagcggcttgacaagggacaacgccctaacaaacatatggctcacaaacttccacatgaccaacaggcccaacagcggcaccaaagtcatgggtgcccatataatcaaacataccctgacaatcatttacctgatcaccga

SEQ ID NO: 106234 - DNA, 257 bp, Zea mays
  Clone ID: MRT4577_28389C.1
aaaacttccttccttactgttctgttcaagtgccgagcgttgtctgcatgaaattagtaggataagtgtgtctatgaacatctgatgtttctaggtatcattgaggagttggttaagaggcaccggcaaattgatccagcttatgtcatacaagctttcgggctttcagagacattcccccctgcaccactgctgcagacctatactgaggagtttgaggatacagttgacaataatggggatgccactgagtccct

SEQ ID NO: 106235 - DNA, 485 bp, Zea mays
  Clone ID: MRT4577_2838C.1
ggactcaacttcttttaagtggtcacgttgtaacaaactttacggacattcaatattttagtttttggggggtttcggcaacatttttttcacgaaacaaacaaaaagggttttttttttttaaacttttaaaaaggggcaatccggggtttttgcttatttgccattgccttttttttgcaaaagcacgttggacacattactttttcaggttcaaaaaattttttacacctttttttttttggccaattttttttccccaattatgaaaactggtttgggttcaataacatcccacttgcaaaacagggggcacatgggaagtccccagtcccatgggaatttgtgcattttttttttttttggtggctgacatttttaacttggaccaaattttaagctgggttaaccccaactgggccccctgtaaatgttgccccttttgggtctacccgcctcaattgaaggggggagggcaagggcct

SEQ ID NO: 106236 - DNA, 291 bp, Zea mays
  Clone ID: MRT4577_28390C.1
ttcccgggtcgacccactcgtccgtacctacatagataataaatcaattcacgtttaaatgaagctcattattctcaccaatgatcattcttacaatcccatgtatcactcctacaacctacatctttcatacactctacttcataatgctcctcgtcccagtataacttatatacatccaaacccctcacaatacacttcctaatatctacgcatttcttaaccattatataactcatctctttaattatattcacattccttataccccaatctacaacatcaacactt

SEQ ID NO: 106237 - DNA, 310 bp, Zea mays
  Clone ID: MRT4577_28391C.1
acaaacacacccaaaggaacgggaagcttcccagtggtgcggtcacaatcgatcctaactaccaaacaccgaccgacccctttaccgctcgacttcatccccgatccccacagccatggcacgcgacgcctgcgccgcgtactcctcttgctgctccgaggttccgatcgccgaccgcacctgcgtctccgtcggcgaggtgacgacgggcacggtgactacaggcagcagcaaccggatggcggcgtattgcagggagtacgccatatatctcgacaggatagcgctccacgagacggaccgttacaag

SEQ ID NO: 106238 - DNA, 515 bp, Zea mays
  unsure (1)..(515): unsure at all n locations
  Clone ID: MRT4577_28392C.1
gtaccgggccccctggcggtttttttttttttttttttttttttttttttttttttttttttttaaaaaaaaaaaattccacactgctagcattaatctgcacaggggagcaccatccaaacgtaaacgatcgtcatgtgacctgtcacggtctcaaaagtaagcaacagatgcaagcaagataacactactcgtctcgttttcagccgacaacgggcaacggattgtcaactcattcacacgaaagctcgatcgaccgaccatcaaaagacgcctccgctgcttaaatcacctgccctcgtggatggaggtgatggtgaggtcgttggtgctgcacgacgtggtgaaccgcgtccgcgacccacagtcgtcgtcgctgccgctggtcgtcgccaccctgagggaaaagtgcggcggccgcttcgggtccgggagcggcccggcggacgcggcttcnccggcggnggcggtggcggtgggcaacatcgccgtgacgtccgccatggtcggccggt

SEQ ID NO: 106239 - DNA, 638 bp, Zea mays
  Clone ID: MRT4577_28393C.1
cacccccatccattcaccaacccgaaatagaaggccgtccccagccaccagcctccggagttcctccggcgatccccgtccccttgtgtgcgcgctccaggagggccttctgcctccagagacagaaggtggccaagtcgagctgcacagggatctcagtagggctaatagtggagggcagccgcaggctcgtactttcacatatcagagctcttccgtgacgtttggtggtattaatggagcttactacaccacttcaaagtctcggcggactggtagtgacgggatcactgtggaagaaagcaaggaagctgatacaacaactaaagaggctactcatagaatctcccgtggaatccatgacaagggacattccctgacaaggaaactgaattcggatgggaaggttgacaccacacagacactgcacaacctgaatgaagatgaactagctggatttgagcaatcatggaaggggaatgctggacattacttgcctgactggaaccacaatgctggtgcacctaatagcgataattctgagcagggccattcatggttatgaacaggtgacccgagctccattggacgtgaccggcgacccgccttaggctgggcgcttcctgggacccaccagg

SEQ ID NO: 106240 - DNA, 1933 bp, Zea mays
  unsure (1)..(1933): unsure at all n locations
  Clone ID: MRT4577_28394C.1
ttgggtacccgttcgggccggcggctaggtgtcgggatggttcgcggacctccactccacgacccgaacgttcgggagaaggcaaattccagacaccacacaggacacagcgcattcggctaatttcctcgtctctccccaatccgaccacccccatccattcaccaacccgaaatagaaggccgtccccagccaccagcctccggagttcctccggcgatccccgtccccttgtgtgcgcgctccaggagggccttctgcctccagcttgcagagcccacctaattgctgcgagatggatagagggcagaacgggagggatgacgtcttcggacgcagggatccattttctgggtttggcttcggcccccacaggagcttgttttctggtctccttggggggagggatccatttgacgatccgttctttacccatccgttcgggggtcggatgatgggtgaccatgacatgtttgtacctagtccttttgggccgatgggagggccttttggggacatgaggaacggtgggtttatcgagcaagctcctcctaggggtaacagaagaaggcctgtgatcacagaggtcgaggaggatggtggagagaacgcagagcatggtaaccagcagcctaaccaagatccttatgttcaggagccagacgatgggattgatgagacagaaggtggccaagtcgagctgcacagggatctcagtagggctaatagtggagggcagccgcaggctcgtactttcacatatcagagctcttccgtgacgtttggtggtattaatggagcttactacaccacttcaaagtctcggcggactggtagtgacgggatcactgtggaagaaagcaaggaagctgatacaacaactaaagaggctactcatagaatctcccgtggaatccatgacaagggacattccctgacaaggaaactgaattcggatgggaaggttgacaccacacagacactgcacaacctgaatgaagatgaactagctggatttgagcaatcatggaaggggaatgctggacattacttgcctgactggaaccacaatgctggtgcacctaatagcgataattctggtgaccgtagctccaatggacgtgaccggcgatcggcctcaggctgggcgcttcctgggaccgagcaaggccgtgatccgaggcgcaacgggaagccaaaatcacgggtcatccctatctcctgaagagcatggacggagtagatatatagagtagataaataaacagctggtttgtactactatgcaaggtttaggttcaagatcgtttcaaggaaacgacctgaggtccaggtaaccggagtccgcccagcacctcgcgtgctattgtctgattctgtagctgtacagtgctctgctaccttattatccgtgatgtgaaacaatttgtgtcgtccagtcttgctgtaaaatcatcatcgcgtatattgtaaacctgagtcggtatgtctgagttggctttgctgtgttgttgctagttgtttgggtccctgaaaaaaaaaaaaaaaaactcgagactagctcgtgcgtttgcgtgtgaagctcnnnagcttcatatttgtaagggaggacatatgggggtggcggatgggaggttntgatgcacaatattaaatnntatcatcatccatcttagatctaacgcnntctaattgatttgtattattttgcaaaaaaacaccantctgaagtggtggagtgtagtagtggaagatgatatttgtaaaatataacaagcaactagagacgttagatctgagatgatggatagtgataatttaatatatgcgccatgtgcgccaaactcccatgtgcactagacatcttctcttggaagaagttatgcaaattggttgtcaattgttgacttgatcaaccaaggatgttatcctt

SEQ ID NO: 106241 - DNA, 431 bp, Zea mays
  unsure (1)..(431): unsure at all n locations
  Clone ID: MRT4577_28395C.1
gatataaaccattctattcataaaagaacaagatcacgccaatctgancataccactggagcagtagtatgtactagtagtatatgaagcaaaactagaagacacacagtctgtggcgcgacacatggggtacatgctccccaattaccatcaccagaccagaccacacacactttagtattagcccaagtaactcatagcacgaaacaggcagtcctacgctcaagacactgatatagatacatactacattgtgacaaacacagataatgcgagaaaccgccacgttcgaatggtactgaacacaagcaccctgccatgtaggcgcgcgcgctcatgatccatttaactctcgaccagttgtccgacgtcctaatgcgcgcacgggatactgactcactacttggacttatgctgcacctcattggccg

SEQ ID NO: 106242 - DNA, 454 bp, Zea mays
  unsure (1)..(454): unsure at all n locations
  Clone ID: MRT4577_28396C.1
ggccttatcaanatagggaaggtgtgttaggatacaagatctactctgtttctctcagtatactgtgcatctgcatggggagctcactatttattattctgctcttgcagtaaggaccaaggtgtataattgtttttttccttgggatggcaattaatggtgttcccttcgatgtatcagggcttggacctgcctgctttttaggatcttccggagagccaatacccctcttgtgatccttggcacgggatgcagaacaacttcagcacatgaattcagcatcttttcctaatcctgtagccggatgatactaagttacttccatatgacagtttccaacagggctggctttgctcatcgagaagaaaagcaggaggattgagatatccctgtactggcttgccagagctatcgagaggtttttcacatggatgaccgatgcaggactctgccc

SEQ ID NO: 106243 - DNA, 734 bp, Zea mays
  unsure (1)..(734): unsure at all n locations
  Clone ID: MRT4577_28397C.1
ccgggatcgcttactatctctgctatttgtcttatttctttgtctctctaaaattcacctcgcctccccatttcttcgcttactccggccgactatctctgctatttgtccccttgggagggcgtgctgccgtcggtcggtgctccagcgactgtccctatcggcggcatgagtacttgccatcgccagatttttgaaacgcgactggaaactagtggtccggcggccttcagcagcggtagcgtggcaattcggcaatgtggtggcgtgtccctatctgtgctcaaatcgcggtgcagaggaggatgacccgaaagagggctctggaaagctttgggtgtggggggcgttcggttactacggaataaaggcctggaacaatttctaatctgaattgtttctctattttatataagttttgattagctgaaataaatcctggtgtaatcctgtgcaaacgaacggggcctgaagggataacgaaagattttaaggtcacacgacgccattgaagggataaagaagatcccaaagccacacaagctagagaacaaggcagaatagaagcggcgacggcggcgacctggctgccggagtgcggctccaccggtggactgctcatcagtggtaacgtcggattcccgatcacttctatatnctctgtcatgctgctttagtaacacgctgcacgccttcgctctgtttgatgcttcgtcagtcactcactggctgct

SEQ ID NO: 106244 - DNA, 491 bp, Zea mays
  Clone ID: MRT4577_28398C.1
ttttagccttggggaggaagatccatcgggtcaaagctctttcagcttgcaagcataggaaaactagactcatgggctgtgacctcccgagcttagaccgatggctctatgagtatcgacagagagcactactcggtttcccagctcagctatttatatctgcgcatgatattatgatccacatgctggtggcacttgactccgaatgcccacgcccacttgattacctacggtccattcactacttcaaaccatgatagggcctttttacacatcgctaacccccaggtggtgctcctggagggggtgctcttgcccaccaacaaagaatgcctttgctctctaactatctttttctacacgattgcttaaacctgggacgatcaggacaggctgcggcactaggaagctgtacaacgccctactgaggacaagcctcatttccttggtaggggccttattaaagacccaactgcgcgttcttcaggccc

SEQ ID NO: 106245 - DNA, 500 bp, Zea mays
  Clone ID: MRT4577_28399C.1
gccggccgggtcgggataacacttctatctgtctatctctgtctgtcatctagtcagcgagaacggtaaagaaatccaaacttcaaagctcaaggtcttcgggatcatgtatcaagcaattgttggccgttcaaggcctctattccataccctcaagcagaggttgcagaccacagatccatcccagaggcgcaagcatatcgttcgatcagatacctacaagacaccagggccaatccccttagcttctttgcggctccaggcgcctgcatgggccaccgcaggaggaggcatatacgccactctgttcggagtatttaggctgctgcgctccatgcgaggtcttcactatatctgagacgttgctgtttcatgtggtttgatatcggactgagaatgtacttactacccatatgagaactggaaaaaaaagctgaatgacaaagaatcatcttgatttggtatcaggataggaaaaaaaaaaaaaaaaaaggccccta

SEQ ID NO: 106246 - DNA, 1155 bp, Zea mays
  Clone ID: MRT4577_2839C.1
acctaactggcaggttttaaactttgaatcatgatgaacacagtttcctagctagctactccaagctttatatttacttctagcaacaacctgatgggctagctactgcgacagtaagaactgatccgaaagaaacagggatgaatggggctcatcagtttatgcatcgatcattgagaatgtaagaaagaagagggatggaggacggagacaaataaaaactactagtaacaatttggtgacgatcgataatccctccagtaaagcaaatattgaagcagtggatggaaagatgcatggcatgtccaaagagaacgaaacccatcagctaggctagctagccgtgtcaatcatggtggccgtttgatcatcacctcggatggccgtggaagaaatgagcggcgccgtacgggccgggcgtcgggtacgggtccatgaccacagccgatgacgagacgggccccacgacgctgccttcgcccgccgcggccgtgctaggggaggacccctcggtggcgtggcggaagccgccgcccgcagcgaccgtcgacggctccgggccgacgtcgtgcaggatgcccttgaagacgtggccggcgatgctgacgctggtctggtacgccacctcggcgtcgggctcgtcgaccgggcccaggcggacgcagcggaacagcgcctccgagctcacttcccgcgggaaccgctccgccaccaccgccatctgctgctgctcacccgaggaagtggttgtggcggtggtagaggagggctgggcaccggtagcggcgtcacggtggcgcttggagggctcggcggcgccggtggcctgctgctgctggcgctcccggcgcttggcggcgggcacccaggtggacttgacatgggtggggcagtcgaagccccggctcttgcagcaggtgcggcagcgcatgtggaccccgcccttcttggcctggttgccgcagtcctggcagctgatggtgcccgcgccggcgccgctggcggagcccctgccgccgcgcgaggagcccgcggcggggtcatcggcgaagcggattatgttgggggcgtagaagtggtggtggtgctcctgcgccgggtgaggcggccatagctggaagccgccgcgcggcgcggcggcggcgcgtgtagagg

SEQ ID NO: 106247 - DNA, 325 bp, Zea mays
  Clone ID: MRT4577_283C.1
cggccaatctagagtcggcatacatgcaatacattgggcaaaatgacgtctaatcgggacacttaacttccaccattgggttaaaatacgtcaatggaacatacgcgtctaaaggaggaatgggccagcagctcatatgatgcaccaatgaacagaagagatatgacacccgagagcatagggataaatgtagcactatctgctagagtgctgatgacgtaaagcatgtgttcctaggatactagatacctatcaaccgaatcaccttgcatccttggggcatgatagccaaaggtgagaccccagctagattgataccaactca

SEQ ID NO: 106248 - DNA, 454 bp, Zea mays
  Clone ID: MRT4577_28400C.1
attgaccgatccatccacgcgttcggttccagtttactgtagaaagtttcttgcctattcctcatactcgttcaattcctggaactccgggagattaaatctatacaccttctccttctttacctgaacatatataaaacctcttgttttgtgaaagcaaaggtgagtacacatcaacgtactcaccaaacgttctgtttagctaaagcgtactaactttatgtgttgtgaagctccactagttgcttttagcttgtcagatatttactattagcataagccaaattttatcaataaccaacccatgaaccgttttcttatcgatgaacatcattatcattatcgtatgcaaatccattaattgaaccatattatcttgaaccattcttatctctaaccaaacaatcttacaatgctgctcataaccgtgagcacgacttatatattcttttct

SEQ ID NO: 106249 - DNA, 280 bp, Zea mays
  Clone ID: MRT4577_28401C.1
cgctctgccctgattcagatcctcgccatgtcttctcacaagactttcagaatcaagcgattcctggcaaagaaacaaaagcaaaatcgtcctattcctcaatggattcggatgaaaactggtaacaaaatcaggtacaactctaagagaagacactggaggagaacgaagctgggtctataaggagtcacactacggccagactgaggatttctactgaatcaccgtcatcgatcagtccgaccagatggatttcaacattttaaactagagatttact

SEQ ID NO: 106250 - DNA, 805 bp, Zea mays
  unsure (1)..(805): unsure at all n locations
  Clone ID: MRT4577_28402C.1
gactcgcctctgccgtatatctccaagttagcaccatcagccaagctctcatcttcgtgacgaggtctcgcagctggtcattcgctgagcgcccgggctttctactagtgtttgccttcctggtcgcgcagctgatagctacactggtagctgtatacgcggactgggggttcacttcgatcgaaggcattggatggggctgggctggtgtggtgtggctctacaacctcgtcttctacttcccgctcgacctcctcaagttcctcatccgatacgctctgagtggcaaagcgtgggatcttgtcattgagcaaaggattgcatttacaaggaagaaggacttcgggaaggaggagagggcgctcaagtgggcacacgcgcagaggacgctccacgggctgcagccaccggatgccaagctgtttcctgacagggtgaacgagctgaatcagatggccgaagaggccaaacggagggccgagattgcaaggctgagggagcttcacacgctgaaggggcatgtggagtcggttgtgaagctcaagggcctagacatcgacaccatccagcagtcgtacacagtctgatgaccctggattaagtacatacatgtatatctagttctggcaggtggcagtcgcctgcttgtttgtatttgccatataccatagctgcaccatctacagatcaacatactagtatataacacataatgagaactggtagttggtgccgtccnaaaaaaaaaaaaaaaaaaaaaaaaaaaaaaaaaaaaaaaaaaaaaaaaaaaaaaaaaaagggggcg

SEQ ID NO: 106251 - DNA, 267 bp, Zea mays
  Clone ID: MRT4577_28403C.1
aaaagaacattgcccttgctagctgacgcacaaccaggctctttgctctaaagctatgaacggggctttggaactgcaaacaaaatgccaggaaacttgcctctgaaccaaagcacaacgctagcacccgcaactcttgggttggatggaacggccccgacacatttggaagaaggaaaccagcttgttgggcttcagcacaacgagaaccatgctaagcggatgcatggagctgcatcacgagggatgcccgcacttgcagccagt

SEQ ID NO: 106252 - DNA, 319 bp, Zea mays
  unsure (1)..(319): unsure at all n locations
  Clone ID: MRT4577_28404C.1
ggccgggccgggtatatcatgcatgctgagtggtatcttaacctcgggggttggggattttatacaggtgtatcttttactatcatgctgcccatgcgagggtaggatatctggaatagtggactctcctaatgctgtaacaactcttgccatccctacggcgatatttgatcagaaacaaaagttactgcctgcatatcgtgaactcatgagcaggccgtacaaacaaaccacacaattttgatgctgattaaagtgagctgggcaaggttcagggttcaccangactaaatttatatcgccctctccattttattgg

SEQ ID NO: 106253 - DNA, 503 bp, Zea mays
  unsure (1)..(503): unsure at all n locations
  Clone ID: MRT4577_28405C.1
gacgnagacgccaccgcatcaacagtagctggcggtgctggacaccacatcctctgggtgaaccccgatctgcggcctcaagaccctaagtacacggaggccaagcccgacctgaccaacatggtctacgacgctgaagctcatacgcacccagctcgccagcgccaggtgagcacctttcttttgccttattcgttcccgaggagggcgtgctcgcatgccaatttgtttacaataaacatggctgggcccgccggtctgttgtactccgcctgcggttaggttagtagttttcttgatctcgcccccacactgtacctgttttactactgtcttttggtaggaaatgaggaagctgtccgtgttcttgtatcggaaaaaccgaatgggacatttgcatactttcatgtggcaccactccccaccggcgtgctgtttcacggctcaaagaacgatgtcgtatccgcggccgggattgccctgaacgaccacttcatcaagct

SEQ ID NO: 106254 - DNA, 109 bp, Zea mays
  Clone ID: MRT4577_28406C.1
gaaaacactgagaatccgaaattcgactggcttaaaggacgcgtgaacggtttgagagctgagagatgccaatatgggatctgctggagttttatgtccgagatgaaga

SEQ ID NO: 106255 - DNA, 1131 bp, Zea mays
  Clone ID: MRT4577_28407C.1
cgaacgcgtgggcaacccacgcgtccgtgagtatgagctcaatcttccaagttcaaacaagggacttgatgttggaagggtgtattttgtgatcctcgagatgtcccctgttacatatattgattcgagtgctgttcaagctcttaaagacttgcaccaagaatacaaagcacgccatattcagattgccatagctaacccgaaccggcaagtgtaccttctgttgtcaagatcgggcatcattgacttggtaggagctgggtggtgctttgtgcgagtgcatgacgccgtgcaagtgtgcctacagcacgtgcagaattcatcttcaaatgcgttgaagctacccgtgcaggcatcaggcgtgttgaccgattctgtttcgactcctaaaccagagcagcagcatcaaaagcagcacggcctcttcaaggacctatggaaggcacaggacagtaacgcggatgctggtggtgaggtgcagccactgctccggcaaaaccttgtgtaatactcctacaaaatacggagtacttcctgggatggactcacgccctcgctggcctatacatatacgtgtttatttatttgtctatgttgttgttaacatggtatcgtggtgaacaaaagaaactgaacatgccattgttactgtggtgtggcgttttttgtacacttttgatacctaaatggaactcctatgatttgggtcaaaaaaaaaaaaaaaaaattttatgggcaatcacatttatcacaacattagtttttggcattgagattggcgtccttgttggggttgcattctcattggcctttgtgattcatgagtcagcaaatccacatatagctgtcttgggccgtttacctggcactactgtgtacaggaatacattgcagtaccctgaggcttatacgtataatgggatagtagtggttcgaattgatgcaccgatctactttgccaacattagctacatcaaagacaggttgcgtgagtatgagctcaatcttccaagttcaaacaagggacttgatgttggaagggtgtatcttgtgatcctcgagatgtcccctgttccatatattgatttgagtgctggtcaagctcttaaagactttggcccaggattccaa

SEQ ID NO: 106256 - DNA, 403 bp, Zea mays
  Clone ID: MRT4577_28408C.1
aagtccatagactcctccaagatgcttgtggtcctgctcacagcagccttgctggctctgagctcagctcagggcacggatgaagaggtcaacaatgctgagaccagtgatgtaccagcagattctgaacaacaacccgtggactcgggttcagatccaccttctgctgatgcagatgcagagaatgttcaagagggtgaatcagccccaccagcaaatgaagagcctcctgccacctctgggagtgaagaggaacagcagcagcaggaacccacacaggcagagaatcaagagcctcctgccacctctgggagtgaagaggaacagcagcagcaggaacccacacaggcggagaatcaagagcctcctgccacctctgggagtgatgaggatcacaagcagc

SEQ ID NO: 106257 - DNA, 786 bp, Zea mays
  Clone ID: MRT4577_28409C.1
ccggccggggcaacatgtaaacagttgccagtcacacacattctctttgagaaggttttctctacacctttctctcttccttctttgttatacattctctcgatatcctagcgatattcgtacattcacttcggctgtgccactttgtccctgttacccttcactctcgtcactcaatcacttctcaacgtttctacacagctcacctaaccgactaccgcaatcatgaggtctgctgtcattctcgccctttcgggatcttcccttgctctgccctttggcggtgccatgaactccatgtttggtgctaaggaggcccgtgaggctcaggctcctccaccagagaacatgcccaacttcccaggtgctggtttcccagctcctactggaactggtgtaccttctttccctatgcccactggaggtttccctggtggtgccccaggaggccaacctggaggccagccaggcggtggcttccccggtttccctggaggccagccaggaggccagccaggtggtcagcccggaggtcagcctggtggaggtttccctggattccctggaggtcagcccggtggtcaacacggaggccaacacggaggtcagaacggtggtcagaaccggtggaggtttccccggtttccccggaggtcaacacggaggccagccaggtggtcagcccggaggtcagccttggggggagggtcccccgattccctggaggtcagcccggtggtcaacacggaggccaacacggaggtcagaacgatggtcagaaacgat

SEQ ID NO: 106258 - DNA, 461 bp, Zea mays
  Clone ID: MRT4577_2840C.1
gtgtggtgggggggtttttttttttttttttttttttttttttttttttttttttttttttttttttttttttttttttttttttttttttttttttccggggaaaacgggcctttgtttttgggttctaaccaaagggggcaccctggggggggggggggggaatttaaaaaacgttacaggagccaaagcccctccccggtaaaaaaaaacaggaggggggggacataactctcgtttaaaacaaggggttttttaaaaacaaacatccattggaggccacaaatttttttttttttcaattaaaccaaccagggggggtttcctgccccgttgcctaatttgagccaatttgttcgggggggggccccattgttttaaagcctttttgggcccggccggaatttttttcataaaatccccacaggacaaaggcctgaaaaaaaaagttttttttaacc

SEQ ID NO: 106259 - DNA, 845 bp, Zea mays
  Clone ID: MRT4577_28410C.1
cgaggccggccgggatcatctctcctccaatcctcttaaaccctcgatctcggcatcacatcccttctggttgctgcgtttgtttgcaaatcagctcttctcagcttcattgttgattccggtcaaccccgctcccacacaaacaccagttcgcgtcgtgcgaatattaccacgtcaccaacaacgtgacgctctactacagtctggtcttcctcctcttggtgacagagatgctcatcttctgcgccctcattgtccccctgccgttcacatggcgccgcaggctcttcaccttcatttcggagagcccgataatagcgaaattacaatatggcatgaagattacgttcgtcttcattctcatactgttcattgacagtgtgaaccgcgtctaccgcgtacaaattgagctttccggctcagacgaccagggccgctcaggtgtcgctgctggaggtatcgaacgcatggaggtccaggctcgcaagttttactcgcagcgcaacatgtacctctgtggtttcaccctcttcctttcgctcatcctcaaccgcacttacgtcatgatcctcgatgttctccgtctcgaagaggaggtcaagagcctaaggggtgaccccaaggctaacaagaactctgccctgaagaacgccggtggccctggcgaggttggtgctctcaggaaggaactcgaggccaagggacgtgacatggagaacctgaagaagcaggttgagaacatgcagaaggagtacaccgcatgggcgatgaggttgctggcaagaaatagacgaacatgagcaatttcgaacggataaggagagcaagccacagctatgccgaca

SEQ ID NO: 106260 - DNA, 208 bp, Zea mays
  unsure (1)..(208): unsure at all n locations
  Clone ID: MRT4577_28411C.1
aaaaaaaaaaaaaaacgtaaaccgtaaaaaaaaaacgtttttcgcgccnnnnnnnnnacnacccccaaaccattcccatggaaaaacccaattccggatacccctgaaccacccattagcctttctcacccaacccggcaacccccgttctcaaatcaaaaccctataaacccgattcttccctcccaacacctttgaccccacccaa

SEQ ID NO: 106261 - DNA, 704 bp, Zea mays
  Clone ID: MRT4577_28412C.1
aggccggccgggaaaaggttctcctataatacatcccaggtggattgtttcagcggaaattcaatctacagcagtgcatggtaaatttgctgatatagtatcagcagtttggcaaacagtctatcacgaatccatgaataatgtatgggacgaaatactgtctgaacgtgttatggactactgtgatgtatggttacagagaaattgtatattgaatctgccctctacaagcatttccgtcatctctgatgataacataagcccaaggcagtcatgaattgtcaccaaaggatttagatgctactgaatgtgacatggactttccacctggatttggaccatgttggaaatctcctgagagctccctctctccatccctattagaagttaatggaagtgctaagttggatgggaagtctgaatcaagtaccacattattttctggccccttagcagtagtccagaggatgctggcaaatgaactatatatctcatcgaagcaatctttatttcactattttgaggaggttattgcagacgatataacaaattgtttatgctttggacttgaaagcaatattgatcaggaacagattggtactcctatacacgcaccagaatcacccatttcagccgaaacgtctatgcatgaaacagccaattccattgagatgactggaggcgatgtactgaatatttgttga

SEQ ID NO: 106262 - DNA, 401 bp, Zea mays
  unsure (1)..(401): unsure at all n locations
  Clone ID: MRT4577_28413C.1
aacacaaaaatacagcctggttcaaggtaacgcatcatctcacctctcgaccgcctccttctctttcatctgtcaaggatcacagcacagagctgccaaagccagaggagcgttaccagagcagggaggaagaagagcgttgtgttcgacgtaggagaatttcgagggacagcgactcgactcggagctctggagagatctagcggggctccggtgcagccgatgcatggcaactcgcaagggctgagctgctcgtcgtcactggcgtaggaaccaaaatcgggcgtcaggaaagtgccgtcgtcgccatggacagggacagcagctcgtcggtctcggcgtcggacgggagctcggaggcgggggggcgcggcggntgctgctcgtcgccgnagtccacg

SEQ ID NO: 106263 - DNA, 211 bp, Zea mays
  Clone ID: MRT4577_28414C.1
gacgcgcgtttcgatacaagactctacagtgagtcgtattaaggatggcacgatacatacaagattcgcacggtccctgcgcacggaagacaagcataactcgagagctggtccatagtgttagtgtgtctgtctggcaatcgatgaatccccatgacgacgtccccgccgcgcgcacgcctgctcgccatggcacggggggctgccctgc

SEQ ID NO: 106264 - DNA, 295 bp, Zea mays
  Clone ID: MRT4577_28415C.1
gcactcatacgcccactcgtcctcccactcgtcctaatagtattttgctaaaaaaaaaaaaaaaagaaaaaagtaaaatttaaaaaaaaaagaaggaatataaaaaaacacccactcttaactttctcaacttacatacacatccattctacatcactaccacattttatattttcacctaaattcaataacctgccctccaaataacatctatctatccatgaaaacccatccacaaccaaaccaaatcaccttccactacattccccttcttccaactagcttatcaccttat

SEQ ID NO: 106265 - DNA, 1348 bp, Zea mays
  Clone ID: MRT4577_28416C.1
actataaaagagctatgacgtcgcatgcacgcgtacgtaagctcggaattcggctcgaggtgcctgtgcatggatttggttttggaatagaccatgattcagatgctttgcattcgatcgcagaggcctctggtggcacattctcctttatcgaggatgaaggtgtgatccaggatgcatttgctcagtgtataggtgggcttctcagcgtggttgttcaaaatgtgcaagtaaatgtggagtgtgtccatcctggtgtccagctccgctgcatcaaatctggtagttacctgagtaaggtgtctgcagataggcagaatgcttcatttgatgttggtcatcattatctcgactaggaaagggactacgtgctatcggtgagcttaccgcattgctgtgaacacaccacacttttgaaagttgccatcctccattctaaaccacacattttggcttagtgcccggtgcatgggtttgggtttggagtagaccatgattcggatgctttgcattcgatggcggtggcccctggcggtacattctcctttatcgaggatgaaggtgtgattcaggacgcatttgctcagtgcataggtgggctcctcagcgttgttgttcaaaacatgcaagtaaatgtggagtgtgtccatcctggtgtccagcttcgctccatcaaatctggtagttaccccagcaaggtggctgcacatgggcgaaatggttccattgatgttggccatctctacgctgacgaggaaagggacttcctactgtcggtgagcttaccacattgtcgtgaacagaccacacttctgaaagttgcctgtgcctacagagattcattgaccaacgaagagatcaagattcagggtggcgaggtagcaatcttgaggcctagatcacccgtatctgagccagtttgcatggaggttgaccgcgagaggaaccgtgtccgtgctgcggatgctatcgaggccgcaagggctgctgctgagagaggtgctctttctgatgccgtgtcaatccttgaagactgccggaggatactttcagaaactttttcaagcaggagcggggaccggctgtgcatggcccttgatgcagagctaagggagatgcaagagaggatggctaaccggcaacgctacgaggcttcagggagggcatacctgctgtctggcctcagctcacattcttggcagagggccactgcgcgaggcgactccactgacagtgacacacttgtttattcctaccagacaccatccatggttcacatgctacagcgctcacagaaccactgcccttctcctcaaggcccttcacaacctagggtcttggtgaagtg

SEQ ID NO: 106266 - DNA, 879 bp, Zea mays
  Clone ID: MRT4577_28417C.1
gagcgcctgtctgtggagtacggcaagaaatccaagctgggcttcactgtgtacccatctccccaggtgtcaacctctgttgtggagccttacaacagcgtgctctccactcactcactcctggagcacactgatgtctccatcctgctcgacaacgaggccatctatgacatctgcaggcgctccctcgacattgagaggcccaactactccaacttgaatcgccttgtgtctcaggtgatctcatcgctgactgcttctctgaggttcgatggtgccctcaatgtggatgtgaacgagttccagaccaacctggttccttacccgaggatccacttcatgctctccgccgcagagggcggcagtgatgacggtgacgaggaggaggaatactgatctgcttgcatgaatctgtttggctgtcgagccaggttgtggtgttgaaaaacctttgtttgtgtcctggcccccctgggtaatgtttgggtgtttccttccatcatcacttgctgaactgctctagtatttgcatttgtaattgaagtctgtcgctttaagcactcttggttctaaaaaaaaaaaaaaaaaaaaaaaaaaaaaaaaaaaaaaaaaaaaaaaaaaaaaaaaaaaaaaaaaaaaaaaaaaaaaaaaaaaaaaaaaaaaaaaaaaaaaaaaaaaaaaaaaaaaaaaaaaaaaaaaaaaaaggggggcccgcttttaggggttccaagttttactccccctgggtttgcaaaggtattgattttttttttggggccccctaatttaatttctcggcccgtgttttaaaaacggggggctgggaaaaaacccggggtttccccattttaatggctttggaaaaatccccctttttcc

SEQ ID NO: 106267 - DNA, 233 bp, Zea mays
  unsure (1)..(233): unsure at all n locations
  Clone ID: MRT4577_28418C.1
tttnttttttttttgtccattattaacagccattaaatattttgttgtaaatgcaggggaggacaaattccagggattatttactgcagcagcaggcaccagcagtttacaggggaccggccttcttctcttgccaccttgcaacacccccccaacacttttcccaggtgaaaagggcaaaattttcccaaccaaaaaacccttgggaaaacccaatcggggaaatgatcttg

SEQ ID NO: 106268 - DNA, 429 bp, Zea mays
  Clone ID: MRT4577_28419C.1
gttttattatttttttttttttttttttttgtttttttatattctctgtcttttttttttaacatattataaaaggggccgtaaaatcattacattaaaaaaaaacataaataacccaagatctcgggtctacctgggagggggggggaactccaaccccaatattacattaaacccattacttacattcatccacaatggaggattccagaaaatgaggactaaaacccaattcaaaggttaaagacggttaaaaaaccaacccaatttttacaaccccacattttataccaacaacaggtcccaaccaacaacaggtaaccccccccaagggataagccaaccaacggcaaaagctcaaaggggccagcctcaaagctccataagggccacggcttaagagaataacacgaacctttccgaataatt

SEQ ID NO: 106269 - DNA, 536 bp, Zea mays
  Clone ID: MRT4577_2841C.1
attcggctcgaggtgaaggttgacgaccctccgcctcaataccgaagtcgaggtgtggcctgacccatcgtcaacgaggacttcgagggggtcagagacgaagaccccaagacgatggcatggtaggtggatgccaacagtgaagaacgccttgaacactactatttctccctctgtagatggcattgtctccgaccccgggacgcgcccactccttgatccaaaatacccaagttattgaaactctttcacgcgccttgaggagatcctagatcgcccaaactccatggactcgtggcctgccacgtggtgagcaacagattcccattcccccgacgacggcggctatgcgctcaccgtgttctccgtcgacgtggccccgctagacaatgacgatgaagagggcgtcatcatgtaccggcggaggcgatgtgcagtttgcttgacgtgagccaatgtcggcggtgtcacagtggaccgacaacgagtagcggctagtgagccagcgcgaggaagaaagagagcaccaacggcta

SEQ ID NO: 106270 - DNA, 572 bp, Zea mays
  Clone ID: MRT4577_28420C.1
aaatgcaaatactagagcagttcagcaagtgatgatggaaggaaacacccaaacattacccaggggggccaggacacaaacaaaggtttttcaacaccacaacctggctcgacagccaaacagattcatgcaagcagatcagtattcctcctcctcgtcaccgtcatcactgccgccctctgcggcgacctcctcgtagtccttctccagggcggccaggtcctcgcgtgccaccaccaacggcattgaagaccaggaagccctggaggccggtgcagttgtcagcaagcttgcggatacggtcaaggcacagatcaacaatctccttgccaattgtgtagtggccacgggcgaaattgttagcggcatcctccttgccactgatgagctgctcagggtggaagagctggcggtacgtgccagtgcgcacctcatcgatcacagtgggttctagatcaacgaagattgcacggggaacgtgcttcccagcaccagtctggctgaagaaggtgctgaaggcatcatcgtgatgtcccgcggtcttatctccaggcacttggccatcaggctgg

SEQ ID NO: 106271 - DNA, 564 bp, Zea mays
  Clone ID: MRT4577_28421C.1
caaacaaaggtttttcaacaccacaacctggctcgacggccaaacagattcatgcaagcagatcagtattcctcctcctcgtcaccgtcatcactgccgccctctgcggcgaaattgttagcggcatcctccttgccactgatgagctgctcagggtggtaagagctggcggtacgtgccagtgcgcacctcatcgatcacagtgggttctagatcaacgaagattgcacggggcaacgtgcttcccagcaccagtctggctgaagaaggtgctgaaggcatcatcgtgatgtcccgcggtcttatctccaggcacttggccatcaggctggatgccgtgctcgaggcagtaaagttcccagcacgcgttgccgacttggatgccggcctgcccgatgtggacggagatgcactccctcatcttcctcctcccctctcaaacaaccgcgcgcgacgccttcggaagagaccgagactggcgtgaaggtcgatcggtgggcggaatggggaattgaagatctgtcgggctcgggcgagagtttgcgccggcgtttgcctcgtgcc

SEQ ID NO: 106272 - DNA, 439 bp, Zea mays
  Clone ID: MRT4577_28422C.1
acaaacgccgacgcagactcttgcccgagcccgacagatctctaattgcccataccgtgcaccgatcgaccttcacgccagtctcggtctcttccgaaggcgtcgcgcgcggttgtttgagaggagaggatgaagatgagggagtgcatctccgtccacatcgggcaagccggcatccaagtcggcaacgcgtgctgggaactttactgcctcgagcacggcatccaggctgatggccaagtgcctggagataagaccgagggacatcacgatgatgccttgagcaccttcttcagccacactggtgctgggaagcacgtttcccgtgcaatcttcgtggatctagaacccactgcgatcgatgacgcgcgcactggagctctccgacagcgcttacacgctggttgtttactagcggcgaggtggatgcccctaacaa

SEQ ID NO: 106273 - DNA, 566 bp, Zea mays
  Clone ID: MRT4577_28423C.1
cggccgaggtacaagcttttttttttttttttttttttttttttgcctcatccaaaaaatttattattgaattacaactaataagcaatctaaaaaaggccccaccaatgatttgttgttggtaggaggctgctgggtttggcaaagcaagttggacaaagggcaacaattggtggagttgtaaaaagggtggggggttagccccaaactggtggtagaaaggcagcaactggtgctgggtcaaaaaagaaacacgggttggtgcaactagctggctaaatgggagtaatatttgctggtgcaaataaacagcgggggtcaaggcggccaattggttaaatggaaaaaattgttgttgatgaaaataggcaataactaactggctgaatgggaataattggtgctgcaaataaacagcaggggtcaatggaaataggtggttgaatggaaaaaaatggtggtgctgatagtagggaaaaagggttgccaaaactacttgggtgatcacaggtagcaccagttgctgcaactgctgggccttgatggtttggacctgcccgggcggg

SEQ ID NO: 106274 - DNA, 602 bp, Zea mays
  Clone ID: MRT4577_28424C.1
gatcgcttcagctcggcgtcttacaaacgccggcgcaaactctcgcccgagcccgacagatcttcaattccccattccgcccaccgatcgaccttcacgccagtctcggtctcttccgaaggcgtcgcgcgcggttgtttgagaggagagggggaagatgagggagtgcatctccgtccacatcgggcaggccggcatccaagtcggcaacgcgtgctgggaactttactggctcgagcacgggattcagcctgatgggcaagtgcctggagataaaaccgcgggacatcacgatgatgcctttagcaccttctttagacagactggtgctgggaagaacgttacccgtgcaatctttgttgttctataacccactgtgatccatgaggggggcactgggacgtaccgccagctctttcaccctgagcaggtcattagtgggaaggaggatgcggctaacaatattttccgtgggcgctacacaattagtaaggagattgttgatctgtgccttgaccgtattcgcaggcttgctgacaactgcacccgccctcagggctttctgggcttcaatgcccgtggggggggggaccgggctctgg

SEQ ID NO: 106275 - DNA, 541 bp, Zea mays
  Clone ID: MRT4577_28425C.1
ttggccgggagctcggcgtcttacaaacgccggcgcaaactcttgcccgagcccgacagatgtggtgtggcggggccgtccaccgggcgaccttcacgccagtctcgggctcttccgaaggcgtcgcgcgcgggtgtttgagaggagaggaggaagatgagggagtgcatctccgtgcacatggggcaggccgggatccaagtggggaacgcgtgctgggagctttactgcctcgagcgcgggatccaggctgatgggcaagtgcctggagataagaccgcgggacatcacgatgatgccttcagcaccttcttcagccagactggtgctgggaagcacgttccccgtgcaatcttcgtggatctaaaacccacggggatcgatgaggtgcgcactggcacgtgccggcagctcttccaccctgagcggctcatcaggggcgagggggatgccgctaacaatttcggccgtgggcactacacaattgggaaggagattggtgatctgtgccttgaccggatccggaagcgtgctgacaact

SEQ ID NO: 106276 - DNA, 1216 bp, Zea mays
  Clone ID: MRT4577_28426C.1
gggcatcgattcagctcggcgtcttcacaaacgccggtgcaaactctcgcccgagcccgacagatcttcaattccccattccgcccaccgatcgaccttcacgccagtctcggtctcttgccgaaggcgtcgcgcgcggttgtttgagaggagaggaggaagatgagggagtgcatctccgtccacatcgggcaggccggcatccaagtgcggcaacgcgtgctgggaactttactggctcgagcacggaatgcagactgatggacaagtgcctggagataagaccgcgggacatcacgatgatgccttgagcaccttctttaggcagactggtgctgagaagcacgttccccgtgcaatcttcgttgatctaaaaccaactgagatcgatgaggtgcgcactgacgcgcaccgtcagctctttcaccctgtgcagttgattaatggcaagggggatgcaaaaaaaaaaaaaaaaaaaaaaaaaaaaaaaaaaaaaaaaaaaaaaaaaaggttttgcccttccgactacgtctctccctgactcggcttctctttttcggcggcgacggctggtcgagttgcggcgctctgttcagtgttgtgcccttcgccacgacgattatcctccagtagtaagtcaccatgtcttcgtccatgcaatcttcataccttcctgctaccactgagtccgtagccaaggctcaggaggccaaggacgcttctgagtccatctcaatcctctaccgcgtgcttgaggatccctcttcatctgcggatgcactgagagtaaaagagcttgccatcacgaatctcacaaactacctcacaaaagagaacagagctgaagacctcaggaaccttttgacccagctcaggcccttttttgcattgacccccaaggcgaagactgcgaagattgtgcgtggcatcattgatgccgttgccaaggtgcctggaacatctgcttcagatctcactgtgcaaggagatggttgaatggacccgtgcagagaagcgaaccttcctcaggcagcgtgtggaagcaaggctggcagcccttctgttggagaatcaggagtatactgaggctcttacactcctttctggactcatcaaggaagttaggaggctggatgacaagttgctccttgtggacatcgaccttttggagagcaagctccatttctctcttgagaaaccttccaaaggccaaagc

SEQ ID NO: 106277 - DNA, 705 bp, Zea mays
  unsure (1)..(705): unsure at all n locations
  Clone ID: MRT4577_28427C.1
agccgccgagcaacacgctaatccggtcggtcatccactcatcctcatcccctgcccatctgatccgatcactcatctcatcctcatcccctacccgatcggatcccctgctcatccgccgagcaccaccaggcagcaggctccagtcgtcgagcaccagcaggagcacggcgcgctgcccagtaggagcacggccaagaggatgacgcccgcatcctgcctcttctcctctgctactggagcctctactgctaggagcacggctaggaggacaacacccgcatccagcaggagcaccagcaggaggaggacgcccatgctgctgccgttgagcgatgatctgatgcgcccccatcatggctcttctcctccctcacggcctcgcctcgatctgctgctgccggtgatctgctgctgccggatccgagcgccgtgcccacgggtcacggccagcgatatgcagggatcaagaatccaactttgagaaaaattgctcgagatgtaaatggcgccgccggagtaccagcagtacctcgtgcaggtgaccaagtaccaggccgcacagaactgcaagggacgtatgcacacatggttacatttactatagaactggaattatattttgatgcaaaggctgccaggtcatggtgatttcacgttcgttaggctcgagagggggactcanacatgacatccaaggtttgc

SEQ ID NO: 106278 - DNA, 864 bp, Zea mays
  unsure (1)..(864): unsure at all n locations
  Clone ID: MRT4577_28428C.1
cctcgaggccggccggggtcctgtttcttaccgatcgatccatctctctcacctctctacctctcgcatacatagcatagtcttcgccgcaatgcgacccgccgcctctgccctcacctcgtcgttccgcgccgcagcggcccgccccttcgcccaggtccagggatccagcgccagcgttagccgagcgtttagcgtctctgcccgatccgcctttgcgcagcccaccgaggatgcctcgccggccgcgggtaagaagccgcagatgaaggagttcaagatctaccgatggaaccccgactcgccagcagaaaagcccaagctgcagtcgtacgaggtggacctgagccagtgtggtcctatgatgctggacgctttgatcaagatcaagaacgagatggaccccaccctgactttccgccggtcatgccgcgagggtatctgcggctcgtgcgcaatgaacattgacggcgtcaacacgctcgcatgcttgtgccggatccccaaggacacggcgtcggcatccaagatctaccctctccctcacatgtacattgtcaaggacctcgtccccgacctgaccaacttctacaagcaatacaagtcgatcgagccgtacctcaagaacgacaacgtgccggagaagggcgagtacctgcaaacgcaagaggaccggaagaagttggacggcatgtacgagtgcatcctgtgcgcgtgctgctcgacctcgtgcccctcgtactggtgggaccaggacncatacctcggccccgncgtcctgatgcaggcgtaccggtggatggccgactcgcgcgactcgtacggtgcccagcgcaagggagagatgcagaacaacatgtcgct

SEQ ID NO: 106279 - DNA, 786 bp, Zea mays
  unsure (1)..(786): unsure at all n locations
  Clone ID: MRT4577_28429C.1
gattgtagccgggctgcatgatgaaaatccttgaagccgagccatgactagagagcgccaacccccacgaggtcgtgctcctccaacagcagcaagaagaaggcaacaccggtgcaccccatctggaggcccgggagatggaatgcgagaagagcaaaggcatggctactgctcgggagatcgatccctttttaaaggcatatctccccactcacgccccaaagtgtcacgggcaaagtctccccccgacgtgctccagggttcccaccctacgacatgggggctaggtccctcatgtcatacaaactgactcgaaacgcggagagggcgaaccgccgcacacaaagcgtgcaaataccctgcggttaagcgctctctcatcctcgccgaaaccagcggtcgaaaaggtggaccgccacgcaagaagcgtgcaactgcaccgcggtcgtacaccctttcagcttcgttgcaaccgacggtccagcatggaggcccgggccacatgtcatgtaaccagcacaccggttactacgtgtaaagcaaccgcaccaccactcgcaccaatgccgcatcttctcgggactgcagaaccagtgcaatgactcgagagcaaccccgcgcatgacccaacagtgccaattaagtgcgacgatcaggggtcagtcagccgcggngatagacgtgacagttggtatgaccataggcggacccggcagtattgcagcaacagacggacggagccagcggtccaaccacccaaccagccctggtcccacctatggcctc

SEQ ID NO: 106280 - DNA, 256 bp, Zea mays
  unsure (1)..(256): unsure at all n locations
  Clone ID: MRT4577_2842C.1
tttaacaacatcannccattggaccttctgctaattctcttggggccttccctnctattctattataaatggtccaactttatacataataaagatatttatcatgctgattgccctgtccacctttccaatcttctttcactggacaaacaaaattaagaacttactcaaccgacttcaatctcttgttaaaagatcatcatcaatctttataacacaaattaatacaattcatcagatatcaatcgaaactaac

SEQ ID NO: 106281 - DNA, 789 bp, Zea mays
  Clone ID: MRT4577_28430C.1
ggcaaatcccaaaccggcaaacactaatgatctaatccccatcccctagccggcagcttccgagcaaaccaactcatccggtcggtcatccactcatcctcatcccctgcccatccgatccgatcagtcatctcatcctcatcccctacccgatcggatcccctgctcatccgccgagcaccaccaggcagcaggctccagtcgtcgagcaccagcaggagcacgacgcgccgcccagtaggagcacggccaggaggacgacgcccgcatcctgcctcttctcctgctactggagcctctactgctaggagcacggctaggaggacgacgcccgcatccagcaggagcaccagcaggaagaggacgcccatgctgctgtcgttgagcgatgatctgatgccccccatcatggctcttctcctccctcgcggcctcgcctcgatctgctgctgccggtgatctgctgctgccggatccgagcgccgtgcccacgggtcacgaccagcgatatgcagggatcaagaatccaactttgagaaaaattgcttgagatgtaaatggcgccgccggagtaccatcagtactgtgacggaacctcccaagtaattaggtccacctatagttgtccttgtccaacagacatcagacaccctatagatgttcctaaatcacttcacaagttcggtatcttctttcttacctttccaggaacgtttcacccatcttgcagacattacagaacatcggagatatagaaatgcagaagcgattacataacttacatttatt

SEQ ID NO: 106282 - DNA, 522 bp, Zea mays
  Clone ID: MRT4577_28431C.1
accccgttcgacccagcgttcggtcgaaaaacaacctacccaccggggggggggggagggcaaaaaaagatagcgttcatactggagataacgctaggctgcttattaacccgagcggctgccgtcgccacgcacgggggcgtcttcctttacaaagactacaacctccccaaccatactatagccctctggttgggggggggccaggactccactgacactacatactaagccctggaaaagcgataaatgttcttggaaagtaatcaaatcactccagctgcaccggatgtggattcgcactcatattaaactgttcgctacgagactttaattgtacgtatagcttagatgaccccggtgttgtttgactatgaaatacgccccttaccaacagcaaaaaattttaagatgcttattaacgccctgctgtctgaaaatgtgattagcctgatatgcgccgctacattagatgaccttactagcacatgaccatcctgatctctgcttgatgcacgccta

SEQ ID NO: 106283 - DNA, 342 bp, Zea mays
  Clone ID: MRT4577_28432C.1
ggttttggtttttttttttttttttttttttttttttttttttttttttttttttttttttttttttttttttttttttaaacaccaatcggggggtttattccaacaggaaatggaacacatgggtcggtacataggggggcccatccgggggggggataaaaatccatacccacctggaaactaaactgggatagaaaaggtgggacacacgccggcaaaccattattcaccagcaacgttgatgtcccgggggaggggggggggccccacgaacgggggggggccttggacaccatggggcttcgacccctgggccagggggtgcacccacgcgtccgg

SEQ ID NO: 106284 - DNA, 247 bp, Zea mays
  Clone ID: MRT4577_28433C.1
atctccctccccctccccccttctctctctctgacgactcgctagctagctcctccggcccaacggaagctagcgatcgccatagcctctgcgactgccagcacccgcactcgaacagttgagtccttcttcttcttcctcctcctcctcttcttcttcttcctcctgtgttttcgtttaggactgtacctgcggtttgctttcgccgtcgggattaggtggagaagctcgtgcttactcgccggac

SEQ ID NO: 106285 - DNA, 2063 bp, Zea mays
  Clone ID: MRT4577_28434C.1
ttgggtacctcgaggccggccgaaggtgaccccagcccagacgtcgtccccgccgcccgaacccgatggacatccgccgcgggccgccgccgccgcgggccgcgttgggaggggtggagccgcggttccgccaggtgggattcgtcacggccgccgagcccgtgcggggggccgccacgccggcgcccgcgtcgcccgccgcgtccgatggcctctcccccgtcatgatcccgcccccgctcatccccgtccccgtcgcgcccgcgtccgagtccctcgcgccttcttccccgcccccggactcctcgtctcgccccgacgccgtctccgaccttgacgacgacgacgacatcaacgtgtcctgggcgcgcccacccccgcccgccttcccagaaccaaacaagaaaaaccttactgcaagaaagaatgagcatgctcctccgactccagtttcgcagaaaccaaagctttctaaagcagagagacgtgccattcaggagtcccagcgtgctgccaaagccgctgccaaggaggcatgtttgaaatcaacagccatggcttctgatgctaactccaagcaacccaaaacagcaaagatatctctgaataaagatgtcaaccaagttaactctccagttgctcctcaaccccgcatgcaatttgacgatacacatcgggtggtgaaagcaaagaagcgttcagttgttagacagtcagaagctcaaaacagggtcgaactgttcagacatctgcctcaatatgcgcatggcactattcggcacgagcttgagtcaaaacttcttcaacctgatctgatgcatccttctgtgtacaaggttggacttcaatatttgtctggtgacatatctggtggcaatgctcgctgtatagcaatgcttcttgcattcagagaggcaataaatgattactccatgccttctgaaaaaattctgaatagagatcttactgctaaaatcagtagctatgtgtcatttctcatcgagtgcagaccactttcaatcagcatgggcaacgcaattagatttttgaagaacaggattaccaagctaccacttgcattttcagagtcagaagctaaagttagtcttcaatctgatattgatcgctttataaatgagaagataatagttgcggataaggtcattgttagtcatgctgtcacaaaaatcagagatggtgatgttctattgacatttgggtcagcctctgtcgttgaaatgatttttgataatgctcatgaacttggaaagaaatttcgtgttgtggtggtcgactctcgtccaaaccatgagggacaaggattgttgcgccgattagttgcaaagggtatcagttgcacatatacacacataaatgctgtatcttacatcatgcatgaggttacaagagtgtttttgggtgcctcttcagtactatcgaatggtactgtctactccagagttgggacagctttggttgcgatggttgcacatgcttttggagttcctgttctagtgtgttgtgaagcgtacaagtttcatgagagggttcaactcgattctatatgctttaatgaacttggtgacccagatgctatttcaagagttcctagggatgaaagtttgagcaatctcaaaaactgggctgagaatgaaaatcttcatcttctgaatcttaagtatgatatcaccccttccgattatgtttcaatgctcataacagattatggaatgctcccacctactagtgtaccagtcattgtaagagagtaccgcagggagcacgtttggatatagaagccaccgttttcctttctggttttgtttgaggttgtaatttgttggagttcatcaccggcacagctgatcggtttggactttggaccacttgaacattatggccggtttcatgataatctgaacagcttttgctgcctaagtgttagtggaatggtaagggggtggtgtgagcatatcagcaaatgtttatatctcagttttgcaaccatcaaattggttgttttctcctgtagttcatttctgtgttgatgcggtttgcattta

SEQ ID NO: 106286 - DNA, 293 bp, Zea mays
  unsure (1)..(293): unsure at all n locations
  Clone ID: MRT4577_28435C.1
ttctatttacaaaatcaaactncaaccggcccgcccnccttaaaatttttccgcaccaaaaaacanacccaaacctaaaaccacacacccaatgagaaatgacagccgctcacatcacactataatcactttaagctcatccacaaagaccttcaacccaaaaccgcctcgcaaataagaaaggaactaggcacaaaaccacaaaacaccatctatctacaaaccaaacttacgaaacgagctaataacaaaacaacacctcaagagtcagaaaactccatcaatcacgaaaa

SEQ ID NO: 106287 - DNA, 833 bp, Zea mays
  Clone ID: MRT4577_28436C.1
ttgaaatgatttttgataatgctcatgaacttggaaagaaatttcgtgttgtggtggtcgactctcgtccaaaccatgagggacaaggattgttgcgccgattagttgcaaagggtatcagttgcacatatacacacataaatgctgtatcttacatcatgcatgaggttacaagagtgtttttgggtgcctcttcagtactatcgaatggtactgtctactccagagttgggacagctttggttgcgatggttgcacatgcttttggagttcctgttctagtgtgttgtgaagcgtacaagtttcatgagagggttcaactcgattctatatgctttaatgaacttggtgacccagatgctatttcaagagttcctagggatgaaagtttgagcaatctcaaaaactgggctgagaatgaaaatcttcatcttctgaatcttaagtatgatatcaccccttccgattatgtttcaatgctcataacagattatggaatgctcccacctactagtgtaccagtcattgtaagagagtaccgcagggagcacgtttggatatagaagccaccgttttcctttctggttttgtttgaggtatgataatctgaacagcttttgctgcctaagtgttagtggaatggtaagggggtggtgtgagcatatcagcaaatgtttatatctcagttttgcaaccatcaaattggttgttttctcctgtagttcatttctatgttgatgcgttttgcatttacctataccgttgctaatgggggagtatatagcctataaatctgccctccataattgacttctgatatgctcttttatgtt

SEQ ID NO: 106288 - DNA, 316 bp, Zea mays
  Clone ID: MRT4577_28437C.1
ccgatccccaattcgtccttcggatgtctcattcagcggacgtaggtgtgaaggaagggggacgcggaggaagatggggctcgcgttcgggaagctcttcagccggctcttcgccaagaaggaaatgcggatactcatagtcagactcgacgccgcaggtaaaaccacctgctctacaagctcaagaacgtcgagatcgtcaccaacatccacaccatcggcttcaatgttgatactgttgagtacgagaacattagcttcactgtctcggaagtcgggggtcaggacaagataagacctctatggaggcattact

SEQ ID NO: 106289 - DNA, 2293 bp, Zea mays
  Clone ID: MRT4577_28438C.1
aattcggcacgagggactctcgagtcttggcgtgcccagcccaggtcgtgaaccccagtccagacgtcgccgtcgtcgccgcccgaacccgatggacatccgccgcgggccgccgccgccgcgcaccgcgtcgggcggggtggagccgcggttccgccaggtgggattcgtcacggccgccgagcccgcgcggggggccgccacgccggcgcccgcgtcgcccgccgcgtccgacggcctctcccccgtcatgatcccgcccccgctcatccccgtccccgtccccgtccctgtcgcgcccgcttccgagtccctcgcgccttcttccccgcccccggactcctcgtctcgccccgacgccgtctccgaccttgacgacgacgacgacatcgacgtgtcctgggcgcgcccacccccgcccgccttcccagaaccaaacaagagacaccttactgaaagaaagaatgagcatgctcctccgactccagtttcgcagaaaccaaagctttctaaagcagagagacgtgccattcaggagtcccagcgtgctgccaaagccgctgccaaggaggcaggtttgaaatcaacagccatggcttctgatgctaacaccaagcaacccaaaacagcaaagatatctctgaagaaagatgtcaaccaagttaactctccagttgcttctgataagaagactggtgaacgaccgcctgacaaagatagaaaaaaagatgctcctcaaccccgcatgcaatttgacgatacacatcgggtggtgaaagcaaagaagcgttcagttgttagacaatcagaagctcaaaacagggtcgaactgttcagacatctgcctcaatatgcacatggcactcaactacctgaccttgagtcaaaattttttcaacctgatctgatgcatccttctgtgtacaaggttggacttcaatatttgtctggtgacatatctggtggcaatgctcgctgtatagcaatgcttcttgcattcagagaggcaataaatgattactccatgccttctgaaaaaattctgaatagagatcttactgctaaaatcagtagctatgtgtcatttctcatcgagtgcagaccactttcaatcagcatgggcaacgcaattagatttttgaagaacaggattaccaagctaccacttgcattttcagagtcagaagctaaagttagtcttcaatctgatattgatcgctttataaatgagaagataatagttgcggataaggtcattgttagtcatgctgtcacaaaaatcagagatggtgatgttctattgacatttgggtcagcctctgtcgttgaaatgatttttgataatgctcatgaacttggaaagaaatttcgtgttgtggtggtcgactctcgtccaaaccatgagggacaaggattgttgcgccgattagttgcaaagggtatcagttgcacatatacacacataaatgctgtatcttacatcatgcatgaggttacaagagtgtttttgggtgcctcttcagtactatcgaatggtactgtctactccagagttgggacagctttggttgcgatggttgcacatgcttttggagttcctgttctagtgtgttgtgaagcgtacaagtttcatgagagggttcaactcgattctatatgctttaatgaacttggtgacccagatgctatttcaagagttcctagggatgaaagtttgagcaatctcaaaaactgggctgagaatgaaaatcttcatcttctgaatcttaagtatgtgcattgtttcgtgcaggtatgatcaatgctcataacagattatggaatgctcccacctactagtgtaccagtcattgtaagagagtaccgcagggagcacgtttggatatagaagccaccgttttcctttctggttttgtttgaggtccatgttggcagttcatgccctcgatcggagcgtggccatgctgttggctcggcccggggcctctggccctcggctcacacttgctgctcaggcaggcagaggatcttcagctggagcagacgacgacgacgacgagggcgacatggttgttctctggctgtgtgaggagctctcaaccgcttgcccaataaagtattgaatcctcattctcatctggtgtctgtcaacttggcagcaaccgtcgctgtcaatctagggtcttgttagcgtcctatctctgcccaagctgctgggagcaaggactgccgccacggcagcagcgtcaccgtgtgttattaatatattctgacgagaggaagggactggacg

SEQ ID NO: 106290 - DNA, 213 bp, Zea mays
  unsure (1)..(213): unsure at all n locations
  Clone ID: MRT4577_28439C.1
acccaccagaggaaaagggcaaaagccaaaaggcatcaccgccgcgacaacgatcgcaggggcgctntnccgtggtggcaccctgatgcagccggccaagaacggcggccgggcgccctttgcctcgctgccgtaccgcccgacgtagcaactcgcctgcagggcgtacggcgttgacaccagcgccgacaggaacacgtgccccctgcagga

SEQ ID NO: 106291 - DNA, 430 bp, Zea mays
  Clone ID: MRT4577_2843C.1
aaaaacattcgaggaatttcgggacaagtaacacatgtaaaaaaacctaacaaaactttggctagctaattcgacaggttcgactggaacaaccggggggggggcaagggcaaggggccaacaaagctaagcaaaccccgactgggggtacatccaaacggaaacagccaaccccaggatggccaggggaaccaaaaacggggggatcttgatgacaaactcgggagtcttgccctggttggagggcggttgtttcggggggacatacttcgtcctggaagggatcgtcaacccgttaatttcacccaccaaggactcatccataaacccccgggcagggttgctggaacccacatcctcaaaaaataaggcgcatccttgccagttggggacaacaaaacataatcccctccggggggggcaaccaaaa

SEQ ID NO: 106292 - DNA, 420 bp, Zea mays
  Clone ID: MRT4577_28440C.1
tttttttttttttttttttttttttttttttttttttttttttttttttttttttttttttttttttttttttttttttttttttttttcaaaaaaaactaactttttccctccttaaaaattccaaaggtccaagaaggtgagtttaaacatgaaaaggggtggtgctggactttatacaaaaccaaggcggccagttaagggggggggggactgttttcctagccaaaggcttaataactcccatttaggtttggggggaccggggggggggcaattggtcaaaatacaagatccccaatggaaagccgggttttgggtttgttttaaacgcaaccgggggcccttgaaggtttaaaaacaccccggttttttttttacggaattttcaaaatcggggtgtgggcctttttttttttt

SEQ ID NO: 106293 - DNA, 1285 bp, Zea mays
  Clone ID: MRT4577_28441C.1
caccgtcgtaactcggtggccggcgacctcttcttctcaacgcccggtgcccaggtctcggccaagctcgcctccagctcgagctgctcccatggcgccggtctctgccctgttcctcccactcgcccggccgcgtcttcgaccttgctctctggtacgctctctggccggtcgctcgacccgagcagctgcgcatccctagcgcccagtctctgtaccgcgcggcccctcctctctctctctcttagctgtcgctccctgctgctccgtttatccttgagctccagcgccgccccctccctgctccagcttcttccatggcgcgcccagcccaagctcgccagccgagctcccccccagccccggatttcctcctcccatggccggtcgagtccgttcccagccgcgatgttccctggcgcttgcctagccgtcctctactttcagccgatgctcttccccatggtcgttgtgccaatcgtctctctctgctcgccagttttcttcactttggggctcgcccagctcgtcgatgcccatcttgtcttcctgctcgaccctggtgctcttgctcggttgtctggccaacgccctaacatcgccgcccaagccatggccctggttgtgctcgatcccgctatccagcttgtcgtccgaccgactgcctcatccctagctctagcgtccatcgcgtcctgctccttccatgtacagcactgctctggtggtcgcccacccagcgtccagcgctgctctcgtctcgtcgggctttgttttcccaaaattagtcgctgctccaactcacgttcgtggacgtcgtatctacgactccgacagtccctacacataatctgtattttgtgttcatcgccgaataaaaatccctaatgtttcggagaaaggaagatgaagtttgttcttcgatcgctaggtgttcagtgttatgcgcgaaccagaaatcgttgccgatatcgcggtcttcaagttgagtttattttattggtacgcttatttatcgcgcgatgcggaagacaagccaagtcgaccccaagcgcgggcaaatccgcaggataatgctgatggacgaacctacctgatccagtgctaggacaaggatgatcgccaagtggacgtcgtctaacaacactaaccttgtgttactcaggtcctagttttgtgctgctgatgatggtgttaagtgccggtgggctcggccttcttataagtttaagtaactcccttatacttcttattgaggatggtcttttgagctagcatatatttc

SEQ ID NO: 106294 - DNA, 786 bp, Zea mays
  Clone ID: MRT4577_28442C.1
gaaattccaaaaaaaaaaaaaaaaaaaaaaaaaaaaaaaaaaaaaagagtcgatcacacatttcctccgcccacctacccatcccgtccgccggccggcctcgaaccttccaagttaagcagctagctagctagctagcacggcggcgaggaatggagcgtgtctcgccgtggctgctgctgctggtacttctggtggccgcgtcagggccgggtgcgcgcgccgatccgcaggtgccgtgctacttcgtgttcggggactcgctggtggacaacgggaacaacaacgacatcgcgtcgctggcgcgggccaactacccgccctacggcatcgacttccccggcggagccaccgggcgcttcagcaacggcctcaccaccgtcgacgccatctctcggcttctgggcttcgacgactacatcccagcgtacgcgggcgcaaacaatgatcaactcctgtccggcgtcaactttgcctccgccgccgccggaatcagggacgagaccggccagcaactgggtcagcgcataagcttcggcgggcagctccagaactaccaggcggcggtgcagcagctggtgagcatcctgggggacgaggactccgcggcggaccacctgagccagtgcatcttcacggtgggcatgggcagcaacgactacctcaacgactacttcatgcccgccgtctacgccaccagccggcagtacaccccggagcagtacgccgacgtgctcgtcagccagtaccgcagcagctcaggatctgtacacaacggggcgagaa

SEQ ID NO: 106295 - DNA, 300 bp, Zea mays
  Clone ID: MRT4577_28443C.1
ccccccctgctgaagtacttcgcaaggagagaaccgaggggcccacccgactcgcagccctagtcgagctcagctgacggagggactgacgactccaagcagcaggcgcggacgctgtactgctccagcgaaggcaccatgccagagatggcctgcattcccgaagatggagctaagcaaagtggagccggggactgtgaccctccttgcggcaactggctgcgcaatgctgactatgcactccactgctcatatggccggcacatacatgtctgctcttgcaaggaccccacggagcag

SEQ ID NO: 106296 - DNA, 513 bp, Zea mays
  unsure (1)..(513): unsure at all n locations
  Clone ID: MRT4577_28444C.1
tcatgctaataataaaaaaagatatattattgcacatataaatcatgctaataaacataacatcnatttgcagtgaanaanataacatcattntaatctcatattcgattaattaagaaatacattaaanaatcactatattagcaatttcaaacaatcggttgtaattaaagggcacacattagtgcttgtttatagtcataatgacatgcataagaaactgtttctctgcatggtagtgtgaagctataataaagtatgtgtctttaaaaaacgtatgntgttatttcaaangtgatttatgatcatnttangtaatatgatcatntatcagctatactctatatacaatttaattaaatacaaaaagttattgcactctattaattgaacaataccatgaaatttcatttatatatattaaatgttacttatatatttaacatgtattttatgcagttatataaatatgtgatttaattactaaatttatctactttttaattccctagc

SEQ ID NO: 106297 - DNA, 539 bp, Zea mays
  Clone ID: MRT4577_28445C.1
ccggccgggatacggaccaagccacaatctacgctattcacaatgtataaagtaattcgcagccaggggatacggcatcgaatacatcttcacgggctacacgtgccggaacaggatcctgccaagaatagaaacgctcgcattgattgtcgagcgccacgagtaccttcaagtggacaacagggagaccgcgaacgatgctggtggcgcagccgctatcagccaagaacagcttgcggctgacctaccgaatagaggagagctaacgacatgttcatggcgaaccagagaatgtacctggacagcgcatctacatcgcaaagaacgattttctgagcgacaggaacagcgtgctcctcggtgagatagctcgaggtgaccgacgacttgtacaacaaggagaacatggcagaccgaggaactctagctcgaaccgccggaaactacttcaccattgtcgctcgctgacctgaagaaggtaagatacgtatgcggctctcctctggcgctcgagatagtctgccagctccggatcccga

SEQ ID NO: 106298 - DNA, 241 bp, Zea mays
  Clone ID: MRT4577_28446C.1
ctaaaagacaaagagaggccgaagatactcttatatgtgcacaacgcgtttttgaccgaagcactatactgacgcgatagcgatcttacacatgtgacagacaagttgttgtcagaaataggacgtggagaagatgataacctgaccaatcaaggcgattaacgatcaagcgatgccagataaacaaaagcctttgataagagaggagctaggcattcatttcatttgggagtgctgcgac

SEQ ID NO: 106299 - DNA, 208 bp, Zea mays
  unsure (1)..(208): unsure at all n locations
  Clone ID: MRT4577_28447C.1
caattggtcattcaggtcattgcttacactgacactggcacccatggggatgcgtgacacattatttctcaatcattgccgctaaatgactcaactagctagctaggcagggggttttcctccgcatctaatttttttcagggggggcacccccnggctgcgcttttgggcctggagttcgctgctggaggccctcctttccgtcagt

SEQ ID NO: 106300 - DNA, 252 bp, Zea mays
  Clone ID: MRT4577_28448C.1
aaaccgaagggcgggagggttttattttagggacgtccaaatgtgcgggaaaaaaattttatttcttgaaaagggtgtttatttttaacagttttaaaaaaatgagtggcgggcctttttttgaacaacccaacttggtgtttaaatgggtattataagccccaacccccccaaaaaaaaaaggtttaatttgtgaagcacccccagtttttgccggtttttcccaaaaggggaatttatttgcgaaccccc

SEQ ID NO: 106301 - DNA, 301 bp, Zea mays
  unsure (1)..(301): unsure at all n locations
  Clone ID: MRT4577_28449C.1
ccggcctggagacggtgctgcgcacgatgggccgcgacaacagcgacgacgaccacacgtcaggctgcaggaacgacgagagcaactacagcggcagcagtttgcctcaccgccggcgcgtggcaagctggagcgctccgcctgccgcgacaccaccaagttctcatcaatggcgatccgtgtgcattgattaattaggtccatctggtggattacgttgggacaagctntnntctcatcggttgaaatcttgccgtgctttcttcttggcctgtcattttgagtgaatgctgcagtgaac

SEQ ID NO: 106302 - DNA, 180 bp, Zea mays
  Clone ID: MRT4577_2844C.1
tgcgtacgtgtaggctatggtacatacatctgtctcatattggtggcaactaaacagcacgggtggaatcctttgactttgtaacggacatggatagctgtggcatagcaagagccggatagcggctaccacctcatcgccgatgctatgaagtaaaaaaaaaaaaaaaaaaggccccta

SEQ ID NO: 106303 - DNA, 405 bp, Zea mays
  Clone ID: MRT4577_28450C.1
ttttttttttttttttttttttaaatcatggcacaggatcgaatgtcacatctttactacataacatgaattctatacaaaataaataattacattataaggagacaacggtccagcaacccaaagttgactgggagacgacggcctagaccactcacgaactcattacaacatcctccaagcgcctcatcctgtggtacctgttcttgaccgacgacgggtccgtggcggcaacaattccggccacggcgcagcgcatgccaacccttcgaagcatgcccaggtctgcccaacctcagcggcacgacgacggacccgtaccggcaaggaaacgccatggtccgaggccatccatccctacatcccgtgcttggttcatcggtgccggcttaggatcccggccgg

SEQ ID NO: 106304 - DNA, 653 bp, Zea mays
  Clone ID: MRT4577_28451C.1
taacaattgtgttgccttgttcttgatttatagcctttgagaacaagtgaccaacattggcgcccaccttgtcacaaccgggttttaggggtctaaagcccggacgtgaacataatcaccaggtgtgctgggaccaagtctcacacatatgatgaatcatggcacaagatcgaatgtcatatctttactacataacatgaattctatacaaaataaataattacattataaggagacaacggtccagcaacccaaagttgactgggagacgacggcctagaccactcacgaactcattacaacatcctccaagcgcctcatcctgtggtacctgttcttgacctggcacttaagattccagttactagggtgattctttggatactcgaaacctcgctgcgacgacgggtccgtggcggcaacaattccggccacggcgcagcgcatgccaacccttcgaagcatgcccaggtctgcccaacctcagcggcacgacgacggacccgtaccggcaaggaaacgccatggtccgaggccatccatccctacatcccgtgcttggttcatcggtgccggcttaggatggagaaagcagggatagcggcgtaaatatatatcccggggcgtggctagcaggcgcgagtcccggccgg

SEQ ID NO: 106305 - DNA, 605 bp, Zea mays
  Clone ID: MRT4577_28452C.1
caaccgtgcaaaacaccttcacgacaccgaccgggagggagatttagaacaccctatgcggagcatccttaagcgtgggatgtagggatggatggcctcggaccatggcgtttccttgccggtacgggtccgtcgtcgtgccgctgaggttgggcagacctgggcatgcttcgaagggctggcatgcgctgcgccgtggccggaattgttgccgccacggacttgtcgtcgcgaggtttcgagtatccaaagaatcaccctggtaactggaatctcaagtgccaggagaagaacaggtggcccaggaggaggcgcttggaggatactgtgatgagttcgtgagtggtctaggccgtcgtctcccagtcaactttgggttgctggaccgttgtcttcttataatgtaattatttattttgtatagaattcatgttatgtagtaaagatgtgacattcgatcctgtgccatgattcatcatatgtgtgagacttggtcccagcacacctggtgattatgttcacgtccgggctttagacccctaaaacccgggtgtgacaactgaggacaagtatgtgccaaaaaaaaaaaaaaaaaaggggcggcc

SEQ ID NO: 106306 - DNA, 780 bp, Zea mays
  unsure (1)..(780): unsure at all n locations
  Clone ID: MRT4577_28453C.1
gtggtacgcctgcaggttccggtccggaattcccgggtcgacccacgcgtccgctgtcttcacttgactgacgtccgctctaggtatcgcagcaggaaccgaagtacgcccgaggacttcaggaaccatgccgaagccacacagtgaagcagggactgccttcattcagacccagcagctccatgcagccatggctgacaccttcctggaacacatgtgccgcctggacattgactctgcccccatcacggcccgcaacactggcatcatttgtaccattgggcctgcttcccgatctgtggagatgctgaaggagatgattaagtctggaatgaatgtggctcggctgaatttctctcatggaacccatgagtaccatgcagagaccatcaagaatgtccgtgaagccacagaaagctttgcatctgatcccattctctaccgtcctgttgcggtggctctggatacaaagggacctgagatccggactggactcatcaagggcagcggcaccgctgaggtggagctgaagaagggagccactctgaagatcaccctggacaacgcttacatggagaagtgtgacgagaacatcctgtggttggactacaagaacatctgcaaggtggtggaggtgggcagcaagatctacgtggacgatgggctcatctcactgcaggtgaaggagaaaggcgctgacttcctggtgacggaggtggagaatggtggctccttgggcagncagaagggcgtgaacctgccggccgctgctgtggatct

SEQ ID NO: 106307 - DNA, 403 bp, Zea mays
  Clone ID: MRT4577_28454C.1
cggaggaacgtggcagccagctgcggagaagcagctgaggtcggtggcgcggcggcgccggtaggaggtgcggcacaggtctgtgtcgccgcgtatctactacaccaagcgaggcgccagatgccagttctgcatccgccggtgatgtctctcatctctccccttatactgtgaaaccgaccacttcccgtgctgcaggatagactctgaatcgacgtttgatgctcgcgcctcatgcaaggagggaaactgccgcctcctgaagttgcgataccgcgtcgaccctgtggtagttgaggaccacatctccttccgtggacagggaatccaggaactgtgcactggggtatcagaaacatgtccgacgacagcggcgaccactcaggcaccagcactgcgcctc

SEQ ID NO: 106308 - DNA, 299 bp, Zea mays
  Clone ID: MRT4577_28455C.1
ttttacccactgtgactttgctgtgttgaatatcatgattgtcgctggtgataaaactacagggatcgactatccagagctggtgtctgtttgtgaccctagtgcccacaagtctttgacctctacattgcatgcctatacacctgctttaacaaaaaggccaatgctgaggtcagtgagagcaccaacaacatgctgcatctggaaatgatgatacactggaacaaaataccttgcttcctgtacgaactagagggcgctgtctacttgcacaaggaactccctgtccatgtatctac

SEQ ID NO: 106309 - DNA, 314 bp, Zea mays
  Clone ID: MRT4577_28456C.1
gatttccgtgctcgaccgcaatggcaactgagatgaatagcagacatctgtctgaatttaccttactgagatacttgcttagcggctgtcctgactgacctgctcaaagagatggaaactacgaagaccaagagcatgcgagtgctcttacaatgactacaccgaccctcgccgattaccgctgatctgacacatactagcctcacctcaccaggcatctgtaccacacgaacgtcaaccagttcatccccactctgtacttcctctacatcagcgtgtacaccgagatcgaatacaaacaccacactaacgcc

SEQ ID NO: 106310 - DNA, 232 bp, Zea mays
  Clone ID: MRT4577_28457C.1
gtgtgacactccacctccgccgggacgcggagtccgtagaacagccaccgcctggccatctcctctctataccgagccgcatgggcacgtacttcaaccactcctcgtcctaggcgccggcgtgtcccccgccgggcacttccccgtacagcgagtaccgccacgactgacccgccaggggcattattgcagtgggattacgtcgtctactgcgatggggtaaataaggtca

SEQ ID NO: 106311 - DNA, 527 bp, Zea mays
  unsure (1)..(527): unsure at all n locations
  Clone ID: MRT4577_28458C.1
agacgtcaaagtttttcttataaatggtgaaacctttttttaacataaacaccagaacaggggcatacaaaggcgctacccgactaaacaactgacgctgcaacaggggccgacaccaggggacaacctaaaaacaacgacacgccgatggaaaacaaattgccagattcacacaaccatagctctgagtcgcgccgatacaacatcaagatggaaaatcgaccatacacatgcgctgtaaagaccaaaacaaaaaaatgctgagaagagacccagctcaccccactgtaccactcaaccaggtccatgagcgtcctgggcacttnccagggcatgtctcagccacgaacatgtaggttcatgagagcacgcctctgcttgttgagcctaccaaacagtgtgcgggccttggcggcccgagcatcccaaacccccgcttgaacaagcctgggtgtgccctttgaagcgccccaaactcctgcctaaggaatggggacagggcacacataaaggcaggctccctccca

SEQ ID NO: 106312 - DNA, 355 bp, Zea mays
  Clone ID: MRT4577_28459C.1
gggcggaccaggggtttgatttgtgaaaaatgattgtttttccataggaagaggtacattcattgcaaggtctggtctataaaaagtgggtgacctattacaataccgggagggtggggaccctcccaactttatacacggcgcctaactaatccttccccagtggtgggaatgccacccaaccttcgaattactttgaggacttctcaacaccttggtcttagacattgagggctaaattcatctattaaaccccaggtaggtgggtccatccactcgatgggcacgcattagacgaaagtcctgtttatcatccacttgatcgggaatctctcctttttatatttggaggtct

SEQ ID NO: 106313 - DNA, 172 bp, Zea mays
  Clone ID: MRT4577_2845C.1
ggatccgtcattgaccgtgattgtgatgaagttgatgacgccttacaagattctggtgcttggagcaaaaggtctcgttgttttaatctctttgatattaatcgcccatcttctttaggagctatttccctgcactaatttaagcttccacctgtatatatattgctctctc

SEQ ID NO: 106314 - DNA, 328 bp, Zea mays
  Clone ID: MRT4577_28460C.1
cggatatacccgggggcgaccacacgcgtcgttaaagtggggacaccgttgcatgcggaactgatgatatacatgcagatgataccaatggctcaggttacaccaggggttaccgaggatatggaaagttggggcatagacaacagaaggatgaatggcgacctggccttgttgaattcatccagaagcacaatgggatgacacctaatgacattggctcagctggttctgtgagtactgaatgcacagctggtggtggacagatgtacatgtggggcaagatgaacaatacaggcgatgatggaaggacacaaacctgtgatggata

SEQ ID NO: 106315 - DNA, 782 bp, Zea mays
  Clone ID: MRT4577_28461C.1
ctggccgggacacacgccccagctgcatgttccacatgtgatccccatcaacgcatgctcgctcggccgctccctttcaaattgcaagccaagccgtctcaagtctgtagcctcgatttggaactttgaacggaggtaggtaggatggcttgcggtctcaaactatgctaccatgtttggatgcactagagtagctgttaaaattaatcaaagacatctaaacagtctagctagtagtttaactattagcttttctttagcaaactagctaattcgacaaataatttttttatcaaagaactattatctctgcatctaaacaccggtgttcaaatgcactacagttaacagttagctgctaaaattagttgaacgcagctaatagtttggttattggctacttttagcagattaggtggctaattcttagcatccaaacagcccccctaattatagcgcaaccgcaatgggaccgaaccaatgggggtatgggctgacgagtggtggtaatctagcgcaatcagagacggctgagaggcaccacagtccacaggaataggtcgacatcaaacactaaaaccatgtcatgatcaccaaataatggccccatgtcatgatcatcgaacaatggccgggtttttgcgtttcaggtggtgggaagccctactactggttcacggtcgtatgcaggttcattgaacatggacagggttccagatttcaaatttttttttccagatttcaaggtttggtaggggggaatagagtctagtaggttgggc

SEQ ID NO: 106316 - DNA, 661 bp, Zea mays
  Clone ID: MRT4577_28462C.1
ctttatatttacaaaccatggaagacaatcctctgtaccatcttccctgcttacatattttccaaactatccaattccagcatccaaacagacacggtatgtaactccttgtttaatattatttgcaactttttacaaacatattatatgactataacctaatgaaattcatttgctaggcccgacgattgctaacatatcccgatgtgccacaaagtacagagctgatgaacactaaacagaccagcttaacaataatgaactatcgtgaccactgaaaaggatgaagcacaaccaagttgacaaagcctgctagattccagaaatccatgaaaataaagcttgttacatcctcatgaaatgcatgaagggatttgcttttgcatatttatcgaggagggcttcatcacttttaatgaaaaatgcatctatgtatatataaaccacctgttgaagcctgtcactccatgtgtgttgatgcaacatctaggaaaaaacaatgctattagttgttggcatatgctactttaatactacttaatatgtattgcagtctcagttccctctaccgtttggtccaaattgcatctgtgtacatagagaccaattgttagaaactttctaaatcggtgtatatttaatgcaacctctggaagacact

SEQ ID NO: 106317 - DNA, 317 bp, Zea mays
  Clone ID: MRT4577_28463C.1
ctagttttagatacccagcggccgcggtttgggtgatatacttcatgtgctcataaccagatggtgttttgttatatgatgtaagcaccgggatttggaggcaatttgccaaaacaaatggcactttatcaaaactgatcacacactacgccaagtcccaacccttgtttatgctgggggggggggtcaccaaaaatccaacgacctgcaaatccatattgaagttgcagaagatgactctactctggaaagaagttgacagaaccccaaattgtctgaaacttagaaccctaccgttagcacataaacaagaaatg

SEQ ID NO: 106318 - DNA, 474 bp, Zea mays
  Clone ID: MRT4577_28464C.1
ccggccgggcccttcttaaaaacaggtggccagaggaggcaagctgacatgagcgctgctactctcccgcccggccaggagccgcacgcagtgtgcgtgccgttcccggcgcagggccacatcacgccgatgctgaagctggccaagatcctccacgccaggggcttccgcgtcaccttcgtcaacaccgagtacaaccaccgccgcctcgttcgcgcccgcggcgccgccgccgtcgcgggcctcacggggttccgcttcgccaccatcccggacggcctgccggagtcggacgccgacgccacgcaggacccggcgaccatcagctacgccaccaagcacaactgtccgcctcacttgagaaacctgctcgcgggggtggacggcgtgacgtgcgtcgtggcgtacaaactgatgagcttcagcgtggacgccgcgaggcatgtagggacgaccgcgacagctcgttcggac

SEQ ID NO: 106319 - DNA, 388 bp, Zea mays
  Clone ID: MRT4577_28465C.1
ggaacacaaaatggggcatgtttgagtccaaagcaagccagcaatgacaacttttttttagacaaacaccccatgtgcagtataccggactggagttttacagtttttagcaaatttcccccacacaaacaacttgggaactggaaaaacaccaaaaccctatttacggtaaggcgcgggggggattgcctagcccccaaaaccgtaaagggtacggccctggggcttaagcgcgtaaacaacgtccatgggggggacggtcttacggggagcgtgctcattgtaggtgacggggtctgggatgactttttccagaaaaattttgagccccccgggggttttcttttaaatgagccccgaaatggtctttaagccgccccggcgggcc

SEQ ID NO: 106320 - DNA, 366 bp, Zea mays
  Clone ID: MRT4577_28466C.1
tcaccagtaaggacggggggattagtattaaaccaaaaataaaacaagtgttaagcgcatagcatacaaagcaaagcaagttatcatacaaagcagataagtaagccgttcggctgctctttttcttggctgacgctgcaagctgctgcttctttggtgctgctttgtttattattccacagctgctgcagccgttagatatagggcagccgaatggcttgcaagattgcaaactctagagaaaatcttcgacatggcacagaaatacattattactgctaaaccatgttcagagaaagttgaaccataccttacagaattggatgagttattactttgctgcagcctcaaaatttttaagcatat

SEQ ID NO: 106321 - DNA, 525 bp, Zea mays
  Clone ID: MRT4577_28467C.1
aaaaaaaattttttttttaaataaggaagctccttccctttttttccaggggttaaagggtggggaaaaagcaccccccccggggggggggacccttggaaaaaatctccttcgaaaaagcaacgggaattggaaggttccccctctaaaaagctaagtaaaattgggttttttaatccttaacaaaggggagagcacctttggggaaacctttttgtggtaaaaaaaaaataaaagttggcccaccaaatggggggtttttaattattctcaaaaaaggggcaaggccttttgggaaaaggggaacttaaaaaattttttccgaggaataaatggaaaccagtttttttttcccttcccgttttaagaaaaaaattttgtccccaacacccttcttttttaaaaaggaaaaaaaaagggtttttttaaccccctggctcccttgggaaaaacggactttattttggttaaggggggggaaaaaaaaaaaacttttttattccagggccccttttttaacccggg

SEQ ID NO: 106322 - DNA, 427 bp, Zea mays
  Clone ID: MRT4577_28468C.1
gctgccttgcgtggaaccctaacatatcacacttggtagtgtgttttctcagatctgagaatgttgagtccatgtcgagctctttcaatagcttgctctctagctagatttcaagatatgttctttaggtctggtttttgcagttgcaccttcattaagaattgtactcatttctatgttaggattgctgaataaatggttcaaattactcatgcgcaggttatttctttgctgaaatttgcctgtataattttagtgttcaaattactcatgtactcattgttgtctagcaagttatttcatgtgcaaatgactgatgtgttatcaatagatctatccctcaatttccagacatcctcctggtaggcatctttgagtaaaattaattacaaatatatgtaaacacccattggatctaattaagact

SEQ ID NO: 106323 - DNA, 123 bp, Zea mays
  Clone ID: MRT4577_28469C.1
gagataaatatgagccgacacatccccgcacgacgcggagcttttttgcggctggcacccgtaggccgcaagctgagcaagtcgcccggttcgtcggccagacggatccactcaggacccggg

SEQ ID NO: 106324 - DNA, 1397 bp, Zea mays
  Clone ID: MRT4577_2846C.1
gttgctcgtcgcgctaaaggtttaggaatgcatgtgattgcacatgatccatacgcttctgctgatcgggcccgtgcaattggagttgagctagttagtatggaggaggccatgacaactgctgacttcatctcattgcacatgcctcttacccctgcaacaaacaagatgctcaacgatgaggcctttgctaagatgaagtatggtgttcgcattataaatgttgcacgcggtggtgtgattgatgaagatgctctagtcagggctcttgattcaggaatagtagcacaggctgctcttgatgtgttcactaaagaacctccagctcctgataacaagttggtgctgcacgagaatgttactgtcacacctcaccttggtgccagcacagtggaggcacaggaaggagtggctattgagatagctgaagctgtcattggagctctgaaaggggaacttgcagcttctgcagtcaacgctccaatggttcctgctgaggtgctgtcagagcttgcaccttttgttgtgcttgcagaaaagcttgggcatttagctgtgcaactagttgctggtggtggtggcatcaagtctgtgaaagtgacctatgcatctgcacgggcccctgatgatcttgacacgagacttctccgtgcaatgatcaccaagggattgattgagccaatctccagcgtttttgtcaatcttgttaatgctgacttcaccgcaaagcagaggggagttcgcatcactgaggagaggatcatcttggacggctcacctgagacgcctatcgactacattcaagttcagattgccaatgtcaagtccaaatttcctagtgcgatatctgagactggagagatcacagtggaggggagagtgaaggatggcgttcctcatctaacaaaggttggagcattccaggtggatgtgagcttggaaggaagcctgatcctttgcaggcaggttgatcagccaggtatgattgggtcggtaggaagtgtcttgggtgaggagaacattaatgtcagtttcatgagtgtcggaaggattgctcctcgcaagcatgctgtcatggcaatcggtgttgatgaggaaccaagcaaggtcacactgagaaagattggggagattccagcaatcgaagagtttgttttcctcaagctttaggcaactaagcgcaaatgtatgtttcaagttgcaagcatgctgtgcaattttgatgtagcttagcaatatagaggacggatggttctccttaaataagcttttaggattatttttgtagtggcgctcttgaatttggtgcaatattgatgccatcttttgaacggggtgttattctcagctactgtttcccaggttataaaaaataatatgtactccacgttccaatc

SEQ ID NO: 106325 - DNA, 558 bp, Zea mays
  Clone ID: MRT4577_28470C.1
gcttgtcctacttttctgcggggctggtcatatttttgtgtgcggcgatggagatgtctctcggaggctccccgcgggaacccgaaaggctgcgagaagatatttaagaccaagtgcgcgcattgtcacacaggacgagaagggcgccggacacaagcaaggtgcaaacttgaacggtctttttgggagacaggaacgtaccattggaggctactcctactatgagggtaacataatcatagttggagtctgggaagaacacactttgtatgagtacctgcttaaccctaagaaataccttgctggaacctagaaggtattccctgggctgaagaagccgcatgagtgtgctgatctaatcgcgtacctgagcgaagcaactgcatagcttattggcatgccttgtgtcatgaatagaaaaatcgttttgcatgttaataaaaaacattttagacaatttgggtcaccctgtttgaacagggggcacacactgctcattattgtcgctcttatggcgcacgtttggaatgcctatggtgttagctgtgcacaaataac

SEQ ID NO: 106326 - DNA, 284 bp, Zea mays
  Clone ID: MRT4577_28471C.1
aaaaaaaaaaacatttcccctccaaaaatggtttacagactgggcggaacccttgcggtttaacccagggttttgggggttttggcccacaaacccaaattttacccttttttaaaggcctaaaacggaaaaaaacccctttttgcgccccgggaaattggaaaggggaacaaaattttttgggggggtattttcggcccaataaataatgaacccgttgggaatccgggggccgaacgtaatttaacccctttttacccctttttatttttgggggggggggc

SEQ ID NO: 106327 - DNA, 181 bp, Zea mays
  Clone ID: MRT4577_28472C.1
ggaaagtaaccggggagggttcacaaacccatttccccgtggggacatgtaaaacccgggcttaagagtcaaaacattggttttttggttggggccctgcggggtgaagcttttattcggggcacgggttttccaggtttcacatgtttgcgaagggggcgcaagaacccctcgggcccgg

SEQ ID NO: 106328 - DNA, 277 bp, Zea mays
  Clone ID: MRT4577_28473C.1
aaagaggctgctcacatggacaccatcgccctacctgggctgctttcagaagtagtcccggtgcttctcgtcgatgggtgcatgctcgatataacctaccatcacatgacagagcagcaagcccggaccatttttggaactgcgagaacactaccaaccgaagtgttcacgtatgctcagacagactggttcctcttgttgggacaacataagaactgcgacatcaaatgacgcttacaccctcactttctcgaaagatgatcgccaatgtgggcaa

SEQ ID NO: 106329 - DNA, 365 bp, Zea mays
  Clone ID: MRT4577_28474C.1
cacacgtagcgccggcggcggaggctatttctccgacgtcccagtcgtaaagccacaggttgcagataccttgcctgcggcggtccaactgaactaacgtatgcagtacacgaagcgatcccctgcgtgagatgacgaggctttcgacgccgatgcttatgcaccacgcactgtcactgattcggtcgaccagcgagctgttgacgtctccgtctatcgcgatcagaacactccatggttccatgcacgaataacaacggtatgcgcagattgtgttgtgattcctaaatgtatactcgctttgtgttgagcagaggcgttcttgtgtacctacgtatggctatataacacgtttcgatattttt

SEQ ID NO: 106330 - DNA, 533 bp, Zea mays
  Clone ID: MRT4577_28475C.1
gctttccttcctcccagccgcgcgtgcggagggaagaggaagaagagattagaagggcgcggaaaggagaagctacattcattagctaataactaggaaaaaaaacaaatttagcgtcggctgggcagacggtggcggcgcgcggggggagcgagcttccacgcgcccttctccctgccttcatctgctccatctgttcaagaacacgccagagaattcaagtgtcgcattgcacttgcactccgtcgagcggtagccccgatccatgcctgcgcctgcccctgccatcgccgtcgtcgtgccgccgccgccgtcgccatcgcttacaggctgcgacggctgctactgactgatcgctctggatgtagctataggtacctctcgattggcatgctgttctgataacttctaacgagcctcgaacacaaaacaaagccgctctgccaccggctgccactggcgctggaagcaacgaccgctcgttagccaggatggcaatcgcggtcggccatttccatggacctaagcccccc

SEQ ID NO: 106331 - DNA, 535 bp, Zea mays
  Clone ID: MRT4577_28476C.1
ttttcttgttttatttctttctttctttattttttctttttttttttatttttttttttttttttttttttttttttttttttttttttttttttaaccaggggcccggggggtttctctggcgggcctatgggaagggggacagggtctctacattttgtggggcccttactggtggcgggggggaagggaacggatctggggatccgggggaacgtatttctcaacacatagtacatgggggaaggaagcaggacgtagcagggctgggttcacaatgcagcaaagcaggcagggaaataaggggggggccaaccatggctgtgtttatatatatatacatatatatttatatctatcatatatatatatatgggggggggccccccctgggttccaagaagaagatcgcgcccccttgttcccggaaaagagggggccgggggggccacaaaaatatgccctcaaggggagggctcctccgaatttcccaccccccacagggggggggaaagctggggcccgggtccctccc

SEQ ID NO: 106332 - DNA, 482 bp, Zea mays
  Clone ID: MRT4577_28477C.1
aaaaagggggaaggggcctgcaccggctcgaaaagggcccgctgaagaaaaaaacaccgggcaccaaaaaaaaaaagaaaaaaaaaggggggccaccccaccccaaaataagggggagggggcccccgcgaccactggggacaaataggaaccaaaaagggcaccccccccccaaaaaaagccgccccgggccacgggggacaaagaaagtgccccccccccccaggggagaacacaggcccccaaaggggggagggcaacaacagtggtttcccgggggaggaccccacccaagggggggggcccccaccctgcgggggccatataccaaaaatgcggcgcaagaacccaaaactcgtttaaaggggcgcccacccggcggaggggtacgtggaaaaaaaggtaagcggccggaggccccgggggcgaccaaaaaaaatctgaaaatcccgggccggtgtgggaaaaaacccccccctggg

SEQ ID NO: 106333 - DNA, 656 bp, Zea mays
  Clone ID: MRT4577_28478C.1
atcaattattgtatccaaacagatctagaagagaagctgatcttctccttccttcggcaccctctccttccctgatccacctactactccttctctcttcctcctagatcctgatcgggtacgttacagacgcgctggccatggcttcccctcgccatcgccaggacggagacggaccacacgacggcgcgccgacgtacgccggcatggcgaagctggtgccggcgctcccgctcgagacgcggtgcccgccgttcgcgctgcggcgctacggcggcttctggctgccggaggcggccctgcggcgcggcctcccggcgttgcacgccgggttcgcgcccaggcgcgcagacgtgctcctcgccagctaccccaagtccggcaccacctggctcaaggccctcgccttcgccaccgtccgccgcgccgtgcacccgccttcttccatcgaccacccgctccgccgtcgcaacccgcaggactgcgtcccgttcctcgagttcgacttcgaccacggggacatggccgagctcgaggcgctcccttcccccgcgggtgctcgccacgcacctcccctactcgctcctccccgaccgcgtcgtcgccgacgacggggcgcggatcgtgtacgtctgccgggaccccaggacgcgctg

SEQ ID NO: 106334 - DNA, 378 bp, Zea mays
  Clone ID: MRT4577_28479C.1
ccggccacacgtgctctagagacatacacgctcgctggcccaccagttttatcaatatgggcaccactggctgcagcggggtacggtgccatagagcagaccctaataggaccacttcaacagcttcggccaggactattagcacttgctgagcctgcatgtcagctctgagggacaccgacgatgaccgtgacacactcccgttagctcttggatgccagccttaagcatcttaggcttgcgtgagtgtgcacgttcttgtgatatggataaaccacagtgcaccacacttaaactaatgggctaatgaccacattgcgtcgatgacatgattgacattcctggaagctcgtgcccgtccatacatgacacacttgg

SEQ ID NO: 106335 - DNA, 2340 bp, Zea mays
  Clone ID: MRT4577_2847C.1
cttgccttgattcccatcaccgaatattattgaatcttgggaatctttgtttttgacgtaggaggtgaacatcttcttctcccccgtcatatggtttgtgcatccgctgtcaataatccagcttgaacccccggatgcataaactttcctaggaacattaacaacatttctcctaggcaaattatgaacagcatttctcctaccaacatttctatcatgcacataagaagaactagaagcaaacatggcatgagaatcaatggcattatatgcattacaactcctataagaatttctagattgtctcctatcatggtacataaaagcatggttcttttgcacactactagccataggggcctttcctttctccttggtggagatgggggccttatggcttgtcaagttcttggcttccctcttgtagccaagtccatccttaattgaggggtgtctaccaatcgtgtaggcatcccttgcaaattttagcttgtcaaattcattcttgctagtcttaagttgggcattaagactagctaattcctcatttaatttagagattgaaactaaatgatcactacaagcatcaatgtcaaaatctttacacctattacaagtttcaacaatttctacacaagaattagatttactagctacttttagtttagcatttaaatcatcattaaaactttttaacttagcaatagtttcatgacaagaagataattcactagagagcatttcattcctcttaatttctagagcaagagatttctgagcttctacaaatttatcatgttcttcatacaacaaatcctcttgcttttctaacagtatattccttccttccacggctcctctcgcttctctaactgtgtcttccttagttctatctaatcccttgaataagcatgagtaatctatctcatcatcatcactagactcatcctcacttgaagaagcataagtactagtattaggagtgcttactttcttctcccttgccatgaggcaagtgtgacgctcgttggggaagagggatgacttgttgaaggcagtggcggcgagtccttcattgtctgagtcggacgaggagcagtccgaatcccactccttgccaagatgagcctcgccctttgccttcttatagttcttctttttctccctcttgttcccttgatcctgatcactatcattgtcgggacagttagcaataaaatgaccaagcttaccgcatttgaagcatgagcgcttccccttggctttggtcttgcttggttgtcccttgcgatctttaagcaccgtcttgaatcttttgatgatgagagccatctcttcatcattaagtccggccgcctcaatctgtgccaccttgctaggtagcgcctccttgcttcgtgttgccttgagagcaagaggttgcggctcgttgatcggaccattcaaggcgtcgtccacgtatctcgcctcctcgatcatcattcgcccgctaacgaatttcccaagaacttcttcgggcgacatcttggtgtacctgggattttcacgaatattgttcactaaatgaggatcaagaacggtaaatgaccttagcattaggcggacgacgtcgtggtccgtccatcgcgtgctcccgtagctccttattttgttgataagggtcttgagccggttgtatgtttgtgtcggctcctcgccccttatcatcgcgaaccgtccaagctcgccttccaccaactccattttggtgagcaaggtgacgtcgtttccctcatgagagatcttgagggtgtcccagatctgcttggcattgtccaggccgctcaccttgtgatactcgtccctgcacaaagaggctagcaacacagtagtagcttgtgcatttttatgaatctgttcattaataaacacagggctatccgagctatcaaatttcattccactttccacaatctcccaaatgcttggatggagagaaaacaggtgagtacgcattttgtggctccaaaatccgtagtcctctccatcaaagtgagggggcttgccaagtggaatggggagcaattgagcatttgaactatgcgggatgcgcgaataatcgaaagaaaagtttgagttaaccgtctttcgtctatcgtggtcgtcgtcgtccttttgggaggaggaagattcgtcgctgtcgtagtagacaatttccttgatgcgccttgtcttcttcttcctcccgtcttttcttttgtggcccgagcctgagtcggtgggcttgtcatcattgggctcgttgacgaaggtctccttctccttgtcgttgatcaccatccccttgcccttaggatccat

SEQ ID NO: 106336 - DNA, 401 bp, Zea mays
  Clone ID: MRT4577_28480C.1
cggacgcgtgggagcagatgcagtacctttatgtaagagttgtaaaagcaaaggagacttgcaaacatggacatgactgggagctgtgacccgtatgttgaggtgaagcattccctgaagcatggcattctgacgcagcctcggtccctggtgatggccttgcaagcattagatcgaaagtgtatcttactccaaagctttggtatctccgtgtcaatgtcattgaagcccaggatcttataccaaatgacagggccaggttccctgaagtttatgtcaaagcaatgctaggcaatcaagtcctcagaaccagggcaccgagccggaccttgaatccaatgtggaatgaagacttgatgtttgtcgcagctgagccatttgaagaacacctaattttgagt

SEQ ID NO: 106337 - DNA, 318 bp, Zea mays
  Clone ID: MRT4577_28481C.1
cgagatacaaggtagatcatcttaagaattctatcaaagcgtgtttaaggttcgttgtcatcgcgatatcgttgtcatgataaccatcacttgcatcaatggaggagatggaggggtacacggtggaccaaaaaagcttccactcatttgctagtgttgagtagtttattacctatgttatcacaatccaagctagcatgaggatgttgtgattgtgagctgttttgtcaaattaatttgtatttggtcactgtttatttggtgcaactatttgttacaaaatggtatggatatagttaatatatgaggcaagagacg

SEQ ID NO: 106338 - DNA, 240 bp, Zea mays
  Clone ID: MRT4577_28482C.1
gttcaatcagatcctgctggacgtctggttatcacaggggatccagagcagcctgataatccttgggggatcacttcggtcaagaaggtggtcaactttccatcaagaattaattcttaccaaacattcggtggtgtcacgctttattgtcaggtgtttgtgcgtgcaccaattggggcattctgatatgttgatatgaaatcaattttagttcacatttgttgacttttgcaccttttt

SEQ ID NO: 106339 - DNA, 586 bp, Zea mays
  unsure (1)..(586): unsure at all n locations
  Clone ID: MRT4577_28483C.1
aattcggcacgaggctctctactgcctttgtttttgctcgcaagaaaaacccgaaaaagaccttgcgcaaatccgtcgtcctgtccaccgacgaagcttctgagtcctcctcgccgcgcgcctctacgcgtgatatcggtcttttcccctgaatggtgatgtggaggtcattctcttcaattcaaatggtccccccccgcagagcaagatgaggaaatgttcaaaatactcttaagccgtgtagcacgacaagtttgttgcagaggacaagcgacgactgggttttcttggcactttgtcaagtccgtgagtagaagtttggtgtaagcttgtcttcgaacaagatgatgcagaggccaccgctccgtccggaggagtactccttgaaggaaaccacacctcaccttggtggtgcagctgctggtgacaagctcacaaccacatatgnacctgttgagcagatgcagtacctttatgtaagagtggtaaaagcaaaggaacttccgaaacaggacatcactgggagttgtgatccttatgttgaggtgaaactaggaaaattataggggccaaactgggcatttcg

SEQ ID NO: 106340 - DNA, 2947 bp, Zea mays
  Clone ID: MRT4577_28484C.1
cccacgcgtccgcccacgcgtccgcgtccccgtcgatcgagcactccactcgactctctagtaccctcctctgcacctccctctctctctctctctctctctactgcctttgtttttgctcgcaagaaaaacccgaaaagaccttgcactttgtcaagtccgtgagtagaagtttggtgtaagcttgtcttcgtacaagatgatgcagagaccaccgctccgtccggaggagtactccttgaaggaaaccacacctcaccttggtggtgcagctgctggtgacaagcttacaaccacctatgacctggttgagcagatgcagtacctttatgtaagagtggtaaaagcaaaggaacttccgaacaaggacatcactgggagttgtgatccttatgttgaggtgaaactaggaaattataagggccagactgggcatttcgagaagaagaacaacccggagtggaatcaggtctttgcctttgcaaaggagcgcatccagtcatcagttgtggagattctggtcaaggacaaggatcttgtcaaggatgacttcattggacgtgttatatttgatttgaatgaggtcccaaagagagtgccacctgatagcccattggctccacaatggtatcggttggaagaccgcaatgggcacaaggtgaagggggagttgatgctggctgtttggatgggtactcaagctgatgaagcattccctgaagcatggcattctgatgcagcctccgtccctggtgatggccttgcaagcattaggtccaaagtgtatctaactccaaagctttggtatctccgtgtaaatgtcattgaagcccaggatcttataccaaatgacaagactaggttccctgaagtttatgtcaaagcaatgctaggcaaccaagtccaaagaaccagggcattggcaagccggactttgaatccattgtggaatgaagacttgatgtttgttgcagctgagccatttgaagagcacctagttttgagtgtagaggacagggtggccccaggaaaggatgaagtaattggaaggacaatcattgcactgcagcatgtaccccggaggctggatcacaggttgctaaccagccagtggtataaccttgagaagcatgtgattattgatggtgagcagaagaaagagaccaagttttcaagtcggatccacttgagaatatgtcttgaaggtggatatcatgtcttggatgagtcaacacattacagtagtgatttaaggccaactgcaaagcctctgtggaaacctagcattggcattcttgaactgggtatattgacagcacagggcctgttgccaatgaagaccaaggatgggcgtggcacaactgatgcatattgtgttgcaaagtatggacaaaaatgggtgcgtaccaggactataatcgacagtttcactcccaaatggaatgaacagtacacctgggaggtgtatgatccatgcactgtggtcacaattggtgtattcgacaactgccacctgaacggcggggaaaaggccaatggtgcgagggacaccagaattgggaaggtccgcatccgcctctcgacactcgaaactgatcgggtgtatacccactcataccctcttattgttctgacacctggtggtgttaagaagatgggtgaggtgcagctcgctgtccgtttcacgtgttcatcactgctgaacatgatgcatctgtactcacagcccttgctgcccaagatgcactatgtgcacccgctgtctgtgatacaggtggacaacctgaggcgccaagccacaagcattgtctccacaaggctgggccgtgcagagccaccgctgcggaaggaaatcgtggaatacatgcttgacgtggactcgcacatgtggagcatgagaaagagcaaggcaaatttcttccgtatcacgggtgtcctgagccccctgtttgctgtggcgaggtggttcgatcagatctgtcactggaagaacccgctgaccaccgtactgatccatgtactctttatgatactggttctatacccagagctgatactgcccacaatcttcctctacctgttcctgataggggtgtggtactacaggtggcgtctgaggcagccaccgcacatggacacccgcctctcccacgcagagaccgcccacccggacgagcttgacgaggagttcgacaccttccccacctcccgcccgccggacttggtgcggatgcggtatgacaagctgcgcagcgtcgcggggaggatccagaccgtggtcggcgaccttgccacgcaaggcgagcggctgcagtcgctgctgagctggagggacccaagggcgaccgcgctgttcgtggtcttctgcttcgtcgccgccatcgtcctgtacgtcactccgttccgcgtcgtggtcttcctcgcaggcctgtacgtgctgaggcaccccaggttccgccacaagatgccatctgtcccgctcaacttcttcaggcgtctgccggcgaggaccgacagcatgctgtaggcgcggcaggtgcatggcctcatcgctggccggtggtttcgcctctcagttgcagctcacagatggttgttgctctctcttaagtaagtgtatccggaaaaaaaggagctgctagctatcttcgtttactttttgagcttctctgtgttgcatggttggttatgtattcatatggttgtgaacctttcctgtaacaactggacgcatgatgcgtgactgtgtctaggtatgcatgcatgtgtgtgatgcttgaaaactccgagctttagtgtttattgctttacctacttcagcggcagtgctgtcagctaacaaggctctctactgctgcaaaaaaaaaaaaaaaaaaagaaaaaaaaaaaaaaaaaagctgtcgagaaaaaaaaaggaaggatctttataaaccaaaattggggggcc

SEQ ID NO: 106341 - DNA, 1561 bp, Zea mays
  Clone ID: MRT4577_28485C.1
ccacgcgtccggacatttacacggagataccaaatgacaagactaggttccctgaagtttatgtcaaagcaatgctaggcaaccaagtccaaagaaccagggcattggcaagccggactttgaatccattgtggaatgaggacttgatgtttgttgcagctgagccatttgaagagcacctagttttgagtgtagaggacagggtggccccaggaaaggatgaagtaattggaaggacaatcattgcactgcagcatgtaccccggaggctggatcacaggttgctaaccagccagtggtataaccttgagaagcatgtgattattgatggtgagcagaagaaagagaccaagttttcaagccggatccacttgagaatatgtcttgaaggtggatatcatgtcttggatgagtcaacacattacagtagtgatttaaggccaactgcaaagcccctgtggaaacctagcattggcattcttgaactgggtatattgacagcacaaggcctgttgccaatgaagaccaaggatgggcgtggcacaactgatgcatattgtgttgcaaagtacggacaaaaatgggtgcgtaccaaggactataatccgacaagtttcactcccaaaatgggatcgacgagctttgacgaggagttcgacaccttccccacttcccgcccaccggacttggtgcggatgcggtatgacaagctgcgcagcgtcgccgggagatccagaccgtggtcggcgaccttgccacgcaaggcgagcggctgcagtcgctgctgagctggagggacccaagggcgaccgcgctgttcgtggtcttctgcttcgtcgccgccatcgtcctgtatgtcactccgttccgcgtcgtggtcttcctcgcaggcctgtacgtgctgaggcaccccaggttccgccacaagatgccatctgtcccgctcaacttcttcaggcgtctgccggcgaggaccgacagcatgctgtaggcgcggcaggtgcatggccccatcgctggcgggtggtttcgcctctcagttgcagctcacagatggttgttgctctctcttaagtaagtgtatcaaaaaaaaaaaggggctgctagctatcttcgtttactttttgagcttctctgtgttgcatggttggttatgtattcatatggttgtgaacctttcctgtaacaactggacgcatgatgcgtgactgtgtctaggtatgcatgcatgtgtgtgatgcttgaaaaaaaagagctttagtgtttattgctttacctactttttcagcggcagtgctgtcagctaacaaggctctctactgctgcatgtgcatcatgttgtttggtttgcagctcaatttaccgacttgccagttgtaattgggaaatgatgatctggattttgcctagccgagagttctcttctacgcagactggaactatttgggtgccaatctgagcagaggcgggctgttgtacttgtgaacttaatagtgatgtcatggttgaatttccttccaaacggagccaaaaaaaaaaaaaaaaaaaggcccctagggcc

SEQ ID NO: 106342 - DNA, 971 bp, Zea mays
  unsure (1)..(971): unsure at all n locations
  Clone ID: MRT4577_28486C.1
ctcaggtaccggtccggaattcccgggtcgacccacgcgtccggcacattacgctcctcttaccctcctctgcacctccctctctctctcctctctactgcctttgtttttgctcgcaagaaaaacccgaaaaagaccttgcgcaaatccgtcgtcctgtccaccgacgaagcttctgagtcctcctcgccgcgcgcctctacgcgtgatatcggtcatcgttgatatgagggcggcagtgggaaaaagctgaaaaaaaagaaggctagcgagttggagaaaggtctttttccctgactggtgatgtggaggtcgttctcttcaattcaaatggttcccccccgcagagcaagatgaggaaatgttcaaaatactcttaagccgtgtagcacgacaagtttgttgcagaggacaagcgacgactgggttttcttggcactttgtcaagtccgtgagtagaagtttggtgtaagcttgtcttcgtacaagatgatgcagagaccaccgctccgtccggaggagtactccttgaaggaaaccacacctcaccttggtggtgcagctgctggtgacaagcttacaaccacctatgacctggttgagcagatgcagtacctttatgtaagagtggtaaaagcaaaggaacttccgaactaggacatcactgggagttgtgatccttatgttgaggtgaaactaggaaattataagggccagactgggcatttcgagaagaagaacaacccggagtggaatcaggtctttgcctttgcaaaggagcgcatccagtcatcagttgtggagattctggtcaaggacaaggatcttgtcaaggatgacttcattggacgtgntatatttgatttgaatgaggtcccaaagagagtgccacctngatagccattggctccacnatggtatcggttggaagaccgcatgggcacagggtgaagggggagttgatgctggct

SEQ ID NO: 106343 - DNA, 830 bp, Zea mays
  Clone ID: MRT4577_28487C.1
cctcgaggccggccgggtgaagaatcacgtggttgaagaaaagcctactgaaaatgagtaatacatcatcttcgtcaagtggtgagcgtgtaggtgagtgatgcagcgacagagggccaagatcaatgtcgtcctggcccatagctcctgccaccttcctcctacccctccgatcttccccaactgccccactcccccacgacccagcgcgcaagcaagctacgcctacaaaagaagcatctgctctttacgctgctcagtctcatctcgtgcaaggcgaaagatttctcattccgatgtggtggcccaatcccttctacgtgattacaaagggcagcttcatttcatccctagactgttgtcgtcccaatttcttgccccaccattcatcttagtttcttgctcgtttcagtcctttttctatgtgacacaccctatggtccattcaccattgcgttgtgcaggattacttcagtagattttggttcaatagaatttgcgtgtcttagtatattttgcttctataatgatctataaagttgggacccatcctctcaattctacttaatgtgctattcatgacttttcagattcttaggtcggtgccagttcgttcaatgctcatacctcactactggcaagggataagagttgggtgaagagcttggaaagactcagccactcagatggcaaagacagaatagaagatgggaacaggtcgatggtacaaaggtttagatctcaactgacccatcagattgatgccttgcataaaaccgtatcaggttctattgcagttctatcatgcaacagaaggaccaccttaatga

SEQ ID NO: 106344 - DNA, 489 bp, Zea mays
  Clone ID: MRT4577_28488C.1
gtggtgagaatgagaagattgcgagaagagtttttgttttgttttatttaatttttggattttgcaccccccccccccccaaaaaaaaaaccgtattgtttcaaaaaaaaaaaaaaaaaaaaaaaaaaaaaaaaaaaataaatataaaaaaagaaaaaaaaaaaaaaaaaaaaataataaaaaaaaaacaaaaaaaaaaaaatcagggggcggccctttaaaagatccaaattttaacacccgggctttgaaaattaaaattttttttttggggcccctaaattaaattcaacggcccgggttttaaaacgcggtgaattgaaaaaccccggggttccccaaattaatccccttgtaaaaaattccccttttgcaaatttgggtaaaaacgaaaaagcccccaaccattcgcctttccaaaaattggccaaactaaattggaaattggaccccccctttattgggcaatttaaaggggggggtggtggg

SEQ ID NO: 106345 - DNA, 655 bp, Zea mays
  Clone ID: MRT4577_28489C.1
cgtgattacaaagggcagcttcatttcatccctagactgttgttatcccaatttcttgccccacccttcatcttagtttcttgctcgtttcagccctttttctatgtgacacaccctatagtccattcacctttgcgttgtgcaggattacttcagtagattttggttcaatagaatttgcgtgtcttagtatattttgcttctgtaatgatctataaagttgggactcatcctctcaattctacttaatgtgctattcatgacttttcagattcttaggtcggtgccagttcgttcaatgctcatacctcactactggcaagggataagagttgggtgaagagcttggaaagactcagccactcagctaagtgcagagttgggtgaaaggctcaagtatccttccagtatgagtcatgtggttttaaagtcttagaaaatgcagcagcagatgtttctttatcctccaaaatagatggcaaagacagaatagaagatgggaacaggtcgatggtacaaaggtttagatctcaactgacccatcagatggatgccttgcataaaaccgtatcaagttctgttgcagttctatcatgcaacagaaggaccaccttaatgaaatgaaacatgaaagtggttagagccgaaggtcttg

SEQ ID NO: 106346 - DNA, 1221 bp, Zea mays
  Clone ID: MRT4577_2848C.1
aactcacctctttgtgtttcatgatctaatgaatttcagtgaaaagtcgttgagatgtttccctggaatcatgctgttttctccttttttattctgtatattaggctgctcttgatgttttcactaaagaacccccagcagctgacaacaagttggtactgcacgggaatgttactgtcacacctcaccttggtgccagcacagtggaggcacaggaaggggtggctattgagatagctgaagctgtcattggagctctgaaaggggagcttgcagcttctgcagtgaacgcgccgatggttcctgctgaggtgctgtcagagcttgcaccttttgttgtgctcgcagaaaagcttgggcgcttggctgtgcaactagttgctggtggtggtggtatcaagtctgtgaaagtgacctatgcatctgcgcgggcccctgatgatcttgacacgagacttctccgtgcaatgatcaccaagggattgattgaaccaatctccagcgtttttgtcaatctggtaaatgccgacttcaccgcaaagcagaggggagttcgcatcacggaggagaggatcctgctggacggctcacctgaaacacctatcgactacattcaagttcagattgccaatgtcgagtccaaatttcccagtgcgatatctgagactggagaaatcactgtggagggcagagtgaaggatggtgttcctcatctaacaaaggttggagcattccaggtggatgtgagcttggaaggaagcctcatcctctgcaggcaggttgatcaaccgggtatgattgggtcagttggaagcgtcttgggtgaggagaacgttaatgtcagtttcatgagtgtcggaagaattgctcctcgcaagcatgctgtcatggcaattggtgttgatgaggaaccaagcaagggcacactgacgaagatcggggagattccagcgatcgaagagtttgttttcctcaagctctaggcgcgaatgtatgtttgaagttgcaagcatggtgtgcaattttgatgtagctagcaatccggaggacggatggttctccttgaaataagcttttaggagtatttttgtagtggcgctcttgaatatggtctggtatcgatgcctacttttgaacggggtgtttattaataaaaacttatatatcaatgcttggctcattggttgattcaaaaaaaaaaaaaaaaaagcggacgcgtgg

SEQ ID NO: 106347 - DNA, 630 bp, Zea mays
  unsure (1)..(630): unsure at all n locations
  Clone ID: MRT4577_28490C.1
canaaatcttatgcctattttgctttatttttttatttatgcccgtgccgtggtactttatttttatttatatccgtggtacttgttactcaattggcacttaaaattggtgatatttttcttattttctaggtcgtcgaagtttcaacttcctcgtcagcaacagcaaagaacatagccgaggctttcacgttagtagctatcacctttcctaattcattgatttattacttgacttgatccatttgttacaatgtcatggtatcaatgctttttttttttaaaaaaactcggtcgggagtgaaaagaccacctccatgatatgctttctcctaccgtgtgaggcacacatatatgttagatttttacttgtgttttaagccgtcttagtctctacactaggatcggtctcatcctgaaattcgttcccactaagattttgaactcaggacctgagaaggactagttaaactacctaaccaatttagcttagccaaaaaccttttcacggcttaatgtttttaaatcatctaatcgaccatagtctacatggcatcgataaagttattggttatgattagtcatcattaagctcattttttgcttgctttatgtttgttcgggcacatg

SEQ ID NO: 106348 - DNA, 797 bp, Zea mays
  Clone ID: MRT4577_28491C.1
gggtacctcgaggccggccgggggagcttatcgcttatgatccgcgcctctacatttcttgtctctctggtcctccgtctccgcctgatgccatccaagacagggatcgccatggcggactcgtgaggagcaccacttcgaatcgagggtcgacgctgaggatgtcctagcacctacccgtagcatgctgggaccgtccggaagaacggcttcatcgtcgtcaagaatcgtccctgcaagggtgtggaggtttctacctccaagactggtaaggatgggcgcgcccaatgccactttgtcgccatagacatattctatgatcaagaagcttgaagatagtgttccttcatcacacaactgtggcattccgcatgggtaccgtactgagtatcaactgattgatatttctgaggatggatttgtgatgcttcttacttcatatggtgacactaaggatgatcgtagactcccatctgtatgacactcttgctgcccagatgaaggaaggtttcgagagcgccaaggatcttgttgtgactgaccagtctgcgatgattgaggagcagatctgcgcgctgagagatgtctgaccctagtaagttccttggctttggagaagcaacgctactctatctcaacttaaatcgtgctagctgtgtatcaccaaaggattgctaccgcgacattcacctggcttgagctgccttttgctatagcgagcaaggcgctgctgggagtcggacctacctgacttatcagtatctgtggttacattctggaccctgcattttctatgc

SEQ ID NO: 106349 - DNA, 1386 bp, Zea mays
  Clone ID: MRT4577_28492C.1
cattgggtacctcgaggccggccgggatcgagttccgcagcgatccgcgcctttttattggcgattgggcacgccgggccgggccgggaggaagggaggccgaactgagcagttcgaccaggcagccatccacctccaaccccccttcgcctgcgcaaatcgttaccatcccagcgagaaagatggcgcgcgtctccaatgccaagaagcggcagggcgccaagcccgcctccgcgctcagcagcaccgacaccagcaccgccgcaaagaggaaggccgaggacgaccgccccgtgcgcgtctacgccgacggcatcttcgatctcttccacttcggccacgcccgcgccctcgagcaggccaagatgctgttccccaacacctatcttctcgtcggatgctgcaacgacgagctaacctaccgctacaagggcaagaccgtcatgacccaggaagagcgatacgaatccctgcggcactgcaagtgggttgatgaggtcattcctgatgcaccgtgggttctcacacaggagtttattgataagcatcagattgactatgttgctcatgatgcgctgccttatgctgatactagcggaacagcaaatgatgtctatgaatttgttaaaaagattggaaaattcaaggaaacaaaaaggacagacggggtttctacttcagatctcataatgaggatcttgaaggactataaccagtatgtcatgaggaatttagcacggggctactcgaggaaagatcttggtgtgagctatgtcaaggagaaacaattgcaagttaatatgaagatcaataaactgcgggagactgtgaaggcacatcaggaaaagttgcaaacagtggcaaagactgctggtttgaatcatgaagaatggcttgctaatgcggatcgctgggttgctggtttcctagagaagtttgagcaacactgccacaatatggaaactgcgatcaaggatcggatacaggagaggctagggaaacagttgagcaaaggaataatcgctggtcttgtgcaggaaccggtgacagcctaaaacaggtgatgctgtcaatgaaacgcactgatgcttttcagatcatcctcccgatgtggttctggtgcgaggcttgtaagggtgcaacgcggttgctgagacgttttaattttgtggtgcatgtgaactcttcccgtatacaaatgtctataggagaggcgtttggtgttttgggcatcgtcgtgggcgtgtttctttgtatctaacgggttagattaaccttttttttgtatcgagattgatgttctttcgtggttataataataataaataataataatattgtcaaagcacaatggtgataacattctaaaaaaaaaaaaaaaaaaaa

SEQ ID NO: 106350 - DNA, 2226 bp, Zea mays
  Clone ID: MRT4577_28493C.1
ccgggacgcaagcaagcagcgactccgtccgcgcacggcaccttcccctcccccgcacggccgcacacaccagacaccaccaccactcgcaagtctcttcgccgtctcgccgagttattagaaggcggggaaaaaaatcaactcgaacgggcgggtggcaaccaaccaccaagcggcgagggcgatggcggcgtccccgccgcggaagcggctccctgctgcgcgcctcatcttcgccctccttctcctgatgtcctccgtgctgccgagggacgccggggcggtggaactggggctgaagctgcccttcagtccgggggacgtgctccccgtcctgccgcggcaggtggcgtggcccgtcatgaacacgctccacagcgccgtcgacctactgccgtccttcgtcgccgccgtggcgcccgggtcgccggcgccggcggcctggaaaggcgcgtgcttctcggagaacgaggccgctatcgagctcacgcccggggaccgcaacgggaccgacgtcggcggtgccgtactgcgcctcaagactgcttcagctcatagttgggcgtgcatggatctctacgtttttgcaacaccatataggataacatgggactattattttgctgctcgggagcacactttggagattaaatcatgggaggaagaagcggaattgaaatatgtgaaggagcatggcatttctatttttctcatgccatctggaatgctcggaactttgctatctttgattgatgtcctgcctttgttttcaaacactgcctggggccaacattccaacctagcctttttagagaagcatatgggagcctcatttgagaaacgaacccaaccttgggttgctaacattagaaaggaggatatacaatctggtgactttttggctttatcaaagattcgaggacgatggggtgggtttgagacattagagaaatgggtgactggtgcatttgctgggcatacctcggtttgcttaaaagacgagaagggtgatctttgggttgcagagtcaggctatgaaaacgagaagggagaagaaatcattgctatagttccttgggatgaatggtgggccatggctctcaaggatgaatcaaatcctcagatagccctgcttcctttgcaccctgatgtgcgtgccagattcaacgaaagtgctgcatgggaatatgcccggagcatggttggaaatccttatggctaccataacatgatatttagctggatcgatacaattggagataattatccacctcctcttgatgctaacctggtaatggcagttatgtcaatgtggactagattgcagccagtttatgctgcaaacatgtggaatgaagctctaaacaaacgacttggcactgaggatttggaccttcaggggatcattatggagattgaaagacgtggaatgtcttttgatcagttgctcaccatacccgagcaagacgaatgggtgtacagtgatggtaaatcaactacttgtgtcgccttcattcttgcaatgtacaaggaggctggaatattcacccctttctcggagtcgatccaggtcaccgagttcactattcgtgacgcatacatgctcaagatatttgaagacaacccggcaaggcttccaggttggtgcaacgcagacacggacaagcttcccttttgccagattctcggagagtacagaatggagttaccagagtacaacacgattgaaccttatgcgaaaatgaacgagaactgtccgtccttgcccccaacgtacaaacgacccgcacgctgctgactacgagattgtctactatgtatctttctgcagctgcttcgtttacacagtggcagtagagtgttgttgctatgttctgtaaataaaagacactatatatataggtgcttggtagatggtagttcttaccagtaatgtagctgcgatgtattcaggttcacggttttcagtcgatcagttctgaagccacggcgtcggcgaccaatatgaaggttaggatttgtcagctccggaaagttgcttatatgtatcaatgtatgtatgtaggcaacattatggcttggtcataaattgtgaactccgtcaagaaataaatctataatgcaacgtcaggtgattctgataaaaaaaaaaaaaaaaaaaaaaaaaaaaaaaaaaaaaaaaaaaaaaaaaaaaaaaaaaaaaactcgagaaagggccgcggtacc

SEQ ID NO: 106351 - DNA, 196 bp, Zea mays
  Clone ID: MRT4577_28494C.1
cagtctagggttcagggttctggagatgggaatctaatatctcaatgagatttatgatggtgggtatctgcacatcctgtctaatcctttgtcgagtcttcctggtgttcaagattaattgtacctggaaaaaggtgtaccatcctcactctacattaatctgacaacgcggtaataatgtaatccgataatggtc

SEQ ID NO: 106352 - DNA, 420 bp, Zea mays
  Clone ID: MRT4577_28495C.1
gcttagctctaggtatggcgtagctggctagttatgtcagggtaggtggaagctcactgcccccagtcagccaagcgtcggcgctcggcagggagaggcagcttcccatcaggcctaccgcggagctacgggggactggaccgaagacggacaggcggacgacgacctactcgctcgagcttcaatgccgctaggcgcgtccgccatcgccctttggggaccagtctcacgccaggccgccgcgctcaactacgggataacggctgatgatgatgccggcatggcggccctcgtccccgcctcctccttccaccatcagagggtcgctgctgctgccgtcgcggtggacgccgccgaccaagggcccgcccgcctcaccggggcggagcgcggtctcgccgacccctggcctcccaagtc

SEQ ID NO: 106353 - DNA, 353 bp, Zea mays
  Clone ID: MRT4577_28496C.1
agggggcaggaccaactgcaaccccttaaataatattatcaattgaaatttctctcaggaaaaacaaagttctgcactgggggacacttttttttttttacaaaaacagcccggggattccctaggagaaggagcaccccggaagcgcctttttaagagtttccaccgccccccaagggtggggtttttgaacatctgtgccctgtccctgtcctccgggggcttgaacttgaagcacgggtcccacgatgggaagaaccccaaacaaattattcacgtcgatgctaaaatgcccagatcgcaatggttttttttatgggcctggtatcgatgtaggcggcccaaaagcgagc

SEQ ID NO: 106354 - DNA, 887 bp, Zea mays
  Clone ID: MRT4577_28497C.1
gcacgagacttttgtccgcgtttttgtttgtttcattacatccacgaacaagggcagaagggggcgaccggccggttggtgccattggcatgcatgtctcctcgccgcttctgacgcgtgcgtagccagcgttcaggtgccgtgctgatccgccgacgatgccgggcaaccaccaggagggccaagggccgccgggcgccagcgtgtgcttgtggctggtgacggtgctgctcctcctctccctgctcggcggcggcgcgtgcctcgcggcctacatcctgctgccgccgcacgaggcgccggcctggctcgccgccgtcggcctggcgctcgtcgcgcttccgtgggcgttttggatcgtcacgtgcgcgtaccggtgcgccaaggtgcgggccaacgagagcagaacgatggccgtggcgccggcctctggcagcatgtgctcccgctccggctcatgagcaatcactgcaagacgccttggcgtgcagaccaaatttcagtattttaggattgctgaagacgcagaacgacatgaggaactgaaggaattaaatctgttcgtagctcaatctacatattgatgtcgagtggaggatgccaaaactctggtgctacaatgccctgttttccaaagtagcgaatgtatatattttcctgatgagatcctagccaacatttctttccctgtacagttcttgtcaatgttttaagagtttgaagttgagccgaacgtcttgactcttgagtgggaaggagattgtgttcagaaaactgtacaaataccttttagcttgctgggttgcaaactgttgcagttggaaggccttgatttttaaactatccgaagcagtatcatttaccggacccttgtgccggtgcccggg

SEQ ID NO: 106355 - DNA, 169 bp, Zea mays
  Clone ID: MRT4577_28498C.1
ctggatcaacctcacgagcttccatggagggaagcggaccagcagtctttttggagtactgtacacccatcgataatgtttgtccctggttgaagaccagacgtggaatctcaaccagaagggtttccttacaatcaacagccaacctgctgtgaacggagagaaaacc

SEQ ID NO: 106356 - DNA, 208 bp, Zea mays
  Clone ID: MRT4577_28499C.1
acgcgtatggatggacttgctggagaccgttcggaccatcaagaacctgaggtcgtactcggtcaggatcagggccttggaggtcgagtaatgcctgtagaaagtcggtgaggacgccctaacctagaagatgacgacagccatcgcggagcttaccacagacattggtaacaaggtgctacatggaccgatgcagcacctgaggtgc

SEQ ID NO: 106357 - DNA, 392 bp, Zea mays
  Clone ID: MRT4577_2849C.1
ctcggagttctcgtgcttagggccgccgcggccggcacactggtcttgttcctcgaggccgatgacggagttggagtcggcggtgcggagcgcgcttgccgatggcgggggccccgcctgcggatgcggaggaggaggaagggaagattagcttgctcctgggccccaggatgtgttcttcgagcggtcgcaggacgagcgcggtggaccatcctgtgaagcaccgagcccaggcagacgaccacccccttgacgggggaccagaacatgccggtccacttgtcccacggacggtgcctcactcaggacaacttctggtcttaagctcggggcactgttgcttggtcctgacgcgcgcagatctcgatctgcgcttactatgctcggacgac

SEQ ID NO: 106358 - DNA, 851 bp, Zea mays
  Clone ID: MRT4577_284C.1
ctaagcagagcatcgcagagaccggcgtcttcgtactcgcctctctctcgcgcttccgagctttggcctccgtcctcccctcctcccccgatctctccaccagcgcagcgtagcgccggcttccgccgctccgacccgccgccatgagggagtgcatctcgatccacatcggccaggccggtatccaggtcgggaacgcgtgctgggagctctactgcctcgagcatggcattcagcctgatggacagatgcccggtgacaagaccgttgggggaggtgatgatgctttcaacaccttcttcagtgagactggtgctgggaagcatgtcccccgcgcggtctttgttgatcttgagcccactgtgattgatgaggtgaggactggcacttaccgccagctcttccaccctgagcagcttatcagtggcaaggaggatgcagccaacaactttgcccgtggtcactacaccattggcaaggagattgttgacctatgccttgaccgtatcaggaagcttgcagacaactgcactggtctccaggggttccttgtcttcaacgctgttggaggtggaactggctctggccttggttctcttctccttgagcgtctctctgttgactatggaaagaagtccaagcttgggttcacagtgtacccatcccctcaggtctccacctctgttgttgagccatacaacagtgtcctgtccacccactctctccttgagcacacctgatgtggctgtcctcctttgacatgaggccatctatgacatctgccgccgctcccttgacattgagcgcccaacatacaccaacctcaataggctcgtttctcaggtcatctc

SEQ ID NO: 106359 - DNA, 209 bp, Zea mays
  unsure (1)..(209): unsure at all n locations
  Clone ID: MRT4577_28500C.1
ctctacctnnccccaattcccnttcgaccgactctttcagtatcattatataatattcctttcttgtagatattattattattatttcaaggggatcctagggattctttacaacttagaactacatactatttttccacaatactcaatatctacaatcaatccatattcctcactatcatcttgtaagaatgtgataattatataca

SEQ ID NO: 106360 - DNA, 474 bp, Zea mays
  unsure (1)..(474): unsure at all n locations
  Clone ID: MRT4577_28501C.1
ccggtgacaccgtcgcctctacttgagaagatctttgggcaagcccactgtgacacccatcttgggggaggacttgacacagaggncaccacttgtcagagttcagagaaacagaggattcactggcaccccaggctctcggagctgagaccgttggagaggcaagaggactctgtcttcactgcaacacgattgaattgactcctgatgagcatcactttactcacatcaccggccaggttgagagctcacatggcctgtcagagtgctgagcctgtgagaagtgctgaggatccagatggacagagcccgccatacttgacttgtgtgctcactggatccaagtgcacactgctcagactcttcacgcaggactggcagacatacccgagagctgcgcttgggctgtgcagctgctcctggcgggaggcatgagagggcagactgctttgtgactacccttgtcctggtctg

SEQ ID NO: 106361 - DNA, 270 bp, Zea mays
  Clone ID: MRT4577_28502C.1
gcaccaagtgctgattcataggttcacgttgtttcagatataggcttcaagatgaaaataatcatgttagctgtacctagtagctcgacataggttggcaatcgtgggcaaaaacataatatttgattttctctgtagttacaaagcgacttcagatctacacgagtcgtatacttttacatgcaatatttctgtctctctcaagcacatgaactccgattctttctgttctgcaggtagggatagatgactctttttttgcggtgtgag

SEQ ID NO: 106362 - DNA, 582 bp, Zea mays
  unsure (1)..(582): unsure at all n locations
  Clone ID: MRT4577_28503C.1
gtgattggcctgccagnaaaactgcacatgactccaatgtcctgcacattgccagacttccaaacaggcagttaatctcatgctcagaagatggcagtgtacgcatttgggagttaagagaaaaacagcagcttgcagctgagcctgtaccaacaggtttttttaacatgtggggatttggaagagtcagcaaacaagccagccaacctgttaaaaagcagcaagaaaatgctacttcatgttcactggagcttattggagatttgattggacactcatcatctgtggagatgtttctatactttgaagatcatggactagtgacgtgctccgctgatcatctcattattttgtggaaaaatggagagcgagaatctggattgcgcagtttaagattatttcaaaaattagaggagaatggtgacttataccttgctgtctagtttaaggaattaaaaatacacatgcatgaaccttgaacatcaaatatcgggtactactctgaaaaccattaatatattgatcacttanattggtaattttttttgtcagtccataaaattctacatgtttaaaattttt

SEQ ID NO: 106363 - DNA, 370 bp, Zea mays
  Clone ID: MRT4577_28504C.1
agtcggccttctgcctggaagcccccgggccggcggctacttcatccctgctatggtgctcttccacaccgccattcactagaactgtatcacgggccagatctcacgtgtacctggattacctcggtggacggatcagtgaccggttgagcgaaatggacgatgtgccagatgacatcatatgtggaacgcatgcagaggctacctgcgaggatagccccagtgtgactcccacaacgcctaacttaggatgccagggtgcggaagagtatagaacgggcaatgaggacaactcaagtgagagcgcggcgataaacccgccggatgaagctggcggtgaggccacctcggccctggaaggcaggaagcc

SEQ ID NO: 106364 - DNA, 274 bp, Zea mays
  Clone ID: MRT4577_28505C.1
tcgcccagccaccacgagtacgcaagtaggcactatatggactaggcaactagttaaagcagtcataaccatgcgttcgctggcgacggaggacggagcagagatgcccgacaacaatgttgatgaggcggacccgcggcaagatcagtgttaggccgatgatgcatttggctgaggtcccacatactgccggctgttacggcgcccgcgtcatcaccgagctgaatcatgcaccccacctctgtgggcgagggcccaacgcgctcgacggcac

SEQ ID NO: 106365 - DNA, 286 bp, Zea mays
  unsure (1)..(286): unsure at all n locations
  Clone ID: MRT4577_28506C.1
cccacgcgtccgagattgccgtcgatgtcagtggcggcgttctcatcgtggtgcagctccgtgaccgcacgctcggtttgagcaatggtagcctcgcgttctgcctctgtcgtgtgggcaagggcagcgtcatgatcagccttggctgtgttcgctctcctgtgcagcgtgagcatcctcgcgctggaggtcagcagcaacaacattgatatccgatccgtnagggcgacggcgttggccttggggcaacaccggagatggcgcgctgggtgcagacggtaggaag

SEQ ID NO: 106366 - DNA, 422 bp, Zea mays
  Clone ID: MRT4577_28507C.1
accacgttagctgccataacagttgcatgattgacaaacacaccatgggacacccactgcgaactacctaacaccagtggctaccagacatattagcctctccttgcgctgcttgacctcgttcatggagcgcactgaatgcgctcattattgcacatggcatgacttgctcctagcgccattatgccacagtggactcccaccagctactgcagtgaggctgcgaacatgcatccgagcaagcctacaggctacaactagcgcttgcggcgagcgccttacaacaaccaattgcccaattgcaacaacaatccttggcacatctaaccctacaaaccattgcgacgcatgcacagcaacaacagatgctgccatcactgacccacctatccgaggtgaaccctgtcacctacttgcgacag

SEQ ID NO: 106367 - DNA, 218 bp, Zea mays
  Clone ID: MRT4577_28508C.1
aaaaaaacaatttggggttttaaaaagcaatccaatttggggacatttttttttaaaacaacccctttggggttcaattcacccgggacacctttggtttgggatataaaaatggtccatagatggcccccaacaggggtaactattttcgccgcccccctagcccttgttctccttaagcccttgagagaaataggggattgtcggattaggggccc

SEQ ID NO: 106368 - DNA, 730 bp, Zea mays
  Clone ID: MRT4577_28509C.1
cgggtgccagaactctgactgatgtgaaactgtgaatagcatgtagcttgagctcaatggggtgcatttatgagtttcataaagtcatttttaataggttttatcgtggaatctttctgctgacttactcaggatatcctttcatttagtttcagttgtcacttagtttccccttttggacaatgtagtttctcacctagcaatgctaagtattgaacatttactggttcggttttcgttctcccgcattggtggagatttttttgaattaacttcagttttcttagcggttttctgtattttggacaaagttggttttcttgttcagcaataccaaatattgaacgtctattagcttgtttttgctctcctgcaatgattgttacctcccagtgcaccatgctagtatttggtcagcttctctcatgaggaagctagagttttgtcattatataattcgttcctttcctctagatgtgttgttttcgtaatgcatgttaatgtcaatgttttcaccctgtatcctccattgtgtcttgacaatggattacatgcttacaattttactctcttacaatgcacgcgagagtaattcgcttgcaaggaaagttattcatgtgaatctttgtttttttctcctttttttcaaaaatagctggcaggacttctgccaggcaaatatattaatagagtagagaaaagtgccaaagtacaaacgaaaaaaagacgt

SEQ ID NO: 106369 - DNA, 1160 bp, Zea mays
  Clone ID: MRT4577_2850C.1
atcgccaccgtgactaccattaaaaccaatcggagctgtgaaccagcttcgactcgccccacctcaccgaacccagggaaaaacaaggcgtaatcatgtaggcacctacgtggcttcgaccgtctggcgtgcgccaaatcgctcgtcggggtaatcgctgtggcttcaagcaaggtgccgggcggggtcgctggggagtacgcgcgaagttttgccgcacaacaacctggaagcaagagtctcggcgtaattttaccgcggtgcgcctggcggtcgagccgggacgggtacggtcggcatctcaccgaactgggccttcatcgctaatcgagccgagcgacgggaattctggagaagaacaggtggttcaggaggagccgcctaacactgaggagttcgatctgatctaggtggcgtgtctcggtcgacattggcgccgacgatccttagttcgctttatctttattattttattttgtaataagacttccgctatgtaataagtactctaatgttttatgacatttatctctatacactctgttattatatatgttgtcttcttggcgcatgtatgagatgcacccggctttgtcctttaaaaccgggtgttacatacgtggagcaaccccctggcttcgaggatgaacggtaccccgaccaagtgtgtaagctctctaaggcgctctatggacttaagcaagccccaagagcatggtatgaatgccttagagactttttaattgctaatgctttcaaggttgggaaagctgatccaactttattcattaagacttgtgacggtgacttatttgtgtgccaaatttatgtcgatgacataatatttggttctactaaccaaaagtcttgtgaaaagtttagtagggtgatgactcagaaattcgagatgtcgatgatgggcgagttgaactacttccttgggttccaagtgaagcaactcaaggatggcaccttcatctcacaaatgaagtacacgcaagacttgctaaagcggtttgggatgaaggacgtcaagcccgcaaagactccaatgggaaccgacggacatgtctacctcaacaaaggaggtaagtccgttgatcaaaaggcataccggtctatgatagggtccccgcgtactctgcgttgttaccactgct

SEQ ID NO: 106370 - DNA, 570 bp, Zea mays
  unsure (1)..(570): unsure at all n locations
  Clone ID: MRT4577_28510C.1
tctctactgcggnaagtacaagggggggggggggggggggctcctcccccctgtcgtgatcgtatcctcgtccgttgctgatcttcgttgctgatctgcttgtgatgcctttaggtctcgtgtatcgtagatctgtttagttgtttcgttgttggtgcgctcagatctcgctgtgattgatgggtatgctaaggctaacggctatatggacgggagaacactctttgtagactgtactgtccacagatcggagtttgaaatggaatgtgtggacagaaatctggtggcctagcctaacgattcgtataggtctgagagactcgttcggttgtaggatttgtggattttttttagatccgtacaggattgtgctgtcgtgtgcccgccaggggcttggtggttgccaaaaggtgatgcctctgatcggtttggatatgggatttgcttactttttgcttcgattttatacatacatatagtggtatgcatctgctcgtcctgtttccagttgatgaaacatattctcctgctagcaagttttatacaaaaatagagggactagtttttata

SEQ ID NO: 106371 - DNA, 447 bp, Zea mays
  Clone ID: MRT4577_28511C.1
atcagcgctctttttactgtggtcaggctcagagctgctctactagttatcagatccagggctcatgtgatatcatactctcctgctacaacgcgtgggagagactactctggctctcccacgagacacgaagcctatcggtcatctcctgccaatcgactgccacaggaacatgaagagcatataaagcggaggtcctactctcctgccaggagatatgatgctgacaatggctatgagaagaggtctcccacaacagacagggaccgatctactatgcaccgcatgtaccccataagatactgacgcttacctcctggatcccgctccaggtccgccgacgattcttctgttgccagggactgatcgaccgatggatgggtacaatatgaatggtatgcgcatgaccagcatggtcatgcggtcaataggcctatgtctttgtca

SEQ ID NO: 106372 - DNA, 893 bp, Zea mays
  Clone ID: MRT4577_28512C.1
agtaattttgttcttcaatccatctatcatcattaacaacatccgcgttgagccggcaggccgtgtgcccgtccgacgaccgggtcccgacaggagagtttaagcaggcagggcagggccgccgtggacgcgggaccgaagcagggccaccgccgctgcaccatgacgcgtctgctgctgtcgtgcctggctctgctgctggcgcgggcggccgtggcgcgggagtacgcggccgtcttcagcttcggcgactccctgtcggacaccggcaacctgtgcgtggacggcatcccggactacttggccacggcgcacgcgccgtacggcatgacctacttcggctatcccacggggcgcgtctccgacggccgcgtcgtcatcgacttcatcgcgcaggagctggggctgccgctgctgccaccgtccaaggcgaagaacgcgacgttccgccgcggcgccaacttcgccatcacgggcgccacggcgctggacatggccttcttcgaggagcacgggctggcgcgcgccgtgtggagctccggctcgctccacacccagatcgggtggttccgggacatgaagcccaacatctgcagctccccgcaagagtgccgtgagctgttccggcggtcgctgttcgtggtgggcgagttcgggggcaacgactacgggtcgaccatcttctcgttccggccgctggaggaggtgcacgcgctggtgccgcacgtggtggacgccatcgcgcggggcgtggaggagctgatcgcggagggggccggggacctgggtggtgccggggctgctccccaccggctgcttccccatgttcctgtccaccttcgtcggcagccggccgcggcgacggggcccgcagcgggtgcaacagggactca

SEQ ID NO: 106373 - DNA, 292 bp, Zea mays
  Clone ID: MRT4577_28513C.1
agcatgctagttctctatgtggatgggatctgaattccaattgaacctaccgttacgtttacaccttgtgtgactgaaaaaaccttggctttgcccaacttactcttcttgcatcctattggcactgttgtcagctggcctaatagcatacgaggccaccaccgatcactcttgccaccatatgagcaatcggaatggtaaaatgtgatgctccctgtaacgatccattaaatgcctcagatgggtattttgctcgcagcgtgaacggcttcatttgagagtgctgtatctc

SEQ ID NO: 106374 - DNA, 408 bp, Zea mays
  Clone ID: MRT4577_28514C.1
gaagtgagttcattcagatagactaggatcggtggtgacaaccacctaggcacatcgactatgcaagagtacatggacgagtagaatgtgttgaccaagtcaagttgaggtgttggaagacttggtgattaggctatcaaggactagtagtagcatgtgtagagaaaatggaaggagcatatcagatatgctactcacaagggggtttagtggtttaggattcaaacccactacgcaaaaggtgaagttctattgagaactagaggcaacacacggtgtcatcacaaagcttctgttgatgtgaagagcttataactgtcaaatctacatattttgagttcgaccataatacctttagggttaagtggtttggctttaattatctaggggcacagtggaaatgtgtag

SEQ ID NO: 106375 - DNA, 230 bp, Zea mays
  Clone ID: MRT4577_28515C.1
cactccagccgcttcgcaacgccgtctgtcgcctctccgaccgccgcgagaattccgttcataaggttcgctagaaatacaggcgcgtggcactgggtcaactatcggaaaagactatctgcgcctcgtcgtcatcgacgatgtgagtcgatcagcacctggcacttgtagacgcacctgatatgagtcaggtgcagattaacatcaaacagctctgactcactgacatc

SEQ ID NO: 106376 - DNA, 300 bp, Zea mays
  Clone ID: MRT4577_28516C.1
cacatgtgcttcagacaggaaatttattgctctcatctaaagggattggatggacagtatggaaaaaacggtggtttattcttacaaggacatcattagtgttcttcaggagcgatcctgtaagatgaaaagctatcgttccttatatacagttccttttctttaactaattattctaatactattttgtagaaaatgtactttgtgtctctttgcttcagttacaatgctctgaataatttaacttgctgtttggactagaataatttttattgtaataaaacacactctgaggtgaag

SEQ ID NO: 106377 - DNA, 347 bp, Zea mays
  Clone ID: MRT4577_28517C.1
ggggaagggcccaaactttgaaccggaaaattttggggcccctccatgatggtccaaaaaaagcctaggggggggggtggtggggatttaaaagggaaaaattgttttgcaaatacaacatttttgggacccccatcgggttggtccctcccagaggaacaaagaatcatgggccccctgctcaagggggtgaaaataaacaaccccccattccctgggacaaaaccctggtaaggagcaacagcttggtttttttttgacgggggaaaacccggtcaataaaaactgggacccggaggtttttaacatccaaaggaaaggggactgggaaaggccccatgggccct

SEQ ID NO: 106378 - DNA, 206 bp, Zea mays
  Clone ID: MRT4577_28518C.1
atgcgtacacacttataatgcatacaatccagatcgcagtttaaacccaccgacaccatgagggcgcggggggcaggttccctctcctggctcttgctgccagcgccaccatgaagcatacatgcggcggctgcgactgacagccaccgaccacgatccatctaccgtcgcccgtgcatctgcgacctccggttcacctggcacct

SEQ ID NO: 106379 - DNA, 392 bp, Zea mays
  Clone ID: MRT4577_28519C.1
caccaaccactagaactttgtctcgtcaccactagtgtcatcatcgctattctaaagcttgcatgaggcgttccatcctcacttgagcccctttgtcctcaacttaggcgcgacaagcttcatcaacgttaaggacaaccgaaatacatcatggtttgaactataccgatgtcttcttcctagaccacaatgtggtggaactgaccagattaatccaacttaaattcacgggtcccaccccatgggcgatgacacacttaaattagattaaactatcagtctgtcggatctagtccgattaaccaccttgcgagatgaaaaaaccatacctcatacgaagatgataccagtgaatacaacataccataagaaccataattaaaaatattagt

SEQ ID NO: 106380 - DNA, 412 bp, Zea mays
  Clone ID: MRT4577_2851C.1
cggggaaagacacacccaaatctgggaacctaaagagcggccgccctggcgccgtttaaaccaatttgagaaatagcgcgccgcgccgacaacggcgacgctgacgatgagctctcgagctaaacgataactaactgacggtatgataacgagtctcggtacaaaccgccgaaccgcgctcccaaatgaatacgtatatggaattaaacaatctaataactgctcagctggtgattttaaaaaggctgagatagttgccgttttggtcagagaatcggaggaggtatcttttacggtaggaaaaacagtatttcttttatacggcggatggtggtgacttatatagaaagcggaatttgtacttcccttaaaaattattacatactcctgcccgacccgagtgcgtcgactc

SEQ ID NO: 106381 - DNA, 601 bp, Zea mays
  Clone ID: MRT4577_28520C.1
gattccatatatcatacataactagtagatagacgaataatcacttatctcctctttctacttaatacctaataccagctagatcgttcagccctgtgataagggacaatcgccgctccttccaccacctggtagctgggcgggtcctgggacctgggatgctgcttgtggctgctggcgccgggacgccgtacgcggtcgtgagctgcgaccagctgacatctgacgtggccccgggcctcgtgcacccgatacgcaatgcgcagtcgccctccgcgctccgctgcatgctgcagcgctctgtgatcactcaacagtcgcccgtcgtcgaccgggaagccacatgccactggctacagactatgaaggatcacctccccggtcgcgtcagcatggacaatggccaaaacatccacgataaccgcgacgtctccgtcctcctgcccattagccataccctcgactgtaccatgatccactgatcaatggaaccataaagcatatagctcgcacgtcggacgttagatgacatggccatcagccatatgcagtctgcatcgtaccacagatgacatatgtaccagggacgcgtgcatcatac

SEQ ID NO: 106382 - DNA, 464 bp, Zea mays
  Clone ID: MRT4577_28521C.1
ctcgagccgtggagcaactgtggctgcattctaacgacttcactgggcccatgccggacttctctaggtttgataatctatgggatttgcaacttcgcgacaacgagctcacagggccggtgcctgagagtcttttcaagttgaaggccctgaagaacgtgactctgacgaataatttgctgcaggggccgatgcctcagattcctaatcaacttcatgctgacatcaaagcagattcagagcggttttgtgtgcaggaagccgggaagccgtgcgatccccgtgtgagcctgctgcttgaggttgctgctgggttcatgtacccgaaggcacttgctacggattggaaggggaatgatccgtgtgtgtttccgggcgttagttgcatacaaggtaacattactgagctaattttcaccaataagggtctcagtggtagtatctcaccgtccatcgggaagatt

SEQ ID NO: 106383 - DNA, 409 bp, Zea mays
  Clone ID: MRT4577_28522C.1
cattgggacctcgagcggcgggcgcgtaaaagaaggtccagctccgcagcggagcggagaaaagaaggggatggggaaaacgcacagagagcagaaagggagacgcgagccacgagccttccttcgcatcaaggcggggcgagcgactccgccgccccacccgctccagtcataccatccaatcgcgagaccaagcatctgggagaacaagaacaagtccgggagcacatgccatagacggatcccgccctcaacatgcgacaaggagctcgatgcccaaatccgctccaggaacgaaaggtcccctgagggtttgccgtgaccgctgattggacacgagggactgacaggtaccgacggatgatgactgggttggaagaacatgcttaagaggtctcatgattctgac

SEQ ID NO: 106384 - DNA, 616 bp, Zea mays
  unsure (1)..(616): unsure at all n locations
  Clone ID: MRT4577_28523C.1
ggtgcacgtgcagcagnaggcgccccggaagcggaagcgcgccgagcaggggcagacgacgccgccggttcttgggaccggcgcggccgacgtggcggcgcagtttcaacagcagctcgtcgacgtcgaccgtctcgtcctccaacacaccgccaagatgtgggcggggctcaccgagcagcggcggcggcacgcccggcaggtcgtggccaccgtggaggccgccgcggcgccgcggctgcgcgcaaaggaggaggagatccagcggatgcggcgcgtcaactgggcgctcgaggagcgggtcaagagcatgtacgtcgaggcgcacatgtggcgtgacttggcgcagtccaacgacgccgcggtcaccgcgctccgcggcgagctgcagcaggcgctcgacgcccagcagacgcgccgccgcgccgacgacgccgactcgtgctgctgcggggagaacgacgtcttcatcaccggagcaggcgcggcggagaacgaagaggaggccgggacgtcgtcgtcgtcgggccacgtcagggcgtgcgccgtgtgcggcgacagcgcggccgacgtgctgctgctgccgtgccgccacctctgcgcgtgcgcgccgtgc

SEQ ID NO: 106385 - DNA, 1331 bp, Zea mays
  Clone ID: MRT4577_28524C.1
cgcctgaggtccggccgtaatttcgggtcgaccgcgcgcttcgcacaccaccaccttgggcgccgggcccttccatgctttccttcgctcgtcgacaagaacaagatatatagtgctagctgttctgtgctgcggtcgtcgtcttcttatataagacgccaacgacgcatgtcctcggagcctgccgaggccaggatatagaggcgtcgccgggccgggccactgcacggtcggcggatatggctgtcgaagcgcacagcctcctcttagcaggagggcacaagcaactcaccagcgcgggatggccttggacgaccggcgacgaagctagatgcgcgacggcgcgaccgagccaccagcaggctttccagctccagcaggcctcgtgtgtgggcgtgggcgtgggcctgccggcggcggctccggtctcgtcggccgcggcggcgccaccagcgccgatgatagcgcagcagtacgctgctggcggacggctgttcgtgggagacgcggcggagagcggcgtcacgttcggaggaggaggtgcggtgcacgtgcagcaggaggcgccccggaagcggaagcgcgccgagcaggggcagacgccgccgccggttcttgggaccggcgcggccgacgtggcggcgcagtttcaacagcagctcgtcgacgtcgaccgtctcgtcctccaacacgtaagtttacctttgatgagcccggcggtgccggccaatgcctcgatctgcgcctgcggggccggggttgtctagtacgtgcgtcgtcatcaacgattcaacgtgcactgactgtgactgatggagaggtggcgtgttaatttttgcggcggctttgaacaattgcagaccgccaagatgtgggcggggctcaccgagcagcggcggcggcacgcccggcaggtcgtggccaccgtggaggccgccgcggcgccgcggctgcgcgcaaaggaggaggagatccagcggatgcggcgcgtcaactgggcgctcgaggagcgggtcaagagcatgtacgtcgaggcgcacatgtggcgtgacttggcgcagtccaacgacgccgcggtcaccgcgctccgcggcgagctgcagcaggcgctcgacgcccagcagacgcgccgccgcgccgacgacgccgactcgtgctgctgcggggagaacgacgtcttcatcaccggagcaggcgcggcggagaacgaagaggaggccgggacgtcgtcgtcgtcgggccacgtcatcagggcgtgcgccgtgtgcggcgacaacgcggccgacgtgctgctgctgccgtgccgccacctctgcgcgtgcgcgccgtgc

SEQ ID NO: 106386 - DNA, 414 bp, Zea mays
  Clone ID: MRT4577_28525C.1
agtattcaatgcatgcgtggttttatagataatatagcagggataaccatgtctcaacaccaattgcactttcaaccaggataaacaaaactgcaatcttataaccaggcttactactctcaagacaggatcacagaagttcaaacatagcacaaattcgaagacaccaaagaccatataagagcacaccaagaacgctagggcttcagcgcagcctcctggcctccctctcggactcgagcagggtgaggatgtcaccctcgcgaaccgggcccttgacattcctcatgatgagacggttctggtcatccaagaacttcactctgacctgggtcacctgacccctggagccggtcctgcccatcaccttcaccacaacagcaagcttcacctgggtgtccatgctctctcgct

SEQ ID NO: 106387 - DNA, 577 bp, Zea mays
  Clone ID: MRT4577_28526C.1
cgcgaagaagcagactaaaaaatcgcttcgtctagcctgagcatgggttcttctgttgcaggaagctgacttggcagaccatggtgcaccaggacagaagacgcccgcctgtgcgcgcaacatgttttgggagaggcaggccatgcagaccaacccccaggccaaggacgacaaggactacaaggatctggcggcgcagccgctctatgcagcccaggaagctcaagaacttgacctatccaccactccgtcctggtggaggttgcccacaccttgctgttcctctacatgttcatacctcaccgtcatggaccactccaagcccactctgcaagagcgccaccgtcggcatgcatggcatcgactgctccttcagcggcatgatcttccgcctcgtctactgcaccgtcggcatcttcggcgtgcacatcaacccggcggcgaccttcgggctgatcctggcgaggaagttgtgcctcaccatggacggggttttacatcatcatgcactgcctgggcgccatctgcggcgcgggcgtcgtcaaggtgttccagcaggggctgtacatgggcaacg

SEQ ID NO: 106388 - DNA, 451 bp, Zea mays
  Clone ID: MRT4577_28527C.1
gtccgagcgctgcaagatcaagaagtggaatgtcgtctctctctgggcatggcatatcgtccgcgacagctgcgccatatgccgcaaccacatcatgcctctatgcatcgagtgccaggcgaaccaacctagcgcgaccagcgaggagcgcactgtcgcttgggagtgtctgtaatcatgcttttcacttccactgcatcaccaggcggcttaagactcgccaagtgtgcccattagataacaccgactgggagttccagaaatatggccactacatcctgggcaccgtcatgtaatgttagggctttgctgcaactcaagacatgcttttgtctgacaaacagttccatctcttactgctttccatgcttgcatctatcactcgtcaatcataactagctagcactacgcccacctgacattgtacttggatgattcattgagaggaatt

SEQ ID NO: 106389 - DNA, 1026 bp, Zea mays
  unsure (1)..(1026): unsure at all n locations
  Clone ID: MRT4577_28528C.1
aaaaacaaaaaaaaaaaaaaaaaaaaaaaaaaaaaaaaaaaaaagtgttctgtcctagcgccgccgccgccccagctcgccttgcgtgactgagagctcgtcggcttccgtccacgcgtgaagcgagagcatggacacccaggtgaagcttgctgttgtggtgaaggtgatgggcaggaccggctccaggggtcaggtgacccaggtcagagtgaagtttttggatgaccagaaccggctcatcatgaggaatgtcaaggggcccgttcgcgagggtgacatcctcaccctgctcgagtccgagagggaggccaggaggctgcgctgaagccctagcgttcttggtgggctcttgtatggtctttggtgtcttggaatttgtgctatgtttgaacttctgtgaccctgttttaagagtagtaagcctggttataagattgcagttttgtttaaaaaaaaaaaaaaaaaaaaaaaacttnggggggggccccggcccccatttccccttttatggaccttttttgaccgggggtggggtggcgggtccctggctgtgcgcttgttgcggggtggggtaggccaggggtctgggccgtcgcccacattgaggatcggctggctacatttaggggaggtagtgtgaacaattttgtcgatcctggttagctttgcctgtttgccgtcccgcgtactgcgtgtgctttattgcgtttgggtcgcgcatttgcgcacgggctcgtattcgtattgactgagggagtcccgtctatgcttttacgcgacgatagtgatagggtcgactgcggtccaccactgttggtttgttcttgggcctgcagacgtaggtatatgcgtccggctgctctgatgaggggtttttgttctgccgtcgccccttttatccgtgcgtcgctcttgttttatttcctatattcgttgtgatgtccctcgtcgccgcctcgtcttttgtttttttgcctttctcccgccccgcctgtctctctccaccgtctgtatccagtttaa

SEQ ID NO: 106390 - DNA, 572 bp, Zea mays
  Clone ID: MRT4577_28529C.1
cattgggtacctcgaggccgggccgggatccgagtgttgtgtcctagcgccgccgccgccccaactcgccttgcgtgactgaaagctcgtcggcttccgtccacgcgagaagcgagagcatggacacccaggtgaagcttgctgttgtggtgaaggtgatgggcaggaccggctccaggggtcaggtgacccaggtcagagttaagttcttggatgaccagaaccggctcatcatgaggaatgtcaaggggcccgtccgcgagggtgacatcctcaccctgctcgagtccgagagggaggccaggaggctgcgctgaagccctagcgttcttggtgggctcttgtttggtctttggtgtcttcgaatttgtgctatgtttgaacttctgtgaccctgtcttgagagtagtaagcctggtgataagattgcagttttgtttatcctggttgaaaatggaattggtgttgagacatggttatccttgctatattatctataaaacgacgcatgcattgaatactaaaaaaaaaaaaaaaaaagaaaaaaaaaaaaaaaaaaggcccctagggcc

SEQ ID NO: 106391 - DNA, 4608 bp, Zea mays
  Clone ID: MRT4577_2852C.1
atggatcttaagggaaaagggatggtggtcaacgacaagacaaaagagtccatcgtcaacgagccaagagatgataagccctcggactctggctcgagtcataagaaaagagacgggaagaagaagaggcgcatcaagaagattgtctactacgacagcgacgagtcttcttcttccccaagtgacgacgacgacaagaaaaagaaaccggttaactcgaacttttcttttgattattctcgtattccgtttaactcaaatgctcatttactttcaattccacttgggaaacctctgcactttgatggagaagactactcattttggagtcacaaaatgcgtagtcacctattctctctccatccaacatccttgtgcagggatgagtaccacaaggtgagcggcttggataacgccaagcaaatttgggacaccctcaagatttctcatgaggggaacgacgccaccatgatcaccaagatggagttggtggaaggcgaactgggaaggtttgcaatgatcaggggagaggagccaacacaaacatacaacaggctcaagacccttgtcaacaaaatcaggagctatggaagcacgagatggatggaccacaacgtcgtccgacttatgctcaggtccttcactgttcttgatcctcatcttgtgaactcaattcgtgagaatcctaggtacacaaagatgacgcccgaagaaatactcggaaagtttgtaagcgggtgtatgatgatcaaggaagcaagatatgttgatgaggcattgaatggcccaatgcccatctacgagcctcaaatcgttgctctcaaagcaacaagcagcagggaggtgctacctagcaaggtggcacaagttgaggcggccggactaaacgaggatgagatggccctaatcataaagcgcttcaagaccgcattgaagggacgcaaggagtactcaaacaagaacaaggcaaaggaaaagcgctcctgcttcaagtgcggtaagactggtcgttttatagcaaattgtctcgataactctagtgaccaggaacaaggaaagggtgggaagaaagagaagcaaaagagctataggaaggcaaagggcgaggcacacatcggaaaggaatgggactcgaactgctcatcttctgattctgacgacgaaggactcgctgctcggccttcaacaagtcctttctcttccccaacgaacgccacacctgcctcatggcaaaggagaaaaagtgatgatgaagtagactatactgaattatttaagggcttagatagatcaaaagtagataaaattaatgaattgattgatgccttaaatgagaaagatagacttctagagaggcaagaagacattctgtatgaggaacatgacaagtttgttagtgttcaaaagtctcttgccttagaactaaagagaaatgaattactatcttctgagttatctacttgtaatgaaactgtggctagcttgaagagtattaatgatgatttaaatgccaagctagaagtagttaacaaatctagttcttgtgtagaaaagattgtaatttgcaatagatgcaaggattttaatgttgatgcttgtgatgaacatttaatttccatttctaaattaaatgatgaagtggcaagtcttaatgctcaacttaagacgtgcaaaagtgattttgataaattaaaatttgctagggatggctacactgttggtagacacctcttaattaaggatgggcttggctttaagaaggaagccaagaacttaacaagccaaagggctcccattttcaacaaggaaaaagggaaggcccctatggctagttgtattcaaaagaatcatgcgttcatttatcatagaaaagtttctaggaatactcattataataggagttatggtgcttatgattcacatgctatgattgcttcaagttctacttttgtgcatggtagaagtaggcctaggaagggaaatgttattcatcatgtgcctaataaaatgcctaatgaatctgctactgtttttcatgcctgcaacactgattttgtactttcatgtaaaaataagaaagtggttgctaggaagttgggagccaaatgcaagggagataagacttgcatttgggtcccaaaggatattgtaactaaccttgtaggacccaacaagagttgggtttatgcatccgggggctcaagctggattatcgacagtggatgcacaaaccacatgacgggggagaagaagatgttctcctcctacgtaaagagcaaagattcccaagattcgatcatctttggagatgggaaccaaggcaaggttaaagatgtgtctgcctttagaaggagtgatggttcactagcttttaagggtgtactagacgacaaactctatttagttaatttttcgaaggaagaggccgatctagatgcatgcttgattgctaagactagcatgggctggttgtggcatcaccgtttagcacatgttgggatgaagaaccttcaaaaacttctaaagggagaacacgtgttaggtctaacaaatgtatctttcgaaaaagatagaccttgtggagcttgtcaagtaggtaaacaggtgggaagtactcatcacaacaagaacgtgatgaccacggcaagacctctagagctacttcatatggacctcttcggacccgtcgcctaccttagcatcgggggaagtaagtatggtcttgttattgttgatgatttttcccgcttcacttgggtattccttttgcaggataaaacagaaacccaagggaccctaaagcgctttttaaggagagctcaaaatgaatttgagctcaaggtaaaaaagataaggagcgacaacgggtccgagttcaagaatcttcaagtggaggagtaccttgaggaggaaggaatcaagcatgagttctccgctccctacacaccacagcaaaacagtgtgaaaggtaggaattccaaattcactcccaaagctgtagaagggtttttgttaggttatgactcaaatacaaaggcgtatagagtcttcaacaaatcatcgggtttggttgaagtctctagcgacgttgtatttgatgaaactaatggttctccaagagagcaagttgatcttgatgatgtagatgaagatgatgttcccacggacgcaattcgcaccatggcgattggaaatcctttcaggatagaagaggccttgctagattcggactgggtgttggccatgcaggaagaactcaacaacttcaagcgaaatgaagtttggaccctggtgccatgtccaaagcaaaacgttgtgggaaccaagtgggtgttccgcaataagcaagacgagcacagagtggtgacaaggaacaaggctcgacttgtggcaaaaggttatgcccaactcgcaggtttggatttcgaggagacttttgctcctgtggctaggctagagtcaattcgcattctattagcctatgccactcaccattccttcaggttgttccaaatggatgtgaagagcgcttttctcccaaacgaagtacacacaagacttgctcaagcggggtctacctttgacttaattggatactcagactccgattatgctggatgcaaggttgataggaagagtacatcagggacgtgtcaattcctaggaaggtccctggtgtcttggagttcaaagaaacaaacttccgttgccatatccaccgctgaggccgagtatgttgccgcaggacagtgttgcgcgcaactactttggatgaggcaaaccctccgggactttggctacaatctgagcaaagtcccactcctatgtgataatgagagtgcaatccgcatggcggacaatcctgttgaacacaaccgcacaaagcacatagacatccggcatcactttttgagagaccaccagcaaaagggagatatcgaagtgttttatgttagcaccgagaaccagctagccgatatctttaccaagcctttagatgagaagaccttttgcaggttgcgtaaatcagagaaaagggaaaaaggaaaagacttggctggagcagccaagactcagcgcagtctggcacaccggactgtctggtggtgcaccagacagtgtccggaaaacagcgccgcctgcgctgctccgactgctgtgccacccgtcagggtgaggctgacagccgtcaagaccggcctcaggcgccataggaagctccgcctcgcccacccccagggttcggactccacctcgaccttggaagacggactccgcctcgcccgaccccagggctcggactcaacctcgactccggaaggcggtctccgcctcgcccgaccccagggctcggactccacctcgacctcggaagacagactccgcctcgcccgaccccagggctcggactcaacctcgactccggaaggcggtctccgcctcgcccgaccccagggctcggactcaacctcgaccctggacgacggtctccgcctcgcccgacccccaggcccggactcagcctcgacctcggaggagcctccgcctcgcccgaccttgggctcggatcgaccacgtcacaagggggcatcattaccctacccctag

SEQ ID NO: 106392 - DNA, 494 bp, Zea mays
  Clone ID: MRT4577_28530C.1
accctccgggtctgccggggatggcaaggttgctataaggaacataagaagagatgcaatcaaagcttacgataaactacagaaggaaaagaagctttctgaagacaatgtgaaagatttgtcagctgacctacaaaaagtcacggacgagtacatgaaaaagatcgattccatccagaagcagaaggaacaggaactgatgaaaatctagatcttcaacaagctgagctgactgtgtatgactggtgagtaataaccgcctctgtaaagcatgaacccccgcatatatgttgggggaatgtatctggtgctcatcagagggatatggtgctcacgtgtacatttaacagcagcatcaattttataaagaactgttccacctccttcccatggcgggggaggggttctttgtaaaattagtttctaccattggatacaaggtagatgtaacagatttaaagtttctaccattggatacaaggtagatgtaacag

SEQ ID NO: 106393 - DNA, 179 bp, Zea mays
  Clone ID: MRT4577_28531C.1
cggacgcttgggaactaaatccactcatgttctaggaaagagggacacaggagggatggagccccggtctccacgcctccacaaccatccttcccgatcccgaccagctttgaatatcctatggcggacggccgttgttgcaccttcgtggatacccttttccaaaatacccccccccc

SEQ ID NO: 106394 - DNA, 294 bp, Zea mays
  Clone ID: MRT4577_28532C.1
gtgatctttacaatgtacctgccacatgctgatcacatgctgaattctatcttcaaacggattgctggcctgtccactatccccataatgaggctctatgcatatctcatcactgttagatgagcataccatacttcaccaacaaagactcaattcaattgccgcactgacccatctacattaactggtgtctcacactggattacaataccatattctcttcatgcgtgagctacctctatagatgcgattaaaccatttcccattatagcatcatcattacatactatcaaa

SEQ ID NO: 106395 - DNA, 237 bp, Zea mays
  Clone ID: MRT4577_28533C.1
gctatccctctttggtggtaatgctacagagtgatgctgtgtcccctgtggggcattgtatcaggaggcacatgctactgatttgtcccattgctggccatgttaagtttgcacagtggttgaggtggtgcctaccaggtttctccactgtgaagcaattcttgactatgtaatctgtggaggactgtataaacatccttgccagaactcttgctacagcctcctcattggcctacc

SEQ ID NO: 106396 - DNA, 599 bp, Zea mays
  Clone ID: MRT4577_28534C.1
aaaccgtcaaaattacgaacctagcaacgggacaacttcaggctaccctagtagtggctcccactattgcccgcgccattgtctggatagggccagactgcctggcgatcggcggcattgatggccacattcggttgtggtatcccttcaccgagcaggcaccagtcctcgtaacggcccacaccgatattgtcaatagcctcagttgggatgccaactcgaacctcctggctagctccagtagcgacagcaccgtcaaactctgggatgtagagacgggcatctgtcatcgaatctggcgcgaggcggtgcccgttcggtgggctacctggagtcctgacgggcatactctggccatcagccgagaagatggcggcattgtcctctggaatccccacagcgatcaagccccgcgttacctcaacggtcatccggaaactgtttggagtttagactggaaccccgatggtgcctggctggctagcagttcccatgatgccacggtgcgattgtgggatgtggtgacgggacgctgtcggcgaattctacgcagtcaccagaactgggtctggtatgctcgctggcacccacaccaacca

SEQ ID NO: 106397 - DNA, 277 bp, Zea mays
  Clone ID: MRT4577_28535C.1
ggtgggggttttttttttttttattacccgaggagtttccctcttttacggggagaagcctaaaggccaagttggtgaggatggggcccaaaaagagcttctgttttttttcccccaaattgcctcgccgtaaaaccgccagaaaatttttttttttttttggccctttctcccgggggggggggggggaccttctttttttttggagcgcccgcgaaagccccctttatgcccgcgggccccggtgggtttccccgcggcccgttttttccggggt

SEQ ID NO: 106398 - DNA, 509 bp, Zea mays
  Clone ID: MRT4577_28536C.1
tttacttagtgcaaacatcctggaaaaatttagcgacttacacaagctcatctatggagggatttctctcaccttcattatcactactgctatcatcactagaggatggaatactcattttacctcttgccataaggcatttgtgtgatgaccgtgatgaacgtgatgaagaccggtggctgtgcatccttggggcttcttcttcgctagaagagtcatcccaagtcttcacacttgtgagcaccttgcctttgctcttcctctcaactttgccttcctctcaactttgccaacttcacttttgttttgtgaaacacttccaattcagtcagcccttcctctcaactttgtcaacttcacttttgttttgtagctttgtatctcacttctacttcttgatgtgttggactcttagcacgtataaagtgtcttaaatatgacttttttaatgtcttctatgggtcttataatgtcttctttaaggtgttgcatcctcagagcctcagtcc

SEQ ID NO: 106399 - DNA, 946 bp, Zea mays
  unsure (1)..(946): unsure at all n locations
  Clone ID: MRT4577_28537C.1
gggtacctcgaggccggccgggccgggagttcgtgtccgtggctctcgcctgccacccatgcagccatggcggccgcgctgctccgccgtgcgctccacctccgccgcgtgctcccctcgcccctcgcctccgcacagcgcctctcccccgccttctcggccactccgaccccgaagacctcccagcagaacgccgccatcaccacgatcgacctctcctccgacgagagtcgccgccgcctcctcaacaggttggtgtaccggagcaagcagcggggtttcctggagctcgacctggtgctgggcacctgggtcgaacagcacgtgcacgccatggacgagcccaacatccgcgcccttctacaagtgctcgacctcgaaaacccagatttgtggaaatggttgactagtcaggagcagccaccagaggatctgaattctaatccggtcacagataacctgatcaagcatgcttctcccgagacccgatcaacacctggccaaccttgggttagaggatgggatgacataaagaaaggcaaagatggacctagttatggaaatcagtgatacgttgcttgaaatggggatgacagatttacatcctaaataatacctttgcccccaccccaccacccggtctgtttgttttgtgttcgtgtagaataaagttaactgtgaccggcatgtgagaagtttgttaaatcgatatttgagaatcagcttgtaactacagatggcactcctgatgtgtccctggcagtttcaggtatcgtctgcaactggaaagatgttatacatagcattgtgttactgatggcaatccttgaagcatttggactgaaacttaaatattgaanatgtggacgacaaacatcatcatcagaaagttagaagtgtatttcttgttgcccttaatattaaatttaaatgatagtttgtgtag

SEQ ID NO: 106400 - DNA, 529 bp, Zea mays
  unsure (1)..(529): unsure at all n locations
  Clone ID: MRT4577_28538C.1
ggttttgttttttttttttttttttttttgttgtgggtttttttttttttttttttttttttttttttttttttttttttttttaaggggaaaaatggggtttttcggggcccccttcttttgccgggccctttaggttccccngcttgggggggggggcctggaaacctttagtgggggacaggcccccccctgtgagggggcctcccaaaattcccattttgggggggttcccaaggttattttaacagggtttttcacagcccagtttttttttcctcttgcaggggcttttttggggtttgcccggggaaattttgccccgccccccccttgttttgggtggcgtccctggggatctgttttggtccttggtggcccccccctcggggggggttcggaatgggctaaaattttgggtggggggggtcctcttgtgggggggggtcccccccggggggttttctggcccgggtcccccgccctccttttttgggagccctgcccgtgtctgggcctgttgtttttg

SEQ ID NO: 106401 - DNA, 273 bp, Zea mays
  Clone ID: MRT4577_28539C.1
ccggccgggaaacaagatcgcttcgacaaatgaactaccgaaggaaccaaagagcatgaggctactctcggggacaaacaccgatctatctcaaaggcgtactgtgacgctcaactacctgccttccgttgagcgaagtcaagataccctgtatactgattatggacaccaatagaagatcactgaagagaaggtagacgttctgcagatagggcacaatacaacactacaaggtaagcccgtatctttaaagatctccggttataatgttga

SEQ ID NO: 106402 - DNA, 869 bp, Zea mays
  Clone ID: MRT4577_2853C.1
ggccccccccggcccctccctttccccctcgatctctaacaaccatccgcgggcggtgcaatctgtttgtatccgtcgctcgctcccgacgaccgagaagagctagcgccgttgctcggcggaggccaggcgagaagaggccctgaaccacgcggcggaggcgcagcggaagcacctgccggccatcacgcggcacgcgctggaggagcaggagcggccggcggagtcccggggcgacctcaccatcctcctctaccagatcgtcctcggctgcaagttcgtcgcctccgccgtcaacaaggccggcctcgccaagctcatcggcctcgccggcgagaccaacgtccagggggaggagcagaagaagctggacgtgctctccaacgaggtctttgtcaaggcgctcgtcagcagcggccgcacctgtgtgctcgtgtctgaagagaacgaggcggccatcttcgtggacgcgcccctccgcggaaagtactgcgtgtgcttcgacccgttggacggctcctccaacaccgactgcggcgtctccatcggcacgatctttggaatctacatgatcaaagacaaggacaacgcgactctggaggacgtgctgcaacccgggacccacatgatcgccgctggctactgcatgtacgggagctcatgcacgcttgtgttgagcactgggaacggtgtaaatggcttcactcttgatccttccctgggagagttcatacttacccatcccaacataaagatacaaacaaagggaagatctactcggtgaacgaaaggaatgccagaaactgggacgcgcctacagcgaagtacgtagagagatgcaagtttccccaagacggctcatcaccaaa

SEQ ID NO: 106403 - DNA, 516 bp, Zea mays
  unsure (1)..(516): unsure at all n locations
  Clone ID: MRT4577_28540C.1
ggggaaggtgggcggctactggttcaaccagaaggccaacaaagagctcgacgacatgaactcgatctctagcagcatcggagatggagctaaatggatggtcaacaaaatcaaagggaagatgcagaaaccgctgccggagttcctcaaggagtacgacctcccagcaggcctgttcccgcaggacgcgacgaactacgagctgaacgaggacaccaagctcctgacggtgtacatcgcgtcgccgtgcgaggtgggctacaacgactcgtcggtgctgcgcttcgccaccaccgtgacggggtacctggagaaggggaggatgacccacgtcgagggcctcaagaccaagatcctcatctggaccaaggtgacggaggtacggaccgaggccaccaaggtgcacttcgccgccggcatgaacaagaccaggaaccgggacgcgtacgaggtcgtcagggacggcatcgncgtagacaagttctagcagaccttgtaattaggcgcgtaatataa

SEQ ID NO: 106404 - DNA, 321 bp, Zea mays
  Clone ID: MRT4577_28541C.1
atattgctgggtctgcgagctcacttgttggcggccgccctgtttgtttttttttttgggacaggagaaatggggtgagagaggttaggctcgttgttcgtctgggctgctgggccccgtcgtatttgtccgacctcccagaaaaagtcttgtggttgatcagcgccccccggggggtgcccaagaaggaccgcaagaagcaggagcagctcgcccgagcggccggtggcgcccccacggggagggcgccggtggacaaccctacaaacactctgggtcagaaagcctaggccatccggccactctgattaaagcgctggg

SEQ ID NO: 106405 - DNA, 320 bp, Zea mays
  Clone ID: MRT4577_28542C.1
ggaggacgacagaatctgcaggatttttgtgttcgtactgttcaagtctgcatccaaacaatggcaagcgccttttaactctctcccttacagctatcctctaggctacacaaaaccctgtaaaccagaattgggcctgcggacatggcttccccttcttgggcctgcttatgcgacttgggcttcattctcggaagagtggcacgccggctcaggagtagtggacgtaacattcgtcgcgacatcattgactcactggagagtccatgcctgttgtcatgctcatgccgccgtcttacaccataggcgcccctttgtgc

SEQ ID NO: 106406 - DNA, 635 bp, Zea mays
  Clone ID: MRT4577_28543C.1
acgtaagctcggaattcggctcgagctatgatttcgggaaaagcttataaagccgtcaaggataagtgcggctttaatgggacatacactgaagactgccaaaatgccatggacttagccacccaagaaaaaggaaatattgataattggaaagattcaccagagacaatgctgccatcaataaagaaactcatttcaagtggcacgagaatatggctgtacagtggtgatatggatgcagtgtgctcattcatttcaacacaatatgtgctggacaatcttgggcttcctatagaagcagcttggcgtccatggcgcgtcgacaatgaggttgctggctacgtcattgggtataaagggctggtcttcgtgacggtcagaggagctgggcacatggtgccatactaccagcctcgcagggcattggcattattctcgtcattcctcgaaggggagctccctccacgctgatcgattaagctagcagggtttgtgaatgccatttactcatttcccacagcctatggaatcatatgtttttactatacttgtagctggcctttattttttatataaatatataaaacaaaccaagcagggagctgacgattatattaataaaaaatgagattgag

SEQ ID NO: 106407 - DNA, 1131 bp, Zea mays
  Clone ID: MRT4577_28544C.1
tcctgaattcaggaccgtgatttcttcataactggtgagagctatgcaggtcactatataccagaacttgcaaatctgattctctctaagaatagagccaccaatgtaactagtatcaagcttaaaggtgttgcgattggaaatgcagacttggatgataatttgactctaagagcatcatatgactactattggatgcatgctatgatttcgggaaaagcttataaagccgtcaaggataagtgcggctttaatgggacatacactgaagactgccaaaatgccatggacttagccacccaagaaaaaggaaatattgatgactatgacatctatgcaccaatatgccaagatgcctcaaacccttctaaatcaagtgactcgttagtgtttggtgatccatgcacaaaccactacgtctcctcttacctaaatcgtcctgaggtccaaagggcactccatgcaaacacaacagggttaggctacccatggatggactgtagtcagcagatatttgataattggaaagattcaccagagacaatgctgccatcaatcaagaaactcatttcaagtggcacgagaatatggctgtacagtggtgatatggatgcagtgtgctcattcatttcaacacaatatgtgctggacaatcttgggcttcctatagaagcagcttggcgtccatggcgcgtcgacaatgaggttgctggctacgtcattgggtataaagggctggtcttcgtgacggtcagaggagctgggcacatggtgccatactaccagcctcgcagggcattggcattattctcgtcattcctcgaaggggagctccctccacgctgatcgattaagctagcagggctggagttttggtagagtcaatgcgaagacagttcttgagaggaggaggcatgtatgcagaagatcgaccacatccacacttggtagccaaatgctgttgcacaaaagtgaacctcccttttgggaacttcaaaaacatggcatgcaagtcggttgtctgcttccattccattcacatttaacttagaaatgatactttagcagacactgttgttagttctacgtttttttttcttcttcaatttggtcgaaaaaaagttgtgcctg

SEQ ID NO: 106408 - DNA, 268 bp, Zea mays
  unsure (1)..(268): unsure at all n locations
  Clone ID: MRT4577_28545C.1
acaggttacagtacagggcagtggagcaaagnatgtgtggttggtgctgatccttcgccgagctcatcgccgaccaccgccggctgcgtccgtgtgcggcgtcggcttgtgcctcgccgtgcttgtgctacgcggcttgntggcgacactacttgtggggcgcggtgttccgggtctttcgtacgagggactccccaggaggagcgactagggtgtgtgtggtgtagcaagccccgcctctcgttgtcccgcgcctctgtccgtggtt

SEQ ID NO: 106409 - DNA, 487 bp, Zea mays
  Clone ID: MRT4577_28546C.1
cggcttcatcatacaccggtacaggctagtgaccatctgccgctaggagcacctcgccaggaacgtgcgtacctccctccagtgtatccttcaacccgccatgaatttcttggtttcactcgctggatgatcgactgactgacacacgtactctcctgtctttaagtcaatccatgatcctatccacatcaagcgtggcaatcaatcatcaaatagtatttttctttggtcggttccatcaagcgtggcagtaatgttttgttcttgcaaattatagatgtaaattcagatcaagtatatgcatttgtagtttatatcacaaagcgtggcatttgtagtttatatcacaaaattatgttcttgcaaatcataagatcccactcttatgagataaattcagatcaagtaatcgcatccccttcaatcgtttgaaggaagaaatatcctatccccccccatatatctaacccatccacaacccccccca

SEQ ID NO: 106410 - DNA, 327 bp, Zea mays
  Clone ID: MRT4577_28547C.1
aagccgcatggatagagataggcagagtcatcagaccatcatcattggacaccaagagatttaccatggttacgctacacggtgtatctacatgtgttggtaacgcaacagtttggcgttaacgatgacacgcttctatagattccgttcgtgcgacatacctttcatgaattatagagcgaatgcgcgataaccaaggtctcgaacgatatacggtaaaacatgcagccgaacgaagctgcatacattaatagcggttgcagccttaagaatctccagtcctactatcggtgcagtcatatgggcatacgcatagggcacaacaag

SEQ ID NO: 106411 - DNA, 119 bp, Zea mays
  Clone ID: MRT4577_28548C.1
ctcaagtttgtcgtggctagctacgccgaggatgtgcaatccgttcagcagtgagtagacggttacgagtggcaggtccgtgccctgaaagaaggacgcagacatcctgcaggagaaga

SEQ ID NO: 106412 - DNA, 245 bp, Zea mays
  Clone ID: MRT4577_28549C.1
aattcggcacgaggaatccctccctcgctgctgccttcgcccaggcctcgttcccctctcgccgctcgcctacccgccgagatcgaggaggcgccaatagcgagagggttggctcttccctccacggctccaacgagcccccgccccctccgcctcagatcccacacgccgcggtgtggccgccgcaccccaccatggatgtcggatcgtgtggatgctccaagggtcaaggagggcctagtacc

SEQ ID NO: 106413 - DNA, 1332 bp, Zea mays
  Clone ID: MRT4577_2854C.1
atggatcctaaggggaagggaatcgtgatcaacgacaaggagaaggagtccttcgtcaacgagccgaaggatgacaagcctactgactcggggtcgggccacaagcgtaaagatgggaagaagaagaagacaaggcgtatcaaggagatcgtctactacgacgatagcgatgagtcgacttcttcccaaaaggacgacgacaacgactacaggaagacggtcaattcgaacttttcatttgattattctcgtattccacatagttcgaattcgcatttgctttccattcctcttggcaaacctccacacttcgatggggaagactacggattttggagtcacaaaatgcgtagtcacttattctctctccatccaagcatggaagagtacaataaggtgagcggcctggacaacgccaagcagatatgggacaccctcaagatctctcacgaagggaacgacatcaccatgctcactaaaatggagttggtggagggcgagcttggacgattcgcaatgataaggggagaggagccaacccaaacttacaaccggctcaagacccttatcaacaaaataaggagctacggaagcacgcgatggacggaccacgacgtcgtccgcctaatgctaaggtcctttaccgttcttgatcctcatctcgtaaacaatattcgtgagaatcccaggtacacgatgatgacgcccgaggaggtactcggaaaattcgtaagcgggcggatgatgatcaaggaggcgagatacgtcgacgacgctctaaacggtccaatcaatgagcctcaacctcttgctctcaaggcaacaagaagcaaggaaatgctacctagcaaggtggcacaaattgaggcggtcggacttaatgatgaagagatggctctcatcatcaagagattcaagacggcactaaaaggccgcaaggggcaaccaagcaagaccaagacaaaggggaagcactcatgcttcaaatgtggtaagcttggtcattttattgctaactgtcccgacaatgatagtgatcaggatcaagggaacaagagggagaagaagaagaactataagaaggcaaagggcgaggcgcatctaggcaaggagtgggactcggactgctcctcttccgactccgacaatgaaggactcgccgccaccgccttcaacaagtcatccctcttcccaaacgagcgtcacacatgccttatggcaagggagaaaaaggtgagtactcgagactccacttatgcttcttctagtgataatgagtctagtgatgatgatgacatagactattcatgcttattcaagggcttagattga

SEQ ID NO: 106414 - DNA, 557 bp, Zea mays
  Clone ID: MRT4577_28550C.1
ctacaaagacttttaagttttacaccactcgtcggtcgcctcacctcccgccggacagcgccggcgccggcgggggatacctggaccgtgacgactgacgaggaggtcagttgccgacttgccgtcattaaggtagctggtgcagtacacgcctagttgctttgcttgcgattggctccggagaccaaactgggtgggtactcaaccacgacagatctggagaaatcgtacagggtttccattcattccctcgtatagcttttactattcggcattcaggttcaagtagctttcggatagcgacgacaatactagttctaggcttctagcaagcagaaattcttttttccctgaacaaaagataacaaatcatatgttacagagaaaagtagccaaaatcattggaagcaacagcaaggcacgacagggattactgttgagctatcggcgtgaacagcgtcaggctaggttcagtccagtcggtctctatccgttagcttagcgcttgtagcccatggagttatcagcagatatgatcagagattcagagagctttt

SEQ ID NO: 106415 - DNA, 320 bp, Zea mays
  Clone ID: MRT4577_28551C.1
tttttttttttttttttttttttttttttttttctcgggggtgggtttttttatttttttgcgggtaccttcaggcggaccagcggcccctaccctgaaaactcaaaaaagcttcccaaaaccatgcaaatttcccctaaatggggaaaattaaaaaccgggaacaatcccacacaaaattcaaaccggaagcaaaaagggaaaagcctgcagagccaaaaaagagaccaaacaaaaaaaaaaagggtaaagctcagggcccccaaaagagacgggaaacccaaaaaaccacctgactcaaaaaaccccccaacacgcgg

SEQ ID NO: 106416 - DNA, 327 bp, Zea mays
  unsure (1)..(327): unsure at all n locations
  Clone ID: MRT4577_28552C.1
ntctccnnnnnnaaacaccaccccgggggaaataaaggaacagacccgcggacacaccaacgggaccgaccgagacaaaagacaagggacccaaaagaagccggccgggcccacgacccacgcaagccgtaacacagactgtcagacccgcgacacacccaaagagcacacagaccgacgagcaggaacaccaccacggaacaaaactcggggcagggcaagccagaaccgaacacacagggcaacgaaaggtacgccggacgcccaaaggccggacccggccagaacacgccgagactgccaccaacaccagaggagccgaccctg

SEQ ID NO: 106417 - DNA, 364 bp, Zea mays
  unsure (1)..(364): unsure at all n locations
  Clone ID: MRT4577_28553C.1
ggggggggnntttttttntggggggggnnaaaagaacaacaaaccctatgattttttttgggaaaaaaaattagggctccaaaagttgcacttattccggttccatgggtggcgcccagccatatttttttgggccccacgaactttggggtttgtaataaaatttaatggtgcatttaaaaaacccccatgggggcaaaaatattttctaactgggacctaaccaggttttttattttggttccacaaatgccgagcactgggactggattttttgttaatgaacccggtcttcctttactaaatgaacttgcaaaagttctgattcatgggcaccttatccagggaaggtttccgcctttaa

SEQ ID NO: 106418 - DNA, 1141 bp, Zea mays
  unsure (1)..(1141): unsure at all n locations
  Clone ID: MRT4577_28554C.1
tagatagacatataagcaggtagcaacagaaccagtcatccgagatcgatcgctcagctagctagcattagcaagatgcattcgcagcacctatacccactaccacaccggcgtttgagcaacacgatgatcggctacctgaacctggtgacgctggtggcatccatccccatcatcggtgcagggctgtggctggcccatggctctgcggcggtgacatgcgaatccgcactgcagacgccgctcctagccatcgggttcatcgtcctcctcatctccctggcgggcttcatcggcgcgtgctaccatgtgacatgggcgctgtggctctacctcctggccatgctgctgctcgtcctcgccctgctcgggatcacagtctttggcctggcagtcacggccggcggcggcggcggcaggcaagtgcccggcaggccctaccgggagttccggatcacagattactcggcttggctccagaggcatgtcgaggtcgatcgctactggcgggcagcgctcgcatgcgtggtcgggtcaagagcctgccccaggatagccgcctggactcccctggactacctccagcataatctcacgccgatacagtctggatgctgcaagccaccgacatcatgcacatacaacgagcaaggcatacccattgctgcgccggcgcaagacgaggaggactgctaccggtggaacaatgcccccagcgtcctgtgctaccagtgcgactcgtgcaaagccggagtgctggagcaggtgcgccgagactggcacaccatcaccatcctcaatgtcatcgtccttgttctactcatagccatctactcctgtggctgctgtgctttccgcaatgctcgccgtgccgactacacatacggtggcatgtcgtccaagaccaatccacgatgggattacttctggtaataatgaggaggagtatgtgtttaagggatcgatgtgcatgtatcaacatttttctgagttgtggttttggtgcaggtcaaggtggtggaatggccatagagagcagctgtattaattagtgatgctataggctagtagtatgtttaagggataatatgtgcatgttctttctccncgaggaagagtttttctcatacatgatgatgat

SEQ ID NO: 106419 - DNA, 790 bp, Zea mays
  Clone ID: MRT4577_28555C.1
gccggccttttccaaaaacgagattactcggcttggcttcagaggcatgtcgaggtcgatcgctactggcgggcagcgctcgcatgcgtggtcgggtcaagagcctgccccaggatagctgcctggactcccctggactacctccagcacaatctcacgccgatacaggtaggtaactacgagtacgcgagggtcttcttcttcttgttgttaattaaactgcaatgcaaaaacgcgcgcagtctggatgctgcaagccaccgacatcatgcacatacaacgagcaaggcatacccattgctgcgccggcgcaagacgaggaggactgctaccggtggaacaatgcccccagcgtcctgtgctaccagtgcgactcgtgcaaagccggagtgctggagcaggtgcgccgagactggcacaccatcaccatcctcaatgtcatcgtccttgttctactcatagccatctactcctgtggctgctgtgctttccgcaatgctcgccgtgccgactacacatacggtggcatgtcgtccaagaccaatccacgatgggattacttctggtaataatgaggaggagtatgtgtttaagggatcgatgtgcatgtatcaacatttttctgagttgtggttttggtgcaggtcaaggtggtggaatggccatagagagcagctgtattaattagtgatgctataggctagtagtatggttaagggataatatgtgcatgttctttctctcgaggagagtttctcatacatgatgatgaatgtgcatgttcttttca

SEQ ID NO: 106420 - DNA, 511 bp, Zea mays
  Clone ID: MRT4577_28556C.1
ggaaggctgaaatatgagggcaaacggccctttttatatagataccgttaagtctgaagtctgaaatatgaggggaaaaagggggggggggggggcctaaacgacactggattcactggccctgaaggaccgggttcagcaggagcagggctagaaactacacatgggggccaaaaacatcactaatcaacatccaggggtgaaacgagctttcactggccctgaaaggtacaatccaaaaccagggaccgaataaaccatccggaaaaattcacggggccctgtttcgggctggtgaaaaacctagggggggccaaaatcacccggcggggatcagggtcgctggctcgctcaaaacaaacttggggaggtgggacttggggccttttttggcgtaacaaagcgtcatgtcagggttcgacacgatgattccagcactgtccacgaagggctgggcaagggctaaatcggactccgggggaacccttagagcatcccaaatctttttttg

SEQ ID NO: 106421 - DNA, 1317 bp, Zea mays
  unsure (1)..(1317): unsure at all n locations
  Clone ID: MRT4577_28557C.1
ccgggatccgcggccgccgccgccgcgctgagtttgggccgggctctgttaatctgggcgactttgattttctctgctcccgctgccacggccgtcaggagtgaagcgatgctggagaaagaccggatatcctacttctacgacgagaccacacaaagcatatccaatagagcttgcccaattccattctgctgattatgtggaattcttgcaccggataactcctgattcccagcacctatatgcaagtgaactaactagatacaatcttggagaagactgtccggtctttgataatttgtttgagttctgccaaatctatgcgggaggaactttagggtaatgactgtgagtttccacaagtatggtgacctgttctttcctggaacaggtgatattaaggatataggagaaagggaaggaaaatattatgccatcaacattccacttaaagatgggatagatgacactagctttactcggctttttaaaacaattattgccaaagttgttgagacatatctgcctggtgctattgttcttcaatgtggggctgattcattggcgagggatcgtttaggctgcttcaatctctctattgaaggccatgctgaatgtgtaaagtttgtcaagaaattcaatattccccttctggtaactggaggtggtggatacaccaaggagaatgtagcacggtgttgggctgttgaaactggggtccttttagacacagaactcccaaatgagattccaaaaaaatgaatgtattgagtactttgctccagattatacattgaaagttccaaatttgaacatggacaatttgaacagtaagacctatctcagttcaatcaaagtgcaagtgatggagagtttgcggtacatacagcatgctcctggtgttcaaatgcaagaggttcctcccgatttttatatcccggactttgatgaagatgaattggatcctgatgaacgtgttgaccagcacactcaagacaagcagattcaccgtgatgatgagtactatgaaggtgacaatgacaacgatcacgacgacggcacacgctaatctgcttcttctgaggccctggtgtaaatggaaacctgagattcttcactgttgtgtgtagttcagcagccttgagatgtaatagtttgtcagttgacagcagggatctaatttagcaggtcaaagtggtttagacttttataagggattctgacccctcctgaattacacattgtagtacaagtctgcatatttttaagcatgcaaaaattcaaatttctcnnnnnnnnnnnnnnnnnnnnnnnnnn

SEQ ID NO: 106422 - DNA, 340 bp, Zea mays
  Clone ID: MRT4577_28558C.1
ctcttcgcctctctgagtctctctctctctctctctctgcacgcctccgctccgcgtgtgcttccgttcggcggtggtttcatctcgcggaggcagcagaccacagcgccagcagccatgaccgcggccgacggggagtcctgcgcggtggtcgcgacggccgccgacatcatctgctctctccgtggtgcggacctcgccggctggaccccgccgtggcgcaagcacgaggccgcctgcgagggcgtccgtgaggaggagggcggtggcggcgacaaggcgcgtgatctggcctggccggcggtggcgcgcgggaagcgctcgcggtcccggcgcgagt

SEQ ID NO: 106423 - DNA, 345 bp, Zea mays
  Clone ID: MRT4577_28559C.1
gctcttgtcttctcgatgggatacctctaggccggccgggaacccgcttctcctacgcccacctagaagatcattggacacatagcgaaaccgctctctacctaccgcgctcgtcatctaacctggcttccggcatggcttccaaggagatcggagtcttgacctgcttcattgccatcaccgctctcgccttccgtccctgcgcatccgccgtgcccatggacggcggctggcccaacggcatctccacgctggaacggccccgccacgggagctggatccgacgctggcgcctgcggcgaccccggcgccgtcgaccaacctccgttctagtcaatgatcacc

SEQ ID NO: 106424 - DNA, 2939 bp, Zea mays
  Clone ID: MRT4577_28560C.1
gcctgctcactatcgcacttggttttttttttttttcatcaaataacagattcactttttctagagaatcactcgaaatcactctattagagaatcatgtagcggagctatatgccaaacgagccactctctgtacaatcaaagcatgcatttgaaacggatctcggtacacgtacgtacacgtcagcatgatctctccgtacaatcaaagcaacacaagtggccttaatttggcagtctttcaattcaccatgatctgaagaagagcacgtcttatataattaaccatgcacacgtttggtttcttaacgaacaagacagatcgatcggattgatggatcgtgcagtgagtcgttctcctcgtcatcgatcagaggtcacgatggccggcggcggcgggcgctggcagctggccgctgttggctatgacgaccttggccttgggcacgccggtgagctggccctcggcttcgatcttgcgcacgacgtccatccctttcaccaccttgccgaacaccacgtggcgcccgtccagcttcttgggcaaccggttttcgtctacggtggtgatgaagaactgggagccattggagtcgggcccgtagttagccatggacagcgtaccggctttagcgtgggtgtgcttgaagttctcgtcggagaagatggtgctgccgtagatggactcgccccccgtgccgttgccgttggtgaagtcgcctccctggatcatgaaccccgggatgatcctgtggaacgtcgaccccttgtaccacagaggcttgccggacttggcaattcctttctcccctgtgcaaagtgctcggaagttctctgctgttttaggaacggtgtccccaaacagtcccagcacgatccggcctgcaggcttgccgtcgatctcgatgtccaagaaggtctcggccgtaagaccttgtccaggtccgccgccgatgccgatggtcctcctccttgcgcccccaatggaaccgagcaccgtacgtgggccagcgccagcgtggccgcggcgagagcgaggcacaggcacgtcgccgccgatgagctgcgcggagccatcgatcgccgccgccgggtatctggttcctccctcctcgatcgtcgccggcggtcctgcgtctctctctctctcttcgctccttttcctgcaggctccccccgccgggtgggccacgggttcgccgcgttttttatatcgcttccgtctcgtttggacctccatccgcggccgccgccgccgcgctgagtttgggccgggctctgttaatctgggcgactttgattttctctgctcccgctgccccggccgtcaggagtgaagcgatgctggagaaagaccggatatcctacttctacgacggagatgttggcaatgtctactttgggccaaatcaccccatgaagccacatcgtctctgtatgacacatcaccttgttctttcatatggacttcatcaaaagatggagatatataggccacacaaagcatatccaatagagcttgcccaattccattctgctgattatgtggaattcttgcaccggataactcctgattcccagcacctatatgcaagtgaactaactagatacaatcttggagaagactgtccggtctttgataatttgtttgagttctgccaaatctatgctggaggaactttagatgctgctcgcagattaaatcataaaatatgtgacattgccattaattgggctggtgggctacatcatgccaaaaagtgtgaggcttcaggcttctgttacattaatgatctagtattaggaattctggagcttctcaagtaccatgccagggttctttatattgacattgatgtccatcatggagatggagttgaagaagccttttatttcactgacagggtaatgactgtgagtttccacaagtatggtgacctgttctttcctggaacaggtgatattaaggatataggagaaagggaaggaaaatattatgccatcaacattccacttaaagatgggatagatgacactagctttactcggctttttaaaacaattattgccaaagttgttgagacatatctgcctggtgctattgttcttcaatgtggggctgattcattggcgagggatcgtttaggctgcttcaatctctctattgaaggccatgctgaatgtgtaaagtttgtcaagaaattcaatattccccttctggtaactggaggtggtggatacaccaaggagaatgtagcacggtgttgggctgttgaaactggggtccttttagacacagaactcccaaatgagattccaaaaaatgaatatattgagtactttgctccagattatacattgaaagttccaaatttgaacatggacaatttgaacagtaagacctatctcagttcaatcaaagtgcaagtgatggagagtttgcggtacatacagcatgctcctggtgttcaaatgcaagaggttcctcccgatttttatatcccggactttgatgaagatgaattggatcctgatgaacgtgttgaccagcacactcaagacaagcagattcaccgtgatgatgagtactatgaaggtgacaatgacaacgatcacgacgacggcacacgctaatctgcttcttctgaggccctggtgtaaatggaaacctgagattcttcactgttgtgtgtagttcagcagccttgagatgtaatagtttgtcagttgacagcagggatctaatttagcaggtcaaagtggtttagacttttataagggattctgacccctcctgaattacacattgtagtacaagtctgcatatttttaagcatgcaaaaattcaaatttctcagtggtattagtatctcggctttttaaaacaattattgccaaagttgttgagacatatctgcctggtgctattgttcttcaat

SEQ ID NO: 106425 - DNA, 889 bp, Zea mays
  Clone ID: MRT4577_28561C.1
gccacggcgtcgccatgaatgcgctcgtcgtcaccgccttggtggacatgtactgcaagtgcggctccgtagacgatgcccgccaggtgttcgatgccgcaaggtcgcaaggcttggccaagctatcgtcttggaactccatgatgcaggggttagcggtgcacgggcagtggcgagaagcggtcgccttgttctcggagctgaaatcctacgggctgagccccgacaacgtcaccttcatcgcggtcctgacggcctacggccactccggcatgcccgacgaggctcaggccgcgttcgcgtccatgtccagtgaacacggagtggagccggggatcgagcattacggctgcctcgtggatgccctcgcccgcgccgggcggctccgggaggccgaggacgcgatccgggcaatgccgatggcgccggacgcggccatctggggcgcgctgctctccgggtgccggctgcacggcgacgccgagctgggtgcgcgcgcggcgcgcgaggccgtgcggtgcgatccgcgcgacagcggcgcgtacgtgctcgcagccagcgtgctggcgcgtggtggagaccccggccgcggcgcgggcatcaggggccggatgagggaggccggcgtcggcaaggtccccggttctagcatgatcgaggttaacggcgtcgtgcacgagtttgtgagctagcgtagccagtagtgtagtgtactaatccacgatacattgggacaagctacatttgtacatctacagtatagaactagttatgtatatgtgacgacaaataactacggttaaatgactcgaatgcccgaaggcattggttgtacaagcgtaaagagtaatggtcagttccgttgaggtaatgtatggacatcatatgt

SEQ ID NO: 106426 - DNA, 354 bp, Zea mays
  Clone ID: MRT4577_28562C.1
gggtctccagctgcaagcacgcatcgggcaggccacaaacgaaatggcggcgacggcaaacgtaccttcttggcgccacgcattcgcggcagcatatagctgtgactcgcaaatgcccgagactgagatgcacggtgaattattcgcgaacaactgcggctacacggtgtggtcggggctgctgtccagcgcgggctccgcgccgctgcccaccacggtgttcgcgctggcgccttcggagtcccgtgccgtggcggcgcccgcggggtggtctggccgactctggggccgcacgctctgcgccgccgacgccgccactgggcggttcttgtgcaccacaggggactgcaggtc

SEQ ID NO: 106427 - DNA, 235 bp, Zea mays
  Clone ID: MRT4577_28563C.1
gttgaggtcaacatttgttacaatctgttcctaacaaggtcagttatgtcaaacagaccaagacgctatatgatcaggctaccgggaacttacatgatgatagtcgaagggtggaaaaaccatcaccacgggttggggaaaatcctagttctgcacgttgcctgcacagctaatagacgccagacttgggacaataagggcacaggagttgatgctgagtatcagtcagggtatc

SEQ ID NO: 106428 - DNA, 536 bp, Zea mays
  Clone ID: MRT4577_28564C.1
ttgggtacctcgaggccggccgggagtctctcgcccctctctcctaccccgcagccgccgcgcaggtagccctagcacccgcgacgagcaggatctgcccagttgctctttgagtagttcccccaactgtcaccatgcagaacgaggagggtaagactgtggacctctatgtccctaggaagtgctcggccacaaacaggatcatcactgccaaggaccatgcctctgtccagatcaacattggccacttggatgcgaatggcctgtatgatggtcacttcacaacgtttgctctctctgggtttgtccgtgctcagggcgacgcagacagctccttggacaggctgtggcagaagaagaaggctgatatcaagcagtagattttacatctagtttaccaagatatggacactgccttagctatgttttgaattcatgtcactatatgcaatgttgtgatttcagctggtaccttaaatctgaagatttagtatctttgttgggttccttctaaaaaaaaaaaaaaaaaagcggcc

SEQ ID NO: 106429 - DNA, 202 bp, Zea mays
  Clone ID: MRT4577_28565C.1
ccggctcgacccacgcgtgcgcccacgcgttcgatctccttctcaataactatattattcttccattcccgtctggatttaatcatacataacccgtccattcacatgcgaggatgaaatcaactcccctgtgtctcctgctactctttacaaggccctaattacagatacctacaacttcatcccaaaagcacttgattcc

SEQ ID NO: 106430 - DNA, 339 bp, Zea mays
  Clone ID: MRT4577_28566C.1
ggatatctcggctctcgcatcgatcgaagaacgtatcgaaatgcgacacctgcgtgtgaatagcaaaataacgcgaaccatcgagtttttttacgcacgttgctgccgaaacctcatggcggagggggcgtatgactgggcgtcacgccccaagcgaaaaaacgttaaagaagtgccaagagctctacaaacaaaattttttataattttaatatattttactttgctttttaatggaagctgactttgtaaggttgtatctttctttaatttgatgttgctgtttttaaaaaaaaaaaaaaaaaggggccgcctttttagggtaacaaaatttttttt

SEQ ID NO: 106431 - DNA, 1294 bp, Zea mays
  Clone ID: MRT4577_28567C.1
cattgggtacctcgaggccgggccgggctctcgcccctctccctctctcccaccccgcagccgccgcgcaggtagccctagcacccgcgacgagcaggatctgcccagttgctcttgcggtagttcccacaactgtcaacatgcagaacgaggagggtaagactgtggacctctatgtccccaggaagtgctcagccacaaacaggatcatcactgccaaggaccatgcctctgtccagatcaacattggccacttggatgcgaatggcctgtatgatggtcacttcacaacgtttgctctctctgggtttgttcgtgctcagggcgacgcagacagctccttggacaggctgtggcagaagaagaaggctgatatcaagcagtagattttacatctagtttaccaagaattggacactgccttatctatgttttgaattcatgtcactatatgcaatgttgtgatttcagctggcaccttaaatctgaagatttagtatctttgttgggttccttcaaaaaaaaaaaaaaaaaaaaaaaaagccaaaaccaaaagcagaggggaaagtgccgtcggctctgactcttgggcacttggctgacgacccgttctctctctgcaactgcaactgcaacgcaccaagaaactgccggcgatcgatcggggaaggagataaacatggtgcacgggaagctggaggtcctcctcgtctccgccaagggactcgaggacaccgatttcctcaataacatggaccccttcgtgatccttacctgccgcacccaagagcagaaaagcagcgtcgcaaatggagcaggaagcgagcccgagtggaacgagaccttcgtcttcaccgtctccgacgacaccccgcagctccacctcaagatcatggacagcgatctcaccaacgacgatttcgtcggcgaagcaaccatccccctggaggccgtgtttcaggaaggcagccttcccccggcggttcacccggtcgtcaaggaggagaagtactgcggagaggtcaagctcgcgctcaccttcactccagcagcggaaactcgccaccgccctgatgacaacgaggaggggccgccttacagcagctggagttgatctatctcgccatgggatgcatgcatcatatatatccaccaagagaagaatcagtgttgctgttatgcgaccctctatctatctatatatatgtgcttaatttgtcatgaacgactgccaatataaactaaactattcagagttgtttgcaaaaaaaaaaaaaaaaaggcccctagggcc

SEQ ID NO: 106432 - DNA, 431 bp, Zea mays
  Clone ID: MRT4577_28568C.1
gggccaaaaaagaaacggtttttttaaaacggcaaccggggggaaaaaaaaaaggggaaaaaagggttttttttcctagtttcgacaaccccctttttcccgggggggggccccaatcctaaactttggaaaaagaggacccaaatttcccccccaaaaaatttaaaacccggggggtttttaggggggagggttttgaacccaaaggggttaaagggcgggggggcaaaaagaaatcaccctggggggaaccccgcaaagcagatccaaaatcctaaaactccccaaatgggccaaaataaaagcgggggttttaaaaaaaaagggggcccccccatttgttttgtttgacggaattggaaaactgcttttcactgtttttggcaactgggggggggggccccacccaaagcctgggaataacccccccg

SEQ ID NO: 106433 - DNA, 3322 bp, Zea mays
  Clone ID: MRT4577_28569C.1
accacgcgtccggaaatcaccaatgaattagaggaactacagaggaagctgaaggaaatcgaagctaataaggatttagtggagggagaaaacagtaagcttcagtctgagattcgcacagcacgtgggaaatagcgtgggtctgaagcagaggttaagtgcattaaacaagtaatgtgttcagtggtggaggcgaaggaggcagctgcaagggcatctgaagctgagaaggcagaaatcatggaggaaatggacaaccttaagaggacaatcgaggagatcaaggccaacagggatttggtagagagtcagaaccaggagcttcggtcaaagatttcgagtgcagagcaagagcgtagcctatttgaaggagagattaagagcgtcaggatggaattgggggcagtagaggaggccaagcagatccttacgagggagttcgatgctgagaaggcagagatcctgaaggaactggatgaccttgagaagaagctagaggaattgcagaccaacaagggtttgctggaggctgaaaacgacaagcttcagctggaggttttgaccgcacagcacaaacaaagcatgtccggcagtggcagggacaatcttgctctcagcatcggctagccttagatggaactggatgagtcttggtggagcacatcccacgccggccggaaagctagcctgagccctgaggtcgtgagctcactccaccacttgactcccgtctcgtctcgtctctgcactggattggaggctggggccgtgaagggtaggtaggtcgcttgatagggacaaggggggagacggcgagaggcgtttcgccgagcagttcgcgtgctcccctccacaggccgacgcggcgacgccgctgtttcaggttctggaatttccagtgcgggtgcattaggctgatatgggcaagtcgccggggaagtggatcaaatcggtgcttttggggaagaaatctaccaagtcaggtcctaccaagtcgaatgaatctaaggctgacaacaacagatactcgaccggggaggaccgcacattgtctgagagttctcctgtgatttctgagccggtactagttaacatccacaagaacgtagctatcaatgggaaggctgcagatgccagtgatagggcacggcaacaagatccgcagagccaaagcgttgttgagtccagatcatcggctccagctgctcagctgggagaagatcaagctgcagcgaaggcacaggcagcctttcgtggttacctggcacgaaggtcattccgtgcattaaaaggtatcgtaagactccaggcgctgattcgagggtatcttgtaaggaggcaggctgtatcaacccttcgcgcaacatggttgattgtgaagtttcaggctctagttcgtggaagaaatgttagactctctggcagtcgcatgcagctcaatgtgaagtttggtcagagtaactttgggggtgttagatcgtctgatgcatggaaagagaagctatcttcaaatgcttatgttcggaagcttctgtcttcaccaattgttttagaacctcttcacttccagtatgacaagagggatcccaattcaacctataactggtttgagagatggaccataggttgcatctggaagcctgcttttcaacccaaaagagttgctgatgggaaaccactggtaaagaaggctagttatgcaatggaaactcaatcagccaagttaaaacgcaacattcggaagggttctgctgctatcgctgggagtttccatacatctggtgaatctgataaagtaaaaaggaatccaaagaatttctctagcttccctgctgattcagtaccagatagccagttatctgaacttgaaaaggttaaaaggaacctcaggaaggtaactgattcgatggctgaagcctcaaagatatctagttccagggttgattcctcgaaggtatgtaattctacagctgaggttccaaaggaatctaatcctgtggcagaaatctcaaagatacgtagtctcctgaatgggatctctgaccatcaggatattcaatgtgagaatacacgtgaatcttcatttcctcttggaactcaagaagactctgacaatgatcatctattgcgatattcaaatatggatagcttggacttggtacctggtttgaaaagtgatcaggaaattcagctggattcggtttctataggagaaaatgttgatgatcccactgttgttgctccagcagttgaagaaatgtcaccgcaaaacattgatacggaagacaatgttttatgcaagaaagaggaagcaaggtccaaggaagagcacttgtctaatggaagccttagaactagcaagaggaagtcttcattccccaacaaatcagaatatgtagaaaatgggactcacgctactcctgttcagccaaggcagccaagctatatggctgcaacggagtccgcaaaggcgaaattgcgagcccagaattcacccagtctggattctgattcagcggcagaaaagaatggtttcacccgacgccactctcttccttccagtacaaagagtagagcacttaaagctgaatggaagcgctgaagaggcaacccatcgtccacttgaattgaattgtgcactgctctgaaacttcgctggatgaactcgaccggtcttgtcccatgttcttgctgtattgaacaaccccttgtgaagttgcgattctggttcagtttgtcgtaggttcatgtgcaaccactagtgccttgtgtcgtatattgcatggttcttgtcgaaggaacaatgcctgcgaaagctgatgttaggactgcattaactgaataacatcacccagttgaccgcaaaggcgaaattgcgagcccagaattcccccagtttggattttgattcagcggcagaaaagaatggtttttcccgacgccccttttttccttccagtacaaagagtagagcccttaaagctgaatggaagcgctgaaaaggcaacccatcgtccccttgaattgaattgtgccctgctttgaaacttcgctggatgaactcgaccggtcttgtcccatgttcttgctgtattgaacaaccccttgtgaagttgcgattttggttcagtttgtcgtaggttcatgggcaacccctagtgccctgtgtcgtatattgcatggttcttgtcgaaggaacaatgcctgcgaaagctgatgttagggctgccttaactgaataacatcccccagttgcccaggtctttgtttgtcgttttaatgagtgatgaaaaagcagttttgcagaactgctagtgccctg

SEQ ID NO: 106434 - DNA, 5091 bp, Zea mays
  Clone ID: MRT4577_2856C.1
tcaatccaagtttcgcgaatctaagacatttagctcactacgcaacttgcaaaaggtctgctcatctaaaggcttggtaaagatatcagctagctggttctcagagctaacatgaaacacttcgatatctcccttttgctggtggtctctcaaaaagtgatgccggatgtctatgtgcttcgtgcggctgtgttcaacaggattgtccgccatgcagatagcactctcattatcacataggagtgggactttgctcaaattgtagccaaagtccctgagggattgcctcatccaaagtagttgcgcgcaacactgtcctgcggcaacgtactcggcctcagcggtggatagggcaacgaaagtttgtttcttagaactccatgacaccagggaccttcctaagaattggcacgtccccgatgtactctttctatcgaccttacatccagcatagtcggagtctgaatatccaatcaagtcaaaggtagacccctttggataccagatcccgaaacaaggcgtagcgactaaatatctaagaattcgcttcacagccactaagtgacactcattaggatcggattgaaatctagcacacatgcatacgctaagcataatatccggtctactagcacataaataaagtaaaaaccctatcatagaccggtatgccttttgatcaactgacttacctcctttgttgaggtcggtgtgtccgtcggttcccattggagtctttgcgggcttggcgtccttcatcccaaacctcttgatcaagtcttgtgtgtacttcgtttgggagatgaaggtcccatccttgagttgcctcacttggaacccaaggaaatagcttaactcgcccatcatcgacatctcaaacttttgagtcatcaccctgctaaactcttcacaagacttttggttagtagaaccaaatattatgccatcgacataaatttggcacacaaaaagatcaccatcacaagtcttagtaaaaagagttggatcgactttcccaacacacgtggtcggggtacggttcatcctcgaagccaggggttgctccacgtacacctcctccttgattggcccgttgaggaaagcgctcttcacatccatttggaacagcctgaaagaatggtgagcggcatatgctagcaaaatgcgaatggattctagcctagccaaaggagcaaaagtctcctcaaagtccaaacctgtgacttgggcataaccttttaccacaagtcgtgccttgttccttgtcaccgctccatgctcgtcttgtttgttgcggaacacccacttggttcccacatcattttgcttgggacgaggcaccagtgtccaaacttcatttcttttgaagttgttgagctcctcctgcatggccaacacccagtccggatctagcaaggcctcttctaccctgaaaggctcaatagaagagacaaaggagtaatgctcacaaaaattaactaatcgagatcgagtagttactcccttgctaatgtcacccaaaatttggtcgacgggatgatccctttgaatcgtcgctcgaacttggtttggaggtgccagttgcgcttcttcctccattatttgatcatcttgtgctcccccttgatcacactcctcctgttcatcatcttgagttcggggatgtaccgttgttgaggaagaaggttgatctcgcttatcttgttcctgtggccgcacatctccaatcgccatggtgcgtattgtggccgttggaacttcttcttcacctacatcatcaagatcaacaacttgctctcttggagagccattagtctcatcaaatacaacgtcgctagagacttcaaccaaacccgatgatttgttgaagactctatacgcctttgtatttgagtcataacctaacaaaaacccttctacggctttgggagcaaatttagaattcctacccttcttcactagaatgtaacatttactcccaaaaactcgaaaatacgaaacattgggtttgttaccggttagtagctcgtatgatgtcttcttgaggaggcgatgaaggtagaccctgttgatggcgtggcaagccgtgttcacgacttccgaccaaaagcgctcgggggtcttgaactctccaagcatcgtcctcgccatgtttataagcgtcctgttcttcctctctaccacaccattttgctgtggtgtgtagggagcggagaactcgtgcttgatcccttcctcctcaaggtactcctccacttgaaggttcttgaactcggacccattgccgctccttatcttcttcaccttgagctcaaactcgttttgagctctccttaggaagcgcttgagggtcccttgggtttcagttttatcctgcaaaaagaatacccaagtgaagcgggaaaagtcatcaacaataactagaccatacttactccctcctatgcttagataggcgacgggtccgaagaggtccatatgtagcagctctagaggtcttgatgtggtcatcacattcttgctgtgatgcgctcctcccacttgtttacctgcttgacaggctgcacaaggtctatctttttcgaaagtaacattggttagacctatcacgtgttctccctttagaagcttgtgaaggttcttcatccccacatgtgctaagcggcgatgccacagccagcccatgctagtcttagcaattaagcatgcatctagaccggtctcctcttttgcaaaatcaactaagtaaagtttgccgtctaatacacccttaaaagctaacgaaccatcacttcttctaaagacagacacatctaacccttttaccttgccttgattcccatcaccgaatattattgaatcttgggaatccttgtttttgacgtaggaggtgaacatcttcttctcccccgtcatatggtttgtgcatccgctgtcgataatccagcttgaaccccagatgcataaaccatgcatataggtagaactagaagcaaacatggcatgagagtcaaaagcatcataagcattacaactcctataagactgtcttctatcatggtacataaaagcatggttctttttagcactactagccataggggccttccctttctccttggcggagatgggagccttatggcttgttaagtccttggcttccctcttgaagccaagtccatccttaattgaggggtgtctaccaatcgtgtaggcatcccttgcaaattttagcttgtcaaattcattcttgctagtcttaagttgggcattaagactagccaattcatcattcaatttggaaattgaaactagatgttcactacaggcatcaatgtcaaaatctttacacctattgcaaatcataacatgttctacacaagagttagatttactagctatttctagcttagcattcaaatcatcatttatgctccttaagctagaaattgtctcatggcaagaagatagttcacaagaaagcatttcatttcttttaacttctaaagcatgagatttttgtgcctctacaaatttgtcatgctcttcatataaaaggtcctcttgtttctctaaaagtctatccttttcattcaaggcatcaatcaattcattaatcttatctattttagttctatccaatcccttgaacaaactagagtaatccatttcttcatcactggactcatcatcactagaagaatcataagtggcattgtttcgagtacataacttcttttccttcgccatgaggcatgtgtggcgctcgttggggaagagggatgacttgttgaaggcggtggcggcgagtccttcattgtcggagtcggatgacgaacaatctgagtcccactccttgccaaggtgtgcctcgcccttagcctttttgtatgtcttcttcttctccctcttgtttccctgttcctggtcactatcattatcggggcagttagcgataaaatgaccaatcttaccacacttgaagcacgagcgcttcccctttgtcttggtcttgcttggctgccccttgtgaccctttagcgtcgtcttggagcgcttgatgatgagagccatctcttcatcatttagccctgccgcctcaacttgtgccaccttgctaggtagcgcctccttgcttcttgttgccttgagagcaaagggttgaggctcattgattggaccattcaatgcgtcgtccacgtatctcgcctcattgatcatcattcgcccgctcacgaacttcccaagaacttcttcgggcgacatcttggtgtacctaggattttcatgaatattgttcaccagatgtggatcaagtacagtaaaggaccttagcattaggcgaacgacgtcgtggtccgtccatcgcgtgcttccatagctccttattttgttgatgtgggtcttgagccggttgtatgtttgggttggctcttcgccccttatcattgcaaatctcccgagctcgccctctaccaactccatcttggtttgcaaggtgacgttgttcccctcatgagagatcttgagggtgtcccagatctgcttggcattgtccaagccgctcaccttatgatagtcgtccctgcacaaagaggctaacaacacagtagtagcttgtgcatttttatgaatctgttcattaataaatataggactatccgagctatcaaatttcattccattctcaacaatctcccatatacttggatggagagagaacatgtgactacgcattttgtgactccaaaatccgtagtcctccccatcaaagtgtggaggtttgccaagagggatggaaagcaaatgtgcatttgagctgtgcggaatacgagagtaatcaaaagaaaagttcgtattaaccatctttcttttgtcgtagtcgttgtcgtcgttgttcttttgggaagaagtggactcatcgctgtcatcatagtagacgatctctttgatgcgtattgtcttcttcttcttcccatctttgcgtttgtggcccgagcccgagtcggtaggcttgtcatcattaggctcgttgacgaaggactccttctccttatcattgatcacaattccctttcccttaggatccat

SEQ ID NO: 106435 - DNA, 322 bp, Zea mays
  Clone ID: MRT4577_28570C.1
ccgggccgacccaaacgtccacccactcgtccgggccaggcagctcggcaccgttgtggctgtgcggaactgcacaagagcgtttcgcctcggccaccacgaacggagaacgcggtagccatggccatggaggaagcggtgaagatgacgtgcaggaagaagggtggtctgagaacagtgcccttcatcttcgccaacgaggtggccgagaacctcgccgtggtgggtttctcgaccaacatgctgacgtacctgaccagtcagctgcacatgccgctggggaaagccgccagtacgctcacgaacttcggggggacctccg

SEQ ID NO: 106436 - DNA, 567 bp, Zea mays
  Clone ID: MRT4577_28571C.1
ggtggtggtttttttttttttttttttttttttttttttttttttttttttttttttttttttttttttttttttttttttttttttttttttttttttttttttgccccggcggaaaggcccaaaatttgggaattgggtgttttggggggggggggggggaaactttggccccgggggaacctgggttttcaagaaaaacttttaaaacacactttttttttaaaaaacttggcgggcatcctttgtttaaacctttataacctcctcccattggccatttgaccctttctttcaaaggggttttttgttcccccccccagctttgggtaattttttcccaggcaagggcccggacaccctccaaacaggggaaccaaaggcacccctgagcttcccctcccacttggttccatcctttcccctgggccaaaagaaaaccttccccttttgggaaaccctggcaatgggcgttttggccaatcccaaaaatggggcccacccgaaattccttaaaaaatttggttgcattttaaaaataaaaacaattttcaactttcaagttcc

SEQ ID NO: 106437 - DNA, 229 bp, Zea mays
  Clone ID: MRT4577_28572C.1
atctctcttggtttatgccgtttcttatagaatcacagtaactacaatgttcttgtggggcacccgacggaaaaatgcaggaatattcatgggagaggggggaaaccactgggtgaaggcgctgcggccaaccccagacacagggggcacccgcctccggggggagccctccagcgccggcctttggggtaggggaacaaccactgcctccggtccctcgcgctgaggg

SEQ ID NO: 106438 - DNA, 381 bp, Zea mays
  Clone ID: MRT4577_28573C.1
acctattgatgtttccaaaaaaaaaaaacgaatgacagcaaagtcttaatttaaagacaagcgactctaaaacaaaaagccgccccagaaaacaagcctggggggacgaggcccaccccgtcgaggaaggaccaccctgcagcaacaccccggcccaagagcgccaccgggccccagcggggggggaccttatggacaaacccccccgaaacattcgggggggaaaacaaaacggggggggggctggcacgacagcggagggggtatcgggggggggtcaccctccccggagggggactcccccaccatcccgcggggggggggggggggccccacatcttgggaggggtgggtcgcattcttggcaggggtagacggcgg

SEQ ID NO: 106439 - DNA, 1077 bp, Zea mays
  Clone ID: MRT4577_28574C.1
atggatattcatgttgggtcatccccgcctcggtctgatggagcgacggtagcacgtgcttccacagctttaactggacaagtcgccttagaggtcggcgagctagatgcaaggagcctgctgtctgctggtgaggctgaggtcactccggatagtgctcttcagattgttcctgctgaccctccctcgtcaagccatgcctcagctcctccttccctgggtttaccgctgttcctttccaaacttcaggattttgttgatggaatatccgcccagttgaaatcctgcggtgccactattcctgaacaagctctatctctgatgcagtggaatccactattgctccagaaacagatcgatgacctgaaggcgtcgaatgctgctgcgttgtcggatatggcccaacgatgctctgaccttgaggaaaagtatactcaaagtctggccgacttggcccagacttctgcttttctggacggtgcacgttctttgaattcctctcttaatgcccagcttgactctgataagatggcacatgaggaggagaagcgagcactcgttgcctctcgtgacaatctagacaggctgtaccgtgacgccagcaactccttgaccatcttggagaggagccaccgcttcaccatgtccgaccaagatcatcaccgccatgagctgcaagtatcccaagatgaagttctgcgacttggacaactgttatcgatcaaggattccaccattaaggatctgcgcgcttccaagaagcttatcgcgcaagagctagaggccgctcgattggctattaaacctttagaggacagctgcaccatcttgaaggctcagcgtgacaaggctatggatatagccattcgcgctggatggatcctgatgaggaggcccggcgtcgtggtgcctgacgatattgttgtcgatgtcaaggccgcgctcgatgctgcaagttgtccttcttcttctgttgcatctgtgaaagaattgccagcaaagatgtttcgatgcagtgatgtcctgcagagcactctttttatcgagtcagcatcttttttagaggatgttatatga

SEQ ID NO: 106440 - DNA, 634 bp, Zea mays
  Clone ID: MRT4577_28575C.1
aatttcccccaccttcgagcgaagccgcgcacagcacaccagagcacctctccccgttgcagcagcagcagcagcatccatggcgcccaaggctgccgagaagaagccggtggagaagacccccgcgggcaagaagcccaaggcggagaagaaggtgccggcgtccaaggagggcggcgagaagaaggggaagaagaagtccaagaagagcgtagagacgtacaagatctacatcttcaaggtgctgaagcaggtgcacccggacatcgggatctcctccaaggccatgtccatcatgaactccttcatcaacgacatcttcgagaagctcgccggcgagtccgccaagctggcgcggtacaacaagaagcccaccatcacatcccgggagatccagacctccgtccgcctcgtcctccccggcgagctcgccaagcacgccgtctccgagggcaccaaggctgtcaccaagttcacctccgcctaatttggcacgtcgtccgtgtgtcttctctggtggatggatcgatgtcaccctgtagtttcctgttcggactctgtcctcttgtaacttgtgctggttgtgtgggatcatatttcatgatccggagaaatagtaatttcagttcttgat

SEQ ID NO: 106441 - DNA, 938 bp, Zea mays
  unsure (1)..(938): unsure at all n locations
  Clone ID: MRT4577_28576C.1
cattgggtacctcgaggccggccgggaaaaaaaaaacagccaaggaaatcttccgttctcaaaccaacctaggcaattcgccgcagcctctcaccctcgcgagtcccgacctcccgcagccgccgcacagatggcacccaaggcggagaagaagccggcggccaagaagcccgcggaggaggagcccgcgacagagaaggtggagaaggctccggcggggaagaagcccaaggccgagaagcgcctcccggcgggcaagtccaaggagggcggcgagggcaagaaggggaaaaagaaggcgaagaagtccgtggagacctacaagatctacatcttcaaggtgctgaagcaggtgcaccccgacatcggcatctcgtccaaggccatgtccatcatgaactccttcatcaacgacatcttcgagaagctcgcggccgagtccgccaagctggcgcgctacaacaagaagcccaccatcacctcccgcgagatccagacctcggtgcgcctcgtcctccccggcgagctcgccaagcacgccgtctccgagggcactaaggccgttacgaagttcacctcgtcttaggatccttgtaatggtcatgtgggcgtcggcggtaggcgtggctcagtttatgtgatactgctagcgatggatgatgatgatctgcgtgtaattgaattaaagaattgtgctgatctttctacaacactgttccacatcactcgttgcccgccagtgagccgccaattacatgtgcaaatctacatcaactttctgaaagaagctagttacttgaaaaaaaaaaaaaaaaaaaaaaaaaaaaaaaaaaaaaaaaaaaaaaaaaaaaaaaaaaaaaaaaaaaaaaaaaaaaaaaaaaaaaaaaaaaaaaaaaaaaaaaaaaaaaaaaaaaaannaaggggggggccgttttaaa

SEQ ID NO: 106442 - DNA, 1031 bp, Zea mays
  Clone ID: MRT4577_28577C.1
cggatctacctggacggggtcgacgggggatcagaagcctatggcctggccgtggctcgcattgcacatggtgggtgcgctggcttaccatctccccaagtgggagagtggacgtcataatttgtggtagagggggtacgcgttcgcgcggcccctgcttcatcgcagaaatcctccgcaacttcacagcgtatcatcgttttccatcgctcctactcctatcatccagaaaatctgagcggtattgatggcgcccaaggcggagaagaagccggcggcgaagaaggtggcggaggaggagccctcggagaaggcggctccggcggagaaggcccccgcggggaagaagcccaaggcggagaagcggctacctgcgggcaagtccgccggcaaggagggcggcgacaagaagggtaggaagaaggcgaagaagagcgtggagacctacaagatctacatcttcaaggtcctgaagcaggtgcaccccgacatcggcatctcctccaaggccatgtccatcatgaactccttcatcaacgacatcttcgagaagctcgccgcggaggccgccaagctcgcccggtacaacaagaagcccaccatcacctcccgcgagatccagacctccgtccgcctcgtcctccccggcgagctcgccaagcacgccgtctcggagggtaccaaggccgtcaccaagttcacctcgtcttagccgccttgtagtaggcgtcgttgttgtctgcttctcaagcaagcactgtgatgtgccgcttctcatggtagtagtggtggttggctggtgtgtgtaagtggtgcagtggcttttgcctgtgttatgaatttagtcatggtggtaatgcattgctatggttatttgaatgttgatcagtgatcttatgtccgcctaccatatatgtcagttgttaatcttgttaggtcttattcggttagctttcaatctatatagattgagtgagattgagtgagtttaaatctcaaacaagtcaaattttttttaaatttttcaatcc

SEQ ID NO: 106443 - DNA, 252 bp, Zea mays
  Clone ID: MRT4577_28578C.1
gcaccacagaatagggcggtgttcgtgtaaaaataaaatcacatgtttgaattgtgagtaaagacagttgccttgtcttcgagaagaaacataaaggtgaaaaatccatatgttgttagtgtaacatatactttcccttaattcagatcaaggtcagtgcatggcttgttggacattcgttatgtggctgtggtgagctccatccaagggtgatgttcatttcactactatttattcctatggatggtccca

SEQ ID NO: 106444 - DNA, 451 bp, Zea mays
  Clone ID: MRT4577_28579C.1
tatacgactagctatgacgtaagacctgcacgcgctccgtaagctcggatcctgtatagcgggcgccctctattcgttcgttctgaagaaacacactgatccagcttactcaaacatgtccgactgcagactactagagcctcaactacgggaaagctccgtcgggaaatatcacaaggccttagatctacgtagtcgctgcaaggacgtcccatggaccgggactcgatcgataccggaaatgagcataatactacatgcaaaacgtctccggagctggatcctgtgtgtgatggcagtggtgaacggcggaagacctgagccacacagaatccaagagattggagctgtagggatccactcacaatgctgtatcgttatcttcttgatggaccggtacagcgccgaagagaggaagcgctcgacaatgctagggatctcgacatcaaat

SEQ ID NO: 106445 - DNA, 4389 bp, Zea mays
  Clone ID: MRT4577_2857C.1
atggatcctaagggcaaggggattgtgatcaatgataaggagaaggagtctttcgtcaacgagcctaaagatgacaagtctaccgactcgggctcgggccacaaacgaaaagatgggaagaagaagaagacgaggcgcatcaaggagatcgtctactacgacgacagcgacgagtcctcttcctcccaaaaagacgacgacaacgaccatgaaaaaaagaagacggttaattcaaacttctcttttgattattctcgtattcctcaaagtatcaatgctaatttactcttcattccacttggtaaacctcctcattttgatggagaggactacgaattttggagtcacaaaatgcgtagtcacttgttctctctccatcctagtatatgggagttagtagagagtggaatgaaatttgatagctcggatagtcctttgtttatcaatgaacagattcataaaaatgcacaagctactactgtgttgttagcctcactgtgcagggacgagtaccataaggtgagcggattggacaatgccaagcagatctgggacaccctcaagatctcacatgaggggaacgacgtcaccatgctcaccaagatggagttggtggaaggcgaactcgggagatttgcgatgataagaggggaggagtcaacccaaacgtacaacaggctcaagaccctcatcaacaagataaggagctatggaagcacgcgatggacggaccacgacgttgtccgcctaatgctaaggtcctttactatacttgatccacatctggtaaacaatattcgtgaaaatcctatgtacaccaagatgtcgcccgaagaaattcttgggaaatttcggttcaagacggcgctaaagggtcgcaaggagcaccccaacaagaacaagacgaaggggaagcgctcctgcttcaaatgtggtaagattggtcattttatcgctaattgtaccgataatgatagtgaccaggaaaagaagagtggaaagtgggaaaagaagaagaactacaagaaggcgaagggcgaggcacatcttggaaaggagtgggattcggattgctcctcgtccgactccgacaacgaaggactcgccgccaccgccttcaacaagtcatccctcttccccaacgagcatcacacttgcctcatggcaagggaaaagaaggtaagcactcgtaatactagtacttatgcttcttcaagtgaggatgagtctagtgatgatgatgaaatagattattcatgtttattcaaaggcctagatagaaccaaggttgataaaattaatgaattaattgatgccttgaatgataagaataggttattagaaaagcaagaggatcttttgtatgaagagcatgataaatttgttagtgcacaaaattctcttgctctagaagttaaaaggaatgaaatgctttcttgtgaactatctacttgtcatgaaaccatttctactttaaaaggtgttaatgatgatttaaatgctaaactagtagtagcgaataaatctaactcttgtgtagaacatgttatgatttgcaataggtgcaaagattttaatgttgatgcttgtagtgaacacctagcttgcatttctaaattaaatgatgaagtggctagtcttaatgcccaacttaagactagcaagagtgaatttgacaagctaaaatttgcaagggatgcctacacgattggtagacacccctcaattaaggatggtcttggcttcaagagggaagtcaagaacttaacaagccataaggctcccatctccgccaaggagaaagggaaggcccctatggctagaagtgctcaaaagaaccatgccttcatgtatcatgataggagacattctagaaatgtttatagaagttatgatgcttttgattctcatgctatggttgcttctagttcttctattatgcatgatagaaatttagctaggagaaatgctattaatcacatgcctagaagaaatattgttcatgtgcctaggaaaacaaatagtgaaccttctacaatttatcatgctttaaatgcttcctttgctatttgtagaaaggataggaagataattgctagaaaattaggggcaaaatgcaagggagataaaacttgcatttgggtccctaaggctatttgtactaaccttgtaggacccaacatgagttgggtttatgcatccgggggctctagctggattatcgacagcggatgcacaaaccacatgacgggggaaaagaggatgttctcttcctacgtcaagaacaaggatccccaagattcaatcatattcggtgacgggaatcaaggcaaggttaaaggcttaggcaagattgcaatctcaaatgagcactctatttctaatgtattcttagttgagtcgcttggatataatttgttatccgtaagtcaattatgtaatatgggatataattgtctattcacaaatgtagatgtgtctgtctttagaagaagtgatggttcactagcttttaagggtgtattagacgacaaactctatttagttgattttgtaaaagaggaggccggtctagatgcatgcttaattgctaagactagcatgggctggctgtggcatcgccgcttagcacatgtggggatgaagaaccttcacaagcttctaaagggagaacacgtaataggtctagctaatgttactttcgaaaaagatagaccttgtgcagcttgtcaagcagggaaacaggtgggaagctctcatcatgccaaaaatgtgatgacaacatcaagacccctagagttacttcatatggacctcttcggacccgtcgcctatttaagcataggaggaattaagtatggtcttgttatagttgatgatttttcccgcttcacatgggtattctttttgcaggataaatctgaaacccaagggaccctcaagcgcttcctaaggagagctcaaaacgagtttgagctcaaggtgaaaaagataaggagcgacaatgggtccgagttcaagaaccttcaagtggaggagtatcttgaggaggaaggaatcaagcatgagttctccgctccctacacaccacagcaaaatggtgtagtacagaggaagaacaggacgcttatagacatggcgaagacaatgcttggagagttcaagaccccagagcgcttttggtcggaagccgtgaacacggcttgccacgccatcaaccgggtctaccttcattgcctcctcaagaagacttcgtatgagctactaaccggtaacaaacccaatgtttcgtatttccgagtttttgggagcaaatgctacattctagtgaagaagggtaggaattccaaatttgctcccaaagccgtagaagggtttttgttaggttatgactcaaatacaaaggtgtatagggtcttcaacaaatcatcgggtttggttgaagtctctagcgacgttgtatttgatgagactaatggctctccaagagagcaagttgttgatcttgatgatatagatgaagaagacgttccaacggccgcaatgcgcaccatggcgattggagatgtacggccacaggaacaaaaggagcaagatcaaccttcttcctcaacaatggtgcatcccccaactcaagacgatgaacaggttcatcaagaggaggcgtatgatcaagggggagcacaagatgttcatgtgatagaggaagaagcacaaccggcacctccaactcaagtccgagcgatgattcaaagggatcatcccgtcgaccagattttgggtgacattagcaagggagtaactactcggtctcgattagttaatttttgtgagcattactcttttgtctcttctattgagcctttcagggtagaggaggccttgctagatccggactgggtgttggccatgcaagaggagctcaacaacttcaaaaggaatgaagtttggacactggtgcctcgtcccaagcaaaatgttgtgggaaccaagtgggtgttccgcaacaaacaagacaagcacggggtggtgacaaggaacaaggcacgacttgtggcaaaaggttatgcccaagtcgcaggtttggactttgaggagacttttgctcctgtggctaggctagagtccattcgtattttgctagcatatgccgctcaccattctttcaggttgttccaaatggatgtgaagagcgctttcctcaacgggccaatcaaggaggaggtgtacgtggagcaaccccctggcttcgaggatgaacggtaccccgaccacgtctgtaagctctctaaggcgctctatggacttaagcaagccccaagagcatggtatgaatgccttagagactttttaattgctaatgctttcaaagttgggaaagccgattga

SEQ ID NO: 106446 - DNA, 588 bp, Zea mays
  Clone ID: MRT4577_28580C.1
ggccgcttttttttttttttttttcgtgtaacgaactccgagaggactttaattaacccatgcgccccatcggatcggcacatacagcgaggagtagtactagtacaagaattaaccacgcacggcaggccgagatatgttgggctgttgcatggatgcagacataatcgctaagggtggaccccgaactggaaagaatatgcagataggaacgtatccgttgcaataaaaccgtgcgtgacgtgcggctcgacgatgcaagatgtatctccccgagactacagcccgtgtttgagcgacgacttccacaacacatccaaccaagggacatgtatggaccacaactcatagtgcgcccaatctttcaagaagtgcaccacgccgccggcacggcacgaccgcaccactgccacgatccattctgtactcgcaggaacatagggcactgcacatacttagacagcctcctggacgccaagttgctctatgaacaatgccaacagaaggcgatgacgcgcggtgcctccaactgacggaagtgcgaaacagacgcggtgcaccgttaggttggaggtccacagacacttg

SEQ ID NO: 106447 - DNA, 1241 bp, Zea mays
  Clone ID: MRT4577_28581C.1
taatgctccgcgccgctttccctcctcccctccgtcttggttcttcacacctggttcttctgtctcccgttgtctctatcgtctgctccggtgaacccgcatcgttcctattccttgtgctgcttccgtcgtcggctccagtaaatcactttgttcgccagctcgagatcgtggacggcttgctaaaatcaggtttgttttcattgggtttccatttctggaagtgattaaggcgaagtaaatcttctttcctcgaaacgtatacactttggtgcatctgtggaaatctgatttgttgggtttctgatctatttggctctttgcattttttaaatcccctcctacaaatcctgctacctccccgtctttttttgtttgtttggaaaatttgtttcgtatcttccctcctcgtttttttgcttcagttcgaaatcgatttggtgggtttctgatggcaaccctcgccaccgcctcatgggtacgtgccgagccgccttatctgttcgctcaccactttacattggttcttgcgcctgcgatttcggtgtcgtaggatcatgcttgtgcggatgtgatggtcgctgtggcttcgcgtcggtgggcggtgggatttgggctgggattctcgcgccttgtctctcgggtttggggtttggtgcttcctcagtgcggaattggggattataactcctttaggtttgattttatctggcgtaactgcgggataatagcctagtagggaaatcgtggggattcttaaggattatcaagtttctgattgtatctctgccttatttagctcgtctgttgtggtggcttttccttcttgctgatgctgattatgcttccaggaatgagccacaaaacagtcttgatcggcaacctgtaggtatgcctcagatcatcgcttgctgcctctgttaaatgaccaagactaaatttttagaccttacacattaggcatccagtaaaacggtatcataattccaaaggtcagtaacgcaaacaaacaccttctaaatcttttccgtttgctgcagcagccatgagattctccttgatctgtttgcgacatttattcctctcttgaacaatatcttgactattccctccagtgaacagcgagacatatttctcattcttagggaagaactacaaatgagttgagatatagaagctttagctcaggattcaggcaggtacagataaaaaatggttgattagaaccttcaattctatgc

SEQ ID NO: 106448 - DNA, 358 bp, Zea mays
  Clone ID: MRT4577_28582C.1
atgttcttcttgagtcctgccttggacaatatccgaactagaatgtcctacccggggcacttccaccggaaatgtccgatccctgcacccgacatcggtgacctgagccactgctggtagatgtgacgaaacggccatggcggacgtcgatcgcctttcgagcgatcgcagccactgagacgtctgcgccctgtaccttccacatctttcgtcggcgccgacactgacgaaaatgctgatggaccttatggtacgagtcttcttcttactacatagctctcccgcagtgtgggagatatacatacaccaccacctgctgcggtcgctctcccaaatcctccagggaaggatgcggtag

SEQ ID NO: 106449 - DNA, 286 bp, Zea mays
  Clone ID: MRT4577_28583C.1
gaccgaggggcgggtctcgcaaacctactccccgttggggaggccacaaaggccggggctttttcaaccctttccctttttaaaacgggcccttggaccgagggagcttctccttttcaattaaaccggaacaaacttccctgtaagggccaccacacaattggggcctcttgccttggttacaattgagttgtttgcaagaaagaatgaaagaaagcacgattgcaaaagccaagctacaagagcgacaaataacacacgggtcactatttttttcaaggcacta

SEQ ID NO: 106450 - DNA, 784 bp, Zea mays
  unsure (1)..(784): unsure at all n locations
  Clone ID: MRT4577_28584C.1
acactcccactcatagtcacactgcacaggcagtagagcaagatagctagttcaagtgctcaacctcactaaggtaggataggaataggatcaatgaagcccagcagggcagcaatgttggccatggtaggcctagtggccgcggtgctgtcccccgcggccttgtccacggcggcgccgtcgttgatctctttgcccaactccgacagcccctcctatgacttccacgacgagtcatgtccaaacctgtggcagatggtgcacgacgccgtggaggaagcaatcaaggaggatatcggtgttgtcgccggcctcctccgcgtcatgttccacgactgcttcccacagggctgtgatgcgtcgcttctactgtctgacaagttctggagcgagctgaacatgcctcagaacaatggaatcagaaggaacgcagtgtatctcattgagagcattcgcgtcaaggttcaagatacctgcgggcccactgtctcctgcacggacatcatgaacctcgccacccgcgaggctgtgatgcacttcgaggtgccaggctacgaggtgccgcttggtctactggatagccgcgcgcccgctcccagagagaacgtagagcagctgccgggccccgacttcaacaccacccagctcatcgaatccttccagagtcgcggtttcgacatcaccgacgtcgtggccctctccggtgcgcacancgatcggggaggtcaagctgcggcagcttcaggaaccgctttggagagaacgcgactttgttcgttggctc

SEQ ID NO: 106451 - DNA, 360 bp, Zea mays
  Clone ID: MRT4577_28585C.1
attcagaaccatcacgttctcaagctgacatatcactgctagttgtacagcaaacattcaacatgaggaggttctgatccacagcaaacatctgagatttacagcaccaactgaagctacgacctacaatcctacagcgcagatctatatcaggtaacactttgtatcaccatggacaggccacttttacacattacatcaaagatgagcttattttgtatgctttacaacatcggcgctgcgacattagatgatcaaatattgcctctgcccagagctaagatcatgaccacagcctttgtggattccaaggatgcaaccagccaccaccttggggactgtgtgcccaagaatctcacg

SEQ ID NO: 106452 - DNA, 404 bp, Zea mays
  unsure (1)..(404): unsure at all n locations
  Clone ID: MRT4577_28586C.1
cccgggcgctgnagcgaggtcgtctggccgcggnngactggccgnacgagcggcgggcggtagcgagggccgcggnagggccgagtggccggtngcgctgcgggaggaggggccggcgccgcgccgcgcgtgtaggcggagcgcgcccctggtaggggctgtcgagggagggaagcggcggnatgcttgcnngcgtcgccgagtctgtnnggcgcgaggtagnncgggtgcagtatgagagcgtggcgcgacgtccaggtgcctgcgctggtacgagtaagctttgcgggagaatcgacgaacgctcgtggcacaagctccaggtccacttgcctgacgctcaacaagtagcagcttgctgcagcagtccccaacggctagcaatgtcggcgtagccagcttcg

SEQ ID NO: 106453 - DNA, 378 bp, Zea mays
  Clone ID: MRT4577_28587C.1
aaatgcttgccacaacaggttaaggggcgtttccaacacaaccgcgaccacgccccacctcccccccccctgaaaccccgggggaggccgaggaaaggcccagccccaccccaaaaggggaggcggcgaatcccccccaccaagccccccccacgggggccccccgcggaaacccggggaaccccgggccccacccccttgcatattgttatggggcacccccaaacaccacgcacaaaattttaagacacggaagccagatgtaccgccccaaaaaaaggggggccaaaaacccctcctgggcccctccccaaggcccccccacgatgcacaaggtcctaggggcaaaaaacccccaaaaaccccccagaacaaaag

SEQ ID NO: 106454 - DNA, 1093 bp, Zea mays
  unsure (1)..(1093): unsure at all n locations
  Clone ID: MRT4577_28588C.1
ctccggcgggatccatctctcattccctcccacgcgcccccacgccgacacggaatgccgcccactacagccccggccgctgccgcggcgctcccatcaccttctcaccgcaggctccccgccgcgaaatccgtctggctgaaccccaacctcccctcttctcaccccctccaccagcgccacaagtccgccgccgagctccaacaacggcagcacgatgaccgtacgatcgacgtcccggccctcgtcaccgcgctctcggccgcgcggacggctcccgacctggcagccgtgctcgccacgcaccgacccgtctccgcgcgcctcctcggtgcgctcctctcccgcctccccgacccccgccgcggcgtcgcgctgctcgacctcctcgcgccggacctccccgcccccacgctcctcatcccatataacctactgctccgctctgcttgccgcgctggcgagctccgcctcgcctccggcctcctcctcgagatgcgggagaggggcgtgacccccgacgcgttctcgtactccaccctcctcgccgcgctcacccgtgcgggccacctcgaccacgcgctcaccttcctgccgctcatggaggatgacgccgtggctccggacctgatcctcttctccaacctcattcacctcgccctccgcggtggcgacgcgcccaaggcgctggcgctgttctcccggctgcgtgccgcggggatcaggcccgacctcaaggcatacaacgcggccgtcgccgcctactgcaagtccgaccttctccgcgacgccaagcggatgctgctccacgacatgccggccgacggcgtcgcgcccgacgcggagacatactcccccatcctcgcggcgctggcgcgaagggggcggcacctcgcggccgtgtcgctgttctcgcacatgcgcgccgtggcgcgcgtcaagccggacatctcggtggttcacatcatcctcaacgcgtacgggcagctggacctcgcgcgcgaggcggaccggctggtctggtcatgcgccgggcaggcgtgccgccaagcgtggtgacctacnacaccatgctccgtgtgtacggcgatgc

SEQ ID NO: 106455 - DNA, 459 bp, Zea mays
  Clone ID: MRT4577_28589C.1
gacaacccaagccaaagtttatcacattactgctgggcgggaaactcattggcacatttgccgaaccacccactaaatttatacattcacaaaacaacgcctaataatctgatagcagacgcctgatggggctcacactggaacaaggtatcatgccctcctcaaaattaaagctacttcctacactgaacacacaactgcctatcatgtttaacggtaaagatcgggcacacaggcctttaacaaacgaacttgtatgggcaccagccaacaggtgggcgatccgtagcccaaccactattcatccaggcattagcttgatatctagaaatgtaaacatgcggcccaacacattatccatactgtgcagagacttttagcagccccctcctttgaattatctccacaactactttatccttgcggggatgggcaaacaactgctttttcccaacatcc

SEQ ID NO: 106456 - DNA, 178 bp, Zea mays
  Clone ID: MRT4577_2858C.1
aggacactcacacctctcttcttctctttcccttcgcattaatggacgctctctctctaaccacattcgtcacgcgcacggagtaggacactcgcccgcttcaggcgtaaacttcacaattcaagatccacggcaaaactcgtcgagcttgggaaggaacggcaccgtcaggatctgg

SEQ ID NO: 106457 - DNA, 1552 bp, Zea mays
  Clone ID: MRT4577_28590C.1
agtgcctattgatgcagggaaggaacaaagctctaccactgattgcgaggctccaactaaacttcagaatttggtctgttcaaagagtacacaaaaccattcccaatcccatgttaaattgggtctgtccaaagaacctggagacatttgtgcaaatatcacacaatattcccatcgaaagaagcactttgcagaacatagtgcagtgaattgcaatgcagaccaacactgtttagcagtgatagatgattgcataaagcgatctggcctaaactctgctgctcctgattttgttcccttagctgttaggaaatcaaataccagcgatggttcctgttcttcatctggaacgaacgtatcgggaattctgaaagagatcaatagtttgtcggaggtgttatgcaataattattctgatgaaattaagctagaggagcatgaccacagcctcctccaatcagtaattgggaatcttcagagttatcttcacaaagcaagcaaggttcctgctatggttgattctgacaagtcagggggactaaaggcttgctatgctcagaatgcagtttcaaaacctgtcgcaggagactacaacggtagtttcactgccgataatggaaaaggcataagtatctctaatcttggtgattctagtcctttggtcggtgacttaaggaaaaagagcgtgacagggtaccagcagcctgcactcagcaattttccaaaggagctctcatgggaggagcggtcacaggctcttatctataagaaactgtggtttgatgcagaacgcacaaactgtgctttgaagtatcaacttaaacaaacgcgtgtggaaatcgacctagagtcaagcacagctcatattggcgggggtccaagaaacagttctttccatctatgtgatgtgggtgtagatccaagtagttcctatggatctgccataacttgcccaccgatgatgctcaagggccatcctggagaaagaaagagtcataacctcctttctgctgctgaccacattcagtcaggagacagcagtgctctgtcaagaccaaaaggttacatagccgtgccagagaatattgaggatggatatttcttgtcagggccggaagaaaccggtgtccgccgccatgcacgtcctggtctacaaagtaggcccctcggaaggttgaacacaagtacgtcagatggaatgtcatcctcgtatgtcactggaagggatgacattctgcgtggcagctgcgagtttggatcttcagattgggagcatgtgctgaaggaagaaatcggctcaacctaaaaaaaatttgaagggatctggcaataagtatatagtactgtacatgtatgagctaccacgaagctaggaattcggatcttcttgatctttttttttttgcttgacaaggctgatgaatgggcactggttggaatggtgctgctctagcctacggaaaaccccttatttatcttgtcttgggaacaatgcctataaatcataacttggatggctatgctaattttctactgtgccgaatgcagatgt

SEQ ID NO: 106458 - DNA, 1161 bp, Zea mays
  Clone ID: MRT4577_28591C.1
cttgggaccctcgaggccggccgggatctcgcacttgagttgagactactgttgtgactattgtgtgcgtgagagagaaacagaagaggaaaaggaatccatggcggcgacgctggcgaggagggcggggcgctccgcggcgacgacgctatggggcgcggcgaggggcttcgcatcggtggggtccgacatcgtctctgcggctcccggcgtgtcgctgcagaaggcgcggtcctgggacgagggcgtcgccaccaagttctctaccacgcctctcaaggacatcttctacgggaagaaggtggtcatcttcggcttgcccggtgcatatacaggggtttgttcacaagcgcacgttcctagttacaagaagaatattgacaagttgaaagcaaaaggaatcgactctgttatctgtgtagctgtgaatgatccgtatgtcctggatggatgggcaaaaaagctagacgctaaagatacaattgagttctatggtgactttgatgggagtttccacaaaagcttggatttggagatagacctttctgctgctttgcttggccgccgttctcacaggtggtccgcctttgttgacgatggtaagatcaagtctttcaatgttgaggaagcaccgtccgactttaaggtttctggtgcggaggtgatcttggaccagatctgagctcctcaatgaacttcggccatcttcagtttgtgcggcatacttcctctgcagcagccgaataaaattaaatctcttacgacccgtgtaagatgttaaagatacgatgcgccccagactgtatggcctcgcctttcggcctcgggttttctggaaatgaattgatcagtgttcactgtgtgcgttatttctatttgcattggcttcaattggagcaatgaactagatttacaggccggacaaagaacatcgacctgaacagcctgcctgtggattatactctttcttggtgaaaatgcttgatagagaaaaaggggaaaaaaaaaaaaaaagaaaaaaaaaaaaaaaaaaaaagcgtacctagctaatggactcaacttgcagagattatcaaactgctgcctttatattacagttgaagaattgtgttatgtagtttaatactgagttacttatcacactgcctgatttagcaagct

SEQ ID NO: 106459 - DNA, 150 bp, Zea mays
  Clone ID: MRT4577_28592C.1
cccactcgtacgcggagaccggccgacactctctaaggacctataccgcggcagtacccacacgttagattctagatgagcgttaccttggggcttcccggctgaatcggggtgcagatgcaccgcgactagggcccgatggcctggtat

SEQ ID NO: 106460 - DNA, 714 bp, Zea mays
  unsure (1)..(714): unsure at all n locations
  Clone ID: MRT4577_28593C.1
ccggccgggttctcgagcccctagtagacccacgtctccggtccccctctcctcgcgcccgccatggcagcctgcggcggcgccggctgcgggccgcagtgctcctcgtcctcctccgcgggcggccaggaggatgctctggtggagagcatgggacgcctttcgaccgcctccgccgccgccgcgtgcggcaagtgcgacggcggcggcgcggccgtcgcggtggccggcggcgtcggcatgtgcgccggctgcttccgggctcacctcttcggcaagttcaagctctccgtcacgagcaacgccatggtgcgccccacagacgccgtcctcctcgccttctccggcggtcccgcctccagggtggctctgcagttcatacacgagatgcagtccaaggcgatccagagctgggaggcgagcaactcccaggccctgccggtcttcagcctcggcgtcgcgttcgtcgacgagaggagcgtcatctcagcgagtcttccggggcacgaaatccaagctgcgatagaagatatcaggtccgtcgtgtcgggtctgtcaccgggggataagcgagtgcacatcgcctctctcgaggaggcgttctcgttcgggtcagacgacaaggcggccaggctgaaggaggtgggcggngtgatcagtgacgagacggtcagggacgactttgagaggcgcctgcgcatgctttcactgcaa

SEQ ID NO: 106461 - DNA, 2010 bp, Zea mays
  Clone ID: MRT4577_28594C.1
tgggtacctcgaggccggccgggccgtcattcagcccctcctctcctccgccttctcctcctcgaccatctccgcgcctcccgcggccggccgggtccgcgaggacgagagtggcctcctctcgcggcgcctgctccggctccgcttccgctcgccggccgggaccgccgcggctgccgtcgagagatgggcccaggaccgcgtccacgtctcgcagccggagcttcggcgcgcaatcgggatgctccggcgcgaacgtcgctacgagcaggccctcgagattttctcttggatggaatcatgcagctcccttcgactgtcgtcatgggatcatgcagcaagactggacttgattgctaaagcttacagtacttctcaagccgaggaatactacaacaaactacagagccctgctaccagacaagcagcatcgttccctctcctccattgctatgttatggaaagagatgtacagaaggctgaaaccttcatggctcagttgcagagtcatgggttgcccgttgatcctcactctttcaatgaaatcatgaagctctatgttgcaacctgtcagtatgagaaggtccttagtgtaattgacctcatgaaacggaacaacattcacagaaatgttctctcctacaacctttggatgaatgcttgtgctgaagtctctggtgttgactcggtacaatcagtgttccaggtgatgttgaatgatgagacggtcaaggttggttggagcacatactgcacattagccaacattttcaggaagaatggactgaacaatgaagcgcaagcgtgccttgtgaaagctgaagcaaaattgtcacctgcagggcgcttaggatactcttttgtaatgacatgttatgcggctctgaatgacagcgatggagttatgagaatgtgggaggctagcaaaagtgtgccaggtagaattcccactgcatactacatggctgctatgtcatgttcaataaaagttggcgacatcagccaggccgagtgtatctttggaaagtgggaagcagggtgcaggaagcatgatgtgagggtttcaaatgttcttcttggtgcttatgtgaggaataggtggattgaaaaggctgagaggctccacctccacatgctagagaaaggagcgtgtccaaattacaagacatgggagatattgatggagggctatgttcaaagcaggcaaatggacaaagctgtgggttgcatgaagaaaggtttgtctctgttgaagagttgccattggagacctccagttgaactgatggaggccattggcaaacatttcgaggagcaaggaagtgctgacgatgcatatcgatatattaaggttctccagagatttaacttgacaagcttgcccctgtacaagtcattgattcgagcatatatcaatgctgacgttgtgccaccaaatgtccttgagatgattgcaaaagatcagattgatatggatgaagaaatggaccggttgatcataatcgctggcaagatagacatcacatgcaatggatagtcttcaactggaacaggtaatcaccagtcaaatgataaatatactcatttgactttgtcaattagagatgcaaagtgaagcaacaagttgaacctgcaaattactagatgcaaaaaaggcactcctggataccttgtttggtgttcatgcagtcctgctaatatgaacaactccatcttcttgtgaatcttaagtatatttggaaaatgtggaaaacacgaaaacctgaaccagcacaagaatgcttacaacttctcaaggatcacctgaacctttggactatcagaacttcatcgaacctgaatcaacattccccggtcatcacctgtaattagtggcgtaaccattcttatgatgcaagcacatagcttgcttatttgttccttaaatcatcactattcacgaaaagctggtttgcagccactaacatctcttatgaattgttcttggagaattaatcactgatcagcccc

SEQ ID NO: 106462 - DNA, 186 bp, Zea mays
  Clone ID: MRT4577_28595C.1
gttgttcataatcggggggtttcattccagcaaccttcattcatgaaactacacccataccgtcctgtatcgatatcatattcaagacttgctccgttgggcctggcccgaacagtgtcccacgcgaccataatcctcgctatgggaatcaaaggaacacccctttccctaattcccttctgcccc

SEQ ID NO: 106463 - DNA, 144 bp, Zea mays
  unsure (1)..(144): unsure at all n locations
  Clone ID: MRT4577_28596C.1
ccnnnnaaaacatttcaaagggtcgcagaaacatccaacaaaagactggaaatttggggctccacgtttaattggccaacataaccaaattatgggaccagaacatgtattttatattttgcaaaaacaaaagaaccaaagaac

SEQ ID NO: 106464 - DNA, 548 bp, Zea mays
  unsure (1)..(548): unsure at all n locations
  Clone ID: MRT4577_28597C.1
cacgcctgcatgtaccgggccgctattacacggtcgacctcagcgttcggtggnaaccctagagggaacaggtgacggcggcgcgctacctagaccgggatacggaggatagatccctgctacttcccggcgcgacggcgccagcaaccggactgcaggctgcttgaagagctcatcatttaatatgaaaggaaggcaagttaatgcaatacctgaagctggatcgggtcgggttcaaagctaggtcatagagtcatagccgggatttgtttcttaaactgggctaaagccctgaagcgcatttcaccggtactccagctgagcctgtatactgcttcagacccaacataaactggtgcaccctgatctattaggacagggtgcaccagattatcggggccatgcagagctctacagctacagatgtggacaacgggaacgggatcctgtgcattgaccacggtataaagctcaacccagggacgaagctatataatcttgacgatacgaaggccccacaactctgtatgtaactgaaaaccccatgc

SEQ ID NO: 106465 - DNA, 724 bp, Zea mays
  Clone ID: MRT4577_28598C.1
agaagtatttttccctctgattttagtaaaaatccttctaatgaagaactaagatgtttatctctcaatcaccatgcttgcaacatcttagttgactctctttctagaagtgcttattttgccatcatgagcagtgatagtgatctatttgttgatgctcatgatttatggaatagaattaaagaaaaatattctgtgacaaactgtgatgctcctactccctatattacttgtgttactaaccattcagagggagaagaacaagaacgacggcacccaaacgatgaatccacctcgtcgacaggtttgttctccactagtgataaatgttttattgctaacaatgacggtggagacgaaagccgtgatgagaaggaatatgaggatgatagcgaggatgaatcttcatcatcacaaggtacattttcctatattgcttccactgacataaatgacagggaaaatgagaccgatgatgtggaagaagaggagattctgccgtttctacaaccatctcaacaaaacggacaaagctctcttggttaagttggtgagaaggaacacggaacacggcgagacgctttttaggctagaggagactcttataaaacaaacacagccctggagagatgaccaaagaacatgaggagctaagatactctcatgatgtcttggatccacggtatgattcaatggtaaatgggcaaagtaattatgatgacgc

SEQ ID NO: 106466 - DNA, 869 bp, Zea mays
  Clone ID: MRT4577_28599C.1
aacatacccatctcctcctccctccgtattctattcctcctcctcctcgtctctctccagcactgactttcttcgaatccctcgcccccctctgctctgttagccccgtgctgccatccattgcggggctgcgatcctgcgccggtgctggcacctggtaatcagcaggagcaccgccgtccggcgcatcggattagggtgtcccagatttgaaaggctgaagttaccctttgttggaaaaggctcgccatagagctaggacatggacatggcattgccgattgtgaatgccaccacagcagcgcttgctcgtgtctcagctgcattcaacgctcctcttgcccgcgccgtcgtcttcggggttcatatcgatggtcatttggttgtggaaggacttcttattgccgtcatagtgtttcagctttccaggaagagctacaaacctccaaagaagccacttagcgagaaggaggttgatgagctatgtgatgaatgggaaccagaacctttatgtcctccagtcaaggagaggtctcatattgacccaccaatcttagaaagtgctgctggaccacatacgaccatcgaggggaaagaagttgtaaactttgcatcagcaaactaccttggtttaattggcaacgagaaacttattgattcttgtgttggttcattggagaaatatggtgttggatcctgtggtccacgtggcttctatggaacaattgatgtccaccttgactgtgaagcaaaaatagccaatttcctgggaacaccggactccattctgtattcgtatgggatatctaccatattcagtgttatacctgccttttgtaagaaagagatatcatagtggcctgatgagg

SEQ ID NO: 106467 - DNA, 5336 bp, Zea mays
  unsure (1)..(5336): unsure at all n locations
  Clone ID: MRT4577_2859C.1
atgaatcctaagggaaaggggacggtggtcaatgacaaggataaggagtccttcctcaatgagccaagggaagacaagcccactgactctggctcaaatcataagaagaaggacgggaagaagaagaggcgtatcaagaagatagtctactacgacagcgacgaatcttcttcttcccaaagagacgacgacgacgagaaaaagaaatcggttaactcaaacttttcttttgattattctcgtattccgtttaactccaatgctcatttactttcaattccacttgggaaacctccgcactttgatggagaagactactcattttggagtcacaaaatgtgtagtcacctattctctctccatccaagtatttgggagatcgttgaaaacgaaatgctttttgatagcactgacaaccccgttttcattaatgagcaaatccataaaaatgcacaagctacaactgttttgctagcatccttgtgcagggacgagtaccacaaggtgagcggcttagataatgccaagcaaatttgggacaccctcaagatttctcatgaggggaatgacgccaccatgatcaccaagatggagttggtggaaggcgaactgggaaggttcgcaatgatcaggggggaggagccaacccaaatgtacaacaggctaaagaccctggtcaacaagattaggagccttggaagcacgagatggacagaccacgacatcgtccgacttatgctcaggtccttcactgtacttgatcctcatcttgtgaactcaatccgtgagaatcctaggtacaccaagatgacgcccgaggaaatactcggaaagtttgtaagcgggcgtatgatgatcaaggaagcaagatacattgatgaggcattgaatggtccaatgcccatctacgagcctcaaaccgttgctctcaaagcaacaagtagcatggaggcgctacctagcaaggtggcgcaagttgaggcggccgggctaaacgaggatgaaatggccctcattatcaagcgcttcaagatagcattgaagggacgcaaggagtactcaaacaagaacaaggcaaaaggaaagtgttcctgcttcaagtgcggtaagacaggtcattttattgctcaatgtcccgataatgaaaatgaccaggaagacgaaagacatgggaagagggagaaaaagaaggcctacaagaaggcgaagggcgaggcgcaccttggcaaagagtgggaatcggattgttcttcgtctgactccgatgatgaaggactcgccgcctcggccttcaacaaatcgtcgctcttccccaacgagcgccatacttgcctaatggcaaaggagaagaaggtaaacgctcgagaaactcctaagtactctacttctagtgatgaggactctagtgatgatgaagtagattacactagcttgttcaaaggattagatagggctaaagtagaaaagattaatgagttgattgatgcattgaatgaaaaagatagactgctagagaggcaagaggacatcttgtatgaggaacatgacaaatttgttagtgttcaaaagtctcttgccttagagattaaaaggaatgaattactatcttctgagttatctatttgcaatgaatctatttctagcttgaagattttgaatgatgatttaaatgctaagctagaagtagttaataaatctagtccttgtgtagagcacgttgtgatttgtaataggtgtaaggatttcaatattgatgcatgtgttgagcaccttaattctattgcaaaattaaatgatgaagtggaaagtattaatgcccaacttaagacttgcaaagatgactttgacaaattaaaacttgctagggatgcctacaccattggtagacatccctcaattaaggatgggcttggctttcgaagggaagccaagaacttaacaagtcaaagggctcccattctcaacaaggagaaagggaaggctcctatggatagtagtagtcaaaagaatcatgcatttatttatgatagaaaattttctaggaatgctcattataataggagttataatgcttatgattcacatgccatgattgtttcaagttcttcctttgtgcatagtaggaatatgcctagaaacaatgttgttcatcatgtgcctaggaaaatgcaaaatgaatctgctactgtctttcatgcctgcaacactgattttgtactctcatgcaaaaataagaaagtggttgctaggaaattgggggccaaatgcaagggagacaagacttgcatttgggtccctaaggctattgttactaaccttgtaggacccaacaagagttgggtttatgcatccgagggctcaagctggattgtcgactgcggatgcacaaaccagatgacagaggagaagaagatgttcacctcctacgtcaagaacaaagattccaaagattcgatcatctttggaggcgggaatcaaggcaaggttaaaggactaggaaaaatagctatttcatccgagcattccatatctaatgtgttcttagttgaatcgctcgggtataacttgttgtccgttagtcaactatgtaatatgggttacaattgcttatttaccaatgtagatgtgtctgtctttagaaggagtgatggttcattagcttttaagggtgtactagacgacaaactctatttagttgatttttcggaggaggctgttctagatgcatgcttaatcgctaagactagcatgggctggttgtggcatcaccgtctagcacatgttaggatgaagaaccttcataaacttctaaagggagaacatgtgttaggtctaaccaatgtaactttcaaaaaagatagaccttgtgaagcttgtcaagtaggtaaacaggtgggaagttctcatcatagcaagaatgtgatgaccacatcaagacctttggagctacttcacatggacctcttcggacccgtcgcctacctcaacatcgggggaagtaagtatggtcttgttattgttgatgatttttcccgcttcacttgggcattctttttgcaggataaaacggaaacccaagggaccctaaagcgcttcctaaggagagctcaaaacgaatttgaactcaaggtgaaaacgataaggagcgacaacgggtccgagttcaagaatcttcaagtggaggagtaccttgaggaggaaggaatcaagcacgatttctccactccctacacaccacagcaaaacgtgaagaaaggtaggaattccaaatttgctcccaaagctgtagaagggtttttgttagattatgaccccagtaaaatgattggcgatactctcaagggaatcatcgtgagagatgattccactattctttattcataggacactaacttgagcatatttcttcattatttacacaattatccaatgatgcctgacaggtattccacgcacttcagctttcaagaaacgaaatggaaactgaatccatcgggtacttcgatctatgtagaatagaatgaaaatctgcagtgcacgtgcacatcatgttagtttaccatccaggactgcagaagccttggacacagccctggcaaccctgtaaatctcgtgctgcagcagtcgccacgtctcggttgtgttggacttcttagccttgtccatggccgagactataccagggaaggctttggtcccccagtcgtcttgatccgatgatgcatatatcatatgcttgtaccatggtctcccgaccagtccttctcggttggtgaacgctcgctcggccatcatcaaccggtcgtttatctccctgactttcagcgtatacttacttgtctttaggctccagttttctgcttgcagcaacttcttctctttgtaaattttggtggcagcactctcgagctgcttgatggagttctgcaaaggagagaaactgacaggaaatcctttacatttatctacgatatcttttgtgcactcctccagttcggaggcataagagacgtaattgaagggtatgatctcgtcgtcagcaagtttcagtgcaaacagacccgaaacccaggccactgcaacatgcctgttgaacaattctactacacaaatctcttgcgaaacatattcaacattgatcgcagtggtaaacgagaggtattccacaaaccagctcatatgacgtgttgagttccaggactcccatctcctcgataaaagctgcatcacctgatccagcaacagccactacagtgtccggtggatgagggtgcatcatggtgtcatacaaggtttgagctggttcaccaaggtgcgttaccaccttactcgaatagtctctgattttgccgaattcaggggtggtaggaggagtccatcagggacgtgcaaattcctaggaaggtccctggtgtcttggaggtataagaaacatacttccgttcccctatccaccgctgaggccgattatgtctccgcaggtcagtgttgcgcgcaactactttggatgaggcaaacccttcggaactttggctacaatttgagcgaagtcccactcctatgtgacaatgagagtgcaatccgcatggcggataatcttgttgaacacagccgcactaagcacatagccatccgtcaccactttcagagagaccaccagcaaaagggagatatcgaagtgttttatgtttgcaccgagaaccagctagccgatatctttaccaagcctttagatgagaagaccttttgcaggctgtgcagtgagctaaatgtcttagattcgcataacttggattgagggcgcggcattcgccgcccattggacccagcggatggtctccccgtcggcggcgggcgcaggcagcgccggggtgcccggccggccgcgggggaaactagttagtccaaagatttgtgttgggcaattcaaccaccaaaattatttaggaactaggtgtaagcctaattccctttcactttggctacaatctgagcaaagtcccactcctatatgataatgagagtgctatccgcatggcggacaatcccgttgaacacagtcgcacaaagcacatagacatccgatatcactttttgagagaccaccagcaaaagggagatattgaagtgttttatgttagcaccgagaaccagctagccgatatctttaccaagcctttagatgagaagaccttttgcaggctgtgtagtgagctaaatgtcttagattcgcgtaacttggattgattcatagcatacatgtgttttatgccttgatcatgttccttatgcattntgttgcttatttatggtgctcaagttgtacacgttatccc

SEQ ID NO: 106468 - DNA, 469 bp, Zea mays
  Clone ID: MRT4577_285C.1
ccgggctcttctcttcccgctacaatctttttggtctcttcaagcacaggaggggggggagaccagttcatcgacgaccatatcgtcgagttcaaagaggtcttcagccttttctacaaggacagggatggttgcatcacgaccaagagctgtgcactgacatccactcactgatgcaaaatcctacagaagctgagcggcgcgacatgatcaacgaggtcgatgcttatggcgacagcaccatcgatttcccagagctactcaaccttatgagctcgcaagatgaacgacacctactctgaagaagagctcaatgaggcctcccgtgtgtctgacaaggaccagtactgatagatctggtgcgaacagctccggcatgtcatgacaaatgttggtgataagctaactgatgatgaggtggacgagatgatctctgaggctgatgcttatggtgatggccacatcaact

SEQ ID NO: 106469 - DNA, 1252 bp, Zea mays
  Clone ID: MRT4577_28600C.1
tggtacctcgagccggccgggagaattgctgctgggtgctggccgttgcgggcgaaccgaaaatcacgggcgcgagagatcggagcacggcatgtcggaggagcagttcctcgccgtggcggtggaagccgccaagagcgccggcgagattattcgcaagggattctaccagaccaagaacgtcgagcacaagggccaggtggatttggtgacggagacggacaaggcctgcgaggacctcatcttcaaccacctccggaagcacttcccggaccacaagttcatcggggaggaggagtccgcggcgctcggggccaccgctgacctcaccgacgaccccacctggatcgtcgatcccctcgacgggaccactaatttcgtccatggtttcccatttgtatgtgtctccgttggcctcaccattgggaaaattcccactgtcggagtcgtcttcaaccccatcatgaacgagcttttcacggcggttcgtggaaaaggggctttcctgaatggctctccaattaaagcatcatctcaagatgagttagtgaaggctcttctggtaacagaggctggaaccaatagagacaagaccactgtggatgatacaaccaacagaatcaacaggctactatacaagattcgatccatacggatgtgtggatcattggctttaaacatgtgtggagttgcctgtggtagactagatttgtgttatgagataggatttggtggtccatgggatgttgctgctggtgctgtaattcttcaggaagccggtggccttgtttttgacccaagcggcggagagtttgatttgatgtcgcgaagaatggcaggatcaaacagcttgctgaaggataagttcgtcaaggaactgggggatactaattgaaacaaatgttagtattattcgtggaacagattaagacaataaggttgccccgccgcatggtgattaacttattgtttgggcaacaaaattccatgtaattctgcacctgtacaactatgttggacgcagaacattttattgagttttgtgattacatgggaatacataggttgaggcaacggtccctactttatggcaatatgtttgggttggaatggcttgagtccaatttcaagtgtgctgcaaggaggaaagtaaattgctggatctttacgcatttgctgataataatatatggttgctacgctgcaaacaatttgcggtggcataaaaaaaaaaaaaaaaaaaaaaaaaaaa

SEQ ID NO: 106470 - DNA, 456 bp, Zea mays
  Clone ID: MRT4577_28601C.1
ccctggccgaaggaaaaattaacatgcggggcctcaaccctgcacaggggggtgtaacagggtttttctcagaccccggggaaacaggaaagggggggggggcgttacaatatacttttcgattaatcacccgtcgggatgggaaaaaaaaagatggtgatgattttgagattttaaagcaacagggggggggggagcgtacattgtacccctgcctcctccattttcccacacgggtttgttggttttttcccccttgccgggttgcaattagggttgcaacgcctcaaagggccatgacaacgggaaccattcgggtgaccaagaaaccccttaacctttccaaggaccacggggggggggggaaccacccgttccgttccgccgttgtttttggttgccgaaacagttgttttatgggtggcgggggttgttggggggggtggggaactaggg

SEQ ID NO: 106471 - DNA, 442 bp, Zea mays
  Clone ID: MRT4577_28602C.1
aattagtatcccccagttccttgacgaacttatccttcagcaagctgtttgatcctgcattcttcgcgacatgaaatcaaactctccgccgcttgggtcaaaaacaaggccaccggcttcctgaagaattacagcaccagcagcaacatccctggaggaaaattagcagtttgagatgaagtgatgaacacatgcagttgtttttttaaaaaaaccactgcaattaattttgttaaaccgtaccatggaccaccaaatcctatctcataacacaaatctagtctaccacaggcaactccacacatgtttaaagccaatgatccacacatccgtatggatcgaatctgaaaaaaaaagaacaacagttaagaatgttgatacttgaactgtatttaatattgaggcaactgatgttactttcacagtttattttgatagctgc

SEQ ID NO: 106472 - DNA, 249 bp, Zea mays
  Clone ID: MRT4577_28603C.1
aaggggcgccagggtgtcataaaaccccggaattccccttcttgcttttttgaaaggggcgggccgggaaaaaaaacaaccgggggtttaaacaggaaatttggccgcttgttcttaattttgtttaacaaccttgggagaacaaaaaggtctaccaaggttggtacccacttggtacttagaccccccttgggcgaggtttaaaaagcccttgggcccacccacccggcaaaacccaacaggtgaaaa

SEQ ID NO: 106473 - DNA, 355 bp, Zea mays
  Clone ID: MRT4577_28604C.1
aatattttttttttttttttttttttttttggttaatttttttatgttctggtgcgatatacaccaaaaaactttgcttagaagagtgggctcaaagaaacagaacacaagcccgatattcgtgtaaaattaaacacaaacacaatggcacatgaaacctgtcaactaaaccagttccacaatagtttcttaaaatgtgcgcataatcacggggagacataactgggaaggcaagacaaatctttcttccaggttaagaaatacactttttcagccaaacgagtttgctcaaagataaccccaaaacccttccaacatacggaaacccggggatagcatccccggggcccatcat

SEQ ID NO: 106474 - DNA, 1437 bp, Zea mays
  Clone ID: MRT4577_28605C.1
ccggccgggagaaatggacgccgcaaattccacccacgttttgcatggtctatatatgtatgtatagtggcatccggccgggagcaagaagctgaaagctaaaggcagaagcagagataatggacgacgtgcctgtctggttcgtctcgctggcctgccttggtgctctgtacatcgccaaaatctgctggcggcccctcgcctatctcgcgttgtgcctgcgcgggccgaaggacctccaccgctacggctcatgggccatggtgactggcccgacctccgggctcggccggtccatggccatggagctcgcgcgacggggcctcaacctcgtcctcctcgacctcgacgccaacaacctccaggagacctccgaggccatcaagtccgtccaccccgtgaagataaggactgtggttctagacctctccctcgtcgccacaccagaaggcgacaaggcgatccgccgtctgcgggaggcgatcgaggggctggacgtggggatactggtgaacaacgcggcggtgaacacgcctggcgcggtgtacctgcacgaggcggacatcgagcgctttgtgcggatgatacgggtgaacttgtgggggctcaccgaggtcacggccgcggtgctgcccagcatgctagcgcggcggaggggtgccatcgttaacgttggatcgggctccacggtggccgtcccgtccttccctctgtacaccgtctacagctccaccaaaaagtatgtggctcatctctccagaagcctttacgtcgaatacaagagcaaaggaatcgacgtccaataccaggtcccgttctatgtgcacacgcgcatgctgtcgagcgccgtgaaggccaagctccggccgtggttcgtggcgacggcggaggagtacaccagcacggcggcgcggtggatcgggaacggcccggtgtgtgttcccggcgccgcccagaacctccagtggtgcctcaccggcttcgtgccggactgggtccacgactggtaccggatccgcctgcacctgcagcacagagccgtcctccgcggcggtcgagccgcgatcgccagcgcccattcacgcgccgagaaggccgtgacacctgacgatgacgacgccaattcagttgcgccaaagatcagtgcctagccatttggctagccagctgtgctgtgctagccctatctctctgcatgcagctgtcagtcaatacaacagtcatatagtactcatgcaagtgatcaatgatcgacgccatacatataatcattatattaaaagtacgcgtgcccttcgtgtgtataattgttttaccacgttggattgaagttgtcagatctgcaccgatctagttggatggttattacttactccgtctatcccatattagaattcgttataggttcgtttaatatttaatatatgtgttttatat

SEQ ID NO: 106475 - DNA, 584 bp, Zea mays
  Clone ID: MRT4577_28606C.1
gtacgacgtacatgtctggttcgtctcgctgggctgccttgggggtttgtacatcgccgccatctgctggcggcccctcgcctatctcgcgttatgcctgcgcgggccgaaggacctccaccgctacggctcatgggccatggtgactggcccgacctccgggctcggccggtccatggccatggagctcgcgcgacggggcctcaacctcgtcctcctcgacctcgacgccaacaacctgcaggagacctccgaggccatcaagtccgtccaccccgtgaagataaggactgtggttctagacctctccctcgtcgccacaccagaaggtgagatgagatcgagatatcgattcacgcacacacacggatcactactagtagcctgaacacgggttgatcctgtgctcgtgctcgatctctagtaacatgatcgatgagcgcttgtcttttgcctggcaggcgacacggcgatccgccgtctgcgggaggcgatcgaggggctggacgtggggatactggtgaacaacgcggtggtgaacacgccttgcgcggcgtacctgcacgaggcggacatcgagcgct

SEQ ID NO: 106476 - DNA, 363 bp, Zea mays
  unsure (1)..(363): unsure at all n locations
  Clone ID: MRT4577_28607C.1
agaagacctactactcacttacaaccaatagctaggancagccagagtgttgaaggtctttagaaaacaaacaccaagggcaacacccaagctaccgcctggcctgcgtcctccactgcggcgcgctggacctgatcagcatagtccacctcaacggccgcatcgaggtgaacaatctagccgctggccgacggcgagatccaacacggcaactcgaaccacagccagaagctgccatggccctaccggagccgacgtccagcctagcacaccgagtcttctacctgcgggtgagcaggtgcgaggtcaaccagtccatgctggatactctcgccctcacccacaccccgctcacccctgaca

SEQ ID NO: 106477 - DNA, 667 bp, Zea mays
  Clone ID: MRT4577_28608C.1
gccggccgggatcctcaccgaggccggacggccacctttccacagtcgtccacgacaaaccctaacccaatcttcctccctcagtccctctcgctcctggcggctggctccctcctcccggcggcggcgcgtctgggcacggagtcgttcctgtacgtggcggcgcggagtgcaactacctcgtctggctcccctacaacggcctcggcaatcgcatgttatccctggtgagctggctgctgctgttcagcgacatgtactttgtgtcgtcgctgctgctggccgggacggaggaggccaccgaccggcggctcaccacgagggagctggtggacgagtgcaagaccttcttcttcggcgggcacaagaccacgccgttggcgctgtcgtggacgctgctcatgctcgctgcgcatccggactggcaggacgcgtttgcgggctcggactggcacgggccactaaatgggtcgtgctattcaggccggcccggcacggccgggcctacacgcctcactgctcgggggtgggtcatgacccgtcgggtgcgcctctacccgccgtcgcccaacgtgcagcggcaggctctggaggacgtgcaggtggcggagggcaagggggccgctgtcgtcatcccgcgtggcaccaacatgtgggtggacgtggt

SEQ ID NO: 106478 - DNA, 761 bp, Zea mays
  unsure (1)..(761): unsure at all n locations
  Clone ID: MRT4577_28609C.1
cccacgcgtccgaaactaggagtgctggcaggaaaagattggtatgtttatgctaccatattttttcaatgtttttattttctagcttttctttgaacttgcatggtaccatctattttcagattttgcaatatacttatcagctaagattcatgtagttctcttataatgctatataattagcacaatacagtgcactcagtttattatttcctgatgaaaagtgagtgatatagccactttatttggaggtttttacacaagatagcatgtaactgtaggagagagatgacgcgaatcaattaatgcaaatggcgagctggccgctctagagtcagatctggtggggaagaagactggtcggtcgttaccgacggcaacgctgactgtagagctgatcgtgccaccagcacaagagatcaaggagttctttgccatcgtcgaggcgaccagtacaagcgcttcgcttccaagaaataactcttgaccatgtgaaggcagttgtctttcttggagatggttttggcaccacaccagagatgagcaaatgaaacttgatatagttcatactggagacttgctgctccaaaggcccttacctcctgttccgctagcgaaatgaaattgtgtttgggatctttaaaaaggtgggctaggggttatccagagatgacaaggccctcaaattggctttccagcactggatcgaagcgatgagtacaaacgaccagtggagattggtggttttactgnccattctt

SEQ ID NO: 106479 - DNA, 2768 bp, Zea mays
  Clone ID: MRT4577_2860C.1
aagctattaagcaggtcgactctagaccgacttctttttttgcaaaatcaactaaataaaggttgccgtctaatacacccttaaaagctagggaaccatcactttttctaaagacagacacatctacattagtaaatagacagttataccccatattgcataattgactaacagatagtaaattatatcctagagactctactaaaaacacattagaaattgagtgctcatttgatattgcaattttacctaacccttttaccttgccttgattcccatcaccgaaaataattgaatcttgggaatccttattcttgacgtaggaggtgaacatcttcttctcccccgtcatatggtttgtgcatccgctgtcgataatccagcttgaacccccggatgcataaacctgcaaggcaaatttaggcttgggacttagtacccaactcttgttgggtcctacaaggttagtgcaaatattccttagggacccaaatgcaagttttgtcacccttgcattttgcccctaatttcctagcaattaccttcttaccctttctacaaatggcaaagggagcattgcaagcataataaatggtagaaggtttgttcacaacttttctaggagcatgagcaaaatttctcctaggcatatgcacaacatgagaactagaagcagtcatagcataagagtcataagcatgtgaatcaaaatcattataagcatttctagcatgtttcctatcatagtacaagaaagcatggttccttttagcactactaaccataggggccttccctttctccttgacgaagatggaagccttatggcttgttaagttcttggcttctctcttgaagccaagaccatccttaattgaggggtgtctacccactgtgtaggcatcccttgcaaattttattttatcaacttcactcttgctagtcttaagttgagcattaagactagccacttcatcatttagttttgaaattgaaactaagtgttcactacaagcattaacatcaaaatccttacacctagtgcaaattgtaacattttcaacatacgagttacttgctacttctagtttagcagttaaatcgttaatttcaccttttaaagaagaaatggtttcattacaagtagaaagttcacaagaaagtattccatttcttttaacttctatagcaagtgaattttgtgcactaacaaatttatcatgttcttcatataaaaggtcttcttgtttctctaagattctatccttttcatttaaggcatcgatcaactcattaatcttagctatcttagttctatccaatcccttgaataaactagagtaatcaatttcatcctcactagattcatcatcactagaagaatcataagtattagcattacgagtgattaccttcttttcccttgccatgaggcaagtgtgatgctcgttggggaagagagccgatttgttgaaggcagtggcggcgagtccttcgtcgtcggagtcggacgaagagcaatccgaatcccactcctttccaaggtgtgcttcgcctttggccttcttgtaaaccttcttgttctctctcttcccatttttcccttgctcctggtcactatcattttcgggacagttagcaataaaatgaccaagcttaccgcatttgaagcatgatcgctttcccttggtcttggccttgcttggctgtccctttcgaccttttagcgccgtcttgaatctcttgatgatgagagccatctcttcatcattgagcccggccgcctcaacttgcgccaccttgctaggtagcgactccttgctcctcgttgcctttagagcaatgggttgaggctcgtggagtggaccgttcaatgcgtcgtcgacgtatcttgcctccttgatcatcatccgcccgctcacgaattttccaagtacttcctcgggcgtcatcatcgtgtacctgggattctcacgaatattgttcatgagatgaggatcaagaacggtaaaggacctgagcattaggcggacgacgtcgtgatccgtccaacgcgtgcttccgtagctccttattttgttgataagggtcttgagccggttgtaagtttgagttggctcctctccccttatcatggcgaatcgtccaagctcgccctccaccaactccatcttggtgagcatggtgatgtcgttcccctcgtgagagatcttgagggtgtcccatatctgcttggcattgtccaagccgctcaccttattgtactcttccctgcacaaagacgctaagagaacagtagtagcttgtgcatttctatgaatttgttcatttataagcatagggctatccgagctatcaaatttcattccattctccacaatctcccatatgcttggatggagagagaataagtgactacgcattttgtgactccaaaatccgtagtcctccccatcgaagtgtggaggtttgccaagaggaatggaaagcaagtgcgaattcgaactatgttgaatacgagaataatcaaatgaaaagttcgaattgaccgtctttttgtagtcgttgtcatcatccttttgggaagaagtagactcatcactatcgtcgtagtagatgatctccttgatgcgccttgtcttcttcttctttccttccttccgtctatgccccgagccggagtcgataggcttgtcgtcctttggctcgttgacgaaggattccttctctttgtcgttgatcacgattcccttccccttaggatccat

SEQ ID NO: 106480 - DNA, 292 bp, Zea mays
  Clone ID: MRT4577_28610C.1
gggggccaaaaccgccccttggggaacccggccaaaacatggtgggttggtgacaataaaaaaacctataatttgttacaggattccttggttaaacccccccgaacatagagatccttattcttttggaagacttttctacgggcctatttaggggtcaccctcactttaaaatatacaagttacattccttcaacaagaattattcgggccccggggtccaccccgaaatttccggccggggcctggaggggtcccaatttttccttttgggggggggattaaagcttgg

SEQ ID NO: 106481 - DNA, 417 bp, Zea mays
  Clone ID: MRT4577_28611C.1
tgcacgcacccgaccccctcctgccggcctcgatctcgtctgctcctccgtacccaatccctcgcggagggcgagggtggaagcgagtgacgatggcggtgctggaggcggcgagggagtgggcggactccgtcataccgccggagctcgccgccgcctggtggggagacccactcgccgtgctggcggacaccgtcgagggcctcgtcgcggggctgcttattatcgatctctggccccgatccggaggcggtacgccgatcatgccgctggccacacttgtacggccatcatctttcaaggtggacgcctaccccggcgttttgattgccgtatcgcgccatcatattttttgggaaaaatactggcatgttcgacgggtttgttaagttcatgactgatgaggctcgggctcat

SEQ ID NO: 106482 - DNA, 174 bp, Zea mays
  Clone ID: MRT4577_28612C.1
attcgaggctctctggccagggcagcccttcaggagctccttagtaaaggacttatcaaactggtttcaaagcacagagctcaagtaatttacaccagaaataccaagggtggagatgctccagctgctggtgaagatgcatgaataggtccaaccagctgtacatttggaaaa

SEQ ID NO: 106483 - DNA, 454 bp, Zea mays
  Clone ID: MRT4577_28613C.1
atgggcgtcgtgtaccttgttccgctgtcgggcgacctcgccctgccagctttcccctttcttcgtgcacgctctgctcagctcataacgatcgtgcgagatcaccaaaatccgggggctcctcaaccaaatttccgagattctcggccgattgcatcgccccgcccctatataacccagccgcaacccgcagccgtgtcggccaccaccaccaacagggacgcctcgtcggcgctagcacagggaagaaacaaaagggagcaaggggggggaagattgccactgccatggggcggctgcggatcgggcggggatgttgggagccgcgctggtcggtctctggctgatgctcctgctgccaccgatgccttgggtgaatgaaggcgcagcgaccatggcgccgggggcctgtgatctacgtgtgacggcttctggtgaggacacgatgtactaa

SEQ ID NO: 106484 - DNA, 723 bp, Zea mays
  Clone ID: MRT4577_28614C.1
tgggaccctcgaggccggccggggagatagagcagatgacgtcgtcgacggcgttcagccaactgttcccttccgccgctgcggtatcccccgtccctcgctgcgtctccctgcagctcttctgcgccagcggtggagttgtccctggatggaggagaagatgctgcggcgcccgcctacacctccgattccctcatcctctacttcaaggcggagggcaccatggaggagagggccattcccaagatcacagaatctcttgagggtatggagggagtcaaggacctggaggtgctcattgaagaaggcatagggagcgttgtgttaacaaaggagacaactgtgcaagctactggagtagcctcgaacctggtggaagctatccagggagctgggttcaagctgcaaactctaagcttgagcttcgatgatttcgacgagccagcagcaggagcgggaggcactgtgcaatcctgcgagtgacctaatttgtggggccgtgcgtggggccaaatgcatataattcggtctcctgattttgtgtaccctgctccttacctttgatttcccaagcacgatcttgtgtttttttgggaaatggggcgagaaatcaatgaatatttttaaggaaaaacatttgtgtttttaaaaaaaaaaaaaaaaaaaaaaaaaaaaaaaaaaaaaaaaaaaaaaaaaaaaaaaaaaaaaaaaaaaaaagggggg

SEQ ID NO: 106485 - DNA, 784 bp, Zea mays
  Clone ID: MRT4577_28615C.1
aatgggtacctcgaggccggccggggtctatctcaaaagctcggccggaatgtctcacaggaagtacgagcacccccgttgcggttcccttggtttcttgccccgcaagcgtgcggcgagacaccgtggaaaggcaaagggtttccccaaggatgaccccaaggcgccggttcacctcaccgctttccttggttacaaggccggtatgactcacgtcgtccgtgaccttgaccgtcccggatccaagatgcacaagaaggaggtcgtcgagtcggccaccgtcatcgagacccctcctatggtcgtcgtcggtgttgtcggttacgtcgagactccccgtggtctccgatcgctcaccaccgtttgggccgagcacctttccgacgaggtcaagcgtcgcttctaccacaactggtaccgctccaagaagaaggcgttcaccaagtacgccaagaagcacgccgaatctggacccaagtcttcgatcgcccgcgaactcgagcgcatctcgaagtactgcactgtcgtccgtgtcctcgcccacactcaaatccgcaagaccggtctcgagcaaaagaaggctcacctcatggagatccaagtcaacggaggatccatcgccgacaaggtcgagtttgccaagtctcactttgagaagaccgtcgacgtcgcgtccgtcttcgagcaagacgagaacattgacatcatcggtgtcaccactggtcgcggtttcgagggtgttacccaccgttggggaaacaagaagcttcctcgcaaaacccac

SEQ ID NO: 106486 - DNA, 1902 bp, Zea mays
  unsure (1)..(1902): unsure at all n locations
  Clone ID: MRT4577_28616C.1
cattgggtacctcgaggccggccgggaccttcacttcacccacaaactagccggacaagcgaacaaaaggtgtaagagcttacgaccgacgcggccaaatcgagataagagcaagatgacgtcgtcgacggcgttcagccaactgttcccttccgccgctgcggtatcccccgtccctcgctgcgtctccctgcagctcttctgcgccagcggtggagttgtccctggatggaggagaagatgccgccgcatggccatggtgcgcgcggccaccgcggatgctgcggcgcccgcctacacctccgattccctcatcctctacttcaaggcggagggcaccatggaggagagggccattcccaagatcacagaatctcttgagggtatggagggagtcaaggacctggaggtgctcattgaagaaggcatagggagcgttgtggtacgtcaggttttcttgctgccactcgctcgattagtgctcccactgggcactagttagtgcgcttcatctgtgcagattggttttctgctgcacattgcagcagttcgtctgaaactgtacctgcaaccatgtcgagatacagttttaatctatctcctcgttttgttagaaagagtttaatccgtagttagaggtggagcacagttttccagaaacttgaatatgtggtagaaacattcagctgtaaagaagatgcttcaattgaagccgccaaggttaagtgaaagaagaaaacaaatagacactagaatcttagagtttcagcattgccagctgttcaaagcctaattttaggttcaaatattttaaacaagatctctgaaccagatttcaaatcatgtgtcgcatatagaaccttgttcaattacaaaaagaaaagaaatcacttcaatcttcttgcaaatgaagtaaatgaactctatgcattcaacttagtcattttgcaagacgtacacaattttaaatgtattccaatttctctcaattcatttattatgttccttgaaaactggatttctttgtttggatggccatatactgcattgatttgatgaggatggaaaacaatgagacaaagattttatccatgtaagatatttgactattctctttgtacgtcgtcaagatacaacagccatagatgcaaaatgaaatacaattaaaaaggaccctggcttttgattgctgagtcccaatacacaaactgtagcagcaaaacctttaaacattgaagaaaaatagtaatcactgagtaaaacttggctggaacttcttaactgacatgatttcttggctatttttattttaataaggagttctcagactgttgtgttgcattcctatgcgaaaggatatatatgagctctgaattagaaagagcttgaaacccacaattgtaggtaccacctagatcatgggtaacagcaagcaaaatgaggtaccactaactgcttcatggtttcagtgaaataaggatgaatactctctaaacacattagatgactatttcctatgtaatatctccagtctgatgtgcttgaagtacattcctgtgttatcgcttctttttcagttaacaaaggagacaactgtgcaagctactggagtagcctcgaacctggtggaagctatccagggagctgggttcaagctgcaaactctaagcttgagcttcgatgatttcgacgagccagcagcaggagcgggaggcactgtccaatccagcgagtgggctaatttgtggtgccgtgcgtggtgccaaatgcatataattcggtctcctgattttgtttaccctgctccttacctttgatttccgaagcacgatcttgtttttttttggcaaatggtcgagaaatcaatgaatatttttaaggaanaaacatttgttttttttt

SEQ ID NO: 106487 - DNA, 412 bp, Zea mays
  Clone ID: MRT4577_28617C.1
cgttgctgtcgcctaactaatcggtcagtctcctccctactcccacacatcccacgccagccgccattcacgattcgttgattcccaagcatccactatcccagcgcgcggcgagcgagcgaagcggcgagcatctggagcactgggcgagggcatggcctgatggccatgcatgggggcggaggtgtggtgagtgtccggcatggcggcgcggcgagtgcctggagcagcggcgtggcaaagcggcgagcgcctagagcggcagcgcgacgagtgcctggagcttccaagcatgaacctcagtgaaaaccgaacaccaaatcgattaagatgataccaaagttatcggcttttgaatttttttttcttcaccgatcaattttgatttatctgaacaccggcgacagcaacg

SEQ ID NO: 106488 - DNA, 412 bp, Zea mays
  Clone ID: MRT4577_28618C.1
cccacgcgtccgaaaaaaaaaagcagtttacctttaaaataataaatggataaaaaacgtactgtataaaaaaaagtttattggactgttatctaaagaaacggtcaaactaaatcgctctattcgcaattattctccatactacagacaattcacttagtacagatttaaagcactatgggtcccacaaggtacccatgacttttgagctctaatgcactattgaacacaacaactaggatgaccgctattgtcagagccatgaaggatcctcccacagacatctctattgcaaaaaagcccttcttaatttaagggcctgctccggaatgggcctttgctcaatcatttaacaattacgtggtaaagtctgctctattacctaccacatccataactctattgttggcac

SEQ ID NO: 106489 - DNA, 390 bp, Zea mays
  unsure (1)..(390): unsure at all n locations
  Clone ID: MRT4577_28619C.1
cccctaataccaaggaggtcttttttcaactctgggcgcccctaattnntnctnnccnnntattttccatcactttcctgggaaaaaaaagcataaaatgaaaaagtttcaggacaaatgtactcagctattcgttcgttaccgttcaatggaagtgtaagatattatcaacggtcgtctgatggaaccaacttgcctaacgatgcttgtttggttttaacaacggatcccaagcctctactccttttgacagctgagctccatgaacgtttcgtcgatgctaatactcaactctgtggccctgacaaatcaaccccaaagactattttgataacaatacgatcaaaaagccttaccctttattacttaaaatcacacctttataaatac

SEQ ID NO: 106490 - DNA, 5520 bp, Zea mays
  unsure (1)..(5520): unsure at all n locations
  Clone ID: MRT4577_2861C.1
atggatccgaagggaaaggggatggtggtcaacgacaaggagaaggaatctttcctcaacgagtctagagatgacaagccaaccgactcaggctcaagtcataagaaaagagatggaaagaagaagaggcacatcaagaaaatcgtctactacgacagcgatgaatcttcctcttcaccaagagacgacgacgacgagaaaaagaaaccggttaattcaaattattcatttaattattctcgtattccttttaattccaatgctcatttactttcaattcctcttggtaaacctccacactttgatggagaggactactctttttggagtaacaaaatgcgtagtcatctattctctctccatcctagtatttgggagatagttgaacatggaatgcaatttgatagtatagataacccggtgtttattaacgagcaaattcataaaaatgcacatgctaccactgttctgctagcatctttgtgtagggatgagtacaacaaggtgagcggcttggacaacgccaagcaaatctgggacaccctcaaaatatcacatgagggaaacgacgccaccatgatcaccaaaatggagttggtggaaggtgagctgggaaggttcgctatgatcaggggagaggagccaacacagacgtacaacaagctcaagaccctggtcaacaagattaggagctatgggagcacgagatggacagaccacgacgtcatccgacttatgctcaggtcttttaccgttattgaccctcatcttatgaacctcatctgtgaaaatcccaggtacacaaagatgacgcccgaggagatactcggaaagtttgtaagcgggcgcatgatggtgaaggaagcccgatatgtagacgacacgcttaatggtccattacccgtctacgagcctcaacccgttgctctcaaagcaacaagcagcagggaggtgctaccaagcaaggtggctcaagttgaggcggccgggctaaacaaagatgagatggctctcatcatcaagcgcttcaagacctcattaaaaggacgcaaggagtaccccaacaagaataaagcaaggggaaagcgctcctgcttcaaatgtggactggcaacctcggccttcaacaaatcttctctcttccccaacgaacgccacacttgcctcatggcaaaggagaaaaaggatagactactagagaggcaagaggacattttgtatgaggaacatgacaaatttgttagtgttcaaaagtctcttgccttagagattaaaagaaatgaattactatcttctgagttatctacttgcaatgaatctatctctagtttaaagaccttgaatgatgacttaagtgctaagctagaggtagctaatagatcaagttcatgtgtagaacatgttgtaatttgcaatagatgcaaggattttgatatcaatgcttgtgatgaacatcttgcttgtattgctaaattaaatgatgagatggcaagtcttaatgctcaacttaagacttgcaaggttgattttgataaactaaaatttgccagggatgcctacactattggtagacacccctcaattaaggatgggnttggctttcgaaaggaagccaagaanttaacaagccaaagggntcccatttccaacaaagagaaagggaaggcccctatggntagtagcgttcaaaagaattatgctttcatgtataataggaaaattgctagtcataataggagatatgattatgatgcttatgattcacatgctatgtttgcttcaagttccaattttaatggtaggactaggagaaattttgtgtctcatactcctaggaaaatgtgtaataaacctactactgtctttcatgcttgcaacactacgtttgtactttcatgtaaaaatgaaaaagtggttgctaaaaaattgggacccaaatgcaaaggagacaaggcttgcatttgggtaccaaaagctattgtaactaaccttgtaggacccaacaagagttgggtttatgcatccggaggctcaagctggattatcaacagcggatgcacaaaccacatgacgggggagaagaagatgttcacctcctacattaagaacaaggattcccaggatacaattatctttggagatgggaaccaaggcaaggtcaaaggcttgagcaagatagccatcacaaatgagcactctatttctaatgtatttttagtagagtcgctaggttataatctcctgtctgttagtcaattgtgccacatgggcaacaattgtttgtttacaaatgttgatgtatctgtctttagaaggagtgatggttcattagcgtttaagggtgtactagatggaaaactctacttagttgatttttcgaaagaggaggccgatctagatgcatgcttaatcgctaatactagtatgggttggctatggcatcaccgtctagaacatgttgggatgaagaaccttcacaaacttctaaagggagagcatgtggtaggactaaccaatgataaatcagaaacccaagggaccctaaagcgctttctaaggaggactcaaaacgagtttgagctcaaggtgaaaaagataagaagcgacaacgggtccgagttcaagaatctgcaagtggaggagtaccttgaggaggaaggcatcaagcacgagttctccgctccctacacaccacagcagaatggtgtggtagagaggaagaacatgacacttatcgacatggcgaggatgatgcttggagagttcaagacgcctgagcgaagacctcgtatgaacttcttaccggaacaacaagagcaagatcaaccttcttcctcaacgatggtgcatccccctactcataatgaagaacaggttcctcaagaagaggcgtgtgatcaagggggagcacaagaagaacaaagtgtggatgaagaagcacaactggcccctccaactcaagtccgaacgacaattcaaaggaatcaccccgtcgatcagattctgggtgacataagcaagggagtaactactcgctcaagattagctaacttttgtgagcattactcgtttgtctcttctattgagcctttcagggtagaagaggccttgcaggatccggaccaggtgttggccatgcaggaagagctcaacaacatcaaacgaaatgaagtttggagcctcgtgccacgtccaaagcaaaatgttgtgggcaccaagtgggtgttccgcaacaagcaagacgagcacggggtggtgacaagaaacaaggctcgacttgtggcaaaaggttatgcccaagtcgcaggtttggatttagtggagccttttactcctatggctaggctagagtccattagaatattgttagcctataccgctcaccactcttttaggttgtttcaaatggatgtgaagagcgctttcctcaacgggccaataaaggaggaggtgtatgtggaacaaccacctggctttgaggatgacaggtatcccgaccacgtttttaagctctctaaggcgctctatggacctaagcaagccccaagagcatggtatgaatgccttagagatttcttaattgctaatgctttcacggtagggaaagccgatcccacgcttttcactaatacttgtgacagtgacctttttgtgtgccaaatttatatcgatgacataatatttggttctactaatcaaaagtcttgtgaggagtttagcagggtgatgacacagaaatttgagatgtcgatgatgggcgagctgacatactttcttgggttccaagtgagacaactcaaggacgacaccttcctctcccaaacgaagtacactcaagatcttctcaagaggtttgggatgaaggacgccaagcccgcgaagacgccaatgcgaaccgacggacatgtcgacctcaacaaaggaggtaagtccgttgatcaaaaggcataccggtctatgatagggtcattgctttatttatgtgctagtagaccggatattatgcttagcgtatgcatgtgtgctagattgcaatccgacccaagggaatgtcaccttgtggccgttaagcgaattcttagatatttagttgctacgccttgcttcgggatctggtatccaaaggggtctacctttgacttgattggatactcagattccgattatgatggatgcaaggttgatagaaagagtacatcaaggacgtgccaattcctaggaaggtacttggtgtcttggagttctaagaaacaaaccttcgttgccctatccaccgctgaggccgagtatgttgccgtaggacagtgttgtgcgcaactactttggatgaggcaaaccctccgggactttggccacaatctgagcaaagtcccactcctatgtgacaatgagagtgcaatcctcatggcggataatcttgttgaacacagccgcactaagcacatagacattcggcatcactttttgaaagactaccagcaaaagggagatatcgaagtgttctatattagcaccgagaaccagctagccgatatctttaccaaacctttagatgagaaaaccttttgtacgctgcgtagatcacctattcacccccctctaggtgctctcaaccctgcaaatggactttgcaatggcaccaggctggtcgttcgtggcttccaaagaaatagcattgacgtagagaatgtactgggtcaacatgttggaaaatggatttttctaccgcgtataccgctgtgtccctccgatgaagagatgttccctttccagttcaaaagaaagcagtttcctgcatggcttagctttgcaatgacggttaacaaagcacagggtcagactattcccaatgttggtgtatacttgcctgaaccagtgttctctcatggtcaactatatgttgctctatctagagcgacaacccgatcaaacataaagattcttgtcatcccagccatcgatgggaggaaaagtcaaggaagggtgtaaagaaaacccccccaccgtagattgtgggacatataccaagaacatcgtctacaaagaggtcctaacaaattagacccatggtaagagttgcatgttcagctaacaaactaataggatgatgtttgtcttatgtttgattggtctggtgtattatcaagtcatgtttgcatgctacaattgtttttattagagccgcacatgtttgtgtattattagagcatccatactatcttaaagtattgttgagttttggatcatttgtgaaattagcaataataatttttatgcatctaacaatttgttatgaatgtaggtttttgtcccgcgagaatggaatctctatttgtaggcttgtctcataacaagccaaaaacatcagtggcaaccgcaatagttcgagaaggtattaaaattttcatagttctgtatggatcaatttgtattttttgtaataactaattttagtgttcaaaaaaaaaaaaaaaaaaaaaaaaaaaaagtactctgcgttgttaccactgcttaagggaa

SEQ ID NO: 106491 - DNA, 805 bp, Zea mays
  unsure (1)..(805): unsure at all n locations
  Clone ID: MRT4577_28620C.1
cattgggtacctcgaggccggccgggaacagacctgctgtcgatggaggcgaagaagccttacctgatcgccgtcgtcatacagcttatatacgccggcatgttcgtcgtctccaaggcagccttcgaccatggcgtcaacaccttcgtcttcatcttctacaggatggccgccgcctcgctgctcctgctgccggtagccattaccctccaaaggaagaacgtgaggtccatgtccatgggcctgctcctcaagctcttcttctacgtcttgatcgggaacacattcagcttgaacctgtacaacgtgagcatgaagtggacatcggcgaccgtggcgtccgcgtccagcaactccatgccggtcatcgccttctgcctggcgctgctgctgaggatggaggcggtgagtctgaggagccgctccggcgtgcannaggggcggccggcgtcgctctctgcgccgccggagtcttggtcctcgccttctacgccgggccggcgctcagccccgtgacccgccgccgcgccgccttcttcgctgccgcccaccacgcaacggacaagcatcatccggcgagcggcgggacggcgtgggtggaaggagcgttcttcatggtcctcgccaacgtcacgtgggccctctggatcgtcctgcagtccgcgttgctgaaagagtccccaacaagatgcttgtgacggtgacgcagtgcgtgttcagcatgacgcagtcgttcgtttgtggcggtggtggccgaaaggggcgacttctccgagtggaagctccggttcgacattagcttgtt

SEQ ID NO: 106492 - DNA, 550 bp, Zea mays
  Clone ID: MRT4577_28621C.1
gggaaaaaacccttttaactttgcccaaatgtttaacatttgtaatatttagcttttttgttttgcaatgggggaaaaaacaagatgctccttaaacagataaacgggcccccaatagtaaagctaaacagttcacaggggaacagaaagtcaccacccccagaatacaaaatttttgccaaaagggaacatttcacttcccttttggaaaaacaaaccctttttaaacaaaggggcgaattttttttttttggaaaaacccttggtcaccttggccccgggggggtcctttttttccacatttttgaggactccaaaaaaaaccgttttttttttgttacggacagaaaacctccccagggggggatcctgggaaaatgtccccccccccatgggcttggggggaataatttttaccataccaaaataaccgtttttaaaaaacttgggctttttttaaagctccttgccaaaacccctgtggaattcttggaaataagctcaaaaaacttgacaaaaatttgggaggttttggcagcccaaccctggg

SEQ ID NO: 106493 - DNA, 884 bp, Zea mays
  Clone ID: MRT4577_28622C.1
ccattgggtacctcgaggccggccgggaatcgcaattcgcaattcccagccccattccccgtcggccgactccagcgagcgacttcgccccggtcggaagcaccaccagccaccagcgatgtctggcgaggaggaggagaacgccgcggagctcaagatcggcgaagagttcctcaaggccaagtgcctgatgaactgcgaggtggcgatcatcctggagcacaagtacgagcagatccagcagcacgcgtcgtcggagtcggacccgtcgtcgcaggtgtcgcaggtgttcgagaagtcgctgcagtacgtgaagcgattcagccgctacaagaaccccgacgccgtgcgccaggtccgcgagacgctgagccgctacggcctcgccgagttcgagctctgcacgctcggcaacctctgccccgacaccagcggcgaggccaccgcgctcgtcccctccctcaagtccggcggcaggttcgtcggcgaccccggggacgagaagatcgagaagatgctcaacgacctctccctcatcaagaagttcgagtagagcgggagccctctcttctcttatcttcttttctcttggagtagcgagcatccagagaggaggggaattcaacatcaagacgatgtactgataaaattttacttgccttacactactatcgttgaggttcacgtctgcgtattgattagaaccttgtttgatcgataatccaatatactagtagtatgtgtgtggttgatgatctgtctaaaaaactacacgagaagcctgcagaggatgaggatccgagttggccatgccctctgttcttcagctcgaaatggactgattccctgcgactgtaacggtcataatactcctccgttttccc

SEQ ID NO: 106494 - DNA, 852 bp, Zea mays
  Clone ID: MRT4577_28623C.1
cctcgaggccggccgggcgtcgcaattcgcaattcccagccattccccgtcgcccggtcggaagcaccaccagctaccagcgatgtccggcgaggaggaggagaacgccgcggagctcaagatcggcgaagagttcctcaaggccaagtgcctgatgaactgcgaggtggcgatcatcctggagcacaagtacgagcagatccagcagcacgcgtcgtcggagtcggacccgtcgtcgcaggtgtcgcaggtgttcgagaagtcgctgcagtacgtgaagcgattcagccgctacaagaaccccgacgccgtgcgccaggtccgcgagacgctgagccgctacggcctcgccgagttcgagctctgcacgctcggcaacctctgccccgacaccagcggcgaggccaccgcgctcgtcccctccctcaagtccggcggcaggttcgtcggcgaccccggggacgagaagatcgagaagatgctcaacgacctctccctcatcaagaagttcgagtagagcgggagcccccagggtccgtgtcccccctcttctcttcttttctcttgggagtagcgagcatccagagaggaggggaattcaacatcaagacgatgtactgctaaaattttacttgccttacactactatcgttgaggttcacgtctgcgtattgattagaaccttgtttgatcgataatccaagatactagtagtatgtgtgtggttgatgatctgtctgaaattctacacgaaaagcctgcagaggatgaggatccgagttggcgatggcctctggtcttcagctcgaaatgtactgatttcctggctattggtaaaggtcattatatctc

SEQ ID NO: 106495 - DNA, 1100 bp, Zea mays
  Clone ID: MRT4577_28624C.1
gccggccgggttccacagctcgactactagacccttgaggccttgaccagccacttccaaactttagcatcactatatctcaacgccatcaagctgtctgtcatcagtcatcacggcacagcagcttctactggccttagctcgatcgttccaatggagcttccaccatgggcgtccttcctcggcatcgtgctagccaccgtgatgcttctgaaagccctcaccggccgccgcagccgccgcatgtacaacctcccgcctggccccaagccgtggccgatcatcggcaacctcgacctcgtgggcgcgctcccgcaccgctccatccacgagttgtccaggaagtacggcccgctgatgcagctccggttcgggtcattccccgtggtggtcggctcgtcggtggacatggccaagttcttcctcaagacccacgacgtggtgttcgcggaccggccaaagacggccgccggcaagtacaccacctacaactacctgtccacggtgagcctgaacgtgatcacgcgcatggtgctcggcaagaagtacctggacaaggaggaggcggccgccgccggcgggtcagtgaccacccccgaggagttcaagtggatgctcgacgagctgttcctgctcaacggcgtgctcaatatcggcgactcgatcccgtggctcgactggatggacttgcagggcgacatcaagcggatgaagaagctcagcaggcgaatgtcccctgggtacagcctcggcctcaaggtcatccaggtgagcctcgctaacctgctgcacggcttcgcgtggagcctccccgccggcgtgcccatggaggagctcagcatggaggagatctttggcctgtccacgccgcgcaagttcccgctcgaggccgtcgttcagcccaagctgccggcgcacctctacgccgagccttgatcgatgtgtaagtggttctgcagcccagtcaccatttttggcgttgctgtccactgttcagtgcgcgtgtgctagcttgcgtcatgcgctgcgttgtgacactatagttatagtggaataatggtgtaatcaattttatattatcctatacgtttatccaccct

SEQ ID NO: 106496 - DNA, 425 bp, Zea mays
  Clone ID: MRT4577_28625C.1
atacgccagaagatatggattgtctttcacattgattgacgaagggagcgtcgtcattcgataaattcgtcaggcgacgagttgatggctcgcggacgcggcgtcactcggtcatgctgaaggcgcccttgtgggccgtgggggtcccttagagcactcgcaccaacaccctgttggacggggccgggaccacaccgcgcgccgggggcggtcccatccgagcggccatctactcctacggcacccaggcctacgacctggcgtacttcagtttcagccgcataaaggagtccatcgtgtaccgcgagatgacccgtcgctacagggcgcacatgatcacctacgccgacacacgtcgtggtgatacgagggctccgggttcatggaccagtgctgcgcgtacgagctgatcgaggaccataccg

SEQ ID NO: 106497 - DNA, 832 bp, Zea mays
  unsure (1)..(832): unsure at all n locations
  Clone ID: MRT4577_28626C.1
actcctatgggcgattgggactcccgaggccggccggggcaattccggccgggattccccgtcggccgactccagcgagcgacttcgccccggtcggaagcaccaccagccaccagcgatgtctggcgaggaggaggagaacgccgcggagctcaagatcggcgaagagttcctcaaggccaagtgcctgatgaactgcgaggtggcgatcatcctggagcacaagtacgagcagatccagcagcacgcgtcgtcggagtcggacccgtcgtcgcagatgtcgcaggtgttcgagaagtcgctgcagtacgtgaagcgcttcagccgctacaagaaccccgacgccgtgcgccaggtccgcgagacgctgagccgctacggcctcgccgagttcgagctctgcacgctcggcaacctctgccccgacaccagcggcgaggccaccgcgctcgtcccctccctcaagtccggcggcaggttcgtcggcgaccccggggacgagaagatcgagaagatgctcaacgacctctccctcatcaagaagttcgagtagagcgggagcccccagggtccgtatctcccccctcttctcttcttttctcttggagtagcgagcatccagagaggaggggaattcaacatcaagacgatgtactgctaaaattttacttgccttactactatcgttgaggtttgcgtctgcgtattgattagaaccttgtttgatcgataatcaagatactagtagtatgtgtgtggttgatgatctgtctgaaattgtacacgaaaagcctgcagaggatccgagttggncatggcctctgttcttcag

SEQ ID NO: 106498 - DNA, 1355 bp, Zea mays
  Clone ID: MRT4577_28627C.1
cgactactagacccttgaggccttgaccagccacttccaaactttagcatcactatatctcaacgccatcaagctgtctgtcatcagtcatcacggcacagcagcttctactggccttagctcgatcgttccaatggagcttccaccatgggcgtccttcctcggcatcgtgctagccaccgtgatgcttctgaaagccctcaccggccgccgcagccgccgcatgtacaacctcccgcctggtcccaagccgtggccgatcatcggcaacctcgacctcgtgggcgcgctcccgcaccgctccatccacgagttgtccaggaagtacggcccgctgatgcagctccggttcgggtcgttccccgtggtggtcggctcgtcggtggacatggccaagttcttcctcaagacccacgacgtggtgttcacggaccggccaaagacggccgccggcaagtacaccacctacaactaccgcgacatcacatggtccccctacggcgcgtactggcggcaggcgcgcaagatgtgcctcaccgagctcttcagcgccaagcggctcgagtcgtacgagtacatccgcgccgacgaggtgcgcgcgctgctgcgcgacctgcacgcggcgtccagctccggccgcgcagtcatgctcaaggactacctgtccacggtgagcctgaacgtgatcacgcgcatggtgctcggcaagaagtacctggataaggaggaggcggccgtcggggccgtgaccacccccgaggagttcaagtggatgctcgacgagctgtttctgctcaacggcgtgctcaacatcggcgactccatcccctggctcgactggatggacctgcaggggtacatcaagaggatgaagaagctcagcaagatgttcgaccggttcctggagcacgttgtctaggagcaccaccagcgccggctgtggcccgggaacagcctcggcctcaaggtcatccaggtgagcctagctaacctgctgcacggcttcgcgtggagcctccccgacggcgtgaccaaggaggagttcagcatggaggagatcttcggcctgtccacgccgcgcaagttcccgctcgaggccgtcgtcgagcccaagctgccggctcacctctacgccgagccttgatcgatgcgcgcgtgattctacagcatagttacctcttttgcgtcggttgtttgtccagagtgcgtacacttattgctcctgttgttgccgttactttaaactcctattagcttgcgtagtgccgtcgtgcgctgccttgtgacggaataatggtgtacccaattttatattgataatagtacttcaacaccccataaatatatatactcct

SEQ ID NO: 106499 - DNA, 1835 bp, Zea mays
  Clone ID: MRT4577_28628C.1
tccaatttcactgaaccgctgtatggcccagttccaccatctgaatctgctcaagcttggcaacaaccgaacacgtacgatgctgctgttcaagctcagatggcagctgctggatatcaaggtgactggtcaagctatgtgtatgcggaacagcagttgggttatccagaacagtatgtgcagcaaagcacccaggaatacgatgtgttagcggaccctagtatatcccaggatccgaggttcatgactcaggcggacaaggatcggggtttaggttctgttttcaaacgtgacgatcaaaggcttaatcagctgagggaaaaagatgcaagggagagagatccaaattttatttcagatagttactcagagtgttatcctgggtaccaggagtataataatgagattgcaggaagcgatgatgaagatgatttatcgaagatggatatgggtggacgggcaaagggccgtcttcacaggtgggactttgagactgaagaggagtgggccaagtacaacgaccagaaagaagccatgccaaaggctgccttccagtttggggtgaagatgcaggacggcaggaagacgaggaagcagaacaaggaccagaagctcactaatgacctccacaagatcaacaagatcctggctaggaagaagggcgagaaagatggggcggaagatggcggtcactacgacgatgatttacctagctcgaagaaacagcgtggctgaagctgtcatttttcgtttctcctgctggttatggcattctacgggagagttacgatggtgtttagctggcagctgtatcatgctgctttcatttaaggtggcatcaggacataatacatgtcaaaaactttacaaccgtggtcgatattttaacaggaacagaatgatccttggtgattttgtttgtcttgtaagacatatcgaaattgtataaaatgtcaaaaatcgcaaatcgcaactcccagccccattccccgtcgcccggtcggaagcaccaccagccgctccggtcggaagcaccagggcggcttcaggatgtctggcgaggaggaggagaacgccgcggagctcaagatcggcgaagagttcctcaaggccaagtgcctgatgaactgcgaggtggcgatcatcctggagcacaagtacgagcagatccagcagcactcgtcggagtcggacccgtcgtcgcaggtgtcgcaggtgttcgagaagtcgctgcagtacgtgaagcgcttcagccgctacaagaaccccgacgccgtgcgccaggtccgcgagacgctcagccgctacggactcgccgagttcgagctctgcacgctcggcaacctctgccccgacaccagcggcgaggccaccgcgctcgtcccgtccctcaagtccggcggcaggttcgtcggagacgccagggacgagaagatcgagaagatgctcaacgacctctccctcatcaagaagttcgagtagagtagcgcccagggttcatgttagcttgatgtgctgctactcgatctccatcatgatgtattgatggaaccttgttggtcgataattcaagatactactaatatatgtgtggttgatgaactgtctgaaattctacacgagaagccatggccatggccatgccctgttctgttcttcagttcctccagctgtaaggactcttgtaatcaagagagttcaaagatcaaacaaaatgtactgattttcttgctattgttgagcttcacattatcttcatctgctcaccatctagtcatgtatgaatggattaatgcaacctgtttgctcggtaattcaagttactagcacttact

SEQ ID NO: 106500 - DNA, 481 bp, Zea mays
  Clone ID: MRT4577_28629C.1
acaagttgtaatcacaatcgatcgatttattgttttaatcattaaaatcttcttcgagtttgatcaatcgattaattagttaattaattaattcaaattaaaaagcaaacaacacataaaatgccgcgaaaggatgcgaagaaaagtattaattttgattaataaaattgattcataatcaaatgatggttggcggcaaaaaatcagtttgtgatggtgacaaagtaattaattaaaaataatcaatgaaatgaaaacagtgggcaagcgaaataaacaagcaaataaaagagaaaaataaatttaattgattgtgatgaaaagtaacggaaaacaaattctttttaatagaaaaacaatgcggcgaatcgatattgatggagaaattaaattagaaaaatcaatgaattaattaaaactggaacaaccttgtgtatcggtttcaaagttgaaaggcaatgatgggtacatataataaaga

SEQ ID NO: 106501 - DNA, 3395 bp, Zea mays
  Clone ID: MRT4577_2862C.1
tcaatccaggttccgcgaatctaagacatttagctcactacgcaacttgcaaaaggtcgactcatctagaggcttggtaaagatatcggctagctggttttcggtgctaacatgaaacacttcgatatctcccttttgctggtggtctctcaaaaagtgatgccggatgtcaatgtactttgtgcggctgtgttcaacaggattattcgccatgcggatagcactctcattatcacataggagtgggactttgctcaaattgtagccaaagtccatgagggtttgcctcatccaaagtagttgcgtgcaacactgtcctgcggcaacatactcggcctcagcggtggatagggcaacggaggtttgtttcttagagctccatgacaccagggaccttcctaagaattggcacgtccccgatgtactcttcctattgaccttacatccagcatagtcggagtctgaatatccaatcaagtcaaaggtagacccctttggataccagatcccgaagcaaggcatagcgactaaatatctaagaattcgcttcacgaccactaggtgacactcccttggatcggattgaaatctagcacacatgcatacactaagcatgatatccggtctactagcacataaataaagtaaagaccctatcatagaccggtatgccttttgatcaacagacttacctcctttgttgaggtcggtgtgtccgtcggttcccattggagtctttgcgggcttggcgtacttcatcccaaaccgcttgatcaagtcttgtgtgtactttgtttgtgagatgaaggtcccatccttgagttgtttcacttggaacccaaggaagtagcttaactcgcccatcattgacatctcaaacttttgagtcatcaccctgctaaactcttcacaagacttttggttagtagaaccaaatattatgtcatcaacataaatttggcacacaaaaaggtcaccatcacaagtcttagtaaatagagttggatcggttttcccaaccttaaaagcattagcaattaaaaagtctctaaggcattcataccatgctcttggggcttgcttaagtccatagagcgccttagagagcttacacacgtggtcggggtatcgttcatcctcaaagccagggggttgctccatgtacacctcctccttgattggcccgttgaggaaagcgctcttcacatccatttggaacaacctgaagaatggtgagtggcataggctaacaatatgcgaattgactctagccaccccatgctcgtcttgtttgttgcggaacacccacttggttcccacaacgttttgtttgggacgagacaccagtgtccaaacttcatttcttttgaagttgttgagctcctcctgcatggccaacacccagtccggatctagcaaggcctcttctaccctgaaaggctcaatagaagagacaaaagagtaatgttcacaaaaattaaccaatctagaacgagtagttactcccttgcttatgtcacccaatatttggtcgacgggatgattcctttgaattgtcgttcgaacttgggttggaggtgccggttgcgcttcttcctccattccatgatcatcttgtgctccccctttattatacgtctcttcttgattaacctgttcatcgtcttgagttgggggatgcaccattgttgaggaagaaggttgatcttgctccttttgttccagtggcctcacatctccaatcgccatggtgcgcattgcggccgttggaacgtcttcttcatctacatcatcaagatcaacaacttgctctcttggagagccattagtctcatcaaatacaacgttgctagagacttcaaccaaactcgatgatttgttgaagaccctatacgcctttgtatttgagtcataacctagcaaaaacccttctacagctttgggagcaaacttagaatttctacccttcttcactagaatgtaacatttgctcccaaatacacgaaagtaagacacattgggtttgttaccagttagaagctcataagaagtcttcttgaggaggcgatgaaggcagacccggtttatggcgtggcaagccgtgctcacggcttccgtccaaaaccgttcgggcgtcttgaattcaccaagcatcatcctcgccatgtctagtagcgtcctgttcttcctctctaccacatcattttgctgtggtgtgtagggagcggagaactcgtgcttgatttcttcctcctcaagatactcctctacttgaaggttcttgaattcggacccattgtcgctccttatcttcttcactttgagctcaaactcgttttgggctctccttaggaagcgcttgagggtcccttgggtctcagatttatcctgtttacctacttgacaagctgcacaaggtctatctttttcgaaagttacattagttagacctatcatgtgttctccctttagaagcttgtgaaggttcttcatccccacatgtgctaaacggcgatgccacagccagcccacgctagtcttagcaattaagcatgcatctagaccggcctcctcttttgcaaaatcaaataaataaagtttgtcgtctagtacacccttaaaagctagtgaaccatcactccttctaaagacagacacatctacatttgtaaataagcaattataacccatattacaaagttgactaacggacaacaagttatacccgagcgattctactaaaaacacattacaaatggaatgctcggatgaaattgatttttttcctagtcctttaaccttgccttggttcccatcaccgaatatgattgaatcttgggagtccttgttcttgacataggaagtgaacatcttcttctcccccgtcatggggtttgtgcatccgctgtcgataatccagcttgaacccctggatgcataaacctgcaaggcaatttaggcttgggtcttaggtacccaactcttgttgggtcctacaatgttagtgacaatagccttagggacccaaatgcaagttttatctcccttgcattttgcccctaatttcctagcaaccactttcttatcctttctacaaattgcaaaggaagcattgcaagcatgataaattgtagaaggttcattaattattttcctaggaacatgagtaacatttctcgattcggatcgctgacactactagaaactggttaaagaacgtgggtgaaaaaccgtcgaacttaatgtaataagccgtcgaacttaccgtaagaacgtgggtttaccgacgaatatagccgacggcgatttttggacgaacttagagaagtaagttcgacggccccgtcgaacttaatgttaagaacgtgagtaccgtcgaacttaatgttaagaac

SEQ ID NO: 106502 - DNA, 1066 bp, Zea mays
  unsure (1)..(1066): unsure at all n locations
  Clone ID: MRT4577_28630C.1
tcccgggccagctaccagggatgtctggcgaggaggaggagaacgccgcggagctcaagatcggcgaaggtccatgctcttccgcgccgccctcctctcctcccctcctctcccttctcaaccaccgtccagtccttgggcgcgcgggcggctagggttttcgtcctccctctcgagctcacccgtaagcctgtgggcgaagagttcctcaaggccaagtgcctgatgaactgcgaggtggcgatcatcctggagcacaagtacgagcagatccagcagcacgcgtcgtcggagtcggacccgtcgtcgcaggtgtcgcaggtgttcgagaagtcgctgcagtacgtgaagcgcttcagccgctacaagaaccccgacgccgtgcgccaggtccgcgagacgctgagccgctacggcctcgccgagttcgagctctgcacgctcggcaacctctgccccgacaccagcggcgaggccaccgcgctcgtcccctccctcaagtccggcggcaggttcgtcggcgaccccggggacgagaagatcgagaagatgctcaacgacctctccctcatcaagaagttcgagtagagcgggagccctctcttctcttatcttctcttctcttggagtagcgagcatccagagaggaggggaattcaacatcaagacgatgtactgctaaaattttacttgtcttacactactatcgttgaggttcacgtctgcgtattgattagaaccttgtttgatcgataatccaagatactagtagtatgtgtgtggttgatgatctgtctggaattctacacgagaagcctgcagaggatgaggatccgagttggccatgccctctgttcttcagctcgaaatgtactgatttccttgctattgttaaggttcatattatcttcatccgctttccatctagtcatgtatacatgaattaatggaaaaaaaaaaaaaaaaaaattggccatgccctttgtttttcagctcgaaatgtgttgattaccccgctattgttaaagttcacattaaaaaaaaaaaaaaataaaaaaaantatta

SEQ ID NO: 106503 - DNA, 241 bp, Zea mays
  Clone ID: MRT4577_28631C.1
ctcattcttgcaatcaactgcagttgaaggcaagctttcaacaaccaatgctgcaactttatgatcactgacggtgagcgtctgtgctttaatgcctataatatgtatactcgtgacgatacatgctggctcgtgactgaacctaccactgttgatgtcacttgtcattatggttcgtttgttgcatcatatgtttcttttatacgatgtgaattacttattattttgttactttacttat

SEQ ID NO: 106504 - DNA, 304 bp, Zea mays
  Clone ID: MRT4577_28632C.1
ggtggatgaaggatgttacttttacaattacactgaatacagttgctaggcgattacacggctggctacagtgatcaacaggtacacggaataacagcgagtgctaaaacgacgctcttatatcctgcgatggagcacatatatattctgtttctgtggagactgtttcctcaccgagatgccttacctaagagaggttggttcaccatgacttggacaacacccggctgcggctactcctactggaggcctgcctccagcaggaactgctctacagagatggagaccctcgaaatgcgagagc

SEQ ID NO: 106505 - DNA, 466 bp, Zea mays
  Clone ID: MRT4577_28633C.1
ccgcaacgttttttttttttggccaagctcctggaacccttagaagcgtgctgaaccggcggcggcgaggggatggcaatggaccttgacccggtagcaaaggccttcgtggaccattactaccgaacgttcaacaccaaccgggcggcgctggttgggctgtaccagaaaacctccatgctcaccttcaagggccaaaagttccagggcccgtccgccattgccggcaagctcggatctctccttttccaggcctgcaagcatcaaatcgtaaccgtcaactgccacccatcgggtccccagggaggcatgctcgttttcgtttccggttccatacgcaccggccccgaggagcaccccatcaagtcctcccagctcgcggaggagcctggctgcccgccactttgctgcggtggtcgggtggtggcaattcaagtgcattccatttgctgccggccgctgggtc

SEQ ID NO: 106506 - DNA, 439 bp, Zea mays
  Clone ID: MRT4577_28634C.1
ctggctcttaacaaattcctacagaaggtatgtatgtggcttctctaatttggatctgttgcgcatttaggaattaggattagatgattagtggattactcacgctcttaacaaattcctacaacaggcaatttttctgtttcataatcaactgggtctgatatgtctcataccaactaatggccgtgagaatgttatttaggcttatataagttatacagaagatatttcgttatgataatgcacaaaagttatggtgtgcaatgaaaggtgcaaaatgtgttttccaccctggataggggtcgtggatttctaagtcttgaggaggtgtaccaggcattaatcaaacttggttttttcgttggattcaccagccttttatactgtttgggagagctttgacaaagagcaagaagggcatgattcaattggatgagtt

SEQ ID NO: 106507 - DNA, 300 bp, Zea mays
  Clone ID: MRT4577_28635C.1
attcggctcgagggatgagacacaattttttcttctcacatctgcttgttcaagcaaccgtgagaatgagaaatgggccaacaacctttacattgctctaatatgctatgggcatgcagcgtcctgaggcttgctccgctgcatcgccagctgagcagagcatgtcctgatgagtatctattgcgacaaaagcagcaatgtttgtcgctgctatatcatactctctgtcagtgtaggctacccgctcaagatgaaccaccttacagtgtacacagtcggagctcaagacagaccccagag

SEQ ID NO: 106508 - DNA, 646 bp, Zea mays
  unsure (1)..(646): unsure at all n locations
  Clone ID: MRT4577_28636C.1
attcggctcgagcgcagagtttctggctcttatcaaattcctacagaaggtatgtatgtgggttctctaatttggatctgttgcgcatttaggaattaggattagatgattagtggattactcactcagacaagcatcttctgcaacaggcaatttttctgtttcataatcaactgggtctgatatgtctcataccaactaatggccgtgagaatgttatttaggcttatataagttatacagaagatgtttcgttatgataatgcacaaaagttatggtgtgcaatgaaaggtatatttgagagtaatagaaatagactcattgtgctgcatccttaactgtaagtttcttgtgtgcgactcatcgtaatcgcaggtgtttcctgtttccaatttgcaggtgcaaaatgtgttttccaccctggataggggtcgtggatttctaagtcttgaggaggtgtaccaggcattaatcaaactttggttcttcgtggattcaccagccttttatctgtttgtgagagctttgacaagagcaagaagggcatgattcaattggatgagtttatatcactctgcatttttgttcagcagctcgaacccgtcaattcgttcgatcaagcaacanggagagtgactttgattt

SEQ ID NO: 106509 - DNA, 1303 bp, Zea mays
  Clone ID: MRT4577_28637C.1
cgcagagtttctggctcttaacaaattcctacagaaggtatgtatgtggcttctctaatttggatctgttgcgcatttaggaattaggattagatgattagtggattactcactcagacaagcatcttctgcaacaggcaatttttctgtttcataatcaactgggtctgaaatgtctcatatcaactaatggccgtgagaatgttatttaggcttatataagttatacagaagatatttcgttatgataatgcacaaaagttatggtgtgcaatgaaaggtatatttgagagtaatagaaatagactcattgtgctgcatccttaactgtaagtttcttgtgtgcgactcatcgtaatcgcaggtgtttcctgtttccaatttgctccggtcgaccgggccttgattgtctgctcttctgccgtctagtcctttgtactgaccggcgctccggtcggctcctcgcgcttgcgggttccccgtccccaccccacgccgggggcaagagatggagaacgcggtggtgctccgggagtggtttgaccgcgtcgacgccggccgcaccggcaacatcaccgctgcccagctccagggcgcgctcgctgtcggcaacctcaacttccccatctccgtcgtgcagcagatgattaggatgtatgacttcgatcggaatggcaccatgaacttcgaagagtttctggctcttaacaaattcctacagaaggtgcaaaatgtgttttccaccctggataggggtcgtggatttctaagtcttgaggaggtgtaccaggcattaatcaaacttggtttctcgttggattcaccagccttctatactgtttgtgagagctttgacaagagcaagaagggcatgattcaattggatgagtttatatcactctgcatttttgttcagtcagctcgtaacctgttcaattcgttcgatacaagcaagcaaggaagagtgactttagattttaaccaattcgtgtactgcacggcaaactgcaggatataatgtggttgtacatgggcgcccaaacaaaaaggttagcagtgtgaagtgctaaccgttcgccaatcaaacttcgtttctgaaccggcagctgggtattgcaattcactgttcgccatctaaggcttgttgtaccatcattttgcctgaatgtattcttggtcacctattggtcaatccgtgtccagttttctgacatcctgggctgtatatacagaataagacttggcaatttgtggctgtatttatataaaacatttcaagtaatccagacattcactcccggcc

SEQ ID NO: 106510 - DNA, 323 bp, Zea mays
  unsure (1)..(323): unsure at all n locations
  Clone ID: MRT4577_28638C.1
ggggaacagacacctaaangtaattggaatttgccatgggcaagttttgattctggttccaaggcttctcagaaaatataggcaccccttttataaggggggctaatgttatcaaactcgcctcactaaccgtaggggcggggtcagccacggtttttaacatatcaaagcgatttcttttaccaacgtgttggacaagtgttggggcttgttcggggccaatgaaggaaaaaacctccgttctagacttttgtgagggatgggcacctagcacccaaacaattggggggaccttcctgcgggggctgagccctacccctttt

SEQ ID NO: 106511 - DNA, 258 bp, Zea mays
  unsure (1)..(258): unsure at all n locations
  Clone ID: MRT4577_28639C.1
ggccgcccgggcaggaacttcccttttttttttttttttttttttttttctttttttttttttttaaaagcacacacatctgggaacccgaaccaacgggagaccagataaaaggctaagggacaaggaacagtgctgcaggccacaagaatctgaggtccaatctagtnttcaggtgggatacaggcaccaggaaattaaagaatctagggcaacacggaaaaaggggntctccgattcaaccaatagacaaagcac

SEQ ID NO: 106512 - DNA, 282 bp, Zea mays
  unsure (1)..(282): unsure at all n locations
  Clone ID: MRT4577_2863C.1
atagtcgcacgaggccctgggtccctacgctctcactcccgagccctcctccaccaccgggtcctccgcgggacccctctcggcggggcctcacgaggggaccagcgggggaccctccggggggcaaccatggggctcttcactgggacgaanaaggccaccacgcccttcgagttccgaaagcgccngcacctccttttctccncaagaaggggactgtataacaggaggcccattatctgcaaaactttgtccaatcagcattgggtgccctggctgggg

SEQ ID NO: 106513 - DNA, 323 bp, Zea mays
  Clone ID: MRT4577_28640C.1
gcttggtaccgagtcttggatatcactagtaacagggcgcgcagatgggctggaatatgcccttaagagggccgggcggagggacacgcggagagctctcctgcttattacagaaggagcaactactaccattcagccagcctagctggtgagagccctgctaccttcttgacacagccacagtcgatgccgttctaccagcaccttgcgcctaacgctagcaccctcttacagctgcagcaagagatgccatttagccaggcttggtttgacaagacccagcagtgtgctatcaagaacccatcattggtcggtgtcctctt

SEQ ID NO: 106514 - DNA, 830 bp, Zea mays
  unsure (1)..(830): unsure at all n locations
  Clone ID: MRT4577_28641C.1
agaatacagtatgcactcttttccttcacgcgtctaaaggaaacaaaatttccaagaaaagaggttggggtcgtcgcgtcggcgttgcccaatcctctcccatctcccccacctctcctactccgctccgcgccgttgccgatctggcctccagtcaactccggcgagattggatttgattggattgaagtttactggactggagccgatccgatccgatctgatcggactctgctggcatctagcgaagcttgaggaggggtcgctcgctgtcgcgggccacagatctgccgcgtccgccatggacggcaacaaggacgacgctgtcaaggccctgcgcatcggcaaggacgccctcgacgccggcgataccgcccgcgccctcaagtttctgtctaaggccaagcggctggaccccttgctccccatcgatcacctcctcaaccccctcctcaataaggatgacccgtcctcctcaccggcctcgtcatcatcgtcatctgccccacatcccccaccgcctccgccgtcgcgagctgcatcatcagcagccggtgctgacggcttgagggaaaggaagcagaagggcaagaagaaaggatggggaggggagggcggcggtgatactgcctgnggtgaggacgtacacggaggagcagctggaggtgatccaccagatcaagaagcacgctagggattactacaagatcctgggcctcgaaaaggactgcactgtcgaggacgtgcgcaaggcctaccgcaagctctctctcaaggtgcaccctgacaagaacaagcccctggtgccgaggatgcctttaaggctgtct

SEQ ID NO: 106515 - DNA, 247 bp, Zea mays
  Clone ID: MRT4577_28642C.1
gccgccgccgctgcaacgccgcctgctgccgcagccgccatgggggcgtacaagtatgtgtcggaactatggaggaggaagcagtcggacgtgatgcgcttcgtgcagagcgacagctgatgggagcaaaggcagtggactgtgaatcgtgatggtctgcgatgaatcctacatcttttaggctgctcctcgaggggctatagggacgttactctctgcccttttgacatgagtgccccatgagtac

SEQ ID NO: 106516 - DNA, 367 bp, Zea mays
  Clone ID: MRT4577_28643C.1
tgctgaacacagatgagaaagttcatctatctactcgtgcagattctaaagtattgctcctgtgatccgctacattgttcataccctatttgggaagatgaaggcagtgcatgataagatggatcacgtgcatgaaattcattgacacatggggcctccattggtgacatgggggactacggctacaaattgttttgagaaagaggtgacctgctgcacgctgcgttccagaaggatgcaatgattcacatcattgataggaccaatggtcaaggtgacaagggcgacatcactacgaggtgtgctacccggcttctctgaaggacccacatgggactaccggaaggatgcttgcattggtgcatgg

SEQ ID NO: 106517 - DNA, 391 bp, Zea mays
  Clone ID: MRT4577_28644C.1
aagttcaaatatcaaacttggtggggattcaagccatactggtgcagaagagttttgggtacaacacagaggacacaacaggtccattaaaccaacgaagccacaaccacgattcatgacacacaaaccacagatgtttattagacgacgacatccatatagaggtacaccagagggcaccagacgacgcagatacccaggtgtctgaggactccacctcaagggtgatcgtcttgccagtaagagtcttcacgaagatctgcatgccacccctgagacgcagcaccaagtggagggtgctctccttctggatgttgtaatctgcaagggtacggccatcctccagctgcttgccagcaaagatgagccgctgctggtccggtggaatgcc

SEQ ID NO: 106518 - DNA, 1494 bp, Zea mays
  Clone ID: MRT4577_28645C.1
ccgatctccgatcccctcgtcgatccaaagatgcagatcttcgtcaagaccctcactggaaagactatcaccctcgaggtggagtcttctgacaccttgttctccgcctcaggggaggcatgcagatcttcgtcaagaccctcactggaaagactatcaccctcgaggtggagtcttctgacaccatcgacaacgtcaaggccaagatccaggacaaggagggcatccctccagaccagcagcggctcatttttgccggcaagcagctcgaggacgggcgcacgctggccgactacaacattcagaaggagagcaccctccacttggtgctgcgtctcaggggcggcatgcagatcttcgtgaagactctgaccggcaagactatcacccttgaggtcgagtcttctgataccattgataatgtcaaggccaagatccaggacaaggagggcatccctccggaccagcagcggctcatttttgccggcaagcagctcgaggacgggcgcacgctggccgactacaacattcagaaggagagcaccctccacttggtgctgcgtctcagaggtggcatgcagatcttcgtgaagacacttactggcaagacgatcacccttgaggtggagtcctcagacaccattgacaacgtcaaggccaagatccaggacaaggagggcattccaccggaccagcagcggctgatcttcgccggcaagcagctggaggatggtcgcaccttggctgactacaacatccagaaggagagcaccctccacctggtgctccgcctcaggggtggtatgcagatttttgtgaagacattgactggcaagaccatcaccttggaggtggagtcgtctgacacaatcgataatgtcaaagccaagatccaggacaaggagggcattccaccggaccagcagcgcctgatctttgctggcaagcagctggaggatggccgtaccctcgccgactacaacatccagaaggagagcaccctccacctggtgctccgcttgcgaggtggtatgcagatctttgtgaagaccttgactggcaagaccataaccctggaggttgagagctccgacaccatcgacaacgtgaaggcaaagatccaggacaaagagggcatccccccagaccagcagcgtctgatcttcgctggcaagcagctggaggatggccgcaccctagcagactacaacatccagaaggagagcactctccacctggtgctccgcctccgtggtggtcagtaagccatggttcatttaagctgctgctgtacctgggtatctgcgtcgtctggtgccctctggtgtacctctatatggatgtcgtcgtctaataaacatctgtggtttgtgtgtcatgaatcgtggttgtggcttcgttggtttaatggacctgttgtgtcctctgtgttgtacccaaaactcttctgcagcagtatggcttgaatccttatgaagtttgatgtttgaactt

SEQ ID NO: 106519 - DNA, 151 bp, Zea mays
  unsure (1)..(151): unsure at all n locations
  Clone ID: MRT4577_28646C.1
gcgcccactctcccgtccaccaccgctatatatcccgacgccccgtcctccctggggcgttcttaactccgcctacggtggctctgcctngccccaccctgcgtggacctccgggnccccctccgttgttgctcgtgcctcttgcctcccg

SEQ ID NO: 106520 - DNA, 227 bp, Zea mays
  Clone ID: MRT4577_28647C.1
gcacgagggacattcatatcatcgcacacctggcgcaggagtgactgcagtgtgacgccgacgccaagccgaacatgagggaggtcgtgcaaatcctcgccaccatggcaccactccatcacggcgccaggcgtcggacacttcacatcgccaccgccttcaacctcacgccatcgacgcacgtccggaggtgtgactcggagcataaagactacgatatcgagagg

SEQ ID NO: 106521 - DNA, 1547 bp, Zea mays
  Clone ID: MRT4577_28648C.1
ccggccgggaacctcatcttctctccttttgctcggaacgcacacacagcccggtccccgatctccgatcccctcgtcgatccaagatgcagatcttcgtcaagactctcactggaaagactatcaccctcgaggtggagtcctctgacaccattgacaacgtcaaggccaagatccaggacaaggaaggcattcccccggaccagcagcggctcatcttcgctggcaagcagctcgaggacgggcgcacacttgccgactacaacatccagaaggagagcaccctccaccttgttctccgcctcaggggaggcatgcagatcttcgtcaagaccctcactggaaagactatcaccctcgaggtggagtcttctgacaccatcgacaacgtcaaggccaagatccaggacaaggaggggattcctccggaccagcagcgcctgatctttgctggcaagcagctcgaggacgggcgcacgctggccgactacaacattcagaaggagagcaccctccacttggtgttgcgtctcaggggcggcatgcagatcttcgtgaagactctgactggcaagactatcacccttgaggtcgagtcttctgataccattgacaatgtcaaggccaagatccaggacaaggagggcatccctccggaccagcagcggctcatttttgccggcaagcagctcgaggacgggcgcacgcttgccgactacaacattcagaaggagagcaccctccacttggtgctgcgtctcaggggtggcatgcagatcttcgtgaagacacttactggcaagacgatcacccttgaggtggagtcctcggacaccatcgacaatgtcaaggccaagatccaggacaaggagggcattccaccggaccagcagcgcctgatctttgctggcaagcagctggaggatggccgtaccctcgccgactacaacatccagaaggagagcaccctccacctggtcgtccgcttgcgaggtggtatgcagatctttgtgaagaccttgactggcaagaccataaccctggaggttgagagctccgacaccatcgacaacgtgaaggcgaagatccaggacaaagagggcatccctccagaccagcagcgtctgatctttgccggcaagcagctggaggatggccgcaccctagcagactacaacatccagaaggagagcactctccacctggtgctccgcctccgcggtggtcagtaagccatggttcatttaagctgctgctgtacctgggtatctgcgtcgtctggtgccctctggtgtacctctatatggatgtcgtcgtctaataaacatctgtggtttgtgtgtcatgaatcgtggttgtggcttcgttggtttaatggacctgttgtgtcctctgtgttgtacccaaaactcttctgcagcagtatggcttgaatccttatgaagtttgatatttgaacttaaaaaaaaaaaaaaaaaaaaaaaaaaaaaaaaaaaaaaaaaaaaaaaaaaaaaacaaaaaaaaaaaaaaaaaaggcccctagggcc

SEQ ID NO: 106522 - DNA, 1115 bp, Zea mays
  unsure (1)..(1115): unsure at all n locations
  Clone ID: MRT4577_28649C.1
cttctctccttttgctcggaacgcacacaccgcccgtccccgatctccgatcccctcgtcgatccaaagatgcagatcttcgtcaagactctcactggaaagactatcaccctcgaggtggagtcctctgacaccattgacaacgtcaaggccaagatccaggacaaggaaggcattcccccggaccagcagcggctcatcttcgctggcaagcagctcgaggacgggcgcacacttgccgactacaacatccagaaggagagcaccctccaccttgttctccgccccaggggaggcatgcagatcttcgtcaagaccctcactggaaagactatcaccctcgaggtggagtcttctgacaccatcgacaacgtcaaggccaagatccaggacaaggagggcatccctccggaccagcagcggctcatttttgctggcaagcagctcgaggacgggcgcacgctggccgactacaacattcagaaggagagcaccctccacttggtgttgcgtctcaggggcggcatgcagatcttcgtgaagactctgactggcaagactatcacccttgaggtcgagtcttctgataccattgacaatgtcaaggccaagatccaggacaaggagggcatccctccggaccagcagcggctcatttttgccggcaagcagctcgaggacgggcgcacgcttgccgactacaacatccagaaggagagcactctccacctggtgctccgcctccgcggtggtcagtaagccatggttcatttaagctgctgctgtacctgggtatctgcgtcgtctggtgccctctggtgtacctctatatggatgtcgtcgtctaataaacatctgtggtttgtgtgtcatgaatcgtggttgtggcttcgttggtttaatggacctgttgtgtcctctgtgttgtacccaaaactcttctgcagcagtatggcttgaatccttatgaagtttgatatttgaacttaaaagtctgctcattatgtttttttctggttatatctcctaattaactgcctgggatcaaatttgatnccanggtgtttattggaccaaaaaaaaaaataaaaaacctcaacctccacnanacagct

SEQ ID NO: 106523 - DNA, 676 bp, Zea mays
  Clone ID: MRT4577_2864C.1
tgcggcggctaggtcggccggcgtttggaggagctccgaagatgtggtgccagtcgtgcaaggaagggtacgacgaggaggacgccgggacctgcaaggagtgctacgaggaggccagcgagacggaggaggagctcaagcgggagatcgacgacctccgctcccgcctcctcttcctccgcctcccctcccctaccctagacgccgcatcagcccccaactgcgacctcctcctccacgccatcccctcgaccggcgcgggaggcgaacgcgatgctgggcgcacccccgacacacccgccgtgcccgcccatcgcgtcatccttgtgggtcccctttctttcacaacttcgagcttcctttgtgcgattctggtttgattacgtagtttgtgttcagtctttgacagacctctgaatcgactagtcttagaattaaacctattcctagaatgtaaacaggaaggttgtcaagacatgattcctaacagtggattgaacagttctagtagcttactgtcctactgaccaatctaggggccttaatagatcgtgatccacatatttcttcacaatatgttagagccctaaaataatttttagtttaaaaataaatagaaatatagcccaatcctaatctgatccgatctttaaattttatagtgtaaaacatagag

SEQ ID NO: 106524 - DNA, 1362 bp, Zea mays
  unsure (1)..(1362): unsure at all n locations
  Clone ID: MRT4577_28650C.1
cccgtccccgatctccgatcccctcgtcgatccaaagatgcagatcttcgtcaagaccctcactggaaagactatcaccctcgaggtggagtcttctgacaccattgacaacgtcaaggccaagatccaggacaaggagggcatccccccggaccagcagcggctcatctttgctggcaagcagctcgaggacgggcgcacacttgccgactacaacatccagaaggagagcaccctccaccttgttctccgcctcaggggaggcatgcagatcttcgtcaagaccctcactggaaagactatcaccctcgaggtggagtcttctgacaccatcgacaacgtcaaggccaagatccaggacaaggagggcatccctccagaccagcagcggctcatttttgccggcaagcagctggaggacgggcgcaccttggccgactacaacatccagaaggagagcaccctccacttggtgctccgcctcaggggtggtatgcagatttttgtgaagacattgactggcaagaccatcaccttggaggtggagtcgtctgacacaatcgataatgtcaaagccaagatccaggacaaggagggcattccaccggaccagcagcgcctgatctttgctggcaagcagctggaggatggccgtaccctcgccgactacaacatccagaaggagagcaccctccacctggtgctccgcttgcgaggtggtatgcagatctttgtgaagaccttgactggcaagaccataaccctggaggttgagagctccgacaccatcgacaacgtgaaggcaaagatccaggacaaagagggcatccccccagaccagcagcgtctgatcttcgctggcaagcagctggaggatggccgcaccctagcagactacaacatccagaaggagagcactctccacctggtgctccgcctccgtggtggtcagtaagccatggttcatttaagctgctgctgtacctgggtatctgcgtcgtctggtgccctctggtgtacctctatatggatgtcgtcgtctaataaacatctgtggtttgtgtgtcatgaatcgtggttgtggcttcgttggtttaatggacctgttgtgtcctctgtgttgtacccaaaactcttctgcagcagtatggcttgaatccttatgaaaaaaaaaaaaaaaaaaaaaaaaaaaaaaaaaaaaaaaaaaaaaaaannaaaaaaaanaaaaaaaaaannanaaanannaaaaaaaaaaaaaaaaaaaaaaaaaaaaaaaaaaaaaggggcgggccgcttttaaaggtccacaattttatttccccgggcttgcagacgtaaaagtttttttattggggccccaaa

SEQ ID NO: 106525 - DNA, 315 bp, Zea mays
  Clone ID: MRT4577_28651C.1
aaacaaaaattctgaatccagattattgtaatggatcaatgcacggttgtggaggcatcctaaactaccggagaagaagaggcctcccaagaactgtatcaacctctcattatagcccgtatagccatgatgcaacagatgaacgagagccgtgcgctgcctccccaaacagggaaagacctgctgatactgtaagacaaaacgaaccatcatactataatgccacgagccatagactctgcttatgctcgcagcgaatgcctgcatatgcccagtacggcccccaagaacatcaacaaaggcccttcctttgct

SEQ ID NO: 106526 - DNA, 465 bp, Zea mays
  Clone ID: MRT4577_28652C.1
aagttcaaacatcaaacttcataaggagtcaagccatactgctgcagaagagttttgggtgcaacacagaggacacaacagggccattaaaccaacgaagccacaaccacgattcatgacacacaaaccacagatgtgtggggggcgacgacatccatatagagggacaccagagggcaccagacgacgcagatacccaggtacaggagcagcttaaatgaaccatgggttactgaccaccacggaggcggagcaccaggtggagagggctctccttctggatggtggagtctgctagggtgcgggcatcctccagctggttgccagcgaagatcagacgctgctggtctggggggatgccctctttggcctggatctttgccttcacgttgtccatgggggcggagctctcaacctccaggggtatgggcttgccagtcaagggcttcacaaagatctggatac

SEQ ID NO: 106527 - DNA, 1768 bp, Zea mays
  Clone ID: MRT4577_28653C.1
ctctccttttgctcggaacgcacacaccgcccgtccccgatctccgatcccctcgtcgatccaaagatgcagatcttcgtcaagaccctcactggaaagactatcaccctcgaggtggagtcttctgacaccattgacaacgtcaaggccaagatccaggacaaggagggcatccccccggaccagcagcggctcatctttgctggcaagcagctcgaggacgggcgcacacttgccgactacaacatccagaaggagagcaccctccaccttgttctccgcctcaggggaggcatgcagatcttcgtcaagaccctcactggaaagactatcaccctcgaggtggagtcttctgacaccatcgacaacgtcaaggccaagatccaggacaaggagggcatccctccagaccagcagcggctcatttttgccggcaagcagctcgaggacgggcgcacgctggccgactacaacattcagaaggagagcaccctccacttggtgctgcgtctcaggggcggcatgcagatcttcgtgaagactctgaccggcaagactatcacccttgaggtcgagtcttctgataccattgataatgtcaaggccaagatccaggacaaggagggcatccctccggaccagcagcggctcatttttgccggcaagcagctcgaggacgggcgcacgctggccgattacaacattcagaaggagagcaccctccacttggtgctgcgtctcaggggtggcatgcagatcttcgtgaagacacttactggcaagacgatcacccttgaggtggagtcctcagacaccattgacaacgtcaaggccaagatccaggacaaggagggcattccaccggaccagcagcggctgatcttcgccggcaagcagctggaggatggtcgcaccttggctgactacaacatccagaaggagagcaccctccacctggtgctccgcctcaggggtggtatgcagatttttgtgaagacattgactggcaagaccatcaccttggaggtggagtcgtctgacacaatcgataatgtcaaagccaagatccaggacaaggagggcattccaccggaccagcagcgcctgatctttgctggcaagcagctggaggatggccgtaccctcgccgactacaacatccagaaggagagcaccctccacctggtgctccgcttgcgaggtggtatgcagatctttgtgaagaccttgactggcaagaccataaccctggaggttgagagctccgacaccatcgacaacgtgaaggcaaagatccaggacaaagagggcatccccccagaccagcagcgtctgatcttcgctggcaagcagctggaggatggtcgcaccctagcagactacaacatccagaaggagagcactctccacctggtgctccgcctccgtggtggtcagtaagccatggttcatttaagctgctgctgtacctgggtatctgcgtcgtcgtcgtctaataaacatctgtggtttgtgtgtcatgaatcgtggttgtggcttcgttggtttaatggacctgttgtgtcctctgtgttgtacccaaaactcttctgcagcagtatggcttgaatccttgtgaagtttgatgtttgaacttaaaagtctgctcattatgttttttttctggttatatctcctaataactgcctgggatcaaatttgattcactggtgtttattggaccaataataacccgacaacatgtcgcacctactactacaacgcgcac

SEQ ID NO: 106528 - DNA, 746 bp, Zea mays
  Clone ID: MRT4577_28654C.1
tttggccgaagcagaccgcctacgcggcagattctgcgcgctccggcggcccccgccacctccggcgacatctacgtgctcctctcgacctcctccacatatcccctttgcttggttggtccgcctccagccctccacgtatatcgacgacaccaccaatccctacttgtcgccgccctccttagtcgttgacatcgcgggagtggcgttctgcggcgtcgcttcttctccatctccctcaatcatcgcgttcctcagccgatccagaagcctctagaagcgtcccgagcgccgaatcccgcggccatggcggagaggctggcacccgagaagcgccatgccttcgtccacaatgggcagaaggttttcgaatgggaccagtcgctggaggaggtgaacatgtacatcgagctccccaagaacgtgcccaccaagctgattcagtgtgtgatccaggccggccacgttgaggtcggcattcgcggccacccgccctacctcaaccatgaccttatgcaccccgtgaagaccgattcgtctttctggacgatagaggacggtgaattgcatatcactctgcaaaaaagggaaaaggggaaaacatgggcatctccaataaaaggccaaggtagcttagatccatatgctgcagaccaggaacagaaacggcttatgctgcaaaggtttcaagaagagaatccagggtttgatttttcgcaggctcagttcagtggtacctgccctga

SEQ ID NO: 106529 - DNA, 505 bp, Zea mays
  Clone ID: MRT4577_28655C.1
ctcggaacgccacacagcccggtccccgatctccgatcccctcgtcgatccaagatgcagatcttcgtcaagactctcactggaaagactatcaccctcgaggtggagtcctctgacaccattgacaacgtcaaggccaagatccaggacaaggaaggcattcccccggaccagcagcggctcatcttcgctggcaagcagctcgaggacgggcgcacacttgccgactacaacatccagaaggagagcaccctccaccttgttcttcgcctcaggggagggatgcagatcttcgtcaagaccctcactggaaagactatcaccctcgagggggaggcttttgacaccatcgacaacgtcaagggcaagatccaagacaaggggggcattccttccgaccaacagcgggttattttttctggcaagcaacttgaggacgggcgcacgctggccgacttcaacatttagaaggggagcaccccccacttggtggtgcgtcttaagg

SEQ ID NO: 106530 - DNA, 339 bp, Zea mays
  Clone ID: MRT4577_28656C.1
tccttttgcgtcggaacgcacacacagcccgggccccgatctccgatcccctcggcgatccaagatgcagatcttcggcaagactctcactggaaagactatcaccctcgagggggagacctctgacaccattggcaccgtgaaggccaagatccaggacaaggaaggcattcccccggaccagcagcgggtcatcttcactggcaagcaactcgaggacggacgcacacttgccgactacaacatgcagaaggagagcaccctacaccttgttctccgcctcatgggaggcatgcagaacatcagcaagaccctcactgaaaagactatcaccctggg

SEQ ID NO: 106531 - DNA, 414 bp, Zea mays
  Clone ID: MRT4577_28657C.1
gcgtcgtaagctggtccttagacggccgccttttttttttttttatagtaaaaacttattattgaacatactcatagaaattaaagagggcaccaccaatgtgggtgtggtagaacactgctgggtttgtcaaacagttggttgaatggcacaattgtgcagttgtagaggggccagcgttaggcgcacgtgctggtagaacgcaacaactgggttggtaagaagtagcaggctcacaccactgctggctgaatggagagttgtgctgtgaaataagcaggagagttcaatgctgctagttggtgatggaagaaatgctgggggtaggcagcaggtagctggctgaatggagtgttgtgtgctattttagcggttcatgaacctattgttgaatggaagaactgtgtgctgaga

SEQ ID NO: 106532 - DNA, 449 bp, Zea mays
  Clone ID: MRT4577_28658C.1
cggattcccgggtcgaccaacgcgtccgcaaagacactgtgttaatttatgttcctgctgtcagatgctcaacaagaagcatacggtagcgcatacttggcacatctgaagtaggtgcagattggtgcataaaaggcatccaggacatcagtagttatagcatcctctcacatctgacgctttcaaaatgtcatctccccatagttagaacgaattcatctcaagactgtaggtcctctgcttgagaagcatcctcaccgctgtcctatacggctcctcgaatgcatccaacacccaggctgcaccagcagccccattccaaactgtgtcccctgttccttcctcacttggcttgatggccacaagcgttgcgccatttagcaccagccccccaggcagctcaatacatggtgcgtaccacagtcacatgctaagctctggcatgagcg

SEQ ID NO: 106533 - DNA, 409 bp, Zea mays
  Clone ID: MRT4577_28659C.1
ggccgcttttttttttttttttttatttttttttttttttttttttttttttttttttttttttttttttttttttttttttttttttttttaaaaaaatggacagttttaaacgaagcaggaccttatggggcaattggggggggcgaagaacccccctaaaacttaaaaaaaaaaacaggggcctacggaaggctccctttgaaaacagttggtcccccccggggggaaccccccaatcccaaaaaacaaaaaatttatttccaggcccccaaaggtccggaaaaaccgggcacaaacgacctgcacaggggcgttaaggccttttgggggggaacccggccggcctggggggcccccaattccccctaaaggggggcgaataacgcccccccacgggccggggtta

SEQ ID NO: 106534 - DNA, 409 bp, Zea mays
  unsure (1)..(409): unsure at all n locations
  Clone ID: MRT4577_2865C.1
gggcgaaggcaaagacgccaccccgcgcccgaagccggcgccgcggccgccggacngacaaagacaaagcgggcagggacacccccgagcacacgcagcaccagacgaaggccggcggagacgtatccccgggggggggccgggaccggcaccaaggcccacgcgagaacaggcccaaagaaacgggccccgcggggcccgcctcagagaaacgggccgagcaagcaaaggcatacagggaagcacagcacagaaaccccgctgcaagagaaaacgccggggacaaacgaggagggccgagggcacaagcaaacaaaacacaaggcgctgggcacacgagaacccataaacacccccacacagagcccgggagaggcaacaacaacaaagccacgcccccgagcacgac

SEQ ID NO: 106535 - DNA, 533 bp, Zea mays
  Clone ID: MRT4577_28660C.1
ggccgcgggttttttttttttttttttacacgaaagagatgtgtttgtattaaaaactattaatcttaaatgccttatccaacagtccatctgttaccatctcagatttagagagcagcaacaacaccggcaacagcggcggcggcgacgtagaggagcccgccctcacgagcgacagcaccgttggtctcaacgggggaagagccaccggaagtaggagtagcggcgggagtcttggcggtctcatcggcagaagagacgacgggaggaacaacaccagtggtggtggcagtgaggccggtggaggcgggggcactggtagcagaagcctcgcagacggggacaaggctggcgagcgaagcaagctcggggcactccttgacagcggacatgatatcgtcctggttcttgccgtaccaggcgatgatggaggagctgtagtcggcgtactcgctggagagagaggcgggggtgctgaagctgcaagggtcggtctgggggttcttgaggagatcagagaccatctcgggggc

SEQ ID NO: 106536 - DNA, 381 bp, Zea mays
  Clone ID: MRT4577_28661C.1
tcaacccagatgcgatattgacgatgacagagaacgcgcctgataatccccgccagaggaagccggacatcgcaaaggacgaaggaagttcgtgagatgggagcccaacacgagctgcgggacggctcggcgctcatgtaggatgagttctgcgtatgactgaccatgaccaagaaaaccaaggcctaaattgccctgaatgtcgctgaacaataaccacacgaggaagaatactcataagcaggactcgtcactatttgcgcccacataacattacgcgatttgaggtccaatagactaaatattcctttgccgtccacctagaaggattgtagtattacgagtttgtatacgggggtggccattcgagtctctgcctac

SEQ ID NO: 106537 - DNA, 408 bp, Zea mays
  Clone ID: MRT4577_28662C.1
attcggctcgagcacagccgggtctcactttttttttcctcaccagctgactatatttccgaaggggctctttgataatactcttagggggaagatcatcgccctgctggaccagcctgttcactccatagccatcgtcagggctgatgcccaggctgggcatagcatagacttagtctttcttcggcttgcatacacatacatgcatttggaggctgttcaagcactcgccgactaccacatcctggaggagggcctggtatacctggtgctctaactaaggtcatacatgcaacctgttcataagaccggccctggagggcctatctcttattcggtttacacttatgacgcgcgtgggctacatggtgtccccatatcttgcttagggtgcgtggctcctcccac

SEQ ID NO: 106538 - DNA, 267 bp, Zea mays
  unsure (1)..(267): unsure at all n locations
  Clone ID: MRT4577_28663C.1
gcgccttacgantcgatcgctcagctcgagagatgtgatcacagtgacatgctgcaactgtgtactgtacagatgctcagtcgtgtcaatctctcggcgaacgtgtgaggcactgacgtgcagatgcgtactgatcgactgactgtgtatgctagcgagagagtgcgctgagctacgcgagctgtgtgagatcatgtcgattgatcgagagatctcctgacacagcatntaagcatatagtcggctctcatgagctctgatctgata

SEQ ID NO: 106539 - DNA, 941 bp, Zea mays
  Clone ID: MRT4577_28664C.1
ctcctaagggcgattggttccctcgaggccggccgggatcttccaaattttactcgcctcctgtacctctctcccgtgtgaccatcacaacaaaaataaaatcaataatagagagagaagaggtagcaacaccggctgcttaatctcttcttttccctcctctttatctccagcgcatcgtaaagggaggagcggagcggcgaattcttgtggtttcccaagatgtcttctccaagcaagcgccgggagatggacctcatgaagctgatgatgagcgactacaaggtggatatggtgaacgatgggatgcaggagttctttgttgaatttcgtgggcctaacgaaagcatttatcaaggaggtatatggagggttagagtagaactgccagatgcgtatccttacaaatccccatcgattggtttcatcaataagatatatcacccaaatgtcgatgaaatgtctggttcagtctgtttggatgtcatcaaccagacatggagcccaatgtttgatcttgttaatgtgttcgaggtcttccttccacaacttctgttatatcctaatccttctgatccattaaatggagatgcagctgcgttgatgatgcgtgatcgccctgcttatgaacaaaaggtgaaagagtgctgtgaaaaatacgccaaaccaggggatgctggtgtcaccccagaagagcagtccagtgacgaagagctgagtgaagatgaagacgactcgggtgatgaggagataatgggcaaaccagacccatagtcaagttggcacctactatacctgtaatctgcacacgatgtttactgcagcaactggaattaaacaccccatgaacgtccgcgtgcagtctgagtgccatgtaaataaactgcaatttcaccaattggatttccagcataaccaaaaaaaaaaaaaaaaaagcggcc

SEQ ID NO: 106540 - DNA, 1212 bp, Zea mays
  Clone ID: MRT4577_28665C.1
gcattttctcctccgtctttccaactgcagtttctcaatccaatcaccgcacgcgtgcaccgccgtgctcacctgaaactgcctgtcacgcccgccgtctcgtctcttggatccttgaccctggtcgggacctcgagccccgccaccgtgtgcccatcgcaataaaaataaaatcaataatagagagagaagaggtagcaacaccggctgcttaatctcttcttttccctcctctttatctccagcgcatcgtaaagggaggagcggagcggcgaattcttgtggtttcccaagatgtcttctccaagcaagcgccgggagatggacctcatgaagctgatgatgagcgactacaaggtggatatggtgaacgatgggatgcaggagttctttgttgaatttcgtgggcctaacgaaagcatttatcaaggaggtatatggagggttagagtagaactgccagatgcgtatccttacaaatccccatcgattggtttcatcaataagatatatcacccaaatgtcgatgaaatgtctggttcagtctgtttggatgtcatcaaccagacatggagcccaatgtttgatcttgtcaatgtgttcgaggtcttccttccacaacttctgttatatcctaatccttctgatccattaaatggagatgcagctgcgttgatgatgcgtgatcgccctgcttatgaacaaaaggtgaaagagtactgtgaaaaatacgccaaaccagaggatgctggtgtcagcccagaagacgagtccagtgacgaagagctgagtgaagaggaaaatgactcgggtgatgaggagataatgggcaaaccagacacatagtcgagttggaacctagatctgtaatctgcacacgatgtttattgcagcaagtgcaattaaatagtccatggatgttcccgtgcagtctgaatgccatgtaaataaactgcaatttcatgttcgctaaaaaaaaaaaaaaaaaaaaaaaaaaaaccctcttacaactgcaacaattgctgccattcaaccaacttgctttgacaaacccagcagcgttctaccaacaacccatcattggtggtgccctcttttagattgcttatgagttatagttcaataatgatgttttttggatgatgtttgtggcttcccagaaataagaaagtacatttctagattcttaaaaaaaaaaaaaaaaaagcggcc

SEQ ID NO: 106541 - DNA, 1266 bp, Zea mays
  Clone ID: MRT4577_28666C.1
cgtcaacttgtttcttggatcggtgcctttccttcgtgatttactcactcaaccggtcatgccaccctctcaaagtttcaaccgtgtgcccatcgcaataaaataaaatcaataatagagagaggaggtagcaacaccggctgcttaatctcttccttttcctcttcctatctccagcgcatcccaagaggcggaaagggaggatcgtggagcggcgaattattgtttgtttccccaagatgtcttctccaagcaagcgccgggagatggacctcatgaagctgatgatgagcgactacaaggtggagatggtgaacgatgggatgcaggagttctttgttgaatttcgtgggcctaacgaaagcatttatcaaggaggtgtatggaaggttagagtagaattgccagacgcatatccttacaaatccccatcgatcggtttcatcaataagatatatcacccaaatgtcgatgaaatgtctggttcagtctgtttggatgtcatcaaccagacttggagcccaatgtttgatcttgtcaatgtgttcgaggtcttccttccacaacttctgttatatcctaatccttctgatccattaaatggagatgcagctgcgttgatgatgcgtgatcgccctgcttacgaacaaaaagtgaaagagtactgtgaaaaatacgccaaaccaggggatgctggtgtcaccccagaagagcagtccagtgacgaagagctgagtgaagatgaagacgactcgggtgatgaggagataatgggcaaaccagacccatagtcaagttggcacctactatacctgtaatctgcacacgatgtttactgcagcaactgcaattaaacaccccatgaacatccgcgtgcagtctgagtgccatgtaaataaactgcaatttcaccaattggatttccagcataactatgtcttcgaatcatgagtgtagtgtaggttcgtgcgtttgaattggctgaaggtttcaatatttgtgcaatcattagcagaactgcagaagcaagttcctcaatacagtaattcagatgatgttggcgtagaccttttgaagcaaaaaaaaaaaaaaaagtagtgcatagctaatgcgcgatttaagatattgaaggggatgcattctgctgatgcatgaactgagcctggagaatctcttcaaccgtgtggagattagtgcttcgtcattgtttgcattgtgaggatatagtcctcattgttataatatgaaaaagtaactggcgcactt

SEQ ID NO: 106542 - DNA, 707 bp, Zea mays
  Clone ID: MRT4577_28667C.1
cccggtacccgatgcacgcctgccgggcttctctcaccaacacccgcgatgtcatcctcctcgccgccgccgccgccacgtcgtcgaggacatgccccatgtcctccagcttctcagcgacggcacggtggtccgcttcgccgactacgacacgctccctcccccgtccgtgcctcccgcgccgctgcccgtccggtggaaggacgtcgtgtacgacgccacccacggcctcaagctccgcgtgtacagtcccagtccgccggcctcctgcggcaagctgcccgtgctggtctacttccacggcggcgggtacgtcctcggcaccttcgcgctgcccagcttccacgcctgctgcctccgcctggccggcgagctcccggccgtcgtgctttccgccgactaccgcctcgcgccggagcaccgcctccccgcagccctcgacgacgcggcggccgtcatgcgctgggtgcgcgcccaggccgtcgcggcggggggaggggacccctggctcgccgactcggctgacccgggccgggtgttcgtcgccggcgactcagcgggcgggaacatcgtccaccacgtcgccgtccgccgcctcggctcggcggcctcgggcgaggctcgacccggtacgcgtcgccgggcacgtcatgctctgcccgttcttcggcggggccgagaggacggcgtccgaggcggagttcccg

SEQ ID NO: 106543 - DNA, 605 bp, Zea mays
  unsure (1)..(605): unsure at all n locations
  Clone ID: MRT4577_28668C.1
nnaggccggccgggcccgggaccatcccgcacccaacgtccatacaatactacgagaccagatgcatcccatcgctctgctgctttcccttccctgtgcccctgtccaccaccatagattctactagcaagattcgacatcaatgaggttctccgagtgatcgctagaaattgggatgatcactggtcgtcgtcgtgcatgagcggacggatagtctgagctcggctgcgctggaaccacccttctcgatcgccaccgactacgtgacctacaagcgcaaggatcacactgtagaccctgagggcaatgaccatggagataacctgcaccacctcacaaaccctctctcttcgtacgtagaaagaaggagctgtactgatgtgcaccaacccatgaattacaccccctaagagtccattcgcgccgaaaaagctatggatacaactgagagaaatcgctgtatcattagaatgctgcatgtcacctgtattgtggcatcaataagattgtcatatctgatcctaatattaatgcccccaaagataccgataatcgcctcaagaaagagtacatctatggcgttaacattggctccgatgcctagc

SEQ ID NO: 106544 - DNA, 418 bp, Zea mays
  Clone ID: MRT4577_28669C.1
gtcatgcgtacgcacctacatacgcatacgcatgcagtatacgctgcactatgcgctgcaggacaggccgcacatgctcaccgctgtcatgacctcgtccacctcgacttgcacctcgactcggcccttgacgtcgcccttcacgcccacggggaggctcacagctgctgcgccagctggtgcagcggcgagcgcactggtcaggtgtctgcttctctgcctgcacatcctcctgcgcatccttctcctcatctttcactccttcttctagactctctccatgatcccggacatcctcctggactacttcctatccgacttggtctacgctggagcgctcttctgtgcgctcctcctattcctgtggctgtttctgtttcggcttgcctttgcgctgccgctgccgctcgcgctccga

SEQ ID NO: 106545 - DNA, 414 bp, Zea mays
  Clone ID: MRT4577_2866C.1
gggccgaccacaggcggccgaacgaacccaacaaaccaataccaataccagaggttttttgatttaacttttaaccgttagatcgggccacgtggttggttaaccggggcacacggttagaaaagcaggatgtcggccggaccggggacctgaatcgccataatcttggccataatcctgccgccgttgggggtttttttaaagttcggttgcggggttgggttctggatctgcctaatcctaacctttttgggttacttccccggattaatttacgccgcttgggccataaccaagtagccggccgaagcaaagcaaccacggccccttgaattgacttccgccggtgcgttagcttgcaatgttttgggatgggattcctttctttttggttaagtggctgctgctcctgtt

SEQ ID NO: 106546 - DNA, 821 bp, Zea mays
  Clone ID: MRT4577_28670C.1
cggccgcccttttttttttttttttttttttttttttttttttttttttttttaagaaacaagaaatatacactacattcaaaatgcgtggggcctgatacagccagcctccatggtaaacacaaatggagtataagcatcttctggtatgtatgaaccaatgttcttaatacggtaaggcgagacgttagaccaccgcctggacgcgtaggcaagcaaggcgactagaattattcgagcgcctagacgcctagacatcacctaggcaacgccttaaaaacactggtatgaactgaatttgtatatagcctcatctactattaaactagttcggcccttttgcaggtttgttacttcaattcagcgaatacagataaagcagctgatttgtgaacccaaaactagaagacgggaaactcaactgcataaagcagttgagaccaataattagtttccaacttccaactcaactacttttgaagggagccctgtatcatggacgttagtgatggatggactcgagcggtcttcaatgatcgtgcaacacttcttccttctgaatattcctcaccaagaggccatcttggccgcagctcatactgcatatcatcagactcatcagcagcaggtgggtcctcaaacctcccggcaacaaaatgctcaatcccagtccaagcaatcatgacaccattgtcagtacaaagacttggaggaggagatacaagttgtaggccattattcccagcaacatgattcaagcgagtcctaacatacttgtttgatgcgacacctcctgaaacaacctttttataattggataa

SEQ ID NO: 106547 - DNA, 195 bp, Zea mays
  Clone ID: MRT4577_28671C.1
ctgtggttttttttttacacaaatcataggcaactttagcatcaaaactatgctttttagagtgcactagggagaccccaacataacattgagatatcaacgcaatagagtgagagatatacagaagggcatccataatttatgcatttggcggttatttatgatctgaggggagcacgatctgtcccacacaac

SEQ ID NO: 106548 - DNA, 712 bp, Zea mays
  Clone ID: MRT4577_28672C.1
ctggaataggggatcgagatgcttctaaagtttctgtgaagaaagaggaagcagcaaacattaagatagttgagcttgcaatgcatagatggtctgggcagttcagccggccattcctctttggattattgaatgatgggacattgttgtgttatcacgcatattattttgaaggctcagaaagcaatgtgcaatgtgctcctttctcacctcatggtggttcaccggatattggcaatgccactgattcaagactcagaaatttgagattttgtcgagtttcaatagatatctcatcacgagatgacatttggtggctcaagaaataatccctcacaattttcaacaatgttggaggttacgagggattatttcttggtggcccaaggccaacctgggtttttgtttgtcgacagcgatttcgggtgcatccacagttatgcgacggtccaattgtagcctttactgttctccacaatgtcaattgttgccgtggccttatttatgtgacatctcagggttttctgaagatatgtcagttgccatctgcatataactatgacaactactggcctgttcaaaaggtccccttgcatggcactccacatcaggtcacatattatggagagcagtcactttatccgcttattgcgtcagttcctcaggttcgccccttaaatcaagttctttcttctatggctgatcaagaatt

SEQ ID NO: 106549 - DNA, 321 bp, Zea mays
  Clone ID: MRT4577_28673C.1
ccgccacgggcggcttctcgtccagggtggtcggccgcggcggcttcagcacggtgtacctcgcctcgctctcctcctcgcggctcggcgccgtcaaggtgcactgcagcagcgagcgcctccgccgcgcgttccgccgggagctcgacgtgctgctctccctccgccacccgcacgtcgtccgcctcctcgcctactgcgacgagcgcgacgagggcgtgctggtgttcgagtacgcgcccaacggcgacctccacgagaggctccacggcggcgcgggcgcgggcaccctcccctgggcgcgccgcgtggcggtcgcgt

SEQ ID NO: 106550 - DNA, 558 bp, Zea mays
  Clone ID: MRT4577_28674C.1
gcggcgctcaggccggcgggtcgggacactcacaatgattctctttccgtcacatcacttctcggacactgtccgggccccaaccatgccgtcgcaacatgcacggctgcaacggtacataggatcctcacgaagataacgacaagcattgacgatgaaccgaagtacataggcccatcgccaagagagatcgacaaataccagtccccaaggaacccgacctgctcctgaaatcgacctcaacgactctccacgctgacgcgaccacagccgccgcctagatcccgcatccactcgagtgcgtacacaactcaagaaagctcaccatatacatatgccggccgctgtataacgtacccgagctaaccgacatgaactgtgctgcatgcaatcttgtagatttgcacatgcagagagaaaccaccatggcagtcgctgctaataataagaaagcaatgtggttatgatgagatgagtaattctgtggcgatattatttgcaacaatgatgtatatatgggcatgattggtccaaaaaaaaaaaaaaaaaaggccccta

SEQ ID NO: 106551 - DNA, 148 bp, Zea mays
  Clone ID: MRT4577_28675C.1
ccaccaaccaagggccactgccacgacaaggcacaggccatcaaagagaactgcttgcctggctgaaactggtgccgctataggaaggcagccaccaaaggactagccactgccagtggattaaggaatggttgccgctggtgaaagc

SEQ ID NO: 106552 - DNA, 875 bp, Zea mays
  Clone ID: MRT4577_28676C.1
gctaaatcctgtggcgagacttagcccgggctgtctgacttcgggctcgccaaagtcggacctgtcggagacaggacccatgtgtccacgagagtgatgggcacctatggctactgcgctcctgactacgttgtgagcggcaagcttaccatgaaatccgacatatacagcttcggcgttcttctgctggagctgatcacggggaggaggatctacgatgcttcaaggcctaaaccggagcagagcctgctgacatggtcgaggccgttcctgcatgataagaggaagttccaccggcttgctgacccgtctctgctgggctgctacccgtcatcggcgctgaaccagctagtggtgatcagcatcatgtgcctccaagaccagccccatgtccgcccaatcatctccgatgttgtgataggcctgaaccacgtcgcgagccagccatgcaccgctgagcgcacgctgccggcgtgcatgacctccccaccgagcagcgggtcgccgcagctcgtcagcacgccggcaagaaggagaggtggtaggttgatcgggcagtagtatgcttagggctcaagctcacgtctaaagaggtcagatgagaccggtaggggagggcagttgaaattgaagccgtcaaattcagttccatcgagtcagcctttttgattgaagcggtctccagtgacttgcttgagcagttgagcttgaccatgcatgcctattgctcttttttcgacttcttcattgttttcagttttgaattctgtagccagtgtactatgtacataggatgtgccctcctgtgggaaagaaaagaatgcagcagtcacgggaaaaaaaaaaaaaaaaagggggcctccttttgggatatt

SEQ ID NO: 106553 - DNA, 631 bp, Zea mays
  unsure (1)..(631): unsure at all n locations
  Clone ID: MRT4577_28677C.1
tccacctctagcccgcgcttatacctatgggactgttcagccacaagaagaaggactcgatcgtcggaccctctgggtacgcctacacggacgaaggcgaggatgaacgtcgtcactcgagttcgtcctccccgcgccgatcggtcgaccactcgcgcacgtctaccgatcaagcgaggaggggcagcgaccaccacgcggcttctgaacacacgcccgtcgtcgccgctgccgccgctgcgcccgtcgtcggttcggcccactcggaacgcagggaaagtctcaactcgaccgacgtcaatcacaaccgctccgaaaagtttacttcaggtgttttgcctcaagcgccttccgccccgacgacgacgacgaccacgactgaaacggtcgtttcccctaccccgatcgtcgccgcgcgaggtctcgagggcggtcgagcggaggatgccaagagggagaagattttcgagactgccaaagcaccgcaccaccacccgggncgggacaaggactctgtcttgagcgaggaggatgcaaagaacgccgagcacgatcacaagtacttgcaacccgtngttcacgaacgcctccaccgacaccanngtnggggagattgagacttcccgaaccg

SEQ ID NO: 106554 - DNA, 446 bp, Zea mays
  Clone ID: MRT4577_28678C.1
cgttttgaagccaccaggtgcttggcgaactgcatcacgcgcagccgcctccggtgggctcccttccgcggcgccggcgggctcccatcctcggcgcctgaagctatatatctgctcggcgtccatggtcacaggattatatggttgtccatgtcctcgcgccgaagcaagtgatgatttagattaaagaaatgtagaacctgggacatgctctcttcagtttgcacatggtcacaagatttgcaacacatatatagtttgcacattctgcctgctcacatggactcagaagcaacaatacatcatcaacatcgtgtctgcaggactgcacattagcattcatcccgttggctgttagattggcttcagcaacgtgatttttatactttctctatatcctggctttacagttttttttaaaaattccatactctatattttctttc

SEQ ID NO: 106555 - DNA, 323 bp, Zea mays
  Clone ID: MRT4577_28679C.1
gaccaacgcgtgctgcgatatgcattcatcaatgtgaccgctccgggcataccgttgcattttacaagacgttccacagctagaattgcgacaagtcatttacatagaaggtggcctcactggcgtacgccatatgcagcgatgtacgctctcaatgctcacgtccgaaactataatgcgtgtaatgacgagatctggggctacactgtgctggtacactgtgatggcccgaacgcacgagaccaggtaccattccctgggggtaacaatgctcgttctcaggccgggaggaacagtccacttatcaggggctcggagactac

SEQ ID NO: 106556 - DNA, 561 bp, Zea mays
  Clone ID: MRT4577_2867C.1
ttcttaagcagtggtaacaacgcagaggactttttttttttttttttttttttttttttattttttttttttttttttttttttttttttttttttttttttttttttttttttttttttttttttttttttttttttttttttttttttttttttttttttttttttaaggagtaagggggtgggggatttttttttatctttatagtttgcatgtgctatgttttattttttttgtttttttggaggaattttgagttttaggaattttgttagaaaacgcacatttttttcaatagtttttttttgagattgttgggaacctaaccatatttttttatcgcctgtttttttctaaaatacgtttttttcccaaatgcattttttaaaaaagtttggctaaaaaaaaaaatataaaaaacccccgctataatagccctttgtggacgagttgcggccccaaagggtttttgttttggcatacaaaaaaaggtcttattgtttttgccccccctgtccagggggtactcccccccccgcccagaagaattttttttgggg

SEQ ID NO: 106557 - DNA, 1136 bp, Zea mays
  Clone ID: MRT4577_28680C.1
gcccaaatatatctccccgccccgggtttggacggggtgggcgtttcttctataagcttctagcagcatccgcccccgccgcggaggcccaaatatatctccccgcgtccgctagccctagccgccgtccgccgacttcatcgtcgccgtcgtctagacctcttcacgcactggaaaggttaaagtccgacatcaatggcgaagcatcatcctgatctcatcatgtgccggaagcagcctggcatcgcgattggccgcctttgcgagaaatgtgatggcaagtgtgttgtctgcgactcgtacgtgcgcccatgtacgcttgtccgggtctgcgacgagtgcaattatggttcgttccagggaaggtgtgtgatctgtggaggagtcggcatctcagacgcttactactgcaaggagtgcacccagcaggagaaggaccgggacggttgccccaagatcgtgaatctcggaagcgccaagacggatctcttctatgagcgcaagaagtatggttttaagaagagatgaccgagaagatggagctgtgtgtggttcactttggctgtgtggtctgttctatggcactgaatactgagagtaggcagctgagacagcagctttgtattcctgttatggtttgataattgatactggcatggaaatacagctgtgatatgcgttgtaataactaagtccaactgtatgatgcaagagactgcttatgtaatctgtgcttgatggtaatggttatgaatggacttgaaataaaaaaaaaaaaaaaaaaaaccggccatggcatcacggccgtcatcatatatatatgttactgctcgatgtatcacaggatcagtcaggttcgcttggcctcttgttgagtaatgctcatggatactgggagtaggatgttgcggcaacgtttgcgttatgtttattgatggtgatggatactggcttaaaacatgaactgggatggcctctttcgttctcagacgtgaacaagagattggtatatgaattgcagttgagcatccctgatgtgcttgtggttctatgtctgagtagccacagtttgactgatcatatcggcacacaatgtactcatgcaccatgagcatatgttctgaatttttgtgttt

SEQ ID NO: 106558 - DNA, 840 bp, Zea mays
  unsure (1)..(840): unsure at all n locations
  Clone ID: MRT4577_28681C.1
ttcccacgcgtccgcccacgcgtccgcccacgcgtccgcccacgcgtccgcaaatatatctccccgcgtccgctagccctagccgccgtccgccgacttcatcgtcgccgtcgtctagacctcttcacgcactggaaaggttaaagtccgacatcaatggcgaagcatcatcctgatctcatcatgtgccggaagcagcctggcatcgcgattggccgcctttgcgagaaatgtgatggcaagtgtgttgtctgcgactcgtacgtgcgcccatgtacgcttgtccgggtctgcgacgagtgcaattatggttcgttccagggaaggtgtgtgatctgtggaggagtcggcatctcagacgcttactactgcaaggagtgcacccagcaggagaaggaccgggacgcccaagatcggttgccccaagatcgtgaatctcggaagcgccaagacggatctctggtaagaacgcagagtacgcgggggttttaagaagagatgaccgagaagatggagctgtgtgtggttcactttggctgtgtggtctgttctatggcactgaatactgagagtaggcagctgagacagcagctttgtattcctgttatggtttgataattgatactcgcatggaaatacagctgtgatatgcgttgtaataactaagtccaactgtatgatgcaagagactgcttatgtaatctgtgcttgatcttaatggttatgaatggacttgaaatattggctaaaaaaaaaaaaaaaaaaaaaaaaaaaaaagtactctgcgttgttaccactgcttangggcgattttcgcacactggcgggcgtctctattgt

SEQ ID NO: 106559 - DNA, 257 bp, Zea mays
  Clone ID: MRT4577_28682C.1
gggaaaaaaaaccttgggcccttttttgaacttttttttgctttcagccatttgttgggtcaaaatcccgagaaaggtgcgcgaaacacttccgttttcaactccattcttgattgcctccagtaaaattcccaacacaaaaaaggaactttttgctcactttcctttttgccaaccatgctcaacacatgggtttgcttggatcccccctcaattggttattgggaaggccccattaatggcattcccattttttt

SEQ ID NO: 106560 - DNA, 652 bp, Zea mays
  Clone ID: MRT4577_28683C.1
gccggccgggctgggctagctagctgatcacgcttcggcctcccctgcttctcctctagcatgctcccctccatatatacatatcccacagatgttgcttgcttccacgaaccagttaataacaacgtccttgtatatatagtagtacctgcagtctctggtcgacgatggcgtgtccgaggcagggaagtacacagcagaagctagcaaacagcatgagtggtgccatggacatggcgcgagccgcgtgacccagcaaactacatacatacacctagcactagcagagaccagagattcagagctcaggagcccaggagctcaggatgtgtcgttgagtgcgaagctgccgatcgaaggagggagagaaggttctcgaccgtcgtcttgctgcttgccggtcgcggtctcagtcatcgaccatgtggagcttggtgcggcagggcctccgatggggcagggggcggcgacggcggcggacggcgcgggtggtggacgagagcgcgctcggcgcagacggcggcgatatcgacggcggcggtgctgccgcggcgggcggcgccgtggtggcgccgacgctgggcggcgccctggccagggcgctgctggcgctggcgtgcgccgtccgcttggacggcgaggacgtcggcgc

SEQ ID NO: 106561 - DNA, 223 bp, Zea mays
  Clone ID: MRT4577_28684C.1
cggcctgagccgttagagatagatgatcgccatcgcgtcggcgactacagagcgcaacgggccggcctttattttcggaccagttcctgatggcgtaccaactgttgctatcttgattcgcattagagaggggccttctcatggctatacctgatatctgttgaacagagttattccctcacagctgcactcatgattggaaacgggaggatatgtttgaaaa

SEQ ID NO: 106562 - DNA, 527 bp, Zea mays
  Clone ID: MRT4577_28685C.1
cgggggggcccagtctaccttgttaacgaataactatagccatatcaattatagtaaaaggatgcctttattttcacatacactcatatctgacatatgaataatcatttggagaacatcaacacgaccacatctctgttcaccagaaagactctctgtggggggggaggccttacagctcgtatcacgatataatcactacacctactgtgacacatacaacagaaaaaatgacttgctctttacatattcatctaactccttatctaaaacatcttataactgatcatttaccatcctcagcaatcacactacgaaaaccagcactcttcaacatctcaccttaagcctccacaaccattcatgtcataacgctctctgcttaatgtacctacccggactaccattcaatagggcgaattctacaaatatccatctcactgaacgctggtcttacctacctttatagggttccattacacctatatttagtcatattacaatatactgaacaggcgctttacaaa

SEQ ID NO: 106563 - DNA, 472 bp, Zea mays
  Clone ID: MRT4577_28686C.1
gggaaaaggggccggtaaaacatctaggggtttaaagggggggggccacatgaaaggggcctgcccaaattccgggaacaaacagcagcagcaaaataggggaacacaaaacatttaaattgggggggcccctcaggggttgggaaaaacaaactgggcaggggggatgggcaccctcaagggtccccgcaaaacatgggggggggggggagccccctgggtaaaccaatttcctggggaaaagaattgccataaaactccttaacgttgtttggattggggccccccacctaaaggaaaaacccccccttgggggcccccgggggcttcccaaaaaaaaaaaaggggggggggggtttccggatctaaataaaattggccccaaggggggactccgccatggggaggaggaccctttccccctgggagggggcccgcccggggaacaacttgaacccccggatcacggggg

SEQ ID NO: 106564 - DNA, 686 bp, Zea mays
  Clone ID: MRT4577_28687C.1
gaacatgcaacagaagcaagatagcacctctgtcacaaaggttcaaaacttaaactctgtaccagtcccctccccagctcctactacttactaccctttcagtgagacgcagacagaatctcaggtcgttggatacgaagaagatttaacaggcaggcagaagatcatagacagggttcggtctcagagcattaatgtgacttcgtcgagtgagattctttagttgtggaggcgaaccataacttctcccagatctgactgtcaaattgcgatagggaagatgtgttatgaaatctgcttgttgtgccatgtcggcttcaaattaagcagcatgaatggagtctacgaatgtggagtcgtattcctagccagatgacccgcgcagcataaatcaagaagatttccattgcatggcattcgatgaacggaacctcgcgctattacatcgtgatcttgtggatgtaaccacccttgtttgtagaactgacagacactaaacgcctgtgatccgtttggtcctgtacattaacaatcttgtacactagatacaagagcaggtaaaggagttatatatatgaacagatgtaacagttcatttttgatttaaaaaaaaaaaacagttcatttcggatttaatgctcaattagtcgaggtaaaaaaaaaaaaaaaaaaaactcgaggagggg

SEQ ID NO: 106565 - DNA, 739 bp, Zea mays
  Clone ID: MRT4577_28688C.1
gaaaaaattgacaatggctctgagacctgttaacaaaaagatacaaggaattcgtacttccgtacggaagaaacccaaataagcaaaggcacactataacaagcacaggaaccagattggtatgggtgccggctcttacaagtcacaactcacaacaacaacgaagtctgaccatcaacacatggacagaagtgaaactctgccccctctcccacttcttccacgccggagactcccttgactagatagcctcatcttggttttcaagttccaaccttatggattaatcgctgtccgacctcaattttatccaacctttaaaggtagcgtctcacccatgatgataaagttctttatccacgccacgcagttctttatctggcattcagatttctacgaggacaatccatccttccagtgaatgatgctgatttgcacaagctataaatcaggcctccagcatatcaagaatcatcgctagaaacaaagacgatcaggaacccatggactgaattcaaaacaaaattcatgttctctgtgaatgccaccaaactttgacaatgcattgcaaccacattgggtctgataggccaattggcacctgcaaacgttgtgcaaacatacatggccgattaattggtttccatgtgtctagcaacacctcgttatgctcgaagagctgttactctgttagacagtggccgcgagaaacccagcccggcacagcatcgtgatgctc

SEQ ID NO: 106566 - DNA, 598 bp, Zea mays
  unsure (1)..(598): unsure at all n locations
  Clone ID: MRT4577_28689C.1
atgtgcggcctcgaggcggcggtcaaaaaaggcaaggaattccttccttttcccaggggagatcgccgccgccgccccgggttcgttcggaagagcgtcgccctctgttcgcgactctgatgcgagacgcgagatatggggacccaaatgaaacttgctcctgctgtgaacgcgatgggaaggacccgatccaggaggaggcgtacccaatgcagactgaaacccttcgatgaccgaaagcggctcatcgtgaggaacatcaagggcaccgtttctcgagggagatatcatcacactgcctcagnactgagaggaaggataggaggctgccttgaggcggaatagtgtcttgccagctttcatatgagagttgcatgaaatcgaatggcgctacggttgtcaaaatttggtatgacgttcagaacatctgcctcggatgagcggacttcgtacagggcgaccaggccacgattttcgacgtcatcttggttgcaaactatctgaacatctaaggcctgctcgacctgacctgtcagactgttgctgacatgatccagggggagacaccacaaaagattcgcaagaccttcaacatcaa

SEQ ID NO: 106567 - DNA, 508 bp, Zea mays
  Clone ID: MRT4577_2868C.1
atcaacagtcaagaccaaaagaggacagcaagatagcgtattggtccacgcaccaagtacatattaaggacacaacatgtcaatcacatagcattacatatagagcttgaatgtgctggagagatgccatagtagtgcctagcaatgtttgatttttgttctcagaataactttctacattccaaccaacaaaccgtgacacaaactgaacatgcatggttggacagttggagcttcagtactttggtgctggctgctgagttggcaaaagtgcaaatctcttcttcaataggtaccgctggcgagagtacttgtcatctggtgagaagcgagctgggtgagcagactgtgtcggcaccccaagaggcgactccttcttggtggtgtagaccttgtcccccttctcgttgatgtagtactggagatacatcttgaatcagtgtgcagggatgataccagagattggaagacggatcaggagtttagcttcagcacgcgaacgcgtggg

SEQ ID NO: 106568 - DNA, 250 bp, Zea mays
  Clone ID: MRT4577_28690C.1
aaaaaaaaaaataaaataataatataaaattaaaaatagactactaacaaaaatggaaacggacaaatactcacggcggaacgtctactagatctaagctatccgatcaagccatgcaacaaaagagcgctcgaatatataactttactccaaatgactgatggacgttctatactcactgtactcaaataactatggggatcctcaacttacatggattgattaacatccacctttcaccagttactgc

SEQ ID NO: 106569 - DNA, 263 bp, Zea mays
  Clone ID: MRT4577_28691C.1
cgcatacaacttgataaagtctacgcgttctaacatattcagatatgctacattacataaaggtaccattagtactactaaattctaaacttccatacactcacatagttatgtatctattgcattctaataccgcaaatataaattaatacagacaaaactcactagcaacaaatttttagtttataacataaataaatgaagacaaaatggacttccactttgtcatagcatactagattcacagattttatgcatttaac

SEQ ID NO: 106570 - DNA, 171 bp, Zea mays
  Clone ID: MRT4577_28692C.1
cacgaagaaggtgtcggcgacgaggaacgtggctctgggttcgacgacgacgcggcggagcagctgctcgacgtgtcgtacgcgctggtgagcgacggcctccccgtgggcttcgaccggtcgctcaaccacgacgacttcatgggcgcgctgtctcaccccatgatctac

SEQ ID NO: 106571 - DNA, 364 bp, Zea mays
  Clone ID: MRT4577_28693C.1
tctacccattgcatttgcaagcccttttacttgtagtgcgctcagacctcgctcgctcttggtacagagctaggcggctaactatctaagaagaagcaagccatagctgtaattgagagagaggcgaggacgtggcgattactgcagccgagatggcgacgacgacggacctggggttcgaggcgacagatctacgcctgggcctgcccgtcgggggaggtggaggggagccggcgctgggcggctaggggaggagctattccttctccttcgttaagaggggcttatctgagaccattgacctgaagctgaagctggagccagcggccgacatgaaggcggaggaggaggaggaggaccttgg

SEQ ID NO: 106572 - DNA, 402 bp, Zea mays
  Clone ID: MRT4577_28694C.1
gccccaagcctgctgcaagctcgcgcgcgagctggccctcctcgcgctgctgctggcgacggagctgctgcgccacgccaccgccgccgccgccgccgcggggagcatggagcgggagcgaggcgccaggatgccgtccgcttcttccaagccggcgcccgcattggcgtttgcccgcttgtccgaggcggaaacgacgccggccgtcgtttgcggcggcgtgttgctccttctgctcgagctgccgtagttcgcgctggaccgagtgctggaggagctctcgccttcgttgttcgccgtgatggcttgcgtgtgttccgtgctcagggaccgctgttccttggacgctctttgggggcgtttcctgccgatcaagtgtgggcgggtgctcggcgccgcgtc

SEQ ID NO: 106573 - DNA, 620 bp, Zea mays
  Clone ID: MRT4577_28695C.1
ggatgtgcccttcccggcttttcccctgagtgagaaatgtctcaaactcttcgtccactctcagtaggctttcctatagagaaccgtggaagtcctgtaggcatgagtgcgttgagaagtcacctggagcggatgaagcatttgacatttgtgaggcggatttcggacttccatttgctccttaagcttgctactttcctagatgcaaagtcagaaatgcctactatagctgcatgtgtaaaaactcagagcaggatgcccgaggggtaccagtttctgatcgagtcctttgctagtcagggataatattgcctctgaaagcatgacacgacgatgcataatttatttacctgtcacatcaggcgtggttcggttattcttaattcacgtggattggaaggtatcaggatgaattgatatagattttaatttgctatagatttaaaccaatttaatcctatccaatttatatggattaaccttaaaacgaataagcccttatgtgtaacttatggatgtctcaggtgtataagtattgttcaatgcaatcacttttcgataaaaaaaaaaaaaaaaaaaaaaaaaaaaaaaaaaagaaaaaaaaaaaaaaaaaagcggcc

SEQ ID NO: 106574 - DNA, 283 bp, Zea mays
  Clone ID: MRT4577_28696C.1
ggggctcgggataaaaaaaatcctttcacttgacttcaattataatgcatgtccccccaaactttacaaaaccatccggttttatttccccttccatccaatcgaaacaacattaaccacccttacccccttcttaaaaaaatttctttttcttccatcaagaggcaatggtaacaggaacaatactttccatttattatcaggtcaccttgttttttcaccaccagtatcacgacccagagggaaactcaccctctccaacttcaactgtttttcccccctt

SEQ ID NO: 106575 - DNA, 284 bp, Zea mays
  Clone ID: MRT4577_28697C.1
cggacgcgtggggctggacgagatggtcaccgccgagagcgcaccttcggcctcttctccaggagttcgcgcgcgctacgggctcactcgtcggattccacacgtgttctgctcgacatggcttctacagccagactgttcagaagacatttcacagcatcaactggatcccaaggcaacaccatgagcgcgctggagaggtgttcgcatctccgcgccagacgctcatcggctctgggcaccgtccgggctctggttcacgtcgcgtcatcgacgtcgtcggc

SEQ ID NO: 106576 - DNA, 350 bp, Zea mays
  unsure (1)..(350): unsure at all n locations
  Clone ID: MRT4577_28698C.1
cacggcctgacgcgccggctccaaccactactatcaccaccatggtcaccacggcggcgcacggtttctttgtgcgcgagaccagggtcgaggaggacattaacacctgcaccggcgaggtccacgagcgcagggagagcttgctcgccagggctaactgagccgtccggcggtcggcattcacgcccgttcgtgcctgcctgcgtgccttatgtatgtctgcggacgactggaagagcagggtctttttttttttttttttgttttttctctcatttattttcccgnacgatataccaccttaaagctcgggacttgaattaaactttcttttttatttgctaataaaa

SEQ ID NO: 106577 - DNA, 146 bp, Zea mays
  Clone ID: MRT4577_28699C.1
gcgtgaacacttgggcggacccgtgggcggacgcgtgggcttgcctggttcctgtcgctggacttttgaaccactcggtatcccctcatatgttgaactatggtcgagtagataaagccacaaaatcgttgaagtttccttttttt

SEQ ID NO: 106578 - DNA, 373 bp, Zea mays
  Clone ID: MRT4577_2869C.1
gtccggtctgggcttatctaatgcggcaccccatatcagatttgcaggacaggacttagttattgatcactgagtccccatgtggaattgcacatttgtgggcaactaaggaaacagattggtgccgcatggtactcccatgggaccccccctctgaaagagcgcagaagtgcccagtcatgaacaactactctacttacggctttgcgctaagaggtctgtgaccagaagagccctatcgggactattggaattccgcatgcggctacattggtgtacacacctttgattgacgtagctaggacaggacgtatgacagaacaggtccctgctttgaacccaacaagctatacgcctatggggagctggggat

SEQ ID NO: 106579 - DNA, 552 bp, Zea mays
  Clone ID: MRT4577_286C.1
tttggtacctcgaaggcggacgggacactgagaaccgcgcacacaggcgtcccgccgactctccgatagcccccactcaagatttccgcgatgtcccgccctatgcccgttgctccgcaccgcggccgctccccccggtcgacaacggcatgaggggcggcgtctacgtcacagagcggccaggctggtatccagatcgaaaacactggctgggagcgggactgcctcgagcatggcattcaggctgatggccaaatgcccggtgacacgaccattgggggaggtgatgatgctttcaacaccttcttgagtgagactggcgctgggaagcacgtcccccctgctgcttttgttgaccttgagcccactgtcatcggtgaggagaggactggaacctaccggcagctcttccatcctgagcagatcatcagtggcaaggaggatgcaggcaacaacttcgctcgtggtcgctacaccattgggaaggagattgttgacctgctgcttgaccgcatcaggaagcttgcagataattgcactggtctccagggc

SEQ ID NO: 106580 - DNA, 364 bp, Zea mays
  Clone ID: MRT4577_28700C.1
cgtcgtcgtcctctcgactctcgtgcgccaycgccgggccgggcgggccggctcagtggcagcygcagcaggagcagccgcagckggggccgcagttgcaggtktggcagtygcagccgccgccctcggtggccgcctcgaagccgccggcgctggccttggtggtcggsgcacragggaccadggkcttgadgctgcgggsggcggcggtctccacgtcaggggacatgcagtkgcatgarctgccgcagagcagctggagccgcagtggcactggccgcygccgcaagacatgawcacagacgaaggggagcaggcgcyacygttctaggaggaggaagaggaggaagaggtgtggkgcctc

SEQ ID NO: 106581 - DNA, 1247 bp, Zea mays
  Clone ID: MRT4577_28701C.1
gcgcggtcggctcctgcgcgcggtgtggtcgcgccagccgccgtggcaccggcgcgtgcggggggccggcggcggcggcttaacaggcaggcgggacgagccgtcgtccgtcgtccgcggcgacgggcggcggggcctgggcctgccgctcatccgcatgctccccgtcgtcaagttcactgccgcctcctgcgacgccggcgccggcgccggcgccggtggcgtggcgccgaggatatccgtgtcggagtgcgccgtgtgcctgagcgagttcgtggagcgcgagcgcgtccggctgctgcccaactgctcccacgccttccacatcgactgcatcgacacgtggctgcagggcagcgcgcggtgccccttctgccggagcgacgtcacgctgccggcgatcccgtcggcgcggcgcgccccggcggcggcggcgccggtccttcccaccagcaggcgccgggacgacgcgctcgccagcgaaagcattgtgatcgaggtgcgaggggagcgcgagaggtggttcagcagcagccacgggacgacgacgacgacgccccggcgccagccgccgaagcagcagccgccgctgccgcggtgcagcaaggcggcggagagcgtcggcgacgaggccatcgacacgaggaagacggacgcggagttcgcggtgcagcccttgcggcggtccgtctccctggactcctcctgcggcaagcacctctacgtgtccatccaggagctcctcgccacgcaaaggtgggacgacggcgacgtcggtcgaccgtgagcccggccggccggccgaccgccagctgcgcatcattccaggacggacgcccactaccactacgtacaagacgaagcagcgatttgttttgcgcgccagatcaggcagccatcaacgacgctggtgttgggtgacccaacccccagtcccagtgcacgcggattggacatttccggggcgaaaaaggtcgctcgctgcatgcgcgccgagagcttacgacgggcgcgctggggcctctcagcctagatcggggccacagagccgtaggccagcgcggcgagcatgcaggtgtcgcgcggcagccccctccccctgggcgtgtgcgcgcgagtggccacgcaccgccgactgctgggggcgagggccggcgcgcgcgcgccaccggccacgcacgtaccggccatgtgcgcgcttcgctttgcgggtacgtaagccgaagtggacgtgccctggatgcacc

SEQ ID NO: 106582 - DNA, 309 bp, Zea mays
  Clone ID: MRT4577_28702C.1
acgcattggaacagctaccgatacacacaggactcttataacaggtctggatacatatgtccggggcctattgttgaatgctatcggtaaccaactgcgctatccaaattgccattcacactaatactccttgatcactctgtatctattctccgaggctacccaagaaattacccaccatcaaaatacaagggttcatctcgagcgtcttatattgaaccagccccatccttgagaggtacttattactttgatcgaattgagtatacaatccagttacaaccttttggagccgttctcttacacact

SEQ ID NO: 106583 - DNA, 486 bp, Zea mays
  Clone ID: MRT4577_28703C.1
ggtcagaactgcaggtttttacttttttgttgtcctttttttttttgttttttttttttttttttttttttccccaaaaccccttttcggggcttaaaacggaaaccgttctgccaggggctgataaaaaggggcccaaaaaaaaaaaaaaaaaggggggggcaaatcgaccttcctagccggggaaatttccccaggggggcggccccggccgcaaaaggttttttagggggggggaccaaaaccggggttccataaaagggggcccgggaacctttgggtttataccacaactttcggggcccccagttttgggccccggaaccccccaaagactggggcccccccaggggcccttttttgggggcccgggcccccaaccgagattccgaaaaagccccccttggttaaaaaggggggggggtatttgggcccccccggggtaaaaaaccccccccccccattttggcgggggggcccccctgg

SEQ ID NO: 106584 - DNA, 245 bp, Zea mays
  Clone ID: MRT4577_28704C.1
cggtccgccatctcgtgggttgacgcaggagtcgagaaccgggcggacacgatgaagaaccgcatatggcatcattggtgcgctccaactacagaggggctcctcatacaagatcacaaccgtcagaccttacagtgcacgagtgtctatgaggaggtatgaacctgcaaccatttgaacaggctatgtgatcaccacgaggacatgacatactgtggaacagggtatttgtaccctacgaacat

SEQ ID NO: 106585 - DNA, 664 bp, Zea mays
  Clone ID: MRT4577_28705C.1
aattcggcacgaggtttatgtgcccccttcttcccgttacgattaccatcgtcaccgccaatgccgccgcctccaccaacgggcgaaccgaagcgccgccggctgctatccctcatggcagtctacccatgcgagagcatcgcgccggcgcctctgttcagctcgcttctcgcacttgcggccgacttggcgagccaagggctcggcgccgacgccggcgccttccctgttctccggcgcggcttacggcaggcagtgcggattgcaggcctcctcctcgcgtttctggaggaggtccaagacgtgtcagtgacgaagacggcacctctgccatcatcggcggtgctggggctcacggagctgcacgtggccatgcagaagctgcggttactcctcacggactgcgcgcgacggggcgcgcggctgtgggtgctcgtgaacgccggattggccgcgtctgagctccgagtgattctcgggtccgtcgctgcggccatggacgcgctgccgaaggacgttgtggacgcgtccgtggaggccggggagctcgcgcggctcatgtcggagcatgcgtggcgggtggcggtgcgtcccgacgccagcgacgagcgcgcggcgaggagcgtgcggtcgatactggagcagttcaagagcggcgtctcgc

SEQ ID NO: 106586 - DNA, 497 bp, Zea mays
  unsure (1)..(497): unsure at all n locations
  Clone ID: MRT4577_28706C.1
ttatttctatattttttttttctgtttatatttatttgatttatccctgttcctttatctattttttttctctttaccttttttatatcttttctttnttctttatttatccagttttgtatgaaaaaatgttaccaactcttttgtctgatttggtggtatcacactggccattaataacgccttaatggcagtgtcccggggcgcacacattgaaatgatgcttgcctttgccaatttcccccacttgtttattcagccacggctctctttaattttaaaccaggtgatccatctaaacggttcatctaattttcaacctaggtggcgccatttttcctggacgaaggagcgggtcgggttgacgtttttggactgggcctgggtggcgttcttggcctccattttcctgccgaactggatggtgattttgccggaaaagtggcctccgcacgtggggttgctgtctttttttaagggggacccccagcacgagt

SEQ ID NO: 106587 - DNA, 307 bp, Zea mays
  Clone ID: MRT4577_28707C.1
ctccaacatcagccagctgatcagccagaggctggcgccacgcgcgacgacggtccgctccggcgcggcgccagggccgtcctctacttcgcggaggacaactggaagcgcgtctgggtgatggcgctctggctggccatcaacgccggcctcttcacctggaagttcctcgcgtaccggcgccaccccacgttcgacgtcatgggctactgcgtctgcgtcgccaagagaggcgccgagaccaccaagttcaacatggcgctcatcctgctccccgtgtgccggaacaccatcacgtggctgcggt

SEQ ID NO: 106588 - DNA, 284 bp, Zea mays
  Clone ID: MRT4577_28708C.1
ttcctccacattatttattcagttcttgttccagaaaaatttggcaacccttttcacccaaaattttgataggaaaccatttgcctatttcaaaggggggaactgaaacagcaggaaacctggttgctatgaaaagctaaattgcttaaagaaacgatgtgatcattaaataattaaactgggactcctgacaaggtaataagccaaggatgggtcactgggccggaaactccggtaaatcggggctgtgaccggtacgagacccacaagtgcaatctggacct

SEQ ID NO: 106589 - DNA, 583 bp, Zea mays
  Clone ID: MRT4577_28709C.1
ggtaccctccgggtccggccgggcactccctcctcgtcgcttgccacaagtcctcgggcgtccgtcgatcataccgcataccgccggcgcagtcctcgccggcgctggacggggtgaagttttagatcaccagaggggcatttttctctcatcgggcagtagaagttttggatcttatccagctagcctccaatccatcatggatcatgacggcacgaacctggctgtcaatgaggctgtgcgctcggtgcagctgctcaagattgacggctacagcgccaccgctaccatgagcgagttggatttcatcaaatccagaaggaacctcgctggccacgagtgggaggtccttttctatcctcagttcagccgttacggtggctgcatagctttgaagctcgtccttgtcagtgaacccccgagggacaaggacaagctgttgagggcgagcctgagatgccgccttgtatgccctagccagccgcattttcatgcctccatagagaagagcgtgttccatgtatttaccagtgacttttagatgctcgtctgttgtatcctcatcccaaaatatgagctacca

SEQ ID NO: 106590 - DNA, 415 bp, Zea mays
  Clone ID: MRT4577_2870C.1
ttcattcgtccgctcccggtgtttggcggcgctcaatcaccaaaggttctgacaccacgttggactccccttcctcctcgtccgcgacctccgcagggtggctgttgcacttgcacctgcaccgtagtggggattccagcttccaccactgccccccgtccccgtcccggcgccggcagtagctcggaggccgggaccacgctcggtggcgtgtcgtacgtcagcacgcccatcccgacgacgacgcgttcgattcaggcggcgacaaatacctgctggccaagacctatttcgactgccgggagtaccgccgcgccgagcacgtgctgcagaaccagtctggagggaagcggaaaatgctggtaatcaggaactagttgctttggagaaagagctctaacacaccgaaaaactg

SEQ ID NO: 106591 - DNA, 792 bp, Zea mays
  Clone ID: MRT4577_28710C.1
cattgggaccctcgaggccggccgggaatactctctctctaatactctctactttgctgcgcgtcatggcggcatgaacccttgcaccatcctttgcatccctgttcgagactcgatgcatgtcaaggcttgctgcaccttctctgccttcacgaggtagcatccacctgcccacgcatcgccaaccatgccctcgtcaaggcgaccggccattgaggcgcgacggtccacgctccactacgaaacttttcccacagtcccccccaggacccgcggccgaccaccttcgacatcgccgtccccccgccatggccgcgactcacaagacggccacagcaaccacgagtcgcccctgccgaccaggcagcttattgtgttggccatcatagcgcttgccgagcagactgccctcaactcaatcagcccatatcttccagagatgacggcctcgttccccgaagtcaagcagggccagggaggtctgtacgtgggactcattgcctcgtcgtttgccctggcccagttcaccacaaacttcttctggggctggctttcggataagattgggcgcaagcccgtcatcatcatgggcaccttcatgactatgtgctgtttcctcttattcggtttctgcacaaagctgtggcatgctatactcgtacaggcactcatgggcttcgtcaatggcaactctggcgttgtgtcgacatgtctgggcgagatcacagaccggagcaatcagtcgcgcgccttcacctacctgcctgtcgtctacggcattggcggaatcac

SEQ ID NO: 106592 - DNA, 486 bp, Zea mays
  Clone ID: MRT4577_28711C.1
aaatgttgagactgaggttttccaagtggctccatcgctccatgtggtttagctgaagaagccaaagggaaatactctggaattccaaaacttctacaaaactctgtccacgaagctaaaggacgtcgtttgggcgcgtgataatgaagtccaggacagaagctcctccccatgaaacagttgcaagatgaggaatacattgtcagtttccctgtacaaatagctcttgttcgttccaaaggacaagttttgtgcccagtgtacatatatataggcttcgctagacaaagacctgctaatgatggtctggggtgaatgaagaggtaaatggaaacagaacagaaggctggttgtttgtagtgaaacactgaatatggtgttgagctattcatattcattggttcaattttctccatagcattctagaatagagtatttgatggttggtgaaacttcgctcgcaaaaaaaaaaagttgtttggatcc

SEQ ID NO: 106593 - DNA, 425 bp, Zea mays
  unsure (1)..(425): unsure at all n locations
  Clone ID: MRT4577_28712C.1
gcagcaggtactggcccatgcgccgcaccattgctgttagcacgaagagtggcaccgccagggccgcccaccgggcgccgaggaccgagcgcacgccgtcggcgatccaagcgttcgccgccgacagatacgccttcgaagctctccaagtataactccgtagttctgtcaacaattttctccaatatccatcttttgttgtacactccaaaagcaccaacgatttttgttgttaagcggtaaggcgagcaagtaaacatgaacaggaggcggtaaggcgagcaagtaaacatgaccaccgtcttaacgcctaggcgatgccttaaatacattgtttctcattacgtattgcatgggatgaagctggttgcttatgccatgagggtgatttgntcaattatgctgcttatgatgatggtacttta

SEQ ID NO: 106594 - DNA, 952 bp, Zea mays
  Clone ID: MRT4577_28713C.1
cattgggtacctcgaggccggccgggagtgtagattaagcctgcatgctgcaagaacccggccggcgaatgcagcaatagccacccagctggtggcggtccgtcgttgagcagcacgcacgcacgcacagtactgatcccttctccgaatcatcaaccaataatgggcggaggaagggagctcgccgccggccgttatttccccctgcaacggcggcggtcgtctagtcgtcgccgtcctcttctcgtcatcctactgctcgccgtcgtcgccagcggtcaagcatccgccgcctctggcagcatcttcggcggcgactcggcgtcatcggagtgcagccgagcgtgcgagtcccagcgctgcacggcgccgctgatgcgctacggcaagtactgcggcgtgtcctacacggggtgccccggcgaggccccctgcgacgccctcgacgcctgctgcatgctccacgacgcctgcgtccaggccacggacaacgactacctcaacatgtggtgcaaccagagcctgctggactgcgtggccgcagccaggcctacggcgatggcggacacgttcgaggggaaccggtgcaacgtcacggacgtcgccgacgagatcaccgccatcgtggaggccgccgtgtacgccaggggcatcctgcacaagccctagcagtagcctggaccagtaagctcgatcgctcctacgtcatccgggtggatggagcgaccggcggctggcctatacaagtttggtggggtggtggattctgtgttggatcttggatggtggttcatggcttgtcgcaggcgaagtccacgtctttgacgtacatatatatatattagttcctgagtttacacggcctggaaaagtgtacagacctcaataaagtactgtcaatatatgtccttgggagggtagttcagaaaaaaaaaaaaaaaaaaggccccta

SEQ ID NO: 106595 - DNA, 280 bp, Zea mays
  Clone ID: MRT4577_28714C.1
gggttaaataactatcaggcatacattatgtgcgtgataaagaatctgggccgcccacagcaaggaggagctcgacccaaaaaacagcacaaaggcggaaaacatggggaaaacaacattggcaactgaacaaccccccgacgacaaggggggactataattaacagccagcggagcatgtacgcctgttggacgagaaaacagttagccaaacccacagaaacaatccgagctaagaacggagacccaggcaagtctctaactcacacagcaacccaag

SEQ ID NO: 106596 - DNA, 826 bp, Zea mays
  Clone ID: MRT4577_28715C.1
ggccgcttttttttttttttttttaagtaagaaagtaatacgcgttcttgcgatggagcacatgtagtaagctaggtccaggcttcatgatatggctacaagttgtggaaggagcatgcaaaacagggcgcaggctgttaggacattggaatctaaacgggagatggctttgatttgatgccggggactgcactgcgtcgttgagccagccgtctaggatccggacacttcatctcccatggattggacttgctaggggcttcaccgcgcgcagcatttccttggcgcccccattctccggctggaccgccgcggaggacgcccccttctggcccgatatcgccgacgccagcgcgacgggcatgaggcacaggcccttgctctgcaggtactgcatcgccgtcgtcatgtcgctctccatcagctgggccacctcctgctcgaacgctgcgccgtcccggacctcggacgacgacggcggcaggctgcctccgcgtgcctgctgctgcctgcctgagcctgacctaggggacagcagaagaccaccaccggagttctcggtctgagactgtgtaaggagcgggacgacggcttccgtcgcgcccagcctgctcatgctgagaaccttcacttgcagctggagaaatttgacgtattcgatgatctcgtcaagcatggatgccttgtcagtcctgttggagttcggaacgagctcctgtagattcttcatcctgtcagagatcttctcccttcggagcctctccgcaatgctgtgtggatcagttgcctggccccggcgagccctgacgcgcggcttaggagctcc

SEQ ID NO: 106597 - DNA, 482 bp, Zea mays
  unsure (1)..(482): unsure at all n locations
  Clone ID: MRT4577_28716C.1
ttcttcgggccctcaactccgccgtcggatcgctcctcgtcagcttcaccgtctacatcatccccgccatggcgcacatggtcaccttccgctcaccacactcccgcgagaacgcggtggagcggccgccgcggttcgccgggggctggacgggggcgtacgtgatcaactcgttcgtggtggcgtgggtgctggtcgtcggcttcgggttcggcgggtgggccagcatcaccaacttcgtgcagcaggtgtccaccttcggcctcttcgccaagtgctaccagtgcccgccccaccccgccgtcgcgtcgccgctgctggcgccgcccatcgccccgagcccgtccatgccgttcggcttcaacatgaccggcatgttcgccccgatgtccgccccgtctccggctccggccccggcgccgatgcacttcgggtcccttcaccaccaccaccggnaccaccgccacggtctgtgatcgatc

SEQ ID NO: 106598 - DNA, 589 bp, Zea mays
  Clone ID: MRT4577_28717C.1
cttgaactcctgcctggaaggtatggaatgattttactggggttgaataaaaaaaaaaaaaaaaaaaaaaaaaaaaaaaaaaaaaaaaaaaaaaaaaaaaaaaaaaaaaaaaaaaaaaaaaaaaaaaaaaaaaaaaaaaaaaaatcccgttccttgggaccccacctttccccaaaacaaaaaaaacccccgttttttgggcccgggcaaaaaagggggggggaatgttgggggggggaagggggggaaggggttggggaagggggggggaaaagccccccggaagggggtcccggaaaaacttccggggtttcccaaacccggaaaccggagggttggttaaagggggggggggaaagcccttctgggggtcctttaaaagggaaacccggggggggccaaaaatttttttggaaaaggttttcgggaggggggtcactaaaccggaaaacgggcgccgaaaaacggggcccgcaagggacgtcttaaaccccctaaagggcaggggcggcccccttaagggtttggggggttaggttaggccccttttctaaccggggaaggggttaggggaaaggcttcggggggg

SEQ ID NO: 106599 - DNA, 787 bp, Zea mays
  Clone ID: MRT4577_28718C.1
cggaccgaggctagccccagtgactgcgtctcctgcgtccgaatacggacaaatacggatatccagcacgcccgaaagccggccaccgtcagacaagcgcagcaaagccagccagcccaccatggcgctaccgccgccaaccattgacctgttgctcaacctcatcgacacccgcccgcagtccatcctcacgtcgctggcgcagcatccacaggtgtcctcggcgcgtgatgctcatggctactctctggtccatgctgccgcctcctacaaccaactcgccgtgctgcgcgacctgattcaaaaattcaatgccgacgtcaacattctagacgaggacggcgagacgcccctcttcgcagccgaaaaaatcgaagtcgcaaaatgcctggtcgaggagctgggtgcagacactagcatacgcaatggcgatggtcaaacggccgaagacaagattggcgaggaagaaggcgaggcacacggagtataccagtacctgaggagtcggagaactggttctgagccaataccagcgggtcttgtagaaactgagagtgtacaccccccgccaccattacccggtggtgtcaaggtcaatatgggcactatggaagaagatgccgctgaggcaccagatccggagatacggcggcggattgaagagttggcggcgagagacgactacaactctgaggaggtgcagagtcaactgagggagctggtgcaagacgttgtcagtggcattggaggtgaggatggaggaagaagcgtaaagagaagggtcgac

SEQ ID NO: 106600 - DNA, 412 bp, Zea mays
  Clone ID: MRT4577_28719C.1
gggaggggaaaaaaggggggggtttgttttgagggggggggaaaaaaaagaggggcccccccaaaaaaaaattggttttgaaaaaaacaagggattggggggggaaaaaaaaaacccccggccgggggagggtaaaacccccttactgttgtttgccggggaccctttttaggggggggggggcaaggtttgttaaaatccggggggttttcttttttttggggggggggaaaaaaccccgaaaattggtttgggacggggaaaggaacacccccttaaagggggaaaaaaagctcaaaaggggggctgttgctcccagctcggaaaaaacgggttaaaccgggccccccgggaaaccctttaaagttccctcaaaaagggtttggggggggggccccttggttaccccccc

SEQ ID NO: 106601 - DNA, 636 bp, Zea mays
  Clone ID: MRT4577_2871C.1
ggctgcctgtgcgcgtttctctaccccgccggcctcctccctcgtgcccccgactccgccagccactggccccgccaggtacaatacccgagacagcggtgtgtacgaggacgagagggagaacaacggattcatcaccgccaggcgtcaggtcagagtgtgttaagaaaagatggtggcgaatggcgacgcacctgctagagggagtgcgacggtagctgcaagcctgcgcaggcgtaggaccacaagcgttgctgctgctggcagaggtggtgccagctcgatgctccagttctacaccgatgaggctgcgggccgcaaaatgtcaccaaacacttttctgatcatgagcattgggttcatagctgttgtcgctatgctccatgtttttgggaaactgtaccgcacctccaactaggttggtactaccataaccaagaaaacagaggccaccaagagaggagccttatagagccatttcaatggatagcaagtgactatcagagaggaaccttgtagagcgatttcaatggatagcaagtgactatcagattgtgaagtgttatagaagtttatctatacaacttgcaatgctgagggctatgataaaaaaaaaaaaaaaaaaaaaaaaagggc

SEQ ID NO: 106602 - DNA, 697 bp, Zea mays
  unsure (1)..(697): unsure at all n locations
  Clone ID: MRT4577_28720C.1
cctgaacattcctggtctgcccatctggccatctcccaaactcccactacctcccgtcctctccacacacagcacactccacagcacaaggagcgcctcctaactctcgccacttgtagctagctaccttgcgcttgcatagctgctcccggccggtggagtcggagaagctagcggccagccatgagacacgctccatcgtcgccggccatgctcctgttgttgctcctggccactttcacctacatcagctgcagagctccgaagcccgatgcggcgaccgcggcgcggaagcacggcggcgccgtcctgtggacggtgcgcccgccgcctcggacggcgccgcccgatgtcggcggcgacatgggcgcaagggcggtgcagggcgagtccaagaggctggttccccagggccccaacccactgcacaactagcctgaagccagctctgggctggggacacaggcactgctacaaccccacgtacgtgctctgtcgcgctgtctgcaattcgtgttttaatttcttcggcatttcggccttgctgttgtaactatagtagttagcgattaacaaaaatatagaagtcataatgacacaagactgttgtactgaactactgacgccatgtaatgtcgagtagcacaaagattgtgaagtcnnnnnnnnaaaaaaaaaaaaaaaaaaaaaaaaaaaa

SEQ ID NO: 106603 - DNA, 260 bp, Zea mays
  Clone ID: MRT4577_28721C.1
gagagatccatacatctattccattgtccgttcaactcaccgacgaactgagcttcgagttcaaggaagccttcagcctcttcgacaaggacggcgatggctgcattacctccaaggaacttgggaccgcgatgcgctcacttggccagaacccatctgtggcagagctgctggacatgataaatgagcgtgatgctgatgggtatgggaccattgatttcccagaattcctgaatctcatgtctcgcaagatgtaagac

SEQ ID NO: 106604 - DNA, 457 bp, Zea mays
  Clone ID: MRT4577_28722C.1
accatagagatcccatgcaatttccaaaaagtccagaaccaagcacaccaaaacggaccaaacgggccacaacccaaccaccacaggggggggccaaaccccccaaagaggaagagggggaaccaccgaacccaggaaacgggggaaacccccaagacccccagggaaaggggggagcccgccgcacaaggggcgagagcgcggcggcccaacaggaccggaaggagcgggggccggaacacccaacacggggagggaggagagcccggggaccccagggccaaaaacagggggacccgcgccagcgacacccaaggaacaccctggtaaaaatgccaggcccgccaggcgagcccacccagcaaggccaagggggccaacgccaggacgccccagagggcccacctgccttacctgctggagaagaccccgcctctcccggcgggacaagggggag

SEQ ID NO: 106605 - DNA, 593 bp, Zea mays
  unsure (1)..(593): unsure at all n locations
  Clone ID: MRT4577_28723C.1
cactgggggtgactgcacgcaanggccaccacggcgaccgaggcggccaaggctgcaccggcgcaggagcagcaggccaacggcaacggcaacggcgagcagaagacgcgccacnccgaggncggcacgggggggggcgcaagagcgacgaccngnaccagnacanccnggacacgagcgnngacccgcgggagccggagagcangaaggagcngcgcgagaacaccgccaagcacccanggaaccngangaccaccnccgccgacgagggccagnnccncaacaagcncancaagcncancggcgccaagaagaccanggagaacggcgncaacaccggcnacncgcnccncgccaccgcgcccgcacncccggaggacggcacgancnnggccanggacancaaccgcgagaaccacgagcnaggccnncccggcancaacaaggccggcgngggccacaagaacgacnnccgcgagggccccgcgcnccccgncccggacgaccncgnggcggacaaggagcagcacgggncgnncgaccacgcccnngnggacgccgacaaggacaacaaccncnagcaccacgagcgg

SEQ ID NO: 106606 - DNA, 124 bp, Zea mays
  Clone ID: MRT4577_28724C.1
accaaatacctaggcaactttagcatgaaaactatgttttttgaacgtacatacggacacccctaatatcattcacacatcacagaattaaagaggctgtgtccagagggcttcataattatgc

SEQ ID NO: 106607 - DNA, 672 bp, Zea mays
  unsure (1)..(672): unsure at all n locations
  Clone ID: MRT4577_28725C.1
ccgggcgctaaggccagcgtggngatagttgagtcgctgtcgccaggtttcgaagacagcctcaccaggagcaacaaggatggtgtgagaaccaaagtatgcaccaaagtgctagtaacagggagttccaaaatgccaagggtggagatgtgggtaagcagccgactggaaggggatgtgttaggcgatcaacacgcatagctgcgacgtcggttcgaatctgaggcagccctctctcttgggttggatcaacatatgctctccaccacctggagctcggctgcacgaggaggcagtcggctttttgttagctaaaatagtatctttgtggcagcaagactttggccaatcgcatcttgggcaccagcgacgaccctgacttcctctcgagttcttttggcgcctgctctcagaaagagaatatctgtaagcaaggttgaagtaggtcgtttgcttttgctaacatggtgcttgtcatgtaaccaagtgtgttcgtgtgctcctctaaaaaaaagaatatttatatgtgtgctcctctaaaaaaaaagagtgcatttatgtgcccctgattattaatcatggtagctacctacttggtttgaggctttgagccccacctgtatgaacttctttaaccataattgtgcaatatattagccatgttggtacttc

SEQ ID NO: 106608 - DNA, 340 bp, Zea mays
  Clone ID: MRT4577_28726C.1
ccctgtctgttattgtaacagggacgcgcgcccgcttcttgaccaaatcttgaggcagcgctacacactgcaacagggctgagggccgcacattcatcttagagccatatattaccaatacggaggtgcatgtctatgaactcaaccatacagaatatgaggccactcatggaacacatgaggtccatgtaaagttgcatcgaggccaaaatgtttgcgccaacttatacaaaggaagctgacaaacacacttcaagaatggttacctgagctgaaactagggagaactcagagctagcattcgtccaacaaaagaaaccgacttatatgtataagccaa

SEQ ID NO: 106609 - DNA, 590 bp, Zea mays
  Clone ID: MRT4577_28727C.1
gatgaatatataatacacttgcaaacaaggcatctcgatcgatggagaaaatagggggaaaagcaacaaatcgctggagaagagaagacgacggagacgacctcgtcgatccccggccggtgacgccaacaacaaccgcgccaaagtcatctccttcgacgcccgccagccctccggatctcggtcggttcgccgcgtgcagccgccggacgaagtgtttgatcgtaccaagccgattcgcctgattagttaatggacacgtcacacgtccctagctagctacagcagctgatcgacgacggggttcaggtcatcagatcacttcctgacgcgtcgcagcgcgaggtacgccaacaggcggtagccgaagaacatggcgacgagcgcggcgacgcacgccccaggcccggcctcgccgtcgacggcctccggcgggagcaggcgcttgaggtggccgccgtactgcacggcgatgagcaggcggtagcagtagtaggtgaaggaggtgtacttggcccacaccatgaaccccggcacgttgtggacgtagaagccgccggtgagcaggtacgccagcatgacgaccgtga

SEQ ID NO: 106610 - DNA, 368 bp, Zea mays
  Clone ID: MRT4577_28728C.1
ccagaaggcggaggcgctctccgtcgcaacgctggggattctgcggtaccggaccgtgaaagaggggttccacatactgccggcgcatttcaagaccatcctcgccttcaacctggcggagaaactgcccaagggggacaagattctggaggcactgtatggccagctcaagcagcactgcccgaggttcagaggaggccaggatcttggccagagcagttccgaggaactgatgcttgctgaccccttcccgctctctgcgtataccatggtgacgatgggtttgctgaagctgaaagaggaggacaacgccgaagagagggatttcgctgtgcgtgacgtgcatattggggggactagctcagttc

SEQ ID NO: 106611 - DNA, 211 bp, Zea mays
  Clone ID: MRT4577_28729C.1
ttacaacatcctaatagtgagtcgtattaaactattagcgcgtcgatccacctctccgaggtcccctgctgcgccctgtcccgcctgtggcttattcgtcgacgtgggggactatgtccagggtgatggctgccatgctgctcggattgcggggcgtcgccagcgctgcaagcctcaccggtaagggcaacgccgtcggcatgccggctct

SEQ ID NO: 106612 - DNA, 603 bp, Zea mays
  Clone ID: MRT4577_2872C.1
cgtcatccgggtacgatatcggggcagacggccagacgcaaagccggaagccagcgtctatacacggatctcgctcggccatcggactgtacaaggacgagagggaaaacagcggattcgtcaccgccaggcgtcaggtcagagtgtgttaagacaagatggtggcgaatggtgatgcacctgctagagggagtgcggcggcagctgcaagcctgcgcaggcgtaggaccacaagcggtgctgctggtggtggaggcggtgccagctcgatgctccagttctacaccgatgaggctgcgggccgcaaaatgtcaccaaacaccgttctgatcatgagcattgggttcatcgccgttgtcgctatgctccatgtttttgggaagctgtaccgcacctccaactaggttggtattaccataaccaagaaaacataggccaccaagacaggagccttatagagcgatttcaatggatagcaagtgactatcagagaggaaccttgtagagcgatttcaatggatagctgtgaactgttatagaagtttatctacacaacttgcaatgctgagggctatgataaaaaaaaaaaaaaaaaggccccta

SEQ ID NO: 106613 - DNA, 379 bp, Zea mays
  Clone ID: MRT4577_28730C.1
ggacagtctaatagtacaagaagagaacctttgaggatgtcctcacagaccaagaacaaggacgtctgtgcttcaaaatcaattgccaagtgcacctcacagcatagagtgggcaacaccatcatgtcttctgggaagaaagtggtcagtgatgatgaatttatggttccttccatctgttatcctagattttatcgacagtctactcaagatcatgcagataaatcaaaaccccaatctactacaaacccacacaaaagtcctgcaatgtccaaatcatctgtagagtgctatagtactgtgaacaagcacttggacaaaatcaatgaaactggtaggaagttaatgaactctccaaagggttaaggagaaagaagca

SEQ ID NO: 106614 - DNA, 2007 bp, Zea mays
  Clone ID: MRT4577_28731C.1
agtctgcgcggtgatccgtcttccctggggtgttccgccgtcctgcagcagaggcagggggttgccgctctcgccgcctgatccttcctgcggcccttgttttttcctctcgtttcaggtggccagccttggttttgcagaactcattcagtggcctctgctgaaaagtgttcaatggcgtcaggagccaccttaagctgggttaaaaccccatttgacacccgaagatttcatgacctatctaatctaagtttccgctgccgaaacccttttggatcaattcagccctggtggctgcaaactgatcaagactcatccctaatcaaggttcgcgtggctgctgattattcagactcaatgccagattcaaagtacacgagagatcggggttatcaccctcttgaagaagttaaagaacgtccaaagaagaaggacctgttgctgacagatattgaaacagctagaacagtagtagaggcaaatagcaaggggttgcttgtatttcctgctagggtacacaatgaacctcatggacatgtttcttggtcggagtttcaatatgttgttgatgaatatggagacattttctttgaagtacctgacagtgagaacatcctggaagatgatactgcaaacaatcctgtgacagttttgattggaatggatggacccattattggagaaagtagtgtggcgattagtgatttcagtgattacatggatggtgaaaattttatggacgttcctgatgagcaccacaccaagattgatacagaaataactgatattctcatagagtgggggatgcctgcaacaatgcgtgcaatacatccgatttactttgccaaatgtttgacaaaggccattcataataataatggggagaagatggatagtccatcaaacggtctctctattgtaggatatctgagacctgctttcatagaggaagagtcttacttgaggagcatgtttcatggtgacaatggtggttattcatctgactggaaagtaaatgaaaccgatgaatacaacagagaaactcggccagtttctggaaccaatcgcctcattgatgatgataaatcaagatttgacttcaatcatgctgaaactagaactgattcaatgatctacaagctggagataatgacaattgaactgttttccatgtatggaaagcagtttaagattgatccacaagattttcaagattcagaaccagatattcttgcaaattctgcttcatcgataatagaacggatcaaagaaaacagtgatcagtgtgccgcggctctcaggtcgctctgtcgccggaaaaagggcctcactgtcgaggaggcaagcttgattggtgttgacagccttggtattgatgtaagagccttttctggcttggaagttaagactgttcgattttcattcaatgcacaggcgctctctgaacgttcagctgaaaagaagatcaggcgaatgcttttcccccgttaccagcgtaaaaacgtgaaagcctctactgaagatgagtcttaacctatcagctgtttttcctgagaaagcatgcaaacacctggttcaaagacaaggtgtcaagggaatcaacacaatatcatcttatgcgagtttgctaggagatagcgcacaacctgtcgactatgagaatgaccaaaaacatcagagtaataaggtttgccatgcatggtctctaacatgcttccaagaatatagtttggtttctgacagataataaaaaaaaaacgaataaggtgccagttcatgtataaaagatgaactgcgactttatgctggcggaaactgattagctgaccaagctttgtcagctacaaattcccagtaataataacgagctgcgaggtgaaagggcagagtaataaggtctcgttggcctaaatcagttcttagtttcttacccacaacctgtaactaactttgttgtctcttttcatgtagacataaatgtcatgcaacgcaactgcgattatggcg

SEQ ID NO: 106615 - DNA, 299 bp, Zea mays
  Clone ID: MRT4577_28732C.1
attaactctccacagatcactcagtgagaagaccagacacttcacgtacgtaccggtgcttggccatttatctcacgctgcagagatgcttaccgattacagggactaaacagacgggaacttaggtgctggataaaataccaaaaggttacactgcttgctactcactagcacaaggcccgcactggttacacacatatatttacaccggaaggtggtgtgagcagatcaccaataacaatagctagtggaaaaccttggcctcaactggccaccaagaggaaaccaccatactactc

SEQ ID NO: 106616 - DNA, 2142 bp, Zea mays
  Clone ID: MRT4577_28733C.1
cggacgcgtgggcatggatggtgaaaattttatggacgttcctgatgagcaccacaccaagattgatacagaaataactgatattctcatagagtgggggatgcctgcaacaatgcgtgcaatacatccgatttactttgccaaatgtttgacaaaggtaagcgataaataattatttgaagagtgcagacaccacaaaccagcagcacttggaatagtgaaaatggtcaagctgataaagatgctattaacgaaaggacagacccagtgggcagtggcccgttctggtggctcccacatgagtagggtctagacaaggaataaccaaggcaagctttactcctgcattttgcagagaggctgcattgaactaggacctttggctcagtgagaaggcttcgcaccactgcaccaggcttgcccttcaataaagatgctattaatgattcattgaattcagcttacatcatgcacgatttgaatgtgaaccttcaaatcatgcactttagattgcagtctccagaccactccggttgcccatatcaagttctgaaaaaaaaggcaaagatagaaaatcaagatggtctcatgttagcttcagaatatggtatctttcaggagggatagcaaatatcagtaaaacaaaagaaagattggcaacagtttgatgtctttctcggagtatcccttttcccatcaattagtatttgataaaaactctgctaaaactagaatatatttagcttttgtatatatgccaatccgaactttttaatttgttctgaactctcatgtgccagtctgttgtagagtaaaaactttaccaaagcatttctccgagcataagtggtcacaagagcatagctctaaatgtgtccctcatcaaatctctcaagttgcagagaactaggcaatcacgttacctgctcttttactgcacaggccattcataataataatggggagaagatggatagtccatcaaacggtctctctattgtaggatatctgagacctgctttcatagaggaagagtcttacttgaggagcatgtttcatggtgacaatggtggttattcatctgactggaaagtaaatgaaaccgatgaatacaacagagaaactcggccagtttctggaaccaatcgcctcattgatgatgataaatcaagatttgacttcaatcatgctgaaactagaactgattcaatgatctacaagctggagataatgacaattgaactgttttccatgtatggaaagcagtttaagattgatccacaagattttcaagattcagaaccagatattcttgcaaattctgcttcatcgataatagaacggatcaaagaaaacagtgatcagtgtgccgcggctctcaggtcgctctgtcgccggaaaaagggcctcactgtcgaggaggcaagcttgattggtgttgacagccttggtattgatgtaagagccttttctggcttggaagttaagactgttcgattttcattcaatgcacaggcgctctctgaacgttcagctgaaaagaagatcaggcgaatgcttttcccccgttaccagcgtaaaaacgtgaaagcctctactgaagatgagtcttaacctatcagctgtttttcctgagaaagcatgcaaacacctggttcaaagacaaggtgtcaagggaatcaacacaatatcatcttatgcgagtttgctaggagatagcgcacaacctgtcgactatgagaatgaccaaaaacatcagagtaataaggtttgccatgcatggtctctaacatgcttccaagaatatagtttggtttctgacagataataaaaaaaaaacgaataaggtgccagttcatgtataaaagatgaactgcgactttatgctggcggaaactgattagctgaccaagctttgtcagctacaaattcccagtaataataacgagctgcgaggtgaaagggcagagtaataaggtctcgttggcctaaatcagttcttagtttcttacccacaacctgtaactaactttgttgtctcttttcatgtagacataaatgtcatgcaacgcaactgcgattatggcattgttttgttgaactatacataaaagaaaacttgataaagtttcgagtgctttt

SEQ ID NO: 106617 - DNA, 269 bp, Zea mays
  Clone ID: MRT4577_28734C.1
gggaccggatgttccttgttttgccgttgcgacgattgccagatatctttcgggaaaaatggtacctacggaatgattttatagacagttctaaaaattatacgagttatctttttatcagtacatggccagagtatgtaccggtgctgccattagtatataccagctaacgatggtttctctactgcagacggcataattgctgatgacagtaagcgctatctgtacactggtgctgatttggatcacagcgagggcgaacatgactt

SEQ ID NO: 106618 - DNA, 2321 bp, Zea mays
  Clone ID: MRT4577_28735C.1
ggctactgagttggcggctgctctctcggtggtcccaaagggaagagggggaaccgggcagagagcagcgcaggacaagacaggcagagaagtcgctagccagactagtctgcgcggtgatccgtcttccctggggtgttccgccgtcctgcagcagaggcagggggttgccgctctcgccgccgcacgctgcggctctgctctgctccgcctgatccttcctgcggcccttgttttttcctctcgtttcaggtggccagccttggttttgcagagctcattcagtggcctctgctgaaaagtgttcaatggcgtcaggagccaccttaagctgggttaaaaccccatttgacacccgaagatttcatgacctatctaatctaagtttccgctgccgaaacccttttggatcaattcagccctggtggctgcaaactgatcaagactcatccctaatcaaggttcgcgtggctgctgattattcagactcaatgccagattcaaagtacacgagagatcggggttatcaccctcttgaagaagttaaagaacgtccaaagaagaaggacctgttgctgacagatattgaaacagctagaacagtagtagaggcaaatagcaaggggttgcttgtatttcctgctagggtacacaatgaacctcatggacatgtttcttggtcggagtttcaatatgttgttgatgaatatggagacattttctttgaagtacctgacagtgagaacatcctggaagatgatactgcaaacaatcctgtgacagttttgattggaatggatggacccattattggagaaagtagtgtggcgattagtgatttcagtgattacatggatggtgaaaattttatggacgttcctgatgagcaccacaccaagattgatacagaaataactgatattctcatagagtgggggatgcctgcaacaatgcgtgcaatacatccgatttactttgccaaatgtttgacaaaggccattcataataataatggggagaagatggatagtccatcaaacggtctctctattgtaggatatctgagacctgctttcatagaggaagagtcttacttgaggagcatgtttcatggtgacaatggtggttattcatctgactggaaagtaaatgaaaccgatgaatacaacagagaaactcggccagtttctggaaccaatcgcctcattgatgatgataaatcaagatttgacttcaatcatgctgaaactagaactgattcaatgatctacaagctggagataatgacaattgaactgttttccatgtatggaaagcagtttaagattgatccacaagattttcaagattcagaaccagatattcttgcaaattctgcttcatcgataatagaacggatcaaagaaaacagtgatcagtgtgccgcggctctcaggtcgctctgtcgccggaaaaagggcctcactgtcgaggaggcaagcttgattggtgttgacagccttggtattgatgtaagagccttttctggcttggaagttaagactgttcgattttcattcaatgcacaggcgctctctgaacgttcagctgaaaagaagatcaggcgaatgcttttcccccgttaccagcgtaaaaacgtgaaagcctctactgaagatgagtcttaacctatcagctgtttttcctgagaaagcatgcaaacacctggttcaaagacaaggtgtcaagggaatcaacacaatatcatcttatgcgagtttgctaggagatagcgcacaacctgtcgactatgagaatgaccaaaaacatcagagtaataaggtttgccatgcatggtctctaacatgcttccaagaatatagtttggtttctgacagataataaaaaaaaaacgaataaggtgccagttcatgtataaaagatgaactgcgactttatgctggcggaaactgattagctgaccaagctttgtcagctacaaattcccagtaataataacgagctgcgaggtgaaagggcagagtaataaggtctcgttggcctaaatcagttcttagtttcttacccacaacctgtaactaactttgttgtctcttttcatgtagacataaatgtcatgcaacgcaactgcgattatggcattgttttgttgaactatacataaaagaaaacttgataaagtttcgagtgcttttagctgtccataaaaaaaaacttataaaattaaaaaaaaatttagttgtccaaagaataaacgcagaagcacgaaaacccaaaaacccaaaaaaaaagggcgccgctcgcgatctagtagatcgcga

SEQ ID NO: 106619 - DNA, 522 bp, Zea mays
  Clone ID: MRT4577_28736C.1
gcaacccccgggttcaacattttttaaaagggcaaattaaagctttcccgttggttgcaaccccttttaaaaacccaaagccaccaaaccttggtgataaaccgtttgggaaagggacctttttttccttgcaaataaaaataaacctagccataggaaaaggctccaggcagcactttcaaaaaatttttcctttggcaacaccctgggaaaaaaagccccccctcctttgctcctaaagaaggctgagcttgaaccccttgccttggggcaggctcccccccggtttgttccccttgccaaggggaaaccctttccccatgggggggggaaactggggccccatggagccctcaagggggttggtttcaaacccccccttgggcttccccctgttttggaccccacctacccccccggggttcctcccgcgggtcaccatgacccctttgccgacgaaaaatttgtgaaagcccatgatcttgtgggcccccaaatgaatcttgagggggccctggccct

SEQ ID NO: 106620 - DNA, 2122 bp, Zea mays
  Clone ID: MRT4577_28737C.1
ttgggtacctcgaggccggccggggttccgttgtcctgcagcagaggcagggggttgccgctctcgccgccgcacgctgcggctctgctctgctccgcctgatccttcctgcggcccttgttttttcctctcgtttcaggtggccagccttggttttgcagagctcattcagtggcctctgctgaaaagtgttcaatggcgtcaggagccaccttaagctgggttaaaaccccatttgacacccgaagatttcatgacctatctagtctaagtttccgctgccgaaacccttttggatcaattcagccctggtggctgcaaactgatcaagactcatccctaatcaaggttcgtgtggctgctgattattcagactcaatgccagattcaaagtacacgagagatcggggttatcaccctcttgaagaagttaaagagcgtccaaagaagaaggacctgttgctgacagatattgaaacagctagaacagtagtagaggcaaatagcaaggggttgcttgtatttcctgctagggtacacaatgaacctcatggacatgtttcttggtcggagtttcaatatgttgttgatgaatatggagacattttctttgaagtacctgacagtgagaacatcctggaagatgatactgcaaacaatcctgtgacagttttgattggaatggatggacccattattggagaaagtagtgtggcgattagtgatttcagtgattacatggatggtgaaaattttatggacgttcctgatgagcaccacaccaaggtttgctaacaagttattttccctgctttcatcagattgatacagaaataactgatattctcatagagtgggggatgccttcaacaatgcgtgcaatacatccgatttactttgccaaatgtttgacaaaggccattcataataataatggggagaagatggatagtccatcaaatggtctctctattgtaggatatctgagacctgctttcatagaggaagagtcttacttgaggagcatgtttcatggtgacaatggtggttattcatctgactggaaagtaaatgaaaccgatgaatacaacagagacactcggccagtttcgggaaccagtcgcctcattgatgatgataaatcaagatttgacttcaatcatgctgaaactagaactgattcaatgatctacaagctggagataatgacaattgaactgttttccatgtatggaaagcagtttaagattgatccacaagattttcaagattcagaaccagatattcttgcaaattctgcttcatcgataatagaacggatcaaagaaaacagtgatcagtgtgcagcggctctcaggtcgctctgtcgccggaaaaagggcctcactgtcgaggaggcaagcttgattggtgttgacagccttggtattgatgtaagagccttttctggcttggaagctaagactgttcgattttcattcaatgcacaggcgctctctgaacgttcagctgaaaaaaagatcaggcgaatgcttttcccccgttaccagcgtaaaaacgtgaaagcctctactgaagatgagtcttaacctatcagctgtttttcctgagcaagcatgcaaacacctggttcaaagacaaggtgtcaagggaatcaacaataataaaaaaaaacgaataaggtacaatatcatcttatgcgagtttgctaggagatagcgcacaacctgtcgactatgaggatgaccaaaagcatcagagtaataaggtttgccatgcatggtctctaacatgcttccaagaatatagtttggtttctaacagataataaaaaaacgaataaggtgccagttcgtgtataaaagatgaactgcgactttatgctggcggaaactgattagctgaccaagctttgtcagctacaaattcccagtaataataacgagctgcgaggtgaaagggcagagtaataaggtctcgttggcctaaatcagttcttagtttcttacccacaacctgtaacttaactttgttgtctcttttcatgtagacataaatgtcatgcaacgcaactgcgattatggcattgttttgttgaactatacataaaagaaaacttgat

SEQ ID NO: 106621 - DNA, 185 bp, Zea mays
  Clone ID: MRT4577_28738C.1
gtgtctcactgttttatgtatcattatacttcagatattgttggtgtggttcagatcgtatctccgacactcactgattagggggagattgacaacgagacaataccaaagcgtgacattgttgtagcagatgactcttaagtatcacttgatcttttaccctgtcgaagcttagaatacaatca

SEQ ID NO: 106622 - DNA, 856 bp, Zea mays
  unsure (1)..(856): unsure at all n locations
  Clone ID: MRT4577_28739C.1
gatttcgcttctcgaagcttccccgattcgcctccgctcccccaccaaatccccgacgccgcgagccggagctgctacaggaggaggagtcgccggcctccgggtagaaggcgcgcgtgaggccaggccgtaccggattcggtgccgcggctctgaagctctcccccatccatcccgggcgggggcccgtgggctgaccaccaaccatggccgcggcccgccggcgccacgccgagctccgctccgggcagcatcgccgaccgcacaccaccatacggttgtagtaaccccgagcagctactgatttggactcttggagagaaagggctgggctcaccactttgctgttagaaaggggggagcaaagtgatttactgtctccttgtgattgcggtccgctgagtgatggcagatgctagctcaaggactgacaactcaactgttctagacaacgacggcaagatctataggttagaacaaggacaaagtggtggggcaatcatggcttctaattcttcggataggtctgacaggtccgacaaacccttggaccaaaagacattgcgccgtcttgctcaaaatcgtgaggctgcaaggaaaagtcgactgaggaagaagtcatatgtgcaacagctagaaagcagcaagctgaagcttgcacaactagagcaggagctccagaaagctcgccagcagggaatcttcatttctagctccggagaccaaacccatgccatgagtggaaatggagcaatgactttcgatctagaatacactagatggcttgaggacaannacagcaaatccacgagttgaggactgccgttaatgctcaatgcagtgacagtgacctgcg

SEQ ID NO: 106623 - DNA, 888 bp, Zea mays
  Clone ID: MRT4577_2873C.1
acgccgcgtttgtctaccccgacggcctgcttcctcttgcccccgactccgccagccactgggccctgcatatacaatacccgagacagctgtgtgtaccttttttcttttgcttcgcattccaagcgcgcgttgcacggtcatccgggtatcgggccagacgccggccagacgcaaagccggaagccagcgtatatacatgtgaataacgcgggtccggcggggcgtacggcgtacacggatctcgctcggccatcgggactgtacaaggacgagagggagaagagaacagcggattcatcaccgccaggcgtcaggtcagagtgtgttaagacaagatggtggcgaatggcgacgcacctgctagagggagtgcggcggcagctgcaagcctgcgcaggcgtaggaccacaagcggtgctgctgctggcggaggtggtgccagctcgatgctccagttttacaccgatgaggctgcgggccgcaaaatgtcaccaaacaccgttctgatcatgagcattgggttcatcgctgttgtcgctatgctccatgtttttgggaagctgtaccgcacctccaactaggttggtactaccataaccaagaaaacagaggccaccaagagaggagccttatagagccatttcaatggatagcaagtgactatcagagaggaaccttgtagagtgatttcaatggatagcaagtgactatcggattgtgaactgttatagaagtttatctacacaacttgcaatgctcagggctatgataaatccctgcgagtcttgtctatgcaaaaaaaaaaaatttttgcatgtgcttgcatatgcatctttctatttctataaaaaaaaaaaaaaaaaaacggccttccgggggggggcc

SEQ ID NO: 106624 - DNA, 400 bp, Zea mays
  unsure (1)..(400): unsure at all n locations
  Clone ID: MRT4577_28740C.1
acaaagcggtttcaggtttttcaggagtcgactctacctgttgtttagtactatgacaaaatggggaggctctngaagaataataatttgcggttgctctgatttttttctttttttacgtagactgtgctaataaattttggggggggttctgtttaggaagtagaaacattaaatgttttaggaggggggagtatttccttaaattcatttgtataaccttcgtgctactgagtttctttccctatatcctcccctaactngtgttactatgttctttatgattcaatgctgctgtnggtgggtgcttttttgctatcgaaacagtattacggccacttactactactatgattatttnagcttcagttatgaaacgtttttttttttttgtgattat

SEQ ID NO: 106625 - DNA, 313 bp, Zea mays
  Clone ID: MRT4577_28741C.1
ccggccggggataaagtactacccacctcagccatccgctcgcgaactaacagagacttcctcgacaccactaccatatccgtcgtcgcgtccgtctctgacggtcgctacataagccgccgcatccagggatggagatgaagaagatcgcctgcgccgccctcgactccggctcggtcaccgtggtgctgaccgcaaaggcgccggcgaggcgaatcagctccggtcggcgacgctactggtcgtccccgacaaacttgccaagcctctggcgtcgctgcccgccgataaggtgcggccggcggcgcagaac

SEQ ID NO: 106626 - DNA, 324 bp, Zea mays
  unsure (1)..(324): unsure at all n locations
  Clone ID: MRT4577_28742C.1
gctccttcatggtgtgtgaggcaaacgccaatgtcggcttcctggcctttgaccaggcgtgcaacttagatgtgggggcaancattgcagactatgctatgtccttgctgccaaacaggcagactgggaagatggccatcctcncgggactggcaagtcccagagagnagagcgagcccaatgggtgtgtttcagctcagggagttgcagagagtgtctataccatcaccaatgggtctacctctagtgagagtgaacctgaactgggagaggcccgggattcctcagcaaaaacaatgggggcccgcctgcccatgttaccga

SEQ ID NO: 106627 - DNA, 218 bp, Zea mays
  Clone ID: MRT4577_28743C.1
tacagagagacatataatagctatagctaacattagaaactcttgtacttggatttatgccaaattaggcactctgtaggccgccaattagttcacaaagatatgctggttgccattgaactggaatatgatctatcagttgctgatttgagccaggacattgctctactgattatggatgacgatgaagacccacttagctctagacatcctgactc

SEQ ID NO: 106628 - DNA, 646 bp, Zea mays
  Clone ID: MRT4577_28744C.1
ccggccgggattgaagtctatgagacagtagccagcgtcgtacgagaaaatttggagctagggtcaccagataaaagcaactccttcgttcgtcgtcaacagcatgccggccatgggggaaagctctggcatggccgccatctgggaatatgcggggtggatggcgctccaggatccggcgctggctgttgacgctggggctcgccgctcgtcccaccgtgccgtgttcgcgcagggagaagaagcaagtcgctggggcggctgacggtgttttggcggggtgcagccgtcgccgttcgatgcaacgtcgtcgcgggccaccgcccctgagactcgcccatgattgttcctctatccggcggagcgggctgatggaccgaacccaggagaatttctcatcggagctcaccaccgccgcagatccgccatcgactgtggccgtggtgaaacaactacacgaatcgcggtcaagaacaggtaccgcaggatgaggcgcatggaggatgctgtgacgagttcgtgagaggtctaggccgtcgtctcccagtcaactttgggttgctggaccgctgtctccttataatggaattatttatttattttgtatagaactcctgttatgtagtaaagatgtgacattcgatcc

SEQ ID NO: 106629 - DNA, 679 bp, Zea mays
  Clone ID: MRT4577_28745C.1
tgggaccctcgaggccggccgggccggactttttatacatctcgcagattgatgatgcggcgggaccgatgctgcacctgcacaggccggcgaaagacatctactcgctcaatctcagctctggtaaagctgaaattctcctaggagccagctaagatgcactgcctttgaaatatctacgtggtctggggtgagacatctacctgattcctaacttccctgggaacctttataaattacggcgatgaacactgttgacactaccgacgttgtgcgtacatcgtcctatagtaggcaggtgtcgcacgatgtatctcgcgtccagatatttcgatatctcatccgagatccttgttagtatgactgtactgtttctttgtgttgaaggtcatggctgtccgcatcatcaagcataccctggagatcattcacctgctcaccgatgccagccccatccaggccgtcgtcgacgcgatcatcaacagtggaccccgtgaggatgccacccgtattgattccgctggtgttgggaggaggcgggacatgtatatctcacccctgatgaggctgaatcagggcctctacctcctcaccactggtcccagggagatagctttccagaacatccaaaccatttgcgagtgccttgcagaccactttataaacggtgaaaatggct

SEQ ID NO: 106630 - DNA, 603 bp, Zea mays
  Clone ID: MRT4577_28746C.1
cgtttcggcgatggagtgcgcggcgaagggactggccgcggagccgtgcgccggcggcgtcgccgatcggcggtgcggcggctgcggagccgtcgcctactgctcccgcgtccaccagattatacattggagggttcacaaagaagaatgtgaaaggtttgcagaacaaatgaggcacatcgatgcgctgagccagtttccgttcacattcttggaacctcctgctctgaaccatgaattcccaagtgcaaggtgcttatttttgcaatcaatcaaacttcaccaaaaaggactctggaaatctgaatgtatatgtggccgagatgttgctcctttgaagggcttaagcgtagaagctgaatggaacttgcaaagctccctctgcccttgtgcagagcctaaaaatcctgtgtcttcagccctggcaagctgggaagcatattatcagtggagatcccttcccctgcattcacctgttgctgttttacttcattggccacttactctatatcattgtgttcaactctgtcggacccaaactccaagatatgatgggcaggacaccctatgcattcactatttaaggcctgagaaggagctact

SEQ ID NO: 106631 - DNA, 297 bp, Zea mays
  Clone ID: MRT4577_28747C.1
acagggaacaactttttttttgatggggaggacgagtataaaacaaacacgagacacgactaacactaacagcgcgcggcggtagactacgaacaccgtacacgtaccaacagggtgggcgaggactaggaggctacaagaacacaggcagcataagaattttttaccaacaaaacacgcacgcaccagctactgaggaacaaatacaaaaggcctttatttatctaccaggtttcgatgccttacgacaagcctcgatccagggatcgacatcgatatatcttgtttaaggccccc

SEQ ID NO: 106632 - DNA, 634 bp, Zea mays
  Clone ID: MRT4577_28748C.1
cggggaagccgtatcccgctgtccagattcaggaactagacttctccggtccgtcctccccctgccgggcgggggggctccagcggctccacgccaccgtttgccattcactgccaggtatacagtctgccccctcccctctttgggggggaaaaactccccgccggcgctcggggtctggagcaccagttcttctaggatcgccgcgtggtttagaatggggcgcaacaaggagtactctttcgcggagctggagaaggagccgtactggccgttcgagaagctgcgggtctccatcaccggggccggcgggttcatcgcctcccacatcgcgcgccgcctcaagggcgagggccactacgtcgtcgcctccgactggaagaggaacgagcacatgcccgaggacatgttctgccacgagttccacctcgtggacctgagggtcatggacaactgcctcaaggtcaccacgggggttgaccacgtgttcaacctcgcggctgacatgggtgggatgggggtcatccagtccaaccactccggcatcatgtgcaacaacaccatgatcagctttaacatgcttgaggctgctagaactaacgggggggaagaggcgcttctatgcatcaagggc

SEQ ID NO: 106633 - DNA, 1971 bp, Zea mays
  Clone ID: MRT4577_28749C.1
tgggaccctcgaggccctcgaggccgggatctccagttctcggcctcgagtccctcctcctccataagagacaagaacgaggtcgtctcgccatcgccgccactcctatttaagagctgccggaggtgggggcagatccggcgagccgttcccgctgtccagattcaggaactagactcctccggtccggtcctccccctcccgccccgtctcgctccagcggctccacgccaccgtttgccattcactgccagaatggcgctcaacaaggagtacacgtacgcggagctggagaaggagccgtactggccgttcgagaagctgcgggtctccatcaccggagccggcgggttcatcgcctcccacatcgcgcgccgcctcaagggcgagggccactacgtcgtcgcctccgactggaagaggaacgagcacatgcccgaggacatgttctgccacgagttccacctcgtggacctgagggtcatggacaactgcctcaaggtcacccacgggggttgaccacgtgttcaacctcgcggctgacatgggtgggatggggttcatccagtccaaccactccgtcatcatgtacaacaacaccatgatcagctttaacatgcttgaggctgctagaattaacggcgtcaagaggttcttctatgcatcaagtgcctgcatctaccctgagttcaagcagctggaaactgtagttagcttgaaggagtccgatgcttggcctgccgagcctcaagatgcctatggcctggaaaaactcgcgactgaggagctgtgcaagcactatacaaaggattttggcatcgagtgccggattggtcgctttcacaacatatatggtcccttcggcacatggaaaggtggaagggagaaggcgcctgctgctttctgcaggaaggctctgacctccacagggcgctttgagatgtggggtgatggcctgcaaaccagatccttcacatttattgatgaatgtgttgaaggtgtccttaggttaacaaagtccgatttccgtgagcctgtaaacattggaagcgacgaaatggtgagcatgaacgagatggcggaaatagtcctgagctttgagaacaagcagctgcccatccaccacatccccgggccggagggcgtgcgtgggcgcaactcagacaacacgctcatcaaggagaagcttggctgggctccgactatgaggctgaaggacgggctgaggatcacgtactcctggatcaaggagcagcttgagaaggagaaggccgagggcatggatctgtctgtctacggatcatccaaggtcgtgcagacacaggccccggttcagctcggctccctccgcgccgctgatggcaaggagtgaactttggctgcgccggtcagttgcagggcatgatataccagtaatacacagttgtttcagtttccatgatttgtagtcaccatttcttgattcacatttgactccacaagagaagaccatttggacgatggatattttgtcacaagttacgggatttagttcaaatttgaactgaatacaaaatatcctgacacgatatctgtcgtccaaacacttataataatttccacgctgttttttccctcttgtgtgcctgtacaatagaaatattgcagacttacaacacacatgtaaactggtgtcactttatttcacagaaatagcaatgaataaaataaggttaagcagtcttgaaaaaaaaaaaaaaaaaaaaaaaaaaaaaaaaaaaaaaaaaaaaaaaaaaaaaaaaaaaaaaaaaaaaaaaaaaaaaaaaaaaaaaaaaaaaataaaaaaaaaaaaaaaaaaaaaaaaaaaaaaaaagggggggagagtttaggggtccaaggtttaaaaacgtgtgattgggaataaaaatttttttattggggtcccctaaatccattttattgcccattttttaaaaacttcttaatgggaaa

SEQ ID NO: 106634 - DNA, 694 bp, Zea mays
  Clone ID: MRT4577_2874C.1
cggatctcgctcggccatcgggactgtacaaggacgagagggagaagagaaccgcgccggcatcaccgccaggcgtcaggtgcgtgcgcatacgatccatccgccacccttcacccgctcttcttctgccggcggttccccccacccgctcttctgccggtggttgcgagagtgtgttaagacaagatggtggcgaatggcgacgcacctgctagagggagtgcggcggcagctgcaagcctgcgcaggcgtaggaccacaagcggtgctgctgctggcggaggtggtgccagctcgatgctccagttttacaccgatgaggctgcgggccgcaaaatgtcaccaaacaccgttctgatcatgagcattgggttcatcgctgttgtcgctatgctccatgtttttgggaagctgtaccgcacctccaactaggttggtactaccataaccaagaaaacagaggccaccaagagaggagccttatagagccatttcaatggatagcaagtgactatcagagaggaaccttgtagagtgatttcaatggatagcaagtgactatcggattgtgaactgttatagaagtttatctacacaacttgcaatgctcagggctatgataaatccctgcgagtcttgtttatgctccaaaaaaaaaaaaaaaaaagcggcctgcttcataattttttttttg

SEQ ID NO: 106635 - DNA, 257 bp, Zea mays
  Clone ID: MRT4577_28750C.1
gggggcaaacccaccttatccttgccaattttccaaccctgggacatataggggccccttggtagggtctcccattcaaaccccccccccaaaaacaaaagtcccccccccccagtggggggccaccccccccaaaagtattttttatgcccggggggcttggcccctttatatagaggtccaccgccaacaaataaattaaatgtggcccccttaaaagttatggcgggggaacaaaattttgattggttgccccc

SEQ ID NO: 106636 - DNA, 287 bp, Zea mays
  Clone ID: MRT4577_28751C.1
tcgaagacaattaccctttacgctgagtctgcagacaccattcataatggcaatgctaatatacaggacaaggagggtatccctcctaaccagcagggggttatctatgccgccctgcatcttgaggacggacacacactcgctgactacaacatacaaaaggagtcaaccctacaattgcttctccgccttaggggaggcatccagatatttgtcaaaacctagactggaaaaacaatcacccttgaggaggattcctcagacaccattgacaatgtcaaggcaaa

SEQ ID NO: 106637 - DNA, 449 bp, Zea mays
  unsure (1)..(449): unsure at all n locations
  Clone ID: MRT4577_28752C.1
gcccgggcaggccgcgggaanagagaaagacnccaaaggaagnaanncngnaaaccgagacnaaanggcnancgaaaggggaaagaaccnnanagacaaccnaananncnggcggaanananagcnnnccaannaaaaaanagagnnncangccgaagagcaangaaaaaagcnanggaannaacnaaaaaagcggananaaagggaanaaaaanccaaanggcgggncgncnagcaggaaaagaaanngcacgngccgaaggcancaaaaagggnagacnaccccnccaaacaanncgcgccaaaanggannanggcngcnanccaanncgaaccancnanggagnannaggngncaaaannnnggaanncgnagaagaagaanaacnaaccagggcnncccannccgcccaggganagaanaaaaaagacaagaacccngnnnngcc

SEQ ID NO: 106638 - DNA, 416 bp, Zea mays
  Clone ID: MRT4577_28753C.1
tttttgtggttttttttttttttttttgttttttttttttttttttttttttttttaaaaaaagggaagggttctctttgcggcaaaccttttaacctccaaattcccccaatgggtattaaggtgaagccgggcttcatgttcaggatgggcggaaactaagcccaaattcctgggcttaagataatctaagggcaacgacgttcatcccaaacaacttaaggaacagtttttcagggcccacccccgtacagggggcgcctcaagggccaaaaccggtcttttttttacagggggggcgtaaccccgggcgggtcaagagacattgggcaaaggggggtcctccgggggaaaccttctttccaggtggatcaggagggccctccccggagggaaccaaaccttttttggccccc

SEQ ID NO: 106639 - DNA, 1634 bp, Zea mays
  Clone ID: MRT4577_28754C.1
gcgttcgctcatcctcttttcaccatggcttccgctgctgatatggagaagaagcatctgtccgtggccatcaccggccacgtcgactccggcaagtcgactgtgacgggtcgcctgctgacgctgctgggcggtgtgtcggagcgcgagctggagaagctcaaagtggaggctgctgcgctgggcaaggagtcgttcatctacgccttcgtgatggacaagcagaaggatgagcgcgcccgcggtatcaccatcgcgtgcacgtccaaggagttcttcactcccaacttccactacaccatcatcgatgcgcccggccaccgcgacttcgtcaagaacatgctcggaggcgcctcgcaggccgatgtggccgtgctcatggtgccggctgagggaggtttcaccaccgccatcgccgccggtgaccacgcgtcgaaggaggtgcagggacagacccgccagcatgcgcgcctgctcaacctgctgggcgtgaagcagctcattgtgggcgtcaacaagatggacgacggcactgtgaactggagcgaggctcgcttcaaggaggtgcgcgatgagatgcgcaacatgctgatcaaggtcggctggcagaaggagttcgtggagacgtgcgtgcccgtgatccccatgtccggctggaagggcgacaatctgctgtccaagtcggagaacatggcttggtggaagggagtggactgcaaggtcgacatcaagcagaaggacaccatccacgtcgacacgctgatggatgcgctcgacaagctggcgcaggcgcccaagcgcaaggaggacgccgctctgcgcatgccgctgtctggctgcttcaagatcaagggtgtgggtgatgtgatcaccggccgcctggagcagggcaaggtgaaggatggcgatgaggtgatgttcctgccccgccacaccgacgccaccccgtgcgtcggcaaggtgttctccgtggagatgcaccacaagaagatcccgcaggctgtggccggtgacaacgtcggcatcaacatcaagggtctgaccaaggagaacatgcccgagagcggcgacatcatggtcgtcaagtcggacaagtcgctcaaggccgccaagcagttcaccatgcaggcgcaggtgctcgactgccccaacccgctcaaggtcggctactgccccgtggcctgcgtgcgtaccgccaagtgcgccgtcaagctggtgaagatcaactgggtcatgcacaagtcgctcggcaaggagaaggtgactgacgccaccgagatcaaggccaactacgtggccgagctcgtcttcgagcccacccagcagctggtggtggagaagtacgctgactgcgagggtctgggccgcgtcggcctgctcgagggtaactcgctcgtcatgctcggaaaggtcaccaacgtcgtcttccgcgactaagcaggcggaaccacgttttcaccgaccaacactgacaacactcaactccagcgtgagagaggaaccaacacaaaaaaacactgcatcagatgactcgctcgcgcgcgcattgcacgcaacaagcggaaatgggcgtccaccttgcttcgtaacttgtcttgcacacacgaacgatgtcactcgttggcatattattc

SEQ ID NO: 106640 - DNA, 107 bp, Zea mays
  unsure (1)..(107): unsure at all n locations
  Clone ID: MRT4577_28755C.1
tgcaccgtcatggacctcacacacgtagtcgacgaggctcncgcaggcaccgccggcatgtcattccacggcggcgacatgttcgagcacatcccgtcggctgacga

SEQ ID NO: 106641 - DNA, 633 bp, Zea mays
  unsure (1)..(633): unsure at all n locations
  Clone ID: MRT4577_28756C.1
cgggaaagtttgacggaatctatagatacaagcacacatatttatgagatcaaattaatatcactagatgcactgtgagttataatttcatggtatatttatttaggatcgtagttgttggtaaatttgattcattttgggctggagtgtaccagctgatgaatgcatataggtggacaactagcagacattgttctaaatataaacaactaggaagattgcaggacgacaaatgtagattgtaccattagtgttttttggaaacttaattaaacatcgtgtctagagtcttataaacatttaagattagcatttaaattgatcgtacgattatgcatcagaaacaagcattctagtgcaattaggaattagcttctgttatacaaagagctgtgaccttggcttangtggtgcgacgtgctgggagtaggaggaccacagtgagattgttgtgactagtaagatatttttcccatccatgaattcgtctgctttagtctcttgtggtctagctgtggtttttggcctctgatcctgattctgcaaatctgggattaacagttcacagccacttcttggtgatctcagatatcctgacaaagcctccataacaacctgaaactgacatatgtt

SEQ ID NO: 106642 - DNA, 411 bp, Zea mays
  unsure (1)..(411): unsure at all n locations
  Clone ID: MRT4577_28757C.1
gtttattcataagagagttcagtgactccttcttttgtcaccttattggagggtggtaagaggaagagagggcggccgaagcgtgtgcctgatatttcagtgactccttcaagtcattctggcctttcagtagatgttgacagtggtgacacatcaaaacgtggccggcctaaaaaaattgacacaagcctgttgcacctgccatctttgttttcagacgatcccagggagtccgcagataatgtgcttatgatgtttgatgcactgcgacgacggctcgtgcagttggatgaggtgaagcaagtagcaaagcagcagcaaaacttgaatgctgctagtatcatgatgaacgctgagcttcggctcagtaagaacaagangattggagaggttccaggtgtcgaggttggt

SEQ ID NO: 106643 - DNA, 234 bp, Zea mays
  Clone ID: MRT4577_28758C.1
tgggtgttaagtttcttacgtggggggcggaggcggcgccccggcgcagcaccctgcgggaggagcaggtgcccggggagctggagcatgacaagatctacatgggcggcgtcgacaggaccggtcgccccataatcgtcggcttgctcgtcaaggactacttggcccaccgcgacatggcggaggtaaagaattttgtgggctagttgtttcaacagatctgtgccagatccc

SEQ ID NO: 106644 - DNA, 959 bp, Zea mays
  unsure (1)..(959): unsure at all n locations
  Clone ID: MRT4577_28759C.1
aaatcttccctccccacgtggagtatatcacccatacgcagacgccacacgcgcaagcacatgaaccaccaccatcccggcggctcccacttgctcttgctccccttcctctcctcgctctgatcctcctccagtgcactgctccgttccggcgacctcgctgccggcccggcgctccccggggcaggcgggctgtcatagggagtggcctgcgtgtatggtgattggtagcctggcaggccaccaataatatcttctctcctgggcttatttgcctccatttgtcatcagcttcttgaaatccacagtctggtcaaatgctgtgaagaaaattcctctagtgctgaataagttcagcatagaaccactatgggcgcctgtgtatcttcaagcaaaaagcggagatcgcaaaggtcatgctgtatatacaggcgctaccgtggcaaggttttaaccaatacacctatagtacgcgtcggtgaagtggagaaccttgcttcttctggagcagcagtccatttagggacttctgcagctgctcgacggagatccgatggctcaaacgttacgttccacctcacacaattgcagtggcgtcacagtgagctggacacagagaatggaaatgttgtgtgccaagaagaagcgtggttcgactctgtcagtatcttgggatctgactcagatgaagacttcagcagtgtcaatggagacttccctgctatgtcaaattcaacaggtacacaattgatgcagtgcgaagatgcttcatctatcgctgacgccatccagaagtttgaattgatttttgatggttctagtgttgctcaagctgttgggcagtacctgaaaagagatgcaaataaaatagaagcagagaggcctanagttgcaagcccccgagcttgtgatgtctctagtggaaaggttgaggatgctaagacacgaaatgagggtat

SEQ ID NO: 106645 - DNA, 363 bp, Zea mays
  Clone ID: MRT4577_2875C.1
acatttttgttttttttttttttatcataaataaagatggtcaaaaaatgaatacataaatgtactttaaatctaaaataaaatacaactgtttggactaaagttaaacctaactttatataaataaaaatctacacaattttgcgaccacaaaatttgaaatctaatctatgttttcctgcacaacaaataggagaaaactaaacatatcaaaaagtttcaaacaaaaactggaatgtcttaaagctgcccttgtgctttttcctgttcttgaagactcctaaaaacccggtgttactcccgccagtcaccattaacacattgccgaagtcaaacttgatgaaatccatgatcttgttcgtc

SEQ ID NO: 106646 - DNA, 784 bp, Zea mays
  unsure (1)..(784): unsure at all n locations
  Clone ID: MRT4577_28760C.1
ccggccgggaccgcctcacctcccgccgacactaccactcaaaaaccacccaaaaccacccccccaaacagccaaaatggagaacgaccgcggcgagattgtggacctttacgtcccccgcaagtgcagcgccaccaaccgcatcatcaaggccaaggatcacggctctgtccagatctccatcgccaaggttgacgagaacggccgtgccatccagggcgagaaccacgtctacgccctctgcggtttcgtccgagccatgggcgagagcgacgactccctcaaccgactggcccagcgtgacggcctcctcaagagcgtctggagcggacagcgataaatcaacaaagtgtgggaaaaagttactcgacatctggttctgagaatcctcgaaaaggaattctgatacgaatggaccacagggttttgggttcgggcacgaaggcaatgggtgaaagaaactagggttggctgcatctagcaaatccacttcgaggcgttcggctcgattttgagacgaaaaaaaaaaaaaaaaaacccgcggcctgaagatgtgatgaactggttacaatcccccgatacggctggcaaagtctcctaggacagaccttacaagtcaacctactcccgaggattccggngctactctgatagtcnccgtgccgcagattgattaggctctgaaaaagcgtagcgctcaagtcgtttgctatggtacagatacgggtctacaatgaattttcagttatgtgattatcttgaaaaaaaaaaaaaaaaacccgcg

SEQ ID NO: 106647 - DNA, 385 bp, Zea mays
  Clone ID: MRT4577_28761C.1
caggcctaaactgtccccaacggcccaaactcgcgaaccgtccagatccacgcatgggcgccacagtcgccggcgccgggacggcctctacgccttactgtcccctcacgccgccgagcctgtgcggcgcctaccacaagacacaactcccagctgaaatgctgcatcaagccctcgcagttagagctgtggcaccgcgccgcgggtctcgcttcggcgcgagctctgatacctgaccgcgtcacgccgttttccttcgacgcggacggagacgaccatccctgagaggagtgcggcgtgttcagagtcattggcgaaccagacacgtcgtcgctctgatacatctgactgtagaagctgtagcaccgaggggaggatggcgcgg

SEQ ID NO: 106648 - DNA, 742 bp, Zea mays
  Clone ID: MRT4577_28762C.1
ccggccgggaagaacgcctggtggtggctgggcatgaccctgatgatcctgggtctgcaacctcgtcgcctacgccttcacagacgccatcctcgtcacccccatgggcgccctctccgtcgtcatctgcgccatcctctcctccttcttcctcaaggagcgcctcagcttcgtcggcaaggtcggctgcttcgactgcatcatcggctccgtcatcatcgccctcagcgcccccgagcagtcctcggtcgcctccatccaggacatgaagaagtgggtcattgccccgggcttcctcagcttcgccggcgtcatcatcgtcgcctccctcgtcattgccctctacctcggcccaaagtacggcaagcgctccatgatggtctacctgaccgtctgcagcctcatcggcggcctcagcgtcgtcgcaacccagggccttggtgctgccgtcgtcgcacaggcctctggctctcacggcggccagttcaaggagtggttcctctacgtcctgctcgtgttcgtcgtcgtcaccctgctgactgagattatttacctaaacaaagccctcaatctcttcaacgccgccctcgtcaccccaacctactacgtcttcttcacctcctccaccatcgtcacctccgccgtactctttcagggcttcaagggactccccataccacatcataacccgtaatcatgggcttcttaacaatctgctaaggccgccgacctgctgcaactc

SEQ ID NO: 106649 - DNA, 279 bp, Zea mays
  Clone ID: MRT4577_28763C.1
ggtggggtaacaaaaccacttcaaacattttcacgagggaaaggccgccaaaaccactccacacaacggccgatccaagacacagcctcagtacaagaaaccaccagacccctgagcccccaaaaccaaaaaaaaagaacccaggccaacccaagagaaaaaagaacaacggtgacccacccatattccttgcacctcaccacccacccccaacatctccatacaaaaccccaaggacatattccaacaaaaaaccgcacaccggggctgccccaaaaa

SEQ ID NO: 106650 - DNA, 796 bp, Zea mays
  unsure (1)..(796): unsure at all n locations
  Clone ID: MRT4577_28764C.1
attgggtacctcgaggccggccgggagaaagccgcccatgaacctggctcatcctttcttcgttttttttttgctttctttcgaactctttggtatgcattgcctcagccaatcagaccacgctagaacaccttcctatttgcatagtggttcctctgaaacatatatggagtgtttggtttgaggaatgacatagtccatcatcttctcattcctcacttttttgtttggtttgtaaaatagagtgagttaatccatcaccacctcattcctcgtagttagttgtttagtactaatatgtggaatggagtcatcccaccaaatttgaggaatggacccatgatgtaccactttattttggatagagtgattcatcaaaccaaacaactcataagtctgagtgctacgatgtgctaaaatatattagaaatgaagtgctaaactttaacccattagcataagatgtgctaaagtttagcacgtgagatccaaatgggtcctaaaaatgggctctccacatttatggtaaaaagctaaaattatacacaaataagcattagnaccatnagttgttggttggaaactcacatttgcatccatctaaataacaaaacacacttctttgtgttttatattatatattcaagtataaatgaaaattgtagcaacgtacggacatctaactagtatctactatattanaagcacccggtttcaacggtcgtcctacgtcaatatttttcaaaaaaaaccctacatttctttagaatcaatctgcactcctataatctcctct

SEQ ID NO: 106651 - DNA, 520 bp, Zea mays
  Clone ID: MRT4577_28765C.1
ggccgcttttttttttttttttttctttttttttttttgtttttttttttttttttaatcaggaactttttttttttttttttcttttcattttctctttttgattttttttttttttttactctctgtctgatgtaagcccgtatgccagccacaaagacaacacccgggggggcgaaaaaaaggagggggggagaaccccccgaaggccgggggggcagacctaaagctcaaaccggagccgaagcaaacgacgttgccgcggcaaccgacaacaccctgaatcgagaaaagacaaaggaggaaaaaaaccgcccatgccggggggggggagaggtaggaaagaaccaggctcctctgcagaggaggaggggggggaaacccaccccgcccgacaagaaaaaaacacaggggcggggcgccggcgccaatcaaaagcttcttggggagggaaaaactccaaggtacccaggggggccgagagggagtcgtattacgcgcgcagactggaagacgttcc

SEQ ID NO: 106652 - DNA, 411 bp, Zea mays
  Clone ID: MRT4577_28766C.1
gcgttacgatcggatccgaattcggattattttatttagtgaaacgtggtgccgacgcagtggctcctccgctggaattaacagatgaggacggcccattgaaaaaagcagttattggtacgcatggtgatacaattcatacacttgtagagcgtaaaaattataaaggggcatttatgccaggattccaaaaggtagaatataatattccatttgacgagtctggtttaattgctgttgatcatgtacttggtaatgatgtaaaaatggaagagcgggtcagttattacgagaatgttatgggctttaaacaaatgattcattttgatgatgacgatattagtacagagtattcgtcgtttatgtcaaaagttatgactaatggaagtgctattaagttttccattaacg

SEQ ID NO: 106653 - DNA, 560 bp, Zea mays
  unsure (1)..(560): unsure at all n locations
  Clone ID: MRT4577_28767C.1
ccgttcggcgtcaactaanaaacattttcaatctgccaaancgtcatcacgcccacggccgttggattaaaaagaccccgttatcgacgttgaaaacgactttttggagagggaatacctttcggcaacacttccgaatctcggtcaatatgcccgactctggtagcgatagccccgaagctggggtgaagggagagacgaagagccctgtggccagcagattcacgacggagattgacacgcgatggggtgatattctgctgctcatttgtttcttcgtggctggtctcgttgacagcgctgcatttaacatgtacggctgtttcgtcagtatgcaaacaggaaacacaatctttgttggtctaggcgtcagccatcagcctgaaaacctacctggaaaagcgtggtctcgctgttttctcgctattgtctgcttcgcttttggagcgctcttcttctccagcttccaccggtttttcggacctcagaagcgctgggtccttatcacgtcattccttatccaggctcttctcactggtctggtagctatcctcgctaca

SEQ ID NO: 106654 - DNA, 747 bp, Zea mays
  Clone ID: MRT4577_28768C.1
tcgcagctatcgttccaggaatggacgcagcagatgagggacatgctggaagctaggaaacgtggggactttgctttccgtgacaaagatttcaaggcagccatagactgctacacgcagttcgtcgacgtggggacgatggtgtcgccaacagtgtacgcgaggcggagcttgtgccacctcatgtgcgaccagcctgacgccgccctccgtgacgccatgcaagcgcagtgcgcgtacccagattggccaaccgcgttctacatgcaggccgtcgcgctctcgaagctgaacatgcagagcgacgctacggacatgctgaacgaggcgtcgcagctcgaaaagaagcggcagaagaacacgaaaccttgatgaaagaccagacccctctctctcgtcccggggttacggtccttttgcggctcaaataggtttgtgttgagacatgctgctcggtccttccgaaacattgtggttagttcctggtgcaagggttgggttgggacttgggaatgttaactggggggaatgtgctgtagagtaactacctggtttggcatttctgtgatgcatttttttggggcccgtgtacatgttacactgacaaaagtagtcgaaacagccagaatgcaagggaatttaattctggttatcaaatcctgagcttgtttgttttaaaaaaaaaaaaaaaaaaaaaaaaaaaaaaaaaaaaaaaaaaaaaaaaaaaagggcggccgctctagagga

SEQ ID NO: 106655 - DNA, 477 bp, Zea mays
  Clone ID: MRT4577_28769C.1
ggaaaggattgggggacctaaaaccccccacttttaaaaaacaggccctaaaatgggtatcactgggatttttaaaaaaaaaatccccccccccctggtgtttccatgaaaacaaattaatttagtctaggaactaaagtccaaggttccaaaggctttttggaaatgccctttcctaaaaaaaaaaaattttttgtttaaagaaaaaacccccccctagcatttggcggcaaaaaaatggaactattgctgcaaaagggctaattacaaaaacagggagttggaaaaaataaaaccccaaccaaaactttaacttgaatttttaaactttttttaaaggtaaaccccccccacggttttaaaagcagttttaaactgattaaaaaattcatccccccttttaacaagttttaaaacacttccttaaaaaatggggggcatttccaaaaccccccaaaagggggctccccgaacccc

SEQ ID NO: 106656 - DNA, 709 bp, Zea mays
  Clone ID: MRT4577_2876C.1
atataactaaaagcgtcaggtcatacaaagatcccaagataatgaaacaaagcttaaacggagagtagaaaaaccatgagataatagacgaaatagtaaaactagtgacaactggctggaagcagaagctctctctcttcactcctctctgtagtctgggttctcctttaagatgatgaatccttctagtattggcgacagaggaatgtatttgtccgtggctagttcggctctctctccagcagccaggagaacaggtgtggagtgtgtctggaaaccggttatggtcttgggccgacccgcttgcccaaccacatcaactgcttgtcctacccgcactggcactgacagtggcttcaggttttcatccactgtcaacatcatccttggttgcatcgccaaaacgaggaagtacagcacataatggtacttcccgagtatgattggtttcatgtcaaggcatgcatgcaaaagtgtcactataccagcaagtgcggttggcgatagcaagaaccgttcagagtggaaggggctgagtgtcaagagaccctttcccatgtgcacaagcccttgagcaatacgcacacagaagagaagactcatgtctttgtaataatagctggagaggttccgaagcatcccggctatccttgcgttattagttccagcgccaatcagtcccaatgatataattgctgacatggcaact

SEQ ID NO: 106657 - DNA, 2381 bp, Zea mays
  Clone ID: MRT4577_28770C.1
gggtacctcgaggccggccgggccggcggatgcccagcctgccgagtgccgactgccgacccaccacccgctgacactccccctccgcaggaacaaattcatccatcgcccgcgccaccagattccatctaaggacaagcaccagaggaacccttaaagcacccgccgcagcgaaagcgcagccgttcgcctgctataattcccccgcagttcccaaggatgcaaacagaggagtgacgaagaaacgaagcacccagattgtaacggctcagcagctcgatgagaccagctccaggccgggctaccacggcatccaggggagcggactcgtgggcgggagggtggccgacgcaggccgccccgacgacgaccccgcctggttctgcctacgagtcggttgcgaccagagccatgagcaggtcgaccctgaggccctggacaggagcttctttatgcgggtcatggcggcgagaagccccaacgtgaggctacagaaggctatcagcaagaagaaccagagctcgatgctgaaatgcccgcactctgcgccgccgaagcaaccgagagctcggttcgcgaggctgagcgcagagactgagactgcggggaaggcaccggcggagcccaagccaagggtcgagcggatctgcgccatgcaagcgtccccaattcgcaccaagacagccagggtcgaatgtcccagcgagaggaagaaggcactgaccacgccgcggagcaaggccgtccggccgaggcaggagctgtttcacagtgtgaagcaccagaaggagccgttggccgctgcagccaggaaagggacggtcgtcaagtctctgttcatgagcacgacgccaaaaaaggagccggtccagacgccggcggcggacaagagcaagggggcggtatccaaggtctgttcgaagctgaggaagctgaacttggcgtgccgggaggtgccgagcaggtacatgtctcagcctcagccgaagattatgaagacggccaagaaggctgaagagaccacggtggccaagagcgagaagcgggggctggaatccaggaccaatgctaagaagaaaattttaggacgctcagtgaagcgtgctaatgctgaacctgacggagagaaccgaaatggttgcagctctgctgcagacgagaactcgcttgcagaaactgctggctcccatcaggaaaggaaggtggtgctgcaggaattgagaatcgaggtggatgcatcgcgatgtgacaattcagatgacaacaaggagaatgtgtccagtgctccgagtgaagaagcattggacaattcacattatggaagtgaaaacagactgttggagaacaatgagaatgttcctgtgaaggagaatgttgctctgaaggtggccaaattgcagaagaaagtgcatcaagagcaggcagtaaagctcaagaaaaccaccaatcctaggccattcaggctaaggactgatgaaagaggagtgcttaaagaagcaaaaccagagaaaaggcagccgttcgctgagaataactccatggcagtactcaaggacgcaaacagagaagtggcgcaaatggacaaacacacccattgcaagggacgagacaagccgccgacctgcggcaagaaacagaagaaacaaagcgcccagattgctgtaacggctcagcagctcggtgagcccaccaggccggccttcaacaacggcatccagcgtaaagctgtggaaccggagagagtttgtagggctgcatcgtcaacacgaacaaccaaaccagcaagaggccttccggcaccaccaccttcccggactgggaaggagaggaaggctgccgtgaagctgtcgtcgaggttccaaacagcagccgcttgagctcatgcagaaccagggcgctccaactgttgttttgtcgtctgtctgctccaacgacgagttctgtatttacggcgtcgaattcgttttctggatttcgttgacttgtgtacactgattctttctgcgaatcgtgtggtggaattcctctcctctgttaccggtactaccaccaacaacacctaccaacaggattctttctgtaatatgttttggaatttaatcctttatgtaacttaaactggggaaaggaggcccagccgcccacccagcccatgagacatttttatatcagtatctctgtaccccttgacctgggctgcatgcgaattcttccttatgtagggcctgtttgagagagagctttgcttcaaaaacttcagttttggtttttcagtttcgctagaaaacagcttcagtaaattgttaagtgagttctaggagggtttgtttggtacatatggggtggtgctatagtggttcgtaaccgatgccctgagattc

SEQ ID NO: 106658 - DNA, 262 bp, Zea mays
  Clone ID: MRT4577_28771C.1
tcagagcataacggcccggcaggagaagacgacactgccatagagagatcggaaccgcgcggtgaagactacatgaccctcaagtcgaaacccggcgctcagcggcacaagttctgggacacacagcccgccggctagagccgggacaccacagacacatcggtaccgaacagccccatcgagccgcccacgccgatcgcctaggagcgcgccgacccccacccgatgcccgacgactacaagtggatcaactgagacctca

SEQ ID NO: 106659 - DNA, 635 bp, Zea mays
  Clone ID: MRT4577_28772C.1
gattcaaccctcgttcgttcgtccgccgtctctgtctccggcggcgccaccccaccatgtccgtggacgactgcttcgtcccgttccactctcctctccgggagccgacagcctacgaccgctgggggaagggcccgcaaccctgctggtcgcagctcgatctggacaggtgcgcgggaggctcgcaagggcaaggcggcgtcgacaggcgcatcctgcagtttctcaaccgccccgtcgctgtccccccaaggcgcctgccgccgcccctcggcccgctgcccaagctctcgaagccgccgtcccagcacaaggagaatttgccagaggagccaaagcaacaccatcctgctcaagctgctgtctcatccgctgcttccagggggaggtacgcaaggagtcgggctggatgggcttccaaggacgggagtaccccatgcatcaggagccgagctgcctgtgcttccaaggagaggagcactcctgaaggtatcaacatggaggaacatggatttaggtttcagttcactttccctgaacccgattatggggaggacggcgccgatttcggtgaggaagaggagtgtgtaccgaggcagaggaaacctccggaagtaaggaatgcactacgtgag

SEQ ID NO: 106660 - DNA, 293 bp, Zea mays
  Clone ID: MRT4577_28773C.1
tcgtagcccacagagctacgcagccagataggggggaaggttaaaccgaaacgggggttgcacaaacaaatcgaggagacgagtgcatcagaaggggagggaaggggagctgtacgacagcaaccacccggacaaggaaggacttagccaactcatgggaccgggcagcccacgcactcactgaggggggaaggtccgcaactcatgccaaaagaaggagcatgtgggactaccagacgggtacttgaggagcggtatgaccgaggctacgccagaagaaatgagagaatcga

SEQ ID NO: 106661 - DNA, 378 bp, Zea mays
  Clone ID: MRT4577_28774C.1
aaattttacctgatggcgctgtatattctctaaagagaaaacacgggggtgcgcaggtattgacagaaaacccacccgtctaattggatcatcacagcgcagagatctatacctgtttatagaacacaacacccttttgagcacgcgaccaacatcttctgtggaagaataaatcaccctgtatcacaagacccacgggaaacgcagcacctctgaaaatatatgtgcgcctggccgaaacattctcgcgctcaagagcacgcactcacgtgtgggggctataccacaccccaacctgaaatcccacactctaaagcgcgcgagggaaaatctgacaactttaaggagcagctgcagcttcatcgtccaagagcacgg

SEQ ID NO: 106662 - DNA, 402 bp, Zea mays
  unsure (1)..(402): unsure at all n locations
  Clone ID: MRT4577_28775C.1
gccaccgccacgnngccccgccccgggcgccggcggcgacgaccaccgcccaccggcgacaaggacagcgacgangcagccggcggcgnggaggcgncaccnnccncgaccaccaccncgccccnnccaccncggcngccagcgccgccnncagaaccgccgcccagcccgggcncgcnccccaagggggggggggagcgganggcgcaagaagcangncngcgagggcgccggcggncaaggggnccgggcancncgnccgcaagggcaccggagggaggncnncngngagnggaanngnagccacggngnnnggagcnacngggnnncnggggcgcnancnngngcaacaacnngccaaganggggacngaagggcngggcccanncagcaggggngagg

SEQ ID NO: 106663 - DNA, 249 bp, Zea mays
  Clone ID: MRT4577_28776C.1
ctcttctccggcgattaacccccaggcgcccaccagatcacttgttaaactttgttgaggggcgatggcggattctttcgcaaacctcaactccgaggcagggcttaaaaagcttgatgagtaccttctcactcgcagctacatcactggctaccaagcttccacggatgacttgaatgcctacacttacctttcgactgcatccctcgtccaagtatatcaacgaacccaggtgctttaaccactttg

SEQ ID NO: 106664 - DNA, 209 bp, Zea mays
  Clone ID: MRT4577_28777C.1
tacccgacccaactcatctcgtcagacctctcaaaaccgtcaacagtctttttttttttatacttctattttaatattatgattgctatttcttcaaatgaacctgaccttttccggatcattgttgtcacattttacaatatcctacacaattaaaccatatccatatacacattgtaccagctgctggaatttgcaagaccacctat

SEQ ID NO: 106665 - DNA, 504 bp, Zea mays
  Clone ID: MRT4577_28778C.1
gcgaataaattatcatttatatacattacaatgattaggatatgatcgttcttgctctttctgatttccttgctcttgatgaacaaggtcgctgttgatagagttaataatagtgacattttcttgtcttccctgtcagtattagaaggaaaaagaatggcaccacagaatgtcttttggggctagtagaaggaaaaagaatggcaccacataatttgtcattttcttgaactgctacgaggctgcatcaggaaccaagaagactactcggactggcaccttacttgcgattttgttaaaatatatactcctacactgggtttctccgtctctattatgaaaactattgggtaatatgaccatattgtatttcataatttgggccaaactcacaactctggttattaagattcagatggagccatctttcttgattgccattacaagatgttgagtctatggactgttgtaatacttcgttacaatttttttatggaaattgct

SEQ ID NO: 106666 - DNA, 270 bp, Zea mays
  Clone ID: MRT4577_28779C.1
aatcttattggggttaaagccctgaattccgaaaatagaattatggcaaagtttaattccttggttataagaaaaggtttcaatggtttttgtttaagaaccaattcccattttaccaaaccattaaattgcaaggtcaaggtgggcaattttcaaaatttcaaccttaaggccaaaaataacctttttccccaatttttggaccaattaggaagcttgattaaggtactttttataatcaagtccaacaagaattgcttgaaggccaaa

SEQ ID NO: 106667 - DNA, 1266 bp, Zea mays
  unsure (1)..(1266): unsure at all n locations
  Clone ID: MRT4577_2877C.1
ccacgcgtccgggccgtacgatctggatgaattgaccaagaacaactaaagttgatcattatggcttgcaaatacaaccaaaatgcaaacatagatcagatacattctggttatataacctaatccttggttggtcctggtgggccttgttgtttgcttcgggcttgatttgtgtgtaattgttatatcatccctgtgtatgtcaacatgacaacatgcatgttgattttgcaatgctcctcacaatgcaactgtatttgcctgcacttctgtttctgttacaagcattgaataatcttacggtgaagcttgtgcgcacatactactgtaacatatcataatcacttctagcttataaaggttaatatgtcgtctgccaaagtaggagctgaatttttgaacaatttagaaattgaatttcagcctactatcccagtcataatttgtccattagcaccagtaaagtaaaaccagagttcagagttttgtgcttagttggactttgtaagcataagaaagcaaaatgattgcttttttttgtttcatcatgaacgaccaactgcatcaatgctacatgctgcaggtatttcttagctatatttccaaaatatggaatattaaatatgtgacacttgctattggcagccaacatcatgttgtgtactcacagttgcagtagtgaatgcaaatattgtaatctgaacccctttcactgtcatgcgagtgtgttaagacaagatggtggcgaatggcgacgcacctgctagagggagtgcggcggcagctgcaagcctgcgcaggcgtaggaccacaagcggtgctgctgctggcggaggtggtgccagctcgatgctccagttttacaccgatgaggctgcgggccgcaaaatgtcaccaaacaccgttctgatcatgagcattgggttcatcgctgttgtcgctatgctccatgtttttgggaagctgtaccgcacctccaactaggttggtactaccataaccaagaaaacagaggccaccaagagaggagccttatagagccatttcaatggatagcaagtgactatcagagaggaaccttgtagagcgatttcaatggatagcaagtgactatcagattgtgaagtgttatagaagtttatctatacaacttgcaatgctgagggctatgatcaatccctgcgagtcttgtttatgccatttttttttgctgtgcgattagaaaaaaaaaaggcctgtcccttgggcgatnngccgcacgcgtgc

SEQ ID NO: 106668 - DNA, 535 bp, Zea mays
  Clone ID: MRT4577_28780C.1
gatggtggacaccctcgctctgctcatatgggatagtagagattctcaacagtatatatgctgcccctattacaaccggtcgcaggcccaatgattacaacaccagtcactgttgtgaatacgacaagaactgcgacgaggcccagcttgcggcgtagatggttggcccggtggtgtaacaatccccccgttgcgccgcagcttgaccccaaagagacgaacctgggaactcttggcaaagacgctcctcctcttcccacatagccatggagaccggccatccggaccacttgacgagcacctgatagcgtgggcgggtgccatgggagagtaaccgccgacgacgtaacaccttgcccatttttgctttcaacatttgccccatggtccatgagaataagagcaatttcagtttggttaaacaaagcagccaaatgcagcaaagtaaatccttgtttgtcgcagtagttagaatccactccctgtgtaagaagtttctttacacccttaacatccccgcctttaattgcttctc

SEQ ID NO: 106669 - DNA, 631 bp, Zea mays
  Clone ID: MRT4577_28781C.1
ccggccggggagttccagaccaacttggtcccttacccccgaatccacttccctctcgtcgcttactctcctgttatctcggccgccaaggctgctcacgaggccaactctgtccaggagatgaccatgtcttgcttcgagcctaacaaccagatggtcaagtgtgacccccgtcacggcaagtacatggccacttgcctgttgtaccgtggtgacgtcgtccccaacgacgcccacgccgccgttgctacccttaagaccaagcgaaccatccagttcgtcgactggtgccccactggtttcaagcttggtatctgctaccaggctcccgagaacgtgcccaacggcgacctcgccaaggtcagccgcgctgtctgcatgctctccaacaccaccgccattgccgaggcctggtcttccctctccctcaagttcgatcttatgcacagcaagcgtgccttcgtccactggtacgttggtgagggtatggagggaagggtgagttctctgaggctcgtgaggatctcgctgcccttgagcgcgattacgaggaggttgccaccgactccatgggcgatgaggagttggaggctgagtactaagcggtgacggatgcgatgactggattgct

SEQ ID NO: 106670 - DNA, 558 bp, Zea mays
  unsure (1)..(558): unsure at all n locations
  Clone ID: MRT4577_28782C.1
cccagcgtccgggttcctggccagtcgtacgatagcgcgagctcgatggccaggcgtaggtacccaactgtcttcttccccttccttttagattccattgagattcgtcagaacttttatgcgagttccttttttagccgataattatgtcagtatcttgagataagatggatgaattggattcaacacatatatatttgttgtggatgtagccacctttcttgcttcgtgaattatttgttgtggatgtaanttccaatgggaaaatatatattattgaggttagcttcagctgcgttccagttatatcgcagttactcctgcttttgggattgagctggcgttttggttatttagagtgttaatttgactcttttagttgcattatagggatctgacatcatttaaaataatttaggatgatttcattagtgatatgattctgaaaaaggtaaaggatgctttagtttcgtccagcataatttacctaataattttaggacactaaatttggttgagaattccaaaaatgagcttaaatcatgtngatcggtccgc

SEQ ID NO: 106671 - DNA, 166 bp, Zea mays
  Clone ID: MRT4577_28784C.1
cgatctgcctggtgctgaccatctttgctaacctcttcccctcaggcctccgaagagctactgcgggagcattatgtcgagctgcgggagagacctttctacagccgattagttaaatacatgggctctggtcccgtggtggccatggtgtggcaagggctggatg

SEQ ID NO: 106672 - DNA, 313 bp, Zea mays
  Clone ID: MRT4577_28785C.1
gggtaaatgttagtgagttccctgcaaaagttgctgctgcaattgaatgacactcacccaactcttgcgattactgagctgatgaggctactcatggatgtggagggacttggctgggatgaagcatgggatatcacaaataaaacaattgcctacaccaatcacactgttcttcctgaagcccttgagaaatggtcgcagattgtaatgaggaaattacttccacgacacatgggaattatcgcgggaattgtcaagcgggtcaaggaaatggaagtctccacccggaacggattgggggggaagattggct

SEQ ID NO: 106673 - DNA, 402 bp, Zea mays
  Clone ID: MRT4577_28786C.1
ctccattcgttctttcttttctgattagagcatcatgtgtgatctgctcatgatcaacaccgaccgtggtgtgatgatttgccgatggctttttttggcaaaggggcgtgggaatctattttttttttgccggactcccaccttttttttatcaccgctgcatgtggttgtgttgcagagatattttttggccccctcccttaagccttgagtgcttaactcgtgtatttttaccggaattggggcatcaattaatgtaacataacctcccacgggttcttttgtggtgtgcagcccccccacgatccggaagatcttgccgctgcataaagtcaccgaaaaggggccccttcagggtcctttggtgtcagaatgaacccggggggttctaaaactctagga

SEQ ID NO: 106674 - DNA, 279 bp, Zea mays
  Clone ID: MRT4577_28787C.1
gtaagctcggaattcgtttcgagccgtattgtccaactcgatttattgaggccgccgtgtatttttttcttcatggggctgtttttaaccggtgccggcgatcctccccgctttgggcttcgctttgacctttagctcgcactgatccccctggtagtatacgctcgttccaataatcgataaacgcgtgcctgttgcaataaacagaagtgaatctatcatcctagcctatggatacgagaatgtagctatcaaccgaactataataaccagcactgc

SEQ ID NO: 106675 - DNA, 643 bp, Zea mays
  Clone ID: MRT4577_28788C.1
ggccgggagctagttcctaacgggcggcggcatcgcgtagtagtgtgtgctagctcagagcagcgcgcagcttccaccctgcgcgcgcatatatgggacccttgggccccaccgtgagcttcagcatcatggtcatggccaagctcagcggcgccgcccagcagcagcccgaggatgagagggagaggaaggagggcgtcaggtgcggcggcgtcggcgggtgcggcttccggatgccgctgcactacccgcgctacaagaaggcggactacgaggccatgcccgagtggcgcgtcgactgcctgctccgcgagtacggcctccccgccgacggcgacctcgacagcaagcgccgcttcgccatgggcgccttcctctggcccgaccagtactgatctgatacaaccaaacaagctagctagctagcccaagcccagagcgcggcgtgccggccgtgaatagtctcgtcatgttcagagcatcagctgtagcgatcgagacctaaatcatcatcgtgcatatgccatatgctctcttgttatttataagttaccatctgcttgtagttgtatagtatagctaattattagctatggaataattaagagatgtttatgggaaaaaaaaaaaaaaaaaagcggcc

SEQ ID NO: 106676 - DNA, 565 bp, Zea mays
  unsure (1)..(565): unsure at all n locations
  Clone ID: MRT4577_28789C.1
ccccgcgtccgcccacgcgtccggtcacccagagccaagcagctactagcggccggcagcatcgcgtagtagagtgtgctcagagcagcgcgcagcttccacccagcgcgcgcatgggacccttgggccccaccgtgagcttcagcatcatggtcatggccaagctcagcggcgccgcccagcagcagccggaggatgagagggagaggaaggagggcggcagtgggtgcggcttccggatgccgctgcactacccgcgctacaagaaggcggactacgaggccatgcccgagtggcgcgtcgactgcctgctccgcgagtacggcctccccgccgacggcgacctcgacagcaagcgccgcttcgccatgggcgccttcctctggcccgaccagtactgatctgatacaaccaaacaagctagctagctagcccaagcccagagcgcggcgtgccggccgtgaatagtctcgtcatgttcagagcatcagctgtagcgatcgagacctaaatcatcattgtgctgcgtgcatatgctctcttgctatttataagntaccatctg

SEQ ID NO: 106677 - DNA, 667 bp, Zea mays
  unsure (1)..(667): unsure at all n locations
  Clone ID: MRT4577_2878C.1
agccaaattaagttgctactatatcaatttctgaaagcaatgcagtacaaacacnccttacatataatagcaatttatcccaagtagacaaacatcccctgtcacacaatatatatttgatccaagcgaataactaaaaaaagaaaagaaacacatacttaaccatcacccattgcaaacaccaaacatcacccaccccacgcaaacaacacggccaaccaattgcagcagtagggacgccaaatttagagaccccctccaagcacagcggatacgcaaagagcgacccatacggcgatgatatgggccccacggccctccttccaggccctgctgtcatagggactgttatccactaacggctgggcaccgaacacggatgccgagtcgtgctctccctgcccgagctcaggcccagccacaccagcggcggcaccgaaggccgcttctccgctgccgacatctgccgcctggggcagctcggccgagtggccgttgccgtcaggttcctgcccaaaggggaggttgctgctgtgccgcggctcgtcgctggcgcgccacgcgagctcgccgtccttgtcgcggatgcgcatgtcgccgtcgtccacgagctctagcgtctcgaggaagttggtgccgtctgtgtacgaacgctgggtcgaaccgg

SEQ ID NO: 106678 - DNA, 221 bp, Zea mays
  Clone ID: MRT4577_28790C.1
taaaaccgtagacgtcggttatgcagtggcttacagatctcggcaagctaaatctcctgctacaccagctagaagataatagcagaatacacatgggctcggcagatctgcgatggatcttaggagctgagcaaggaccctctgcgtcccgatgaccgatcctgagcgcgttgacaagtggaactgccactgcttcattacgagccagaccatcgcggagg

SEQ ID NO: 106679 - DNA, 425 bp, Zea mays
  Clone ID: MRT4577_28791C.1
aaaaaaacaacccccaggggaaaaccaaaaaaattaacaggcccttatttaaaggccccttttttttccgggggctcggccggggggggaaaaaaattccccaagcccccaaaaaaacggccataaggccccaaaagggggggcccccattaatgcccccccccggggggaacgggaaacaacggttcccccgggggaacaagggggggcccccttgaacccggccccccgggggcaaatgacaaagtaaatgaagttaaaaacccccttcccggggagggcccaaaaaaaaagggggggggggcccttggggggggcccggcccaaccaattttgcccggaccccggggtccggggcacaagggaaaccaaaaaccccctggggtagttcccccccccccggttgaaaaagggaagccccccgg

SEQ ID NO: 106680 - DNA, 295 bp, Zea mays
  unsure (1)..(295): unsure at all n locations
  Clone ID: MRT4577_28792C.1
gagattagaataacttaaaaataactgacataatnttttatttttcctgatcagaaaaatacatgaaaaagataggaggtagaaaaatttgctgatgtatggttaaagaagaaaaacaagaatacaggatgttctgttgaattgcaagtattcagtnttaccaataagatacggagactcgcttgacattcagaattacacagaaaagatctttcatcggtaagaggtctacgaagacttttgggaaaacgtctgcggctgctgacttatttgcctaagaagaatagagtatctg

SEQ ID NO: 106681 - DNA, 401 bp, Zea mays
  unsure (1)..(401): unsure at all n locations
  Clone ID: MRT4577_28793C.1
caagggaggaaagggcccacaaaccccgggggcatgaattttaccaccgatgagctcagatctctagaaaagaagttttttttttttttttagcccangggggtgggggggggggcttttttttttttctgcgtttgttctgcatgggggggggggggaggcgccccccccgggccacgagaacctgctntgctcaggcttcccagattcggcagattcgccgcgngatgggtgcgattatgatcaacctggcttttacctgtgaccttgaggaacttggttctgagttcattccggtagttgttggcgtggggattgggaggtctgcctccggcttgtttcccccttcgttgcgtgttctcccgcccggggagggatctcacggccccccagtttgatct

SEQ ID NO: 106682 - DNA, 302 bp, Zea mays
  Clone ID: MRT4577_28794C.1
tttgtcggatctgagacgagacgaggtaccatcttattccaacttcgggacggacaagttaccattttattccaacttcggcttgaccggatcttgtcggacttggattcggccgaccaccccgggccggcggagatcaaagaagatggcagctggcgacacatttctttttaccttggagtctgtgaacgagggacaccctgacaagctctgtgaccaggtcttaaatgccggtcttgacgcttggcttgctgaggacctgacagcaagggtgcttgtgagacctgcaccaagaccaacat

SEQ ID NO: 106683 - DNA, 301 bp, Zea mays
  Clone ID: MRT4577_28795C.1
ctctctccgcacagcagctttgcgaaaacctttttaagcaaaccaccggagcatcggggctgggtctggctgagccagggcagaggactattacaacgaaattgacatggggtatgaggatgagcccccataaccggagattgaggaaggatctgaacaagagcttgagaacaactaatatgcccctgatgacatcataagtggttagggttaacataaggagcaggataagaccaagcgtgaacgcaaatcaacttgatacatgacgaagtactaacgtgctttcatcctgagtacacga

SEQ ID NO: 106684 - DNA, 349 bp, Zea mays
  Clone ID: MRT4577_28796C.1
agccttccttaggaaagattttttggaaaaaggagagttatatttccttcaaataaacaaaaaacacccatttttttttcttcaaaaaatccccactattatattattctccactacataattttcaaaaaggtggttagatcattcacaaaaactccttagaagattaatcacaaaaacaccacaccgacatcactccatcgtgaaggagtttaaaagcccacaaccacattactaatgtttcatatcaatttaggtattggttaaaaacccacaactacattactttagttgtttcaaagctgatcagtcacaaaaacaccaaagctacactaatgctttaaacaat

SEQ ID NO: 106685 - DNA, 572 bp, Zea mays
  Clone ID: MRT4577_28797C.1
ctctctccctaccttgccgacggctccgcctacgtatatgctcaagaaggcgcatcgcttgcccaggaacccgagaacgcctactgtgacaaggtgcctcctctccttcccgaacggcgaatgagcaagatcgaatagaactcacctgttcaaggaactcaccgaggggctactcaagacccctgatgaatacaagaacaaggagttggacatcctacagatgcgcttaaatgaggtgactggagagatggcgcacccacttacaacagcgagatcctactagcagcactgcgacttccctgagcattatgatatggaggaaccccacgtcatttttctctatcaagagaccatgcattgacacatctacagcaagggggacatctgcttagacatggagtatgacttcggccctccaacgatgaccgagagctctgacgtgatcacgatcgagtgtatgtagtgtaggtggccaggatatgaacgcgccatggactatgaccgctatgtcatgaactgccgcaacgggagcgtcccgtacgagaccagatggtgatgacatgacgacacct

SEQ ID NO: 106686 - DNA, 309 bp, Zea mays
  Clone ID: MRT4577_28798C.1
tttttttttgtttgttttttttttttttgggtttttttttttttttttttttttttttaaaggcaccaacaaaaaggtttccatttcggtttggcagctacaaaaaggatcccatttgaaacaaattgaaacaaattggctttaaaaaaattcgtacttaccaagtacaaaagcgaaggaaacaaaattgggaagactaaaacatgctgaaaatttggggcctacaaaaaaaatttggaacgacaaactacagtacttggggcgggtttttttaaaaagttaaaacccgacgggaacaagcggcccatt

SEQ ID NO: 106687 - DNA, 111 bp, Zea mays
  Clone ID: MRT4577_28799C.1
tggttttccagaccattagcttaatctactgcagagcgcataagatcccgagcgacagcataagatactttcttaatctacatctttccctccagtccttttctctaccac

SEQ ID NO: 106688 - DNA, 427 bp, Zea mays
  Clone ID: MRT4577_2879C.1
gtcaccgaaccgcatgtatgcgagctgcacccatggatcccgccgcaggaagcgccggccagcaacgccagaacaaagcttcggcgggcaagaagggtaaaaatggcggtggcaacggcgggagatggccggcggtcaagccccagaagggatttcacaataattggcttaaggggccccacctctcttccctttcagaattttttacttttgtggaggcgaaaggtttcattggtattgctgaggcgatgggcttcacacaccagggcagtttgtggcccctaatgggggagggttacagagacaaccatcggatatctgtgacggatccattgctcgctcaagccctttgggaatgttgaatacacacgattttttcacaccatcaacgtctttggccaaggaacaacaggattgtgaatccaaa

SEQ ID NO: 106689 - DNA, 369 bp, Zea mays
  Clone ID: MRT4577_287C.1
gaactagaaaacattgaattcaacaaataaaacaaatcacaacaattacacaagttgatgtgatctgacaaaaaaaatgaacatgttcagcacggttaagcatccaccggatacaagtacatgtatcacgtacctatcagcggttaaccgtgctcatcaagacgaaaataataaaaattacaccacatcattcgcatgtatacgcacatgcggccaacgcaatgctagtaattaactcctcccctactgtccgctgcttcagtagaggaaatatgcgacgagggaggcgactagggcggcgggggcgattgccacctcggaggcatcgctggtggcaggagcagcctcggaggccatgacggcggtggc

SEQ ID NO: 106690 - DNA, 1978 bp, Zea mays
  Clone ID: MRT4577_28800C.1
agcagctgctggggccttgcgtactttatcctttaaaaatgatgaaaataaaactcagattgtgcaatgcaatgctttgccaactttgatcttaatgctgcgatctgaagatgctgcaattcactatgaagcagttgcgatcattggaaggttggttcattcatcacctaagatcaagaaggaggttcttaatgcaggggcactgcaacctgtgattggattattaagctcatgttgtacagaaagccaaagagaggctgctttgttgctagggcaatttgcttcagccgactcagattgcaaggtccatattgtgcaaaggggtgcagtccgtccactaattgaaatgctacagtcggctgatgtccaactccgggagatgtctgcttttgcacttggcaggcttgcccaggacacacataaccaagcaggtattgcatataatggtggcttggtgcctttgttaaaacttcttgactcaaaaaatggatctctgcaacataatgctgcatttgccctttatggagttgcagataatgaggactatgtatctgacttcattaaagtaggaggtgtccaaaagttacaagatggagaatttattgtccaggcaacaaaggactgtgtggcaaaaacattgaagaggttagaggagaagataaatggacgagtgttgaaacacttgctttatttgatgcgagtaggagagaaatctgtgcaaaggcgtgttgctctggctcttgcacacctttgtgcccctgaagatcaaagggcaatttttattgataataatggtctcgacttgcttcttgatcttcttatttccatgagcccaaaacatcaacaagatggctcagcagcattatacaaattggccaacaaagctgcagcactttctcccatggatgctgcccctccatctccaacacctcaggtttatcttggtgagcaatacgtgaatagttcaacactttcagacgttactttcttggtagaaggaaagcgattttatgcacacagaattgctttgcttgcttcttctgatgcatttcgtgcaatgtttgatggcgggtacagggaaaaggatgcaagggacattgaaattcctaatatcagatgggacgtctttgaactcatgatgagatttatctatacagggtcagttcaggttaccagtgaaattgcacaggatcttcttagagctggtgatcagtatctcttagaaggcctcaaacgcctatgtgaatatactattgcgaaggatgtgaatctagataatgtatctgacatgtatgacttgtccgaagcctttcatgccgtgtctctgagacatacgtgcatcttgtacattctggaacattttaacaagatctgcaccagagccggttctgcacagctgatccagcgtgttattccagagctccgcaatttcctaaccaaggcactgagttcatcaagaagcccaagtacaaccgacgacaggaacttgcagacttgattttgagtcccaattcattgacactgacaccgtcatctgaccaaagttgctggacatcctgtacagtgaagtttctggcgctgcgcatttgatggcatctgttgtggtacatggtggccggctcctcaaaattaacatcagcagcttaacaaacttttgtaagatttagtggaggatatgggtaaagagaacccgcgtcttagtcatgcctcgaccagcttacactgggataggctgtagttgtgaatggtcttggccgtaattcgtcggtctctgctttgtttctgagttgtgtttgtttcaagttcacagttcagtgtatgcctgcatatgtttaaagtatgaagcttgagcaagttagaaattagcccctgtagtgataaagctgtctgtgtagatccaccgattggagttaccgaaacaactatgtaacatcatagatgacattagatgcatgataattgctggtaaagcttggtc

SEQ ID NO: 106691 - DNA, 475 bp, Zea mays
  Clone ID: MRT4577_28801C.1
aatgtaacaaaattttctaagatctagttgaggataaggataaggagaacatatctcgtactcatgcatcgaccagcttacactgggataggctatagttggatggtcctggccgtaattcgtcggtctcagctttgattgagtttagtgttgtttcccctttccagttcccagttcagtgtatgcccgcatctgtttattttaagtattaagcgtgaccaagttagccattaggacatgtccaatgatatcttgaggtgtctaaagggtttgcaaaaaaaattatggagccgtctctccgtgaaaagacgccttctctgactcgtaacctaagtagcaatagatgcctcatttcttattgtacgaattcgtcgtatgttttttcattcggcgctgtataagtgtatttacttttgtatttattaatagactatatttataacccctattatataatagagtcttttagttgtct

SEQ ID NO: 106692 - DNA, 353 bp, Zea mays
  Clone ID: MRT4577_28802C.1
aattagtacacatgcgacaaggatggacatcgagaggttttttaagagatcacggcctggccccaaccgattaaagggccagagtgtcaaacaacgctgcactggttacggtgaggattgtgttctgtatactagatgctcgagcaacagggacggtgatccatggctattcaatgctacactcggtggactttcacatatcacaggatggcacgagggaggtcatatcctgcaagtgcgggatgctggccctgtccagggcactgctgaatctgctgatggagacgaacggtatccactgtggcgaattcatccaggcttactgcttgcatgggatattgaatcacgccatc

SEQ ID NO: 106693 - DNA, 738 bp, Zea mays
  unsure (1)..(738): unsure at all n locations
  Clone ID: MRT4577_28803C.1
tgcagcactttctccatggatgctgcccctccatctccaacacctcaggtttatcttggtgagcaatacgtgaatagttcaacactttcagatgttactttcttggtagaaggttggtactatttcacgaccctgatttcatcagtagatactttaaataattcttttctatcatgtcctagataatcttaatcccttctacaggaaagcgcttttatgcacacagaattgctttgcttgcttcttcggatgcatttcgtgcaatgtttgatggtgggtattagggtgagttttgacttggcacaacataatgtgcttttgctggttttagtctgttgatctctttccgtagttgatatattgctgctgtatatagtatgttagttttgaacaggccttgaatctcatgtctaattcaaaggtcattttcttaaccaggaaaaggatgcaagagacattgaaattccaaatatcagatgggaggtctttgaactcatgatgagatttatctatacagggtcagtgcagattaacagtgaaatttcacaggatcttcttagagctgctgatcagtatctcttagaaggactcaaacgcttatgtgaatatactattgcgaaggatgtgaatctagataatgtatctgacatgtatgacttgtccgaagcctttcatgccgtgtcactgagacatacatgcatcttgtacattctggaacattntaacaagatctgcacc

SEQ ID NO: 106694 - DNA, 545 bp, Zea mays
  Clone ID: MRT4577_28804C.1
ttcgagtttttttttttttttttttttttttttttttttttttttttttttttttttttttttggtttgggggggttttttttttttttttttgggagaaaaaattttaaaaaacaagaggggggacaaacttggttcattcacagggaaacaaccccctagggccccccaaaaaacatcgaccaaaactcaggcaaacccaaaatttcctgaacaggggggggggcccccccctcgctgggttggcccccgttaaaggggggccccccttcccctaactttaaaaaaaaaaacccccccccctccttaaacttgaaaaaacattgggcaaaattctccccccccaataaactttccccaaaacagtccttggggcatgaaaaaattgggaccccaaaaaaccccttcccccccttctttaaggggggccatggcctccccccaacaatgggatctttgaaaaacatgcccctttgcccgaaaacaggttttttggggggcccttgccgcccctaaacccccactaagggctacagtttttccgg

SEQ ID NO: 106695 - DNA, 270 bp, Zea mays
  Clone ID: MRT4577_28805C.1
aacataccaaacgaaacatgcagaggtacgttatatatcgtagaagacacaggaaacattccacatgacagggacagtcacggaccaccagcagtagtccaccttgctttcacgtccatattggattggatgctcaaccagatatttcaatagccttcacctttaggcttcttctcctccggcttgggctcggtgaccgcgagcgcgcaattctaaaggccaggcttgacctgttccagcttggcgatctacggcaggcggaagcgcctg

SEQ ID NO: 106696 - DNA, 1267 bp, Zea mays
  Clone ID: MRT4577_28806C.1
ccacgcgtccggtgagcaattcgtgttatagttcaacactttcagacgttactttcttggtagaaggttggtactatttcacgaccctgatttcatcagtataattcttttcaatcgtgtaccagataatcttaatcccttctacaggaaagcgattttatgcacacagaattgctttgcttgcttcttctgatgcatttcgtgcaatgtttgatggcgggtacagggaaaaggatgcaagggacattgaaattcctaatatcagatgggacgtctttgaactcatgatgagatttatctatacagggtcagttcaggttaccagtgaaattgcacaggatcttcttagagctggtgatcagtatctcttagaaggcctcaaacgcctatgtgaatatactattgcgaaggatgtgaatctagataatgtatctgacatgtatgacttgtccgaagcctttcatgccgtgtcactgagacatacgtgcatcttgtacattctggaacattttaacaagatctgcaccagagccggttctgcacagctgatccagcgtgttattccagagatccgcaattttctaaccaaggcactgagttcatcaagaagtccaagtccaagcgacaggaactcgcagacttgatgagtcccaattcattggcaccgacgccgtcatctgaccaaagttgctggagatcctgtacagtaaaatttctggcgctgagcgttcaatggtatctattttgggtacatggtggcgcggtccttgaaattaacatcagcaatgtaacaaaattttctaagatctagttgaggataaggataaggagaacatgtctcgtactcatgcatcgaccagcttacactgggataggctatagttggatggtcctggccgtaattcgtcggtctcagctttgattgagtttagtgttgttttcactttccagttcacagttcagtgtatgcccgcatctgtttatttaaagtattaagcgtgaacaagttagacattaggacatgtacaatgatgtttaatgtagatgctcttgaggtgtttaatgtagatgctcttgaggtgtctaaagggtttgcaaaaaaaattatggagccgtctctctccatgaagagatgcctcctttgactcgtaacctaagtagcaatagatgtctcatttcttattgtacgaatttgtcgtatgtttttcattcggtgctgcataagtgtatttacttttatatttattaatagcctatatttatcatc

SEQ ID NO: 106697 - DNA, 361 bp, Zea mays
  Clone ID: MRT4577_28807C.1
cggacgcgtgggaggaatcccttttatcggatgaagacgaagctagcagcgtgatattccccaagcgctcgataaattgcctgaatcggaaaatcgctaccggtctcgtggattcatgttggctgtgtaaacggtacgttgattaaccacaagatgcggagaacttgagtcaagtcgaccccaagcgtggactactccgcatggtgaagctgatggaccaacctgaagatggttaaatcaagcgaatgttcggttgagggatactcgtcaagcggacgtcatctaacaaacactaacatagtgtttattccaggcgtgctgatcgaagaccctttaactggtcacatgcctcgtcatgggt

SEQ ID NO: 106698 - DNA, 456 bp, Zea mays
  Clone ID: MRT4577_28808C.1
gggcgggggcgaccgtactcacaaaccttcgttgctacctgcgcatcttcaattcggtgagtcgcgctctttcgcacttgtttagcatttacttccaacctgtcccaaaaaccgacgaattatgtactgcgttttctcccgatttcctccctgaaaaaatcatcgaattttgaactatgttggtagcgcgcttgggctcagatcgcgtcttgggctccagaagcggtgattggagtcagatctgagagctgcaaggtctagaggttttaaagcgcacttggtttgggggcggtgattctcgggtgatggatctgtcgcggtttgttgtgttatacagaatctcgggtgcgtcgaattttgctagctttctgatttgcgacctaccagtactgaaaatcggttttggatgcggttgggaatccagaatgccccattccaaattgccaactgttttct

SEQ ID NO: 106699 - DNA, 226 bp, Zea mays
  unsure (1)..(226): unsure at all n locations
  Clone ID: MRT4577_28809C.1
acccactcgtccgctcacccaacacccgtattgagcggctggtgagggatcggatcgtcggcggctatggaagacgattttcagagggcagcgggccccacctctaacnaccttgactattacgcgaaatcccatttcgtgtcatacgcactgtcctttcgcgttaaatgataatttttccaagggtcccctcctcttgacgatcccagatcacgtccgcttcctt

SEQ ID NO: 106700 - DNA, 1545 bp, Zea mays
  Clone ID: MRT4577_2880C.1
acctactgaccgaggacagtgatgaagaagattaggctccggccggcgggctaaacatgcacagaaccaaaataacaagcctaagtccaaggtccccaatggaagtgaagctgatgacactgatggcgcctctaggcctaaatctgctggacttgtggactatgacgatgatgacgatgaggacttcaatccaccaccaaaggagccttctaggcctgcagaggatgatgtgcccttaaacatatccccgttgaagcggaagccagtgaatgcagtggatgggaaacattcagacggagagggtcgcaggaggcaaaaaatagaaactagaattagttgtgctaaaattgctgctgttactagtacagctattaagcacacagatctacaaaacaagtatgcttcccacttgcttacgtcagccacaccaagtactgaagccaatggtatttttagtgaacatggtactaactatgaggagcaacaacatcctatggagaacacagaaacttcacgacaaactggtggtgattgtataaaagatgtgggcagtatgtctcccgagaaggccgtaaatactaccaatacaagcgattcggagccttattcagtaagatgactactacacagctggttggtccatgtacccatcctgtgctgtggtcaacaggaaggaatcagaatgtgtttggctccaagcgctgaatgcatcgatatcatgctggaaacatgattggaggtgacatagattgcagctacctttacatctcaagtaaaattccagttacccctttttgcgcctgtaaagttaattttccgcaaggacagatctgacaaacatgataataggaatgactgtagattcgaacattggatgggccttgctcctgctgctgcgctcgctattgtatcggtttatgagccaacgtagtagtgaatatgtgccttcaactttatttttctccacaattattgatactgttgtaaaacaagtaggaaggcatagtttataatagcgagcgtttttgcaagactctgtacttcagagtgtgttaagacaagatggtggcgaatggtgatgcacctgctagagggagtgcggcggcagctgcaagcctgcgcaggcgtaggaccacaagcggtgctgctggtggtggaggcggtgccagctcgatgctccagttctacaccgatgaggctgcgggccgcaaaatgtcaccaaacaccgttctgatcatgagcattgggttcatcgccgttgtcgctatgctccatgtttttgggaagctgtaccgcacctccaactaggttggtattaccataaccaagaaaacataggccaccaagacaggagccttatagagcgatttcaatggatagcaagtgactatcagagaggaaccttgtagagcgatttcaatggatagctgtgaactgttatagaagtttatctacacaacttgcaatgctgagggctatgataaatccctgcgagtcttgtttatgctccaaaaaaaaaacaaaaaaaaaaaaaaaaaagcggcc

SEQ ID NO: 106701 - DNA, 2133 bp, Zea mays
  Clone ID: MRT4577_28810C.1
ctccgcacattacagagagaagcagggttgcctagggttttagagcaaaggcggttctccgcggcggcgacggcgagccatggagaacacgaagctctcgtcggcgctattcgccgggacccacttcgaccgcaagcgcttcgccgccgacttcgcccggtttcgtaaaggcccggctctcccatccgccgccaccccctccgcaccgtccccggagaagaagcggaagcgcaagagcggcaaggcaaaggcgaagaagaataagaagagagcccaggatgcggcggccgccgcctcgtcggattttgtggaggggttcagcgtgttcaagggattggctgataataatgcggagctgcgttctgagaaggtggatatgaggaaagatgatgattcggtggctgtgaggagacggaaagagattgagagggaattcgagagagctgcagttcttcgtaagaggtttgatatccacattgccgggcaaaatgctccagcaccacttgagagctttgaagaattgatttcaaggtatggttgtgattcttatttggttggaaacttgtcaaaacttggttttcaagaacctacaccaattcaaaggcaggccatgcccattcttctttcgggtagggaatgctttgcgtgtgcacctactggttctggcaagacattggctttcttgtttccacttcttatgaaaattaagggtcaaaaggtggtgttaaagccgtgattctttgcccaacaagggaattggctgcacaaactgtgagagaatgcaagaagttagttaaggggaggaagtattatattaaattgatgaccaaagagctgtccaaatcagggaatttcaaagatatgcactgtgatatccttgtttccacccctcttcgtttggaccatgctgtgaagaaaagagaccttgatttaagtagtgtggaataccttgtcttggatgaatctgataaactttttgagcttggatttgttgaagtggttgattcagttgttgaagcctgttccaatccttcaataattcggtctctgttcagtgccactttacccgattcaattgagactcttgcacgcactataatgcatgatgccattcgagtcattgtcggcagaaagaattcggcctcttcactgattaagcaaaagttgatttttgctggaactgagaggggaaagttgctaactcttcgccaaagctttcaagagtctctcaatcctccagtattgatttttgttcaaagcaaagagagggccaaggagctttacaaagaactggcctttgatgacattagagttgatgtaattcatgcagatctcagtgagcagcagcgtcaagatgctgttgacaatttgagagctggaaagacctgggtactgatagcaacggaagtcattgcccggggaatggacttcaaaggtgtcgcctgtgtgataaactacgattttccagagtcggctgctgcctatattcacaggatagggcgatccggaagagccggtaggtccggggaggctatcacgttcttcacagaggaggacaagccattcttgaggaatatcgccaacgtgttggtatcttcaggctgtgaagtgccttcctggataatggcactgccaaagctcaagcgaaagaagcacagagtggatagggacccaatctcctacctacctgacgaagtttgagagcggcttggtaagatgctctatttatttatttttgtggggagggggggatatataacacaggctgtccagagtggtactttaaccatgcacttccgagaggtggcacgttggcttcagttttccctgtttgagcagtgcaccgatcagtttgtttagccacaacccaagacgagggatcagtatatctttgttaattggagtacgttacagtttgtgtggacgattggtggtgaatccacagagtagagcagctcgtttctgtttggcctagcgtagtcagattgcaattagggtccgtttggttgggttatggctgtgaaaaaagttgttgtgggctgtgagctgtggaaaaagctgctgtaggctgtgagctgttaaaaagctaaaaccgtttggtggaaagcactaataaaaattaaaagttcttcg

SEQ ID NO: 106702 - DNA, 324 bp, Zea mays
  Clone ID: MRT4577_28811C.1
gatgggaagcgaccactcgcgactgctcttattattacccacagaatggaccatcaggttggaaccacacagcaagcgtactctggtgatagatacaagagaacttagctagcaccagagcctagaagtggcggtactgcccacctcgaccggtagaagtgggcattagacccccatctagacactggtggaacctatatgcacactgtatataacacgtagagtatgtcaagctgtagtggtcccaacgcgtatgggacattcagcgggctataactatagcaggagagtgttaaacgcacatgaaacaaaacacgagggggc

SEQ ID NO: 106703 - DNA, 562 bp, Zea mays
  Clone ID: MRT4577_28812C.1
cgagtttttttttttcttttttttttttttttttttttttttttttttttttttttttttttttttttttttggggggaaccccggaccttaaaaaaagggggttttttggaccccttatttatacaaccaaaaaagccctaatccatttaaacattggttttggggacccccgcccccaagaaacaaaaacaaatgggggcttaaattggattttttgggaacccgggataaaaaccacgggctaagggggcccagggaccaccccctacaaggggggacccaattgggcccccaaaaaatggggggggcccgaaaccacaggttttaccaaaaaagggggggaaaagggaataatattttctgggcccaaagcgggatggtttactcccccaaagggggtggtgctttgccaacctttgggccagggacccgtttaaagttaaaaattccgggaaggcctccccctttaaaaagggggtaaatttcacaaagcttaaattaaaaaacttccaatttttaagaaaaactcttttcccttgggtaaaatccctggacatcgg

SEQ ID NO: 106704 - DNA, 376 bp, Zea mays
  Clone ID: MRT4577_28813C.1
ggatgctgggaaattggtaaacaaggagacggacaaaaatctggggaacgggaaaacagggggggggaacccccgagggggggggggcgctttggctaacgggaactttggggaccaagggcaaaaaaacaaaggccggggaatggtggtcaaaagccaaaagggtaaaaagaaaaaaaaagggggggaacacaaccttttcaggggaaaaaaaaaaagaaggtataaagacaaaaacaaattcttctaaaaagccataatgaaaacaaaaagaaggggccatgaaccccccgggcaggtcccccaccgggcccctgtccgacattttccctgggggccaggaaaaaggagcccttccagcggaaaacgggccggg

SEQ ID NO: 106705 - DNA, 289 bp, Zea mays
  Clone ID: MRT4577_28814C.1
accggaagcctgaaccccttctgggttccggcgcccgtgtatctcatttaggaacaaaacaaacatttgcatttgcattctgcattgtaatcagttaaagagtcgatggatcggtaagcatgttaattagtcagtctctgacgctgctgggtgacaggttggtaattagacttctgcattttagctgttctgtatggtcgctgtcgccgccgtacatgtatccaccaccttcatcttcttggttgtattgtacctaactctgcgtaagcatattaatcttaggccatgt

SEQ ID NO: 106706 - DNA, 269 bp, Zea mays
  Clone ID: MRT4577_28815C.1
ttttgcacgcttacgacacgttcctgtcagaggatgacatcagacttaacagcgctattctcactgaggcgaagcacttgcctatgtatgacaagctggctaggaagagcaatggggaatatattgccggaagcgccacccggagctatatcaaggctgaccattggatgcttcaaacatcagttgcaccaggttacatgtgatgcattggaacaggacacaggctggagaagaaatgactaaaaactctaaagcatggaagcagaact

SEQ ID NO: 106707 - DNA, 812 bp, Zea mays
  Clone ID: MRT4577_28816C.1
gccggccgggccgggctccgtctcgcgtgacttcattcccagcggccggcggcgacctccacgtggtgccattcgccggcaacgagcacccgcccaccaggatccagaaagagaggaccaaggtcattcgcgaactcagtggactcattcttacacgagggcccaaactctgcaattttgttgagtggagaggttacaaggtcgtataccggaggtatgctagcctgtatttctgcatgtgcattgatgccgaggacaatgagcttgaagtccttgagatcatccatcatttcgtcgagatactggaccgctattttggcagtgtatgtgagttggatttgatattcaattttcataaggcctactacatactggatgagattctcatcgctggtgaacttcaagaatctagcaagaagaatgttgcaagacttattgctgcacaggattcattggtcgaagctgctaaagaggaagccagctccataagtaacattattgctcaggctacaaaatgaagttcttcatgcctgccccccttccctctatcttgttattgttgtacaagcaactgtaattcactggactgcgagtccatttgctctgctcatgtttatggatttcaagactccaggttatttagaatgagcgtgatgtgtaactacattgcatgtgttcccgttgcaagtaaaatcatgatttccaggattgctcaggcatacatgtaaattcctaatgttataagtggatattttgtcaacctcgttgattgtctgttgtgttctataaaaaaaaaaaaaaaaaagcggcca

SEQ ID NO: 106708 - DNA, 243 bp, Zea mays
  Clone ID: MRT4577_28817C.1
attgctagggggggaactttgcatatttgatttgatttacacagggggggcccgcttgcttcgtcgttcttttttatttggcacatttttgaaaagaactttcaaatgacaaatttttgggggcggaagcaaggcccccctaataaataaataaataaaaagaagcccccccccttgccctttgtttgttgccgcaacaaaaagcagacagatgccgcagcaaaaactaaaaaggggggcccc

SEQ ID NO: 106709 - DNA, 1422 bp, Zea mays
  Clone ID: MRT4577_28818C.1
attcggctcgaggcactgaacaaactcaagggtaaagaacttgaacttcttctggctatactccccgacaacaatggtccgttatatggtgacatcaaacgtatttgtgaaactgatttgggattgatatcacaatgttgcttaaccaagcatgtttttaagatcagcaaacagtacttggcaaatgtctcactgaaaattaatgttaagatgggaggaagaaacactgtgctcctggacgcaataagttggagcattcctttggtcagtgacatcccaactattatatttggtgcagatgtaacacaccctgaaaccggggaggactcaagtccatcaatcgctgccgttgttgcttctcaagattggccagaagttacaaagtatgctggattggtttgtgctcaggcacaccggcaagagctcattcaggacctttacaaaacatggcacgatcctcagagaggcactgtaacaggcggcatgatcagggagctgttaatatccttcaggaaggccactgggcagaagccattgagaataatattctacagggacggtgttagtgaaggccagttctatcaagttctcctttacgagttagatgccatccgtaaggcatgcgcatccctagaaccaaattaccagcctcctgtaacatttgtggtggttcaaaaacgtcatcatacgagactatttacaaacaatcacaaagacagaagtagcatggacaagagtggaaatattttgccaggaactgttgttgattctaagatatgccacccaacagagtttgatttctacctctgtagtcatgctggaatccagggaacaagtaggcccgctcactaccatgtcctctgggatgagaacaatttcacagcagacgaaatgcaaacactgacaaacaacctttgctacacttatgcccggtgcacacgctcggtttctgttgtccctcctgcatactacgcacacctggcagcattccgggcgcggttctacatggaaccagagatgtcggagaaccagacgtcgaagagctccaatggcacgaacggaggcttggtgaagcccctgcctgctgtgaaggagaaggtgaaaagggtgatgttctactgctgacgaggtgaccactttaacaaccattcacatgctgtagctaacttggtagggttcagtagggggattagattagctttctccaggaacgaagaggaaacgggatgcgtatttggatcatgaacaatcaatctgttagcgatcgctgtaaaatactcggaaatgcctgtataatagttcttgttggttcagatgcatgcatccaatgttccagtgtactatgaaaagggggtgtagaagaaacctggtgttttttaggttgaattcaatcaattcattaacagcaaaaaaaaaaaaaaa

SEQ ID NO: 106710 - DNA, 593 bp, Zea mays
  Clone ID: MRT4577_28819C.1
gaggtcgttgcgcgcctgccacaggaacgccgcgtaccgcccccagcgcctccgcgtccgccggctccgcgcgcaccgccctcctgaagaagtgctccgccctgtcgaggtcgccctgcacctggtacaggaactgggcgaagtttgccaggagcagcgagctgttgggctcctcggacacggcctgctcgtatctctgcgccgtggccacgtgctcctccgacgaataggtcacgtctggcttcggtgcctccacgggcgcgacgagctgctccaggatctccgggtccgtcagctcctctgcacgcacgctcgcctgcatcctgatggcttcgtcggatatccgtttccagatgaccagctcgtcctgtacagtctgctgtgcctcctccacggccattgagtcggacacggacgcctccgaccccgcgcccgcgcccgcgcccaggggcgtcgcctgcgacacgtcctgcggcagcacagctccgctttgtcggtacgacgacgactcgtccgactggccgtcgcccgtggcgccggcaaccgcccacgcgtccgcggacgcgtgggcggacgcgtgggcggacgctggg

SEQ ID NO: 106711 - DNA, 405 bp, Zea mays
  Clone ID: MRT4577_2881C.1
caacaaattcctgtcaaaattggtgaatggctgatcggtgggacaaggctttatctgacacctgttgtgcgggtaggaaatgccagcagtgtacaacatgctggtctggactccacgagtgcaaacaactgggtgccacaggttgggatctcttcaaaccaatcatagggtattgaggctagtaatcaagtgcgtcgttctaagatcacctttaaattcatttttcacatgtatagccattatcttcttagtgagcagtcttgcagaatctctgttattcctgacgtggatcatataagcacaccatccgtcattcatataggaatatgcccacgtgaatgcacgaggaaaaacccgtttacaggtccagaaaattctttgactgaaaccagttctacatctgct

SEQ ID NO: 106712 - DNA, 1160 bp, Zea mays
  unsure (1)..(1160): unsure at all n locations
  Clone ID: MRT4577_28820C.1
ggggaccgagctagatctccggactacctcccaaccgtttgcctccgtctcgcgtgacttcattcccagcggccggcggcgacctccacgtggtgccattcgccggcaacgagcacccgcccaccaggatccaggtttgtgctgcgacagcgcctatccattcaccatgattaatttcgtgctcctgatcagccgccagggcaaggtgaggctcaccaagtggtattctccttacacccagaaagagaggaccaaggtcagtaccccacactgctctgtgtgataactcgtgtaattcagttccggggttgctttattcatcactggcagagtggcagtgggtgctaatttccatgctagtttgtgtcaggactttgcagtcatgacttttgttcccaacaaatcgatgaacattagaagtgaatgaatgtacanatatacatgtnncagttgccaacttccaaagctatatncttgatccagcatacatngtttctgtatagattgtgatggatgtttttttttgttatgtaaacttgaatatgtgttaattcttgttgtttttcctcttgttgtatttggtatacattcatctgaacaatttcccgtttctcctactcgctgccctcttccttgtttattcctctaatgtgttgctgccttgctgggtaacaagtcattcgcgaactcagtggactcattcttacacgagggcccaaactctgcaattttgttgagtggagaggttacaaggtcgtataccggaggtatgctagcctgtatttctgcatgtgcattgatgccgaggacaatgagcttgaagtccttgagatcatccatcatttcgtcgagatactggaccgctattttggcagtgtatgtgagttggatttgatattcaattttcataaggcctactacatactggatgagattctcatcgctggtgaacttcaagaatctagcaagaagaatgttgcaagacttattgctgcacaggattcattggtcgaagctgctaaagaggaagccagctccataagtaacattattgctcaggctacaaaatgaagttcttcatgcctgccccccttccctctatcttgttattggtgtacaagcaactgtaatgcactggactgcgagttcatttgctctgc

SEQ ID NO: 106713 - DNA, 2000 bp, Zea mays
  unsure (1)..(2000): unsure at all n locations
  Clone ID: MRT4577_28821C.1
gccggccgggtcggggcctccgtctcgcgtgacttcattcccagcggccggcggcgacctccacgtggtgccattcgccggcaacgagcacccgcccaccaggatccaggtttgtgctgcgagagcgcctatccattcaccatgattaatttcgtgctcctgatcagccgccagggcaaggtgaggctcaccaagtggtattctccttacacccagaaagagaggaccaaggtcagtaccccacagtgctctgtgtgataactcgtgtaattcagttccggggttgctttattcatcactggcagagtggtagtgggtgctaatttctgcaggagttaaggctatgcatgctagtttgtcaggactttgcagtcatgacttttgttcccaacaaatcgatgaacattagaagtgaatgaatagttgccgttttgtaacgagtttgacgtacagtatgcatgtcggttgccaacttccaaagctatatcttgatccagcatacatgtttctgtatagattgtgatgaatgtttttttgctatgtaaacttgaatatgtgttaattcttgttgtttttcctcttgttgtatttggtatacattcatctgaacaatttcccgtttctcctactcgctgccctcttccttgtttattcctctaatgtgttgctgccttgctgggtaacaagtgagtgcggccccatgtattttctcaccaatttgatgaattcgtacagaacttactttagtacagtaatctgttggaagggagttcctgtcttccatcaaatattctgctttttaccagggtacctggtttcatgtacccatggatgttttgtttctttcaaactttaatagcttcatataattcccaaaaaacaagttttctagcggtatctattaaataacatttctttgtgaggcgtattgctgcatgcttgtttattaagtttgctactcatgttcaaaactactctcgttcgagacggccggccctggtggagtcgaccgatcgagctagatctccaggactcacctccccaaccgtttgcctccgtctcgcgtgacttcattcccagcggccggcggcgacctccacgtggtgccattcgccggcaacgagcacccgcccaccaggatccaggtttgtgctgcgagagcgcctatccattcaccatgattaatttcgtgctcctgatcagccgccagggcaaggtgaggctcaccaagtggtattctccttacacccagaaagagaggaccaaggtcattcgcgaactcagtggactcattcttacacgagggcccaaactctgcaattttgttgagtggagaggttacaaggtcgtataccggaggtatgctagcctgtatttctgcatgtgcattgatgccgaggacaatgagcttgaagtccttgagatcatccatcatttcgtcgagatactggaccgctattttggcagtgtatgtgagttggatttgatattcaattttcataaggcctactacatactggatgagattctcatcgctggtgaacttcaagaatctagcaagaagaatgttgcaagacttattgctgcacaggattcattggtcgaggctgctaaagaggaagccagctccataagtaacatcattgctcaggctacaaaatgaagttcttcatgcctgccccccttccctctatcttgttattgttgtacaagcaactgtaatgcactggactgcgagtccatttgctctgctcatgtttatggatttcaagactccaggttatttagaatgagcgtgatgtgtaactacattgcatgtgttcccgttgcaagtaaaatcatgatttccaggattgctcaggcatacatgtaaattcctaatgttataagtggatattttgtcaacctcgatataaaaaaaaaaaaaaaaaagtgtctctctctctctcctcgtgcaaattaaaaaaaaataagggccctagnaangtaatagtnttttt

SEQ ID NO: 106714 - DNA, 333 bp, Zea mays
  Clone ID: MRT4577_28822C.1
ttgactcgttgtctatgatcattcgactctatatacatacagctctagctagctctctgggcgtctaacctcgcttccggcatggctctcaatcacatcgtactcttgacctgctacattgccattaccgctctcaccttccgtccctgctcatcctcccttcccatagactcttgctagttcacactgcaaaacaacgctctcagcatactcatatacgcctccttacatcagagcttgataattcgcatcatcagtttcatcatcaaattctcgttctattcccatatatctgaatggaaccttctcctatcatatgtccaccttttgcat

SEQ ID NO: 106715 - DNA, 349 bp, Zea mays
  Clone ID: MRT4577_28823C.1
ccccccccaaaaaaaaaaagggggaaacccccctttttgtatttgggtttgggtggggggggggctttgcccctggggggtggggacttggaccccccagctttggggggctcccccagcgtcagcccggtttgccattaaagctggcccttatgttttttttaaaaaggggggaatttgttgcataaaatttgcatatcaactaaggcatcgttggcccttcgggggagagccgggctttatgctttaataagggggggctaaaattttttggaatccatggttttccccccaaaatccaaaggtggcccggcttttcctctttttttcctcccaaaggtttaattgg

SEQ ID NO: 106716 - DNA, 727 bp, Zea mays
  Clone ID: MRT4577_28824C.1
gtccacacacgagacattgtctcagaagctgtacgaaaagttcaagaaccacaaaagatttaccaaaccaaagctttctcgtactgcatttacaattcaacattatgctggagatgtaacatatcaatctgatcaattcctggacaagaacaaggactatgtggtagcagagcatcaggaattacttaatgcttctaagtgctcttttgtatcagggttatttccacaagcaacagaagagaacacaaaatcatcaaaatcctcaattgcaactcgctttaagatacaacttcatgaactcatggagactttgagctctacagagccacattacataagatgtataaaaccaaatagtgtccttaagcctggcatttttgagaataccaatgttctgcagcagcttcgatgttctggtgttcttgaagccattagaatcagctgtgctggttatcccacaaggaaactatttcatgattttctacatcgttttcgtgttcttgctcctgaaattttgaaagagaaaaatgatgaaaaagtctcctgtcaaaaggttttggacaaaatgggactacagggttatcagataggaagaactaaggtattcctgagggctggtcaaatggctgatctggatgccagaagaacagagatgcgaaacaatgcagcaaaaggcgttcagagtcaattccgtactcatgttgctcgtgagcagttcctagtacta

SEQ ID NO: 106717 - DNA, 1770 bp, Zea mays
  Clone ID: MRT4577_28825C.1
atgccgtttggcctcaagaatgctggagcgacttaccagagagctattcaaacatgcttagccgatcactggggcaagcgagtagaagcttatgtcgacgatgtgcctgaggcggtactggtggaagctcaatccaaaaaatgtgtctttggagtgccagcagggaagttgctcggattcattgtcagccaccgagaaattgaagctaacccgaagaaaatcgaggctatcatgaggatggaagcaccacgatcacaaaagaaagtgcaaaggcttactggatgcatggcatctttaagcaggttcatatcaaggttaggagaaaaaggcctaccattgtacaaattgcttaagaaggtagacaagttccagtggaccttagaagttcaggaagctcttgatgcactaaagaagtttatgaccacaccaccagtgcttaagccaccacgccgagccatgccagatcagccggcggaagatctgctgttgtacatctcctgcacgactcacgtgctccgtcactactttgatgaccacaaagtcatagtagtcaccgggtttccaataggatatattcttcacaacaaagaagccattggaagaatagctaagtgggcctatgaactgggagctcacgacattgagtttcggcctcgcactgcaataaacactcaagcactagttgacttcgtatcagaatggaccgagcagcaagtaccagacaacccggaggctgcagaagtatggcgaatgtatttcgatggctcgctgaaactgcagggagcaggcgtagggatcctcttcattgcccctggaggtgaacaactcaaatatgctctccagttgttattctcagcatcaaataatgcagcagaatatgaagctctgatccacggattgaacattgacatatcactgggcattaagaggttgatgcaacaacatttaccagcacaacaattgcagaccatacccgtaacatggccatttgcgtgctggggactagacatgattggacccttcaagaaagctcaaggaggctacactcacgtgttggtcgccattgacaaattcaccaaatggatagaatacaaacccattgcttctctaacttcagccaaggcagtggaattcatacaagatataatattcaggtttgggatacctaatagcatcataaccgacctaggatccaattttactagctctgaattctttgatttctgcgaacaacggagcatccagatcaaatatgcgtcactagcacatccaagagccaatggtcaggtggaaagggctaatggaatgataccggaagcactcaggaagaaagtcttcgacaagaacgaaaagtttgtagggaagtggatcagagaattaccttatgtggtagtgctacctgccgacctcaggtttggggcaccaaggctggtctttgaaagcatagctgaagcagaagctaccaggctagaatatattgacgtactggaagaagagcgattgaatacagtaattcaatcagccagataccagcagaccttgaggcgatatcatgataagactatacgacatcgatccttcgtagtgggagacttggtccttcgccgaattctaacgggagaaggacggcacaaattatcgccgcaatgggaagggccattcatggtgtcggaggtcacccggccaggatcatatcggcttactcaaatggatggcacagaagtggggaattcatggaatatagagcacctcaggaagttttacccttag

SEQ ID NO: 106718 - DNA, 912 bp, Zea mays
  Clone ID: MRT4577_28826C.1
atgccgtttggcctcaagaacgctggagcgacttaccagagagctattcaaacatgcttagccgatcactggggcaagcgggtagaagcttatgttgatgatgtggtgatcaaaacagaaaacttagaaaacttcattgaagatttgcagctggtcttcaacagcctgaggcgataccgccaccaaggaattgaagctaacccggaaaaaatcgaggctatcatgagaatggaggcaccacgatcgcagaaaaaggtgcaaaggcttactggatgcatggcggccttgagcacagtagtcgagcgggcagaagaaggacacacatatccagtacagcatccggtctacttcatcagtgaagttctgggaccctctaaaaagaagtatccccaagttcaaaaactattgtatggagtacttctaactgctcacaaactccgtcactactttgatgaccacaaagtcatagtagtcaccgggtttccaataggggatattcttcacaacaaagaagccatcggaagaatagccaagtgggtctgcgagctgggagctcacgacatagagtttcgaccttgcacagcaataaagactcaagcactggttgacttcatatcaaagtggaccgagcaacaagttcctaacaacccggaggctactaaaggagcaggcgcaggaatcctcttcattgcccctggaggtgaacaactcaagtacgctcttcagctattattcccagtatcaaataatgcagcagaatatgaggctctgatccatgggttgaacatcgtcatatcactgggcattaagaggttgatggtatacggagattcactggtggtcataagccagataaataaagactgggattgctcgactgattctatgggcaagtactgtacagccgtctga

SEQ ID NO: 106719 - DNA, 1194 bp, Zea mays
  Clone ID: MRT4577_28827C.1
atgacgtttggcctcaagaacgctggagtgacttaccagagagttattcaaaaatgcttagtcgatcactgggacaagcgggtagaagcttatgttgatgatgtggtgattaagacagaaaacttagaaaacttcattgtggatctacagctggtcttcaacagcctgagacggtacgggtggaagctcaatccagaaaaatgtgtctttggagtaccagcagggaagttgctcggattcattggagcaggcgcaggaatcctcttcattgcccctggaggtgaacaactcaaatatgctcttcagttgtcattctcagcatcaaataatgcagcagaatatgaagctctgatccacggattgaacattgccatatcactgggcattaagaggttgatggtatacggagattcactggtggtcataagtcagataaataaagactgggattgctcgactgattctatgggcaagtactgtacacctgtccaaaaattagaagacaaatttgaagggctagaatttcatcacgtggaaagagatcgcaacgcagcagcagacgcgttgtcgaaactaggatccagtcgagctcagatcaaatatgcatcagtagcacacccaagagctaatggccaggtggaaagggctaatggaatgatactggaagcactcaggaagaaagtcttcgataagaatgaaaagttcgcagagaaatggatcagagagttaccgtatgtggtctggagcctaagaactcaacccaatcgagctctgcatggaaacacccccttcttcatggtctatggttcggaggcagtggtacctgccgacctcaggtttggggcaccaaggctggtcttcgaaagcatagctgaagcagaagctaccaggctagaagatattgacgtgctggaagaagagcgattgaatacagtaattcagtcagctagataccagcagaccgtgaggcgctatcatgataaggctatacgatatcgatcctttgtagtggcagacttggtccttcgccgaattctaacgggagaagaacggcacaaattttcaccactatgggaagggccattcatggtattgaaagtcactcggccaggatcataccagcttactcaaatggatggcacgaaagtggggaattcatggaatatagagcatctcaggaagttttacccttag

SEQ ID NO: 106720 - DNA, 2250 bp, Zea mays
  Clone ID: MRT4577_28828C.1
atgccgtttggcctcaagaacgctggagcgacttaccagagagctattcaaacatgcttaaccgatcactggggcaagcgggtagaagcttatgttgatgatgtggtgatcaaaacagaaaactcagaaaacttcattaaagatttgcagctggtcttcaatagcctgaggcgatatcggtggaagctcaatccagaaaaatgtgtcttcggagtaccagcagggaagttgctcggattcattatcagccaccgaggaattgaagctaacccggaaaaaatcgaggctatcatgagaatggaagcaccacaatcacagaaaaaagtggaaaggcttactggatgcatggcagccttaaggaggttcatatcaaggctaggcaaaaaaggcttaccattctacaaattgctcaagaaggtggacaagttccagtggaccgcagaagcacaggaagctctcgatgcattgaagaagttcttaaccacgccaccagtactgaagccaccacaccgagccacgctagatcagccagcagaagatctgctgttatacatctcctgcacgactcacgtggtgagcactgcgttggtagtcgagcgggcagaagaaggacacacatattcagtacatcattcggtctacttcatcagtgaagttctgggaccctccaaaaagaagtatccccaagttcaaaaactattgtacgcagtacttctaactgctcgcaaactccatcactactttgacgaccacaaagtcatagtagtcaccgggtttccaataggggatattcttcacaacaaagaagccatcggaagaatagccaagtgggcctgcgagctgggagcccacgacatagagtttcggcctcgcacagcaataaaaactcaagcattggttgatttcatatcagaatggaccaagcaacaagttcctgacaacccggaggctactgaaggagcaggcgcaggaatcctcttcattgcccctggaggtgaacaactcaagtacgctcttcagctactattcctagcatcaaataatgcaacagaatatgaggctctgatccatgggttgaacatcactgtatcactgggcattaagaggttgatggtatacgaagattcactggaagtcataagccagataaataaagaccaggattgctcgactgattctatgggcaagtactgtacagccatccgaaaattagaagacaaatttgaagggctggaattccatcacgtggaaagagatcgcaacgcagcagcagacacgttgtcgaagctaggatctagtcgagcccaggcggaagagtgcaacactttgagccagccagagtcagactctaatgactggagagagcctatcatcaggtatataaagaatgaagaagaaccggatgataaggctgtagcagaacgcattgcaagacagtcggtccactacaccctcatagggggcgcactgtacaaaaggggtgcgacaggagtcctcatgaagtgcatttcatcggttactaggaaaccgctattagatgagatccacgccggacagtgtggaatacacgcagcatccagaactctggttgggaaagtcttcaggtctggtttctattggccaacagcaaagagtgatgcggctgagttagtccagagatgtgaagcttgccaattcttgtcaaagcaacaacacttaccggcacagcaactgcagaccatacccgtaacatggccatttgcatgttggggactggacatgattggacccttcaagaaagctcagggaggctacactcacgtgccggttgccatcgataaattcaccaaatggatagagtacaaacccattgcttctctaacttcaaccaaggcagtggaattcatacaagacataatattcagattcgggataccgaatagcattttaaccgacctgggatctaacttcactagctcagaattctttgatttctgcgaacaacggagtatccaaatcaagtatgcatcagtagcacacccgagagctaatggtcaggtggaaagagctaatgaggcagtgctacctaccgacctcaggtttggggcaccaaggctggtattcgaaagcatatctgaagcagaagctaccaggctagcggatattgatgtgctggaggaagagcgattgaacacagtaattcagtcagccagataccagcagaccttgaggcgctatcatgataagctatacgacatcgatcctttgtag

SEQ ID NO: 106721 - DNA, 256 bp, Zea mays
  Clone ID: MRT4577_28829C.1
aattgaccacaacagcttttgccatttctcaaggaccacagcagatctttgaccgtccgcatccaacgacccacatttgacagcgtgcacacggttcgtgaatgaatattttgagatatcaaaactgttaaacagtgaactgatggaggtgagctagagaaagggtaatctgtgggaggtaaacaacaactgaatgagaatctacatcagaatctatgccatccacattctaattgtacagggccacaggcgcatg

SEQ ID NO: 106722 - DNA, 173 bp, Zea mays
  Clone ID: MRT4577_2882C.1
tgtttaagctcatgttgctatccaaatatccatcttgaggaataccacaaaaaaaaatacctatttgaacatcatctcgctttgttccccttgtgtggcagggttcaccctggcttggtgcctatttgccggcagaaactgtggcatctgtagcttgttgctgcgttgctgct

SEQ ID NO: 106723 - DNA, 497 bp, Zea mays
  Clone ID: MRT4577_28830C.1
ccacaaaaaattttttttttttaaattgtatttttgccagggattattccagggacaaacaaaagggttcttggtcccgggggaattttattatggggggaccccaaaacctagggccccttaaacaagtttgttaaattaaaaggggggggtagggcattcccacccctttgggcgtccctttaaattgggttccgggttgaaaggggtttctttggaggaacagttctttaaaaaagggaggcttgaacaacctttcgggtttcctccaaaggaagttgtttttgcccaagaccaagaaaatcaccctgggaaggggaactattttagggaatttcgccccgatctttttgtttttggacaagggcaaaatttaagggtttgtaaggtttgaaatttggtttggcagcacaccagccagttatttgttgtaaaggtataaatttttaagggacgggaagccgttcccgtggccgaaaaaacccttgaaagggcct

SEQ ID NO: 106724 - DNA, 3138 bp, Zea mays
  Clone ID: MRT4577_28831C.1
atgtgtggagtatctacactcactccgcgtctcagggccattcaatggcccccgaacttcaaagtctccaacatcgagaaatacgagcctaagcaggacccgggaggctggttggccgtctataccaccgctgcccgggccgctggggcaaccgaagatgtgatgactgcatacctgcccatcgtccttgggcaagatgcactgcaatggctacgacacctaccccgacactgcatcgatgattggagcgacttcagtcggtgttttatcgccaactttcaatccctctctgacaagccagtgcagccgtgggacctcaaatccatcaggcggcgaggggatgagactcttcgatcgtacctcaagaggtttcagaccatgagaaatcgtattcccgaggtcgctgaagcagcagtgatcgaggacttctaccggggatccaatgactcggccttcgtccgagccatactacaaaaggcaccgaccacttccgagcagtttttcagggaggcagacctctacatcaccgccgacgaacgggctcaggacctcatcgggggaacgaagcctgccccatctgcaccacgacgtgacgcgaaccaacagaccgacaagcgctgggagaagaggcctcgtgaagaagtccacgccgctggaccacccgtctctcgcgcccgaggggcaccacgcggaggaggacccgatgaacctcgacaacctcagcagcatgaagggggaggaggcggagcattcccacgtgtcgatggagaagttaatgtcatcttcgaaggacacgggtcacaagagagcaaaaggcagcagaagctcaacgatcgacagatactggtggctaccaccagtgcttccaccccctatcggtggttagaacacccgatcacctttactcaggcggatcaatggctcaacttcgatcatccgggcaagtattcgctcctcgtcgatccggtgatccgagagagcagggtaaagaaggtgctggtggacgggggaagcagcatcaacgtcaccttcccccggacactcttaggcttggaagttgcactcaaagagctccacgagtcagacactcctttcttcggcattgtgccaaccgaaggagaatacccgcttggacacatctacgtgtctgtcacctttggagctctggaaaactacaaaaccgagttcctgaggttcgaggtaaccagctttgactgcggatacaatgccatcatcggtaggccagggttggcaaaattcatggccattccgcactattcatacatgatattgaagatgccgggaccacaagggatcatcaccgtgcgcgctgacttccaagatctcaacaaacactgtccgaaggatcccttcggacttcctataatagatcaggtggtagattcgaccgccggatgttctatgttgtccttcctggaccgctactctagataccttcagatcggcctcgcaaaagaagatgaggaaaaaactgcattcattaccccgtttggagctttctgctatacctccatgtcgtttggcctcaagaacgctggagcgacttaccagagagctattcaaacatgcttagccgatcactggggcaagcaggtagaagcttatgttgatgatgtggtgatcaaaacagaaaactcagaaaacttcaatgaagatttgcagctggtcttcaacagcctgaggcgatacctgtggaaactcaatccagaaaaatgtgtctttggggtaccagcagggaagttgctcggattcattgtcagccaccgaggaattgaagctaacccggaaaaatatgaagctatcatgagaatggaagcaccacgatcgcagaaaaaagtgcaaaggcttactagatgcacgacaaccttgagcaggttcatatcaagactaggcgaaaaaggcttaccgttctacaaattgctcaagaagctccgtcactactttgacgaccacaaagtcatagtagtcaccgggtttccaataggggatattcttcacaacaaagaagccattagaagaataaccaagtgggcctacgagctgggagctcacgacatcgagtttcggcctcgcacagcaataaagactcaagcactggttgacttcgtatcagaatggaccgagcaacaaatacctgacaacccggaggctaccgaattatcattcccagcatcaaataatgcagcagaatatgaggctctgatccatgggttgaacattgccatatcactgggcattaagaggttgatggtatatggagattcacttgtggtcataagccagataaataaagactgggattactcgactgattctatgggcaagtatataaagaatgaagaagaaccggatgataaggctataacagaacacatcacaagactgtcggcccactacaccctcgtagggggcacattgtacagaaggggtgcaacaggagtcctcatgaagtgcatttcctcggttactggaaaacagctattagacgagattcacgccggacattgtggaatacacgcagcatccagaactctggttgggaaagtcttcaggtctggtttctattggccaacagcaaagagtgatgcggtcgagttagtccagagcatcataaccgacctagaatccaacttcactagctctaaactctttgatttctgcgaacaacagagcatccagatcaaatatgcatcaatagcacacccaagagctaatggcgaggtggaaagggttaatggaatgatactggaagaactcaggaagaaagtcttcgataagaatgaaaagttcacagggaagtggatcagagagttacattatgtggtttggagcctaagaactcaacccagtcgagctctacatggaaacacccccttcttcatggtctatggttcggaggcagtgctacctgccaatctcaggtttggggcaccaaggctggtcttcaaaagcatagctgaagtagaagctactaggctagaggatattgacgtactggaggaagagcgattgaacacaataattcagtcagctagataccagcagaccttgaggcactatcatgataagactatacgacatcaatcctttatagtgggagacttggtccttcgctga

SEQ ID NO: 106725 - DNA, 798 bp, Zea mays
  Clone ID: MRT4577_28832C.1
atggccatttgcgtgttgggaactggagatgattggacccttcaagaaagctcagagaggctatactcacccaaggcagtggaattcatacaagacataatattcaggtttgggataccaaatagcatcataactcacctgggatccaacttcactagctctgaattctttgatttctgcgaacaacggagcatccagatcaagtatgcatcagtagcacacccaagagctaatggccaggtggaaagagctaatggtatgatactggaagcactcaggaagaaagttttcaacaagaatgaaaagttcgcaagaaagtggattagagagttaccttatgtggtttggagcttaagaactcaacccagtcgagctctgcatggaaataccctcttcttcatggtctatggttctgaggcagtactacctgccgacctcaggtttggagcaccaaggctggtattcgaaagcatagctgaagcagaagctaccaggctagaggatattgatgtgctggaggaagagcgattaaacacaataatccagttagctagataccagcagaccttgaggcgctatcatgataaggctatactacatcgatcctttgtagtgggagatttggtccttcgccgaattctaacgggggaaggatggcacaagttgtcaccactatgggaagggccattcattgtgtcggaggtcactcggccaggatcatatcggcttactcaaatggatggtacggaagtggggaactcatggaacatagagcatcttagaaagttttacccttag

SEQ ID NO: 106726 - DNA, 2043 bp, Zea mays
  Clone ID: MRT4577_28833C.1
atggcgtccctgcacgaagtcaggccactagagctgagtcggcaacggcttcaactggtggcacaacccgggaccggcaccacggtcgttgacaggaggacacgtgtggagtatcggcactcactccgcgtctcaaagccattcaatggcccccaaactttaaagtctccaacgttgacaaatacgagcccaactgccacggttgaaagagccttctcagctatgaaaatcatcaagacagaattgagaaataagatgagaaatgattggttgaattatagaatgccatgggacctcaaatccatcaggcgccaagaggatgagactcttcgatcgtacctcaagaggtttcagaccatgagaaatcaaattcctaaggtcgcggaagcagcagtgatcgaagacttctaccggggatctaatgactcggccttcgtccgagccatactacaaaaggcaccgaccacttccgagcagctgttcagggaggcagacctttacatcaccgctgacgaatgggctcaagacctcatcggaggaacgaagcctgctccatctgcaccacgatgcgacacgaaccagcagaccgacaagcgatggagaagaggcctcgtgaagaagtccatgccgctggaccacccgtctctcgtgcccgaggggcaccccatggaggcaaacgaacattggacgacatcctcgacgcccagtgcccgtaccacaaagatatgcgtcacaccctttggaactgcagagacttcaagcactccatcgggaatggccgacccttccaacctctaccacctcccccaccacgaggaggacctggagaacctcgacaacctcagcagcaggaagggggaggaggcagagcgttcccacgcgtcgatggagaagtcaatgtcatcttcggcggacacgggcttgggagttgcactcaaagagctccacaagtcagacactcctttctttggcattgtgctgaccgaaggagaatactcgcttggacacatctacatgcctatcacctttggaactccggaaaactacagaaccgagttcctgaggttcgaagtagcaagcttcgactgcggatacaacaccatcatcggcaggctagggttggcgaaattcatggccattccgcactattcgtacatgatattgaagatgccgggaccacaaggaatcatcaccatgcgcgctgacttccaaggcgccacgaaatgtttccatgtggccattcaggtggccctcgccaccaaaccatcgatgatttcctccgcgcagctggtcttcaatagcctgaggcgataccggtggaagctcaatccagaaaaatgtgtctttggagtacaagcagggaagttgctcggattcattgtcagccaccgaggaattgaagctaacccggaaaaaatcgaggctatcatgagaatggaagcactacgatcacagaagaaagtgcaaaggcttactggatgcatggcagccttgagcaggttcatatcaaggctaggagaaaaaggcttaccattctacaaattgctcaagaaggtagacaagttccagtggaccacagaagcacaggaagctctcgatgcactgaagaagttcttgaccatgccaccagtgctaaagccgccacaccgagccacgccagataagccggcagaagatctgttgttatacatctcctacacgactcacgtgctccgtcactactttgacgaccacaaagtcatagtagtcaccgggtttccaataggggatattattcacaacaaagaagccgtcggaagaatagccaagtgggcctgcgagctaggagctcacaacatcgagtttcggccacgcacggcaataaagactcaagcactggttgacttcgtattggaatggaccgagcaacaagtacctgacaacccggaggttacagaattatggcaaatgcatttcgatggctcgctgaaactgcagggagcagacgcaggaattgaaagggaaatgtgcctttgggccatttctaagtattttggtgattaa

SEQ ID NO: 106727 - DNA, 658 bp, Zea mays
  Clone ID: MRT4577_28834C.1
gggtacctcgaggccggtcgggtatgaatcagcaatgcacacaaattacaccatcgatcaacattctatgcactgaatgcccctcagtgaattttctcaaggttaacgtcaacagcagcccaatggtagcaaggacagagaacgtgcggatagtcccgacgttcaagatatacaaaggaggggtgaaagtgaaggaaatgatctgcccgagcttgcatgttctgcgctactccgtgcgacactattctgtatccagttcttgagaagctttaggtacccgtaccccaatttcccattttccctaatgcatagagcagagcacccggtcaaacttgcagcatcaccaggcaccaggcaccagcctccagagcattttcaccacctgcgtagctactccccattgagcatgagcataaggaagactgtcaggtggaagagcccctcattccccatctcctgtcgttttcgcctcttcaccgttcatataccgacccattaaattcaatagcttttccatgtttggggctctccacctcattttgtatttgatacttcattttcgttccacccccatcatagtccatatgccagcaccctgtgtctcaagacaactcacacccccccccccccctccccttcttcaacaaaaagcggcccc

SEQ ID NO: 106728 - DNA, 1659 bp, Zea mays
  Clone ID: MRT4577_28835C.1
atggccggagaggccaaaccgagccctagtgtctttggttatttaatcccttttttggatgatgtttattcacatgtgatagcagcctgtgagctgggagctcacggcatcgagtttcggcctcgcacgacaataaagactcaagcattggttgacttcgtgtcagagtggaccgagcaacaaggaacaagcgcaggaatcctcttcattgcccctagaggtgaacaactcaaatatgctcttcagttgtcattctcagcatcgaataatgcagcagaatatggagctctgattcacggattgaacattgcgatatcattgggcattaagaggttgatggaagtgtcacgcccaagcattccctcagatcaggcggaagagtgcaacactttgagccagccagagtcagactctaatgactggagagaacctatcatcaagtatataaaaaatgaagaagaaccggattacaaggccgcaacagagcgtatcgcaagacagtcggcccactacaccctcataggggagacactgtacagaaggggtgcaacaggaatcctcatgaaatgcatttcctcgatcactaggagacggctactagatgagattcacgccggacagcgtggaatacacgcagcatccagaactctggttgggaaagtcttcatgtttggtttctactggtcgacagtaaagagtggtgcagccgagttagtccagagatgtgaggcttgccaattcttgtcaaagcaacagcatttaccagcacagcaactgcagaccatacccgtaacatggctatttgcatgctggggactggacatgattggacccttcaagaaagctcagggaggctatacacacgtgttggtcgccattgataaattcaccaaatggatagaatacaaactcattgcttctctaacttcagccaaggcagtggaattcatacaagatataatattcaggtttgggataccgaatagcatcataactgacctaggatccaatttcactagctctgaattctttgatttctgcgaacaacggagcatccagatcaaatatgcatcggtagcacacccaagagccaatggtcaggtggaaagggctaatggaatgatactggaagcactcaggaagaaagtcttcgacaagaatgaaaagttcataggaaagtggatcagagagttaccttatgtggtttggagcctaagaactcaacccagtcgagctctgcatggaaacacccccttcttcatggtctatggttcggaggtagtgctacctaccgacctcaggtttagggcaccaaggttggtcttcgaaagcatagctaaagcagaacctaccaggctagaagatatcgatgtactggaagaagagcaattaagtacagtaattcagtcagctaaataccagcagaccctgaggcgctatcatgataaggctatacgacatcgatctttcgtaatgggagacttggcccttcgccgaattctaacgggagaaggacggcacaaattgtcgccgctatgggaagggtcattcatggtgtcggaggtcactcggccaggatcatatcggcttactcaaatggatggcacggaagtggggaactcatggaatatagagcaccttaggaagttttatccttag

SEQ ID NO: 106729 - DNA, 278 bp, Zea mays
  Clone ID: MRT4577_28836C.1
atcatcttacaagacatcatgcgtgcgcggacctgcttatcaggcttccaagctgaggtggcgtccctgcgggctgatcgctatgtgaaagagagatgctacaccccagggcgtgcgtggactctgtttacacgaccccgtaggagtcacctgtggcggggctgatacactccgtagaccgatctgagcttcatagaggatgatcaatagtctagtgacctgaacccggctgattaatctcctcggacttctgctcaacgtgccatccctcgactgaa

SEQ ID NO: 106730 - DNA, 361 bp, Zea mays
  Clone ID: MRT4577_28837C.1
ctcgcccggctgccccgcaatcagagccattagctggcagcagcagccgggtcctcctccgcctcccttagcagccacaccccgtccgtcaccagaggaagaggaggaggatgtcgggatcgaaggtgtacacccttgaggaggtgggcaagcacaacaccaaggacgactgctgggtcgtcatcggcggcaaggcgcacaatgtgaccaagtgcccggaggaccaccctggaggtgatgatgtcctgctgccttccactgccaaggagggtaccgatgattccgaagacatggcggagggcaccaccgcccgtggtgtgatggacgcgcaccccgccggggagatagatgcaggccacca

SEQ ID NO: 106731 - DNA, 550 bp, Zea mays
  Clone ID: MRT4577_28838C.1
gccaaacgccctcgcttgacttcctccacacagctccctcgacgatcgcggacccggccctaagaagatcagatgattcctaatatctgtcctgccaacttgcatgatgtcttcttacagaactagaaagtggccacgtgtcacatatatgtatgctctgaacacatcaccctgaaaatcctgcatgtgtaacattacacgaccccgataccccgaaaaatgcctattatgcaaacactgcaagagtcccatccactctgagagagcaacttgatgaggaacatctcacttaataccgccctcgccacagatatcgtgcaatggcgaaaacatgagagaccgcctgtccgtaactctatacgcacatctcgaggcaaactcgagatatatcttccctgctactatgaacatgcctgacatgccagcaaacaatgtcaaaccctagatcccgtctactcagaacaataagactgtatgtggagctgaccacctctatcatgaccttgatgccaccggcaattattgatgtcatctaacatcataggcaact

SEQ ID NO: 106732 - DNA, 431 bp, Zea mays
  Clone ID: MRT4577_28839C.1
gttaatcaattttcctttaacctttcttttttcaaacatttgcaccaaacaaggtgcctggggaaaacaatttggccacagaaaaaaagaaaaaaacccgcgggaaaaccgggcgggaaaagagtcgcaacaaaaaaggcccacggatatgggaggaacaaaacttaaactggggcctaaaaacctttttttgccaaccctttggccaaaaggagaggaaaaaaaccgggggaggggctataaccacatgggagcaacacctggaaaaaatatagaaaaaaaaaaaaaagcggaaaatttatcccgaaaaagccccaccaacaaaaagggttggccaactaaaaacacgcgaaaaaaaatgggccaaaaaatcattccaagggaacaaagggtccaaaccgctcaaaacccctgggtccaaccgggaaatc

SEQ ID NO: 106733 - DNA, 173 bp, Zea mays
  Clone ID: MRT4577_2883C.1
cgtatgcgtgcgcttccgctcggtaccatggcacgggtaacaggacatgcgatgccacttgaaagcattaaatgacctgttccacttcgtgctttcgataccagtacagcgcccggctggccatgccagaaagaaggctgatggctgcaacactgagcgagcaacagctggac

SEQ ID NO: 106734 - DNA, 868 bp, Zea mays
  Clone ID: MRT4577_28840C.1
aacttctagtgtctccccctctttcccttctcgcagcagcagatcactagctcactccatggtggagagagtggttggtggccactaatggcgcgcctctcccgtcgccgcttcctcctctcgctccacgtcgcgctgctgctgctagtcccctgctcctgccaggtcggggattcgtgctcggcggcccgcgactgcggggtgggcctctactgcggcgattgcgccgccgccggcaggacgcggccgtcctgcatcagggacctggccatccagcccacctccatcgtgaaggggctgccctttaacagatactcatggctggtgacccataattcattctccatcgtcggcgagccgtcacgcaccggggttgagagggttacgttttacaaccaggaggacactgtcaccaaccaactgaggaatggagtgaggggattgatgctggatatgtatgacttcggcggtgatgtctggctctgccactccttgcaagggcaatgctacaacttcaccgctttcgaaccagcaattgacacactgaaagaggtggaagcatttctgtctgagaatcccacagagattgttacaatattcatcgaggattacgtacatgccccgatgagattgagcaaactgtttactgctgctgacttgatgaagtattggtaccctatctcagaaatgccaacgagcgggcaggaatggcccactgtcacagatatggtcgcaaagaaccacaggttgcttgtgtttacttccgatgcttcaaaggagtctagcgaaggaatagcttaccagtggagttatttgctggagaatgagtctggagatccgggtattgaccctagcacttgtccaaaca

SEQ ID NO: 106735 - DNA, 368 bp, Zea mays
  Clone ID: MRT4577_28841C.1
ggccgaccacgcgtccgaagcaaaccataaacgtaacgccaggcttttagactttgacgcctgactccacacactgtgttgcctgtcattcccagagctttcttgcatcgccaggaatccactggaaattttgtaattggactacagaactgtatccatcgacgaacgcgcatggagttggccatgggtcacggtagggaacacagaccagcaccgcggtcctctcccaccagctcattgatcctgtcctacctgtacggtattcctgcggagaccttcgaattttactcgatcgaacacaacatgaaacgggcacgcggtgccagcccccctatgactgcgatgaccaatccgaacgatgatggtta

SEQ ID NO: 106736 - DNA, 318 bp, Zea mays
  Clone ID: MRT4577_28842C.1
tttttggtggttttttttttttttggttggtttttttttttttttttttttttttggggctcacatgggaggggccccctatcaccatatattcatttattttgcaagggggcgtttatatgaaccaaccacatatgcctgtcatcatccagtacaagaaatttttaccattattatccgactccagttttattaattgaccatacctacgtacataaaccccacgactgttcaggtcccccagaaaactagtagctagtaacatgcaaacgtgctcgggcacggggcattgttccattgtaaacagaccgataccac

SEQ ID NO: 106737 - DNA, 335 bp, Zea mays
  Clone ID: MRT4577_28844C.1
ctgctgcttggggcgtaacacgcagagaactccagttctcttacttgctactaaccatggtgtccgccgcagggaagccatggatccgtgctcccatatcgccgaagacactggctactgaccgatttacagtgacggagcactccatggtttggtggactagctcacccggcgccgactctttcatctgagacgccgggtcaagctccacgaacagagggctcacagcgacggccgactagacgctcctcttgacctcggggaaacctttaccggtcccgatggccgcaataaggcggcgccgcttgaacagttccacgggggccgctgtgtca

SEQ ID NO: 106738 - DNA, 359 bp, Zea mays
  unsure (1)..(359): unsure at all n locations
  Clone ID: MRT4577_28845C.1
acaggcacacgtactaactaaactatacatggataatgagctgggggatccttttgggtctacgagaatcatcaggcgacgaangaccctttacacgcacacaggtacaagatcacagatgaagtacatgtcctggttgatgaaaccgcctgcgattacgtattccacgagcaccaccagaagaaaatataccacaaagacgccgatgaagccactgtctagaataagcaacaccacctattcgaatgaccgtaatactccgactgctcacgatccagctagctagctctggtgcacacaaccacacaacatgttaattctgtactgcatgcgtgacgtatttgatcgatcacaataat

SEQ ID NO: 106739 - DNA, 344 bp, Zea mays
  unsure (1)..(344): unsure at all n locations
  Clone ID: MRT4577_28846C.1
cataagcgtatgcgatccaagcttgcgtgcaggccctgaaccgaagaaatagaccaggtcaagcttaaagnagcaaccgtcattggagatggactggagtgaagaccatgggctggctgccacacgcatagacttgataacaaactgctagagtagcgggtgctgctttatgctgctttctaagcaactgagcaggtgtttgtgactgaaagaggtctcgttgatcaatctgacagctgcccaatgctggagtcaagcctctacttatgcagacggatgaccaacgagcgcccttattaccatcacgcagaaccgtacgaacttcacttgctctcgactatgca

SEQ ID NO: 106740 - DNA, 282 bp, Zea mays
  Clone ID: MRT4577_28847C.1
tggcgctggtgatgggctcccggccgtacaccaggggcatgtgcgagggtgttgagcacgtggtgcgctccatgaggccaggcggcaagcggcgggtggtcgtcccgccgggcctcgcgttcggcgacggcggcgccgacttcggggaggagcacgtccagatcccgcccggcgcgacgctcgagtacgtcgtgcaggtcgacaaggtgtccatcgcgccggcgtgagggcctgccgaggcgggagccggggcgaagctacattatttttgggtgcatttgc

SEQ ID NO: 106741 - DNA, 251 bp, Zea mays
  unsure (1)..(251): unsure at all n locations
  Clone ID: MRT4577_28848C.1
gacaccagaaaacagggcacgaaggcagaaacncaaacaaaggccacagaagngcaggcagacnnaacncnggngnaacacacagagcgcnaaaggaggacncnncagccagagccaacaganaanacncaaacaaaacncgggnnnccggggagggggcaaggcanccaagcncaacggcncaagccgcggagaaccagggggganggnngcgcgnccacggggccacaccnngagggaaccagagagcg

SEQ ID NO: 106742 - DNA, 354 bp, Zea mays
  Clone ID: MRT4577_28849C.1
gctcggaattcggctcgtgggtgatcggggccttctttttcacgctcgatatcctggccaacaacggggcgtttctgatgctcatgccgtcggcggaatgggcggccggggactacgcaccgagcatggcaaccaacctggaggggagctcgcacatctcccaggtagggcacccgttgatacttaactcctcaccagccggaggggtaagcatagtaaatgactgcgacaccccagcaggcttgggttatcgcaggagagattgtgcagtgccaccacaggcgggactgaatcagatgacgaggaacctatgtggggagtgggcctgcaataggagacttgcggactgagata

SEQ ID NO: 106743 - DNA, 399 bp, Zea mays
  Clone ID: MRT4577_2884C.1
cggacgacccacgcgtccacgccgacattcttgacctgattaacaaacggtcctacaccaaccttaaatacccaattccggctcactccaagagaacccaggacacaccggcttaattttaagaaggcttacaagaggcgcacggtggcggtctttcggtaacatctaccacaagggtgcgcgcgcgcgctatatagtcattttgatattcgagtacataaaaggcgacatctacgcgctgcagcaagggagacagcttatacatagactcatgatataaccatgtatttgctcctttcatccaaaaataattgcccaccatatccaataatcaataaatcttaatcttcaccaatcatatccatatcttgcgtatctaatattaaagaaagtgttact

SEQ ID NO: 106744 - DNA, 371 bp, Zea mays
  Clone ID: MRT4577_28850C.1
ttccacaaggccggccgggatcactcttttttactcttccacggatacgttagagagaaagcgtgctcaccaccgacttcgtacgcgagttcagatatgtgtctaccaggaagggctcgtgatgctccacttgtgcgtggacgacgacgtccctacttctcttgctgctgctggagacatctcatacgactcaatgctgtagcgcgaacaagagaccaccggccgcagcctgctgaagtctactacaaactgaatggcgagctttgagggcgcaaaatacactccgatccctatgtagagaaagggcgcgcaggacctagctacgcagtctagctgtgctctccatgactatgtgtgcgctgactccacct

SEQ ID NO: 106745 - DNA, 658 bp, Zea mays
  Clone ID: MRT4577_28851C.1
ctcgaggccggccggggaacgattcccatcacagctactagaacccccccgtatcaattcatcactgacaaacattcctctagctatattggtacacgtacctccatttacaaacgcccgggacgtcggagcccacatcagatcttaaggtcaagagaccggatgtgaatgagatgcacctaccccatatacatgtccaccctattgaccagattactgaactgctattcctactgacaaactgaggagatcaatatgatcttgttaatggtctacgggaggatgctaaacgcatcaaaaaccctggcactacattcagatggattaccgagaactgataccagccactgactatagcaaactggagaaggctctcctagctcacctaatagccaccttgctactgcgcctattgctctcctccctgagagtactatgcaatatgcaaaaacgactcttaaggaacttgtaatgatctggctccttgctccagtgctgatggacatcactaccctttatatactgaaatgcttaagcatacttggttctgacatcactccgctatatatacctagtacatgcatccgtgaagtgtgacgttcaaactacattaatgcacatgagtccacatatgtccattttttgttgcctttagcga

SEQ ID NO: 106746 - DNA, 220 bp, Zea mays
  unsure (1)..(220): unsure at all n locations
  Clone ID: MRT4577_28852C.1
annagnaacggncgccagagagcaggaanncggcacgaggccaacncgaagcnngcgnncnnngagnagaggncggcagcaagcggnagagcgagaggncgagaagangaagagcagcactctgggggcgancctagntctccaggcccttcttttttttacgggcgtggccaaaggaccngcagggccgaagaagcagagctggcgcggcgagggcacc

SEQ ID NO: 106747 - DNA, 504 bp, Zea mays
  Clone ID: MRT4577_28853C.1
atgaaatgctgaagttttgtgcatcaaacaaaatatatccaaagatcaaggtcatctaaattgacactatcaaccaggctctcaagaggcctgtaaatcgtgatgtgaaataccgctttgtaatttcagaaataatctattacctttgctgcgttcagccactgaacgagacatatacatctgtatgttacttttcttgcacatagcatcttgttcaagtacgacaccgtgcacggccaatggaagcacagcgacatcaccctcaaagactccaagacgcttctcttcggccagacgccggtcaccgtctatgccatcaggaaccccgaggagatcccgtagggtgaggctggtgctgactatgtccaaaagtccaccggtgtcttcactgcctaggacatggctactgcacatctgaagggaggtgccaagaatgttggtatatctgccttaagcaaagatgcacccatgttagtagttcgagtcaatgaggacatttacacc

SEQ ID NO: 106748 - DNA, 667 bp, Zea mays
  unsure (1)..(667): unsure at all n locations
  Clone ID: MRT4577_28854C.1
gaaaaagaaacgcaaagggggagggagggaggtcggacgcgccccgccggtttccgtctctccgttcatcccgctcgccgtcgtcgggcggcggcaccaccaccaccatggccatgtccaagccgcagcagggcgaccccgccggcttcctcgacctcgtcggcccggacctctccgcctgcgtcttcgcccgcctccaagaccccgccgacctcgcccgcgccgccaccgtctcccgcccctggcgcagattcgtcgaggggaacggcttcctcaaaaaggtgtgcgtccgcaagttcccggagctggccgtcctcacggccgcggtggagggtgcgcagatcgcccgaccccgcccccgcccccgggcccatcgnggcgggcggcggcnggcgccgaggccaacgagcacaggatctactcccacctctacggcgcgctcgtcgccgccagcccccccgtcgactgcatcctgcactgcgtcggcgcctccagcaccgacaacttccccgacgagaccatcgacaacaccctcgagccgcaggaccgcgtcaacaaccgcttctcctactggtccagcgccggacaggacgaccccgacgtccccgagacgctcacctacagggtcgtctccgacatctgcgtcgtcgatgagatcaggatacag

SEQ ID NO: 106749 - DNA, 661 bp, Zea mays
  unsure (1)..(661): unsure at all n locations
  Clone ID: MRT4577_28855C.1
cctcgaggccggncggggtgctttcttataggtggagtgccttctactctctctccggatcgggttaggtatcgtgaggttctccgagggttcgaggttacgggtgacgagcgtatcaatgatgtcggggtggtatgttgagtaccgctgcttcttcgtcggcctctgctgggacacggacgaccactccctccacaacgccttcagcacctacggagaggtcctcaaggccaagatcatcctcgatcgggagacgcataggtcccgcggcttcggcttcgtcaccttctccacggaggaggcgatgagaaacgccatcgagggcatgaacggaaaggagctggacggacggaacatcaccgtcaacgaggtccagacccgcgccggccgtgtaggcgctgtaggaggatacggaggcgaccgaggaggcggcgtctactgcgtatgacgggcgccgtgatggcggtggcggctagggcggcgttggcggatacggtgtcggggacggctactgcggtggtggcgtaggctacggtgttggcaaccgtgatgatggctacggcaactccgacgttaactggaggagctgagagccggatcccgtgcgaacaagagatacaggtcgctaccgtgatgcatactctagtccagaagacttatc

SEQ ID NO: 106750 - DNA, 250 bp, Zea mays
  Clone ID: MRT4577_28856C.1
gtgtttgtttaattattatttttttggtctgactggctatatatgttgtacgtgattggatcgattattcattcgcttcagtgaccataaaaaaccatgaggacccccaatagagagcctaaaacaaaaaaagataaacgcaaaggcgggagggttcttgattgttaaaaaaaaaaaaaaaaaaaaaaatcaacaacccaatccctgacaatcggggtaggggggggggcccgaatacctttttcccgcc

SEQ ID NO: 106751 - DNA, 260 bp, Zea mays
  Clone ID: MRT4577_28857C.1
acaagtgcacactcacctttcacctcacacattcatctaaatagctaacgccgaaagcgagggcaacaaaaagctcgaggtgggcggatagaaaaaccacatcctacacctcctggacttctgaattagcccattctgccagcgctgccgcatcgcgatggactagaagtgcctgtcctactagtaccttcagcaggacctgacgaacaagagccatcttctcctacgccccaacccggttcataagaagatccccttac

SEQ ID NO: 106752 - DNA, 131 bp, Zea mays
  Clone ID: MRT4577_28859C.1
ggcacgagggagaagcctggccagccatggacccgcccaaccctaaccccaacgaagccccggcgctcccaggcgaaaccgcgggcagactcgccagcctctccctttgagggaccagggacctttccccg

SEQ ID NO: 106753 - DNA, 306 bp, Zea mays
  Clone ID: MRT4577_2885C.1
tgtcacagaaatagagggccgccattttttaacctttcttgccgaaaagccaccctctactaaaagaaaaactcacttcaaaacacatacaccacacccacactccactattgaaacacataccaatactaaataatagtgagagaaatgacactccctctaaatatgctacccaaccataccatcatatgctaccatctctaaatctcgagctatacacatacgaaaatacctatctactatcagatgactcccgtcggccagcaaaggtgtcgtaatatacattgcaccacaggcagtatcaca

SEQ ID NO: 106754 - DNA, 399 bp, Zea mays
  Clone ID: MRT4577_28860C.1
tttttttttttttttttttttttttttttttttggtgtgtttttttatttttttttttttaaacaatgatcattatttggcaagacaactggaatacaatttctttgttaagattaactaatttacaatgggggggaccaaatggtggtgttgcacaaagggtcaagacaaacccccccacacaccaaactttcccgaaacaaatagaggaaagtgttaaaaggtttaaccttgtacacctgttttgtgccaaaattttgttgtccaaaaagagggggggcactgtttcaaaccaatggtcacacccttattttttttgggaaaaaacgctgtaaaaacttcaccggttttggtacggaaagaatttttttttttttcctggtctacaaaagtggtatc

SEQ ID NO: 106755 - DNA, 1202 bp, Zea mays
  Clone ID: MRT4577_28861C.1
aacaccttccacaacgcccgacggccgtgccggttccctgcctccgccgcgccgcgacgccacctcacacgcactaatccttgccattgctctgcgtgacaacattcaaatggatacggcaagcgcccccggcctccagtaccttctgtgcctcgcctgggtcgcggccaccctccccatcgccgctgccgcgctgccgatccccagggccgccggcggccgtttcatccatggactgctctgcgccttttcatcccgcgggaagacaggcaggccttcgtcctcgtcctcgtccaaggtcctgagacgcctatatgagactgaacatgtcttccactacagcccttcagctcgaatgcacatcataggatatctaacgggtattttctactatgtggctgcacctttatcgcttgctagttcttgtcttcctgaaacaatacagtatcttcggtatcaaatagctgagttcattgtgaagggtcgggcaaaaatgccagatctagcaattgtcccatcacatcttttgaagcctcttctaaagctgaggtggtgccagtggattggtgctattattttcatctgggggtcactccatgagatccactgccatgcaattcttggatcattgcgtgaacacaagatcctgatgaatatgtaattccttgcggcgactggtttagtcgtgtgtcgtgccctcattaccttgctgaactagtaatatatttttggcatgttgatagctagcggtggatcagacatttcggtgtggttcctatacctttttgtgataacaaacttgtcctttgcagcggtacaaacacataaatggtatcttcggaaatttgaagattaccctcgttctcgttacgcaatcattccatttgtatgctagacgtgtccagaaatgccaaaagcatctgttgctgttttcatccgcttgcacaagtccgacatgcaaacagatattcatgtaaatgtgactgtaccaattgaagcgctgcaatgtttaacttaagtagttctgatcattctgaatgtactcataatgttatgtttgtgtatgtagattgtaatagacaattagacagacatttgatgtacaataggattaattaacactttctagcattgaaaataaagtcctccaggactagagactgtaaaaaaaaaaaaaaaagggcggccgccaccgcggtgga

SEQ ID NO: 106756 - DNA, 633 bp, Zea mays
  Clone ID: MRT4577_28862C.1
ttacacgcacacctcaaaacaagttcagttcactacacaaggttacacagaccatcgatggcaaaagacaaaacaacctgacctagcctaagcctgctactgttctgcatccagtgcaagggcaaggaggtaatatattttggcatgttgatagctagcggtggatcagacatttcggtgtggttcctatacctttttgtgataacaaacttgtcctttgcagcggtacaaacacataaatggtatcttcggaaatttgaagattaccctcgttctcgttacgcaatcattccatttgtatgctagacgtgtccagaaatgccaaaagcatctgttgctgttttcatccgcttgcacaagtccgacatgcaaacagatattcatgtaaatgtgactgtaccaattgaagcgctgcaatgtttaacttaagtagttctgatcattctgaatgtacttataattttatgtttgtgtatgtagattgtaatagacaattagacagacatttgatgtacaataggattaattaacactttctagcattgaaaataaagtccttcaggactagagacttaccaagtactccctccaatttaaattgtaaaagattctggcccttttaaatacatggtt

SEQ ID NO: 106757 - DNA, 412 bp, Zea mays
  Clone ID: MRT4577_28863C.1
ccaaatcctccgggaaccatttgcgcggctacgattcgctcctgcaactgcagcatagaaagtgacgtcgccgtcgccgcattcgcgccgccctgggctccgtccaactaccgttgcaaacccaggcttgcctgacaccagaagctgctcccctctccgatccagcggcgccctgttcgactgcggcggcggcggctaccatcccgatccggtggcgccccggccttgctcgattcctacagctgctatccttttctacctgcagcgccctgctccactctagtggctgctcccttcccaatctgggttctttatcaggagggtggcctcgccgggagccctagcggtgaggggtgtcaggaagccgttggcgcggcgttatatttcaccctcgaggaacaaggagaacctg

SEQ ID NO: 106758 - DNA, 1589 bp, Zea mays
  Clone ID: MRT4577_28864C.1
tggacacctcgcggccggccgggctcgtcggcaggagttccccccttcccactccaagcaccaagctaccaacccgaactgcctcacggccgcgccggtcactgcctccgccgcgccgcgtcgccactcgccaccccgcgcgcactaatctttgccatggcgctgcgtggcagcatccaaatggatacgggaagcgggcccgcgctccagtacctcctgtgcctcgcctgggtcgcggcgaccctccccatcgccgccgccgcgctgccgatccccacggccgctggcggccgtttcatccatggcctgctctgcgccttctcgtcccgcgggaagacagtcaggccttcgtcctcgtcctcgtccaaggcgaggttcaccgttccacaaaaattcttcttccatttttatgtggtcggtgtggttgtgacgactagcttgctacttgcaatatggttctatgcatacatgaaaatgacacctttgattccagaacaatcgagttactccacaattgctagtcatcttgttggtggttcaaattcattccatttggcaaatttctggtcatcacgccccatggaacacaagtatcgtgtctggcgtactgtatttgtacttatattgatggaaattcaggtcctgagacgcctatatgagactgaacatgtcttccactacagcccttcagctcaaatgcacatcataggatacctaacgggtattttctactatgtggccgcacctttatcacttgctagttcttgtcttcctgaagcaatacagtatcttcgatatcaaatagctgagttcatagtgaagggtagagcaagaatgccagatctatcaattgacccatcacatctcttgaagcctcttctaaagttggggtggtgccagtggattggtgctgttattttcatctggggctcactccatcagatccgctgccatgcaattcttggatcattgcgtgaacacaaagattctgatgaatatgtaattccgtgcggtgactggtttagtcgtgtgtcttgccctcattaccttgctgaactagtaatatattttggcatgttggtggctagtggtggatcagacattccggtgtggttcctgtacctttttgtgataacaaatttgtcctttgcagcggtacaaacacataaatggtatcttcagaaatttgaagattaccctcgttctcgctacgcaatcgttccatttgtatgctagatgtccccataaatgccaacagcatttgttgtctgttttcatctgcttgcaccagtcaggcatgcaacagatattgatgtaaatgtgactatgcaatgttgaacttaagtagttccgatcattctgaatgtgcttagaaggttataaggttatgtttgtgtatgtagattataacacacagatatttgatgtaaagtagtattaattaatactttttagcattaatgaaaatgaagtccttcagaaccagaggctaatcaaaaaaaaataaccatctaacggggagtgaaacaaatggtgttattgttcctcataaaaaaaaaaaaaaaaaaaaaaaaaaaaaaaaactcgag

SEQ ID NO: 106759 - DNA, 887 bp, Zea mays
  unsure (1)..(887): unsure at all n locations
  Clone ID: MRT4577_28865C.1
ggaaaggagcaaatcatggatgaagtcctttggccactgaatttcancacaccaaaaacccaggacttttggacttgtatgctgatggcaactcaatatacaagcatgtgactttgcacaactgaacagtctccattttcctcatttgtttgaagactcatacaagcctttaaattaccttatctgataatttggctttttattagcattgacagtgctgccaaattatatttgtagctatattgccagtggatgcttgagtaaaaaaaaatctcaatcaattttaggatcaatgagattgaattgcaagcaggtaggttgtaagcaagcaaaacacatggctagatcatgacctgagctatccagtgcacgacaggaaggtgaattggtcaggattctcagtcctcgttggtgccattgagcttctgttgtacaagggctaccagcctagaatgcactttgcaatggccgtaatatcacggagcggcgtcctggggtaccatccaggaagcgggctcctctttgtcggtgtgaccctcaacgcccaaaccggcagcaggttctccttgttcctcgagggtgaaatataacgccgcgccaacggcttcctgacacccctcaccgctaaggctcccggcgaggccaccctcctgataaagaaccctccaccaccaacaccaccagaaaggtcagctaggtcctcactcctgccgtccctggactcaggcatctcggggctctgggtttgcaacggtagttggacggagcccagggcggcgcgaatgcggcgacggcgacgtcactttctatgctgcagttgcaggagcgaatcgtcgccggcaaatggttcccggaggatttggaatggagggaggagcagaggattt

SEQ ID NO: 106760 - DNA, 261 bp, Zea mays
  Clone ID: MRT4577_28866C.1
caatcgagtctgaagggaggcgatttgcgttgaggaggtgctcacctgccactcgaatcgacggtcacagtcttcgttggggagatcgaaggtagctggttcttcggctagggagaaaaagacgggctcagctcgggttgtggtgcacgacagcgagttgaggaggtgccaggcatcacggtgcggcgtcgggctcgctttatagacggggaaaggcgattcgcctgagaaaaatctcagcagacgactgtgcgcgacgac

SEQ ID NO: 106761 - DNA, 1383 bp, Zea mays
  Clone ID: MRT4577_28867C.1
gaccaaacacctatgtcatgcatagatactatgctaaatttctcatggtgccgactggcttacatattgaagttcatataatacaagcggccacaacagaaaatattcatacactaatacctagtggttatggtattagtggcttagtgcggcagaaaagtaaattaaagatttatttgttcaacggcccacagggatacacagaaaagtatgcatacatcagcaatagcatgaaccagatcacacctcacactagtagctgcagtcctagaacctcaagcagagagccaatggcttccatattcttgtcctcgagaagggaacaaggaatgaccgtgagcatcacgccacggcaagtattggaagaagagcagcacagacaagaggaaggaggacaagcctgaggtggactttctcttcccccagcaaagtacagcaataaattcatcgcatggacataagattgcgcctttgggtggccctcctggaggcctgggcagccctcgatgttcgcttcaggtttttcctcaccaacttctctaccttctctattgaaccggaaagtttcttgtcagcaagggcaggatccattggtttggatggagtattcaatgagccttctgctgccaaagaagacacattcaaattgtcatcagccaaaacagtagcagggtttgctacagcttctctttcagttgagccggagccagatgcaacagcatgggaggcttcagcaatgtgagcatcctgctctgcttgtgctggagtagtcacgttcacagattgtgaagactgctcgatcctttggcttcgctgctgagctgcagcaatccttgaacgacttctctgaatagcctgcgcaatggccgtaatatcacggagcggcgtcctggggtaccatccaggaagcgggctcctctttgtcggtgtgaccctcaacgcccaaaccggcagcaggttctccttgttcctcgagggtgaaatataacgccgcgccaacggcttcctgacacccctcaccgctaaggctcccggcgaggccaccctcctgataaagaaccctccaccaccaacaccaccagaaaggtcagctaggtcctcactcctgccgtccctggactcaggcatctcggggctcagattgggaggggagcagccactagagtggagcagggcgccgcaggtagaaaaggatagcagctgtaggaatcgagcaaggccggggcgccaccggatcgggatggtagccgccgccgccgcagtcgaacagggcgccgctgggtttgcaacggtagttggacggagcccagggcggcgcgaatgcggcgacggcgacgtcacttctatgctgcagttgcaggagcgaatcgtagccgcgcaaat

SEQ ID NO: 106762 - DNA, 612 bp, Zea mays
  Clone ID: MRT4577_28868C.1
atttgcgcggctacgattcgctcctgcaactgcagcatagaaagtgacgtcgccgtcgccgcattcgcgccgccctgggctccgtccaactaccgttgcaaacccaggcttgcctgacaccagaagctgctcccctctccgatccagcggcgccctgttcgactgcggcggcggcggctagcatcccgatccggtggcgccccggccttgctcgattcctacagctgctatccttttctacctgcagcgccctgctccactctagtggctgctcccttcccaatctgagccccgagatgcctgagtccagggacggcaggagtgaggacctagctgacctttctggtggtgttggtggtggagggttctttatcaggagggtggcctcgccgggagccctatcggtgaggggtgtcaggaagccgttggcgcggcgttatatttcaccctcgaggaacaaggagaacctgctgccggtttgggcgttgagggtcacaccgacaaagaggagcccgcttcctggatggtaccccaggacgccgctccgtgatattacggccattgcaaaggctattcagagaagtcgttcaaggattgctgcagctcagcagc

SEQ ID NO: 106763 - DNA, 186 bp, Zea mays
  Clone ID: MRT4577_28869C.1
atcctctcccaaacgctcgccctctccggctccactcggatcttctccgtgggcgatcaaaacggctgtgcccatgtacgacatcgagtccagatgacagatctctgtctgtatactgctgtctgctaacaccctaaacgtaacggaaatgagtgcagctcctgatcgcccactttacccagtttc

SEQ ID NO: 106764 - DNA, 185 bp, Zea mays
  Clone ID: MRT4577_2886C.1
tctcaactcatattctcaatcgggtttcactattgtactattagccccaacaacaggttaattttcaattcatggaggacctagctctatttatcctacaagcactaattgataagctaaatatcaaatatatctaaatactatatattaataacaatactaatatataccatcctttagatatt

SEQ ID NO: 106765 - DNA, 612 bp, Zea mays
  unsure (1)..(612): unsure at all n locations
  Clone ID: MRT4577_28870C.1
cgactgtttatcatcagcaacctcagtcacggtgggggatggaaagccttctttgttctgggaaagcgcctggcttaagggtatgacactgagagacgcctatccgctattctctatttccaggggggaatagatccattcaagaggctctctcaaacaactcatggatacatgacctaaattttcatcatgatgatttttcatctacgcacctccatgaatactgtcacctgtgggtagaggtgaatcgggttcgcttattgaaaaatacccctgatcttactcagtggaagcttaccccgagtggccagtacacatctcggtctgcctaccaggcgcaattcgttggctccacactcactaactttaacaacataatttggagagtctaggcacctccaaagtgcaaattctttagttggcttgctgttcaaaacagactctggcaacctgtagactctgtgcaccagtggtggtcgaatctcgcggcatctgcagtgagagacaagaagggctngcgtaccctcatcattctcgtctgttggaggattcggtgcgagagaaactcgcgaattttttaacaaaagggacatctctaccatagactcttgc

SEQ ID NO: 106766 - DNA, 469 bp, Zea mays
  Clone ID: MRT4577_28871C.1
aaaaacgggcagctttttcccacatttttcccggttaaagccccccccgggtttcattggggcaatgggaaaagggtaagacccccctaattgggagttcgggatagatccaaatttaattttcccccataccacaggccataaagggggcctcagattaccatgctccaaaaactcccacagggggcactgggggggggggcaactcgattcaaccgggctcatgaacaggggggggggggtcccaataaggggcccttcccattcttttaagaagccttgggtgtggggactccggaataaacgccttttttttttaagggagctttttttgggttttcgggttcccatcagggacggggaacggccttggttttggggctttactaccctgggagcttgacggtgctgaattgggagatttttttgccacctttttccgcaaatccgagggagggggggtgctttt

SEQ ID NO: 106767 - DNA, 409 bp, Zea mays
  unsure (1)..(409): unsure at all n locations
  Clone ID: MRT4577_28872C.1
ccggaatacttggggcggncgnncnnncttttttttttttttttttttnnnnnnnnnnnnnnnnncnnanaaaaggaacaacggatacacatgcgggcttgcataggatcataaaagtagccaattgtgcgcgaaacgccctaaatccaagaggagagtcaaacgttttttactatacacgtgacagagtgcccacatagacagttatagtgccaaaacacatgctcatgaggaaccattctcattgcatcttttgcttcataagcctctcgagctcgttcacgatttggatttgataaaaatagagactgttatacccaaaactggaggccgttatttgggccattgttagcattttgttgagattaaaaacaccaatgctcctatcatggatcatggaactgaccat

SEQ ID NO: 106768 - DNA, 275 bp, Zea mays
  Clone ID: MRT4577_28873C.1
aaaaaaaaaatcccgggccaaaaaattttggaaaaagttttaattacggttagggggggggaaacttaaaaacccggttttaaccggggggggggggccccaaaaaggggaaaaacccgaggggccccaaggggggtttataaggcttaaacccgggccttttttgggcccaaaaaaactccaggggctcatgttaaaaaatgaaggaccggcagggggttttgttcactttaaaaaaaaaaccctttgggaagttaaaaattgttccaaagggg

SEQ ID NO: 106769 - DNA, 205 bp, Zea mays
  Clone ID: MRT4577_28874C.1
aagaaaacgggagcacatatgcacttcacaatatgaaaataacaggcgggcgatgaaatacacagtcactcactttactatgcctgtacctgagtagttaaacctcctacatatacccctactgggaacggaaggacctacctttttggcctatcctcctggtagagacggaaatcatagtgacagcgccgtcaaaagggtgcta

SEQ ID NO: 106770 - DNA, 163 bp, Zea mays
  Clone ID: MRT4577_28875C.1
gatctattcaagtgccaatctgtggcagagaccttaatacctagaaattcatgatgccacaacaagacactgttggaaataaagcggacggagacgggacaaaagaacgaaggagctagaagagacaaatagggtgactcctcttgagagagtactcatcaca

SEQ ID NO: 106771 - DNA, 409 bp, Zea mays
  unsure (1)..(409): unsure at all n locations
  Clone ID: MRT4577_28876C.1
acgaagaccgaaccccagagcggccgcccaaccccaaataaaacaccantccaaccgcaccaacaagaccaccttggaacatcaaccaagtaaccccacaagaagctccaacagctaaaagggcagaagacccataccaaaaccacatatgggcggaccaccggcaaacacgaaaaagggcagacaaaaccaaacccagcgggccgcgacagcaataaagaaaccagaaacacaaaacctcacacggcggagaacaggaacacaccgcccagcgccgcaacaagcttgctcaccgggcaacaaccaacggcaagagaggaacgccaacacctaagcagcaaggcaaaaaaacacccgcaacccggggagcccaaaggcaaagccagcgagccacgaagaccccccaggg

SEQ ID NO: 106772 - DNA, 260 bp, Zea mays
  Clone ID: MRT4577_28877C.1
ccaccggcgacgatcaaacgcgcaggcagcagctcgacgtcttcttctgccacacttgccacgaaaccacctgtggatgggctactgctactggtggtccgattgcctggggatactgccgggtgatggaacataatccgaccgtcccaccttattatggactaggaccgatacagttaacttatgagtacaactacaggctggtcgggcaagagctgtacatgaatctggtgggcaacccggatctggtggctagcgaa

SEQ ID NO: 106773 - DNA, 766 bp, Zea mays
  unsure (1)..(766): unsure at all n locations
  Clone ID: MRT4577_28878C.1
acctcgaggccggccgggctcgcattcgccgctgcgtcaacttgtcttccttcccgcggtctctccgccgcctcccagatccggcggccatggcaaggaacccgggctgcaccgtcttcataggtaacttggatgacaaggttcctgagagggttctgtatgaaattcttattcagatctctgggcaagacaaaccctcattaaatggcaatatccctgtaactcctaggttaaactctgtaccacagccaaagcctcatcaacctatgaggtctagtgatactcctttgccacagcatgcagcagtgaatggcaggaatgccgggtatggtatcccaccaaatcattcatacgacacgcacactcaagggtgatcaagttataccgtttctgttacctggctgctgtccggtatttgcaagttgacctgttgtcatttccaagttcattagcgtggaagctggtgctgctggattttcacttaactggtgacttatcttgcattgtgataatgccacttcatcctagtcagaaaccagctggctttctgagtggcaaaccagcaggataccacaaatccaccatattgttggtcaagatgggttagatgcacatttctcatcgggttgtatctggaagccccatgactgcgattatgatgagctcatatatctactgaccgttgtatctgtctgtgatttgagctcgtgtacctgcagtaggccgataaaagatgggtagatatncatacttctgaagttcgact

SEQ ID NO: 106774 - DNA, 423 bp, Zea mays
  Clone ID: MRT4577_28879C.1
ggctcgcattcgccgctgcgtcaacgtgtcttccttcccgcggtctctccgccgcctcccagatccggcggccatggcaaggaacccgggctgcaccgtcttcatagatctctgggcaagacaaaccctcattaaatggcaatatccctgtaactcctaggttaaactctgtaccacagccaaagcctcatcaacctatgaggtctagtgatactcctttgccacagcatacagcagtgaatggcaggagtgccgggtatggtatcccaccaaatcattcatacgacacgcacactcaagcactgtcgagtgggttaccgaatagaggactaagcaacggtacgtatgaatatagtaagcgtgtatttggttctggtctgaatgatggttagccgtgagctaccagggaaccaatcccgtacc

SEQ ID NO: 106775 - DNA, 862 bp, Zea mays
  Clone ID: MRT4577_2887C.1
gggtgatgtccttcactgttgttgacagaaaacctctcttctctgccgcaatggtaggcagggcacgcgtcctagaagcgaggccaggtgtcgcgccaccgaagctcggcgccgccacgtcttctctctgcgggcagcttgctttgatccttcccctgggttccagttccagcgtctgcttgcttgctaccacgcctcctcatctgctgccaccggcgtctctccttcccagctggggccctgagctgagagcagagcagggagcgaaactttgcgctgagattgagctgctcctacttggaaggcggcggcgtcggcaatggggtcggagacgttcgtggagatcctgctggccatcctgctgccgccggtcggcgtcttcctccgctacggcatcggggttgagttctggatctgcctgctgctcaccatcctgggatacatcccgggcatcatctacgccgtctacgtcctcgtcgcgtgaaagcacaacatggtgtggtaggtatgacgacgatggtgaccgtccgcccgcccgccgggagctggaatatatgagacccagacccagtgcttctgatccatccattccatgcatgcagtgatgcaggcatacgtacgtttagcccatgctgtatgtttgtgtcttgctttagttagctttagctagctgcttgcagcttagcttctctcagctcgtctaccggtccgttttgctgtgcccatggacatggatgggaagaaggaaccgtagcttgtatgcaagtgtgtactagagtccagagtttctactctgctactgattctgaatccagacatgttttctgagatcttccttcgtgctaaaaaaaaaaaaaaaaaa

SEQ ID NO: 106776 - DNA, 1921 bp, Zea mays
  Clone ID: MRT4577_28880C.1
cattgggacctccgcgccccgccgggcgtggcgcattctcccttttcccgctcgcggcttgccactctgcttccgtgcttggcttgctcgctttcctttcccgtctcgactctcgagtctcgactcctcgcattcgccgctgcgtcaacgtgtcttccttcccgcggtctctccgccgcctcccagatccggcggccatggcaaggaacccgggctgcaccgtcttcataggtaacttggatgacaaggttcctgagagggttctgtatgaaattcttattcaggtaggtcgtgttgtagacctacacatacctcgtgacaaggaaactagccgaccaaaaggctatgcttttgctgagtatgaaacagaggagattgcccaatatgctgttaagctattttctggtcttgttcgacttcataataaaacgcttagatttgcgatctctgggcaagacaaaccctcattaaatggcaatatccctgtaactcctaggttaaactctgtaccacagccaaagcctcatcaacctatgaggtctagtgatactcctttgccacagcatacagcagtgaatggcaggagtgccgggtatggtatcccaccaaatcattcatacgacacgcacactcaagcactgtcgagtgggttaccgaatagaggactaagcaacggtacatatgaatatagtaggcgtgtatttggttctgttctgaatgatgttagccgtcgagctaccagggaaccaatcccgtacccgtcctactagcatgttgagccctggtgactgtgactctatgtgctgacagaaaatatttctgaagatgttgtctgttgtgtcagccacctgtaatatctctgtactcaccatttcatgcctgtaaatatgggttatggtggtaggacatatgcttgtttttttggttctgttcttcgcattgtagtgagacttttccctgcttgttaggtccttctcatcccctagtgtgaaggccatgcctccactagtatggctgcactaggaaataccattcctagttacatgaatgggtggcaatatgctggcaattgtgttttaacattagtgccattagctatttcaatgttacagcagggcgtgtttgtgtttgagatattagtatttggtggattttgtgcttctcatcatggatctgggacatctgaaggagaaacattgttttaaaagaaaattgtgaaataagtcccacaatttatgatgtttgagtatatgaatatttggttacataaagcattcgtgatcccattggctctcagggtgatcaagttataccgtttctgttacctggctgctgtccggtatttgcaagttgacctgttgtcatttccaagttcattagcgtgaaaactggtgctgctggattttcacttaactggtgacttatcttgcattgtgataatgctacttcatcctagtcagaaaccagctggctttttgagtggcaaactagcaggataccccaaatcccccatattgttggtcaaaatgggttagatgcacatttctcatcgggttgtatttggaagccccatgactgcgattatgatgagctcatatatctactgaccgttgtatctgtctgtgatttgagctcgtgtacctgcagtaggccgataaaaaaatggtaaggtatcaaaactttttaagttcgaacttggccaagtcccgttgggatccaaattacaggttgtcggagtttgtaattaacgctcagactatgaaatcaatccgggacagaaaatatgatagtgcaccatttaccattacgatccattttgtattgtgtaagtaatgaatattcatggtgatctgaacaaataaaccccccttcttttacagcacacagcattgcctcaatttgcgtcaaaaccgatgaaaaa

SEQ ID NO: 106777 - DNA, 253 bp, Zea mays
  Clone ID: MRT4577_28881C.1
aagcaaaaacaacaacttcattcagtgagtggggataattgggggtaccccccaaatacaaaagaaaggggcccttttttaacccagcattgaccccaacagtggaggcttccaaaacctcttttttaagagggtaccaaaaggcccggccagctcgggggatgaagccacccatggcttactgaccgcctcggagacgggctccagggcggaaggggcgctcacttttggggggggggggggggtgaggggg

SEQ ID NO: 106778 - DNA, 280 bp, Zea mays
  Clone ID: MRT4577_28882C.1
tgtatatctcttggaaaataagacaatagtatttctcctttgcaatagcagttataacagatgtgaaaatatacttgactctaatatgattatacaaaagagcatggatgcatttcaaatgttagatattgctactataatcaaatgatttcatattatctttttatcatgatcctccctatcaagcactaaaaagttgaaccattatactttatatctgtaatgatactgattatgaaatgtcccctcagactcattgcagcagataacttttttgagt

SEQ ID NO: 106779 - DNA, 929 bp, Zea mays
  Clone ID: MRT4577_28883C.1
gccggccgggttgcggactcctcgcattcgccgctgcgttgtgtgtcttccttcccgcggtctctccgccgcctcccagatccggcggccatggcaaggaacccgggctgcaccgtcttcataggtaacttggatgacaaggttcctgagagggttctgtatgaaattcttattcaggtaggtcgtgttgtagacctacacatacctcgtgacaaggaaactagccgaccaaaaggctatgcttttgctgagtatgaaacagaggagattgcccaatatgctgttaagctattttctggtcttgttcgacttcataataaaacgcttagatttgcgatctctgggcaagacaaaccctcattaaatggcaatatccctgtaactcctaggttaaactctgtaccacagccaaagcctcatcaacctatgaggtctagtgatactcctttgccacagcatacagcagtgaatggcaggagtgccgggtatggtatcccaccaaatcattcatacgacacgcacactcaagcactgtcgagtgggttaccgaatagaggactaagcaacgcacaagcattcgtgatccgcccaattggctctcagggtgatcaagttataccgtttctgttacctacctgctgtctggtatttgcaagttgacctgttgtcatttccaagttcattagcgtggaagctggtgctgctggattttcacttaactggtgacttatctagatattgcattgtcataatgctacttcatcctagtcagaaaccagctggctttctgagtggcaaaccagcaggataccacaaatccaccatattgttggtcaagatgggttagatgcacatttctcatcgggttgtatctggaagccccatgactgcgattatgatgagctcatatatctactgaccgttgtatc

SEQ ID NO: 106780 - DNA, 891 bp, Zea mays
  Clone ID: MRT4577_28884C.1
cgcttgccttgctcgctttgcctttccccgctcgactcctcgcattcgccgctgcgtcaacgtgtcttccttcccgcggtctctccgccgcctcccagatccggcggccatggcaaggaacccgggctgcaccgtcttcataggtaacttggatgacaaggttcctgagagggttctgtatgaaattcttattcaggtaggtcgtgttgtagacctacacatacctcgtgacaaggaaactagccgaccaaaaggctatgcttttgctgagtatgaaacagaggagattgcccaatatgctgttaagctattttctggtcttgttcgacttcataataaaacgcttagatttgcgatctctgggcaagacaaaccctcattaaatggcaatatccctgtaactcctaggttaaactctgtaccacagccaaagcctcatcaacctatgaggtctagtgatactcctttgccacagcatgcagcagtgaatggcaggaatgccgggtatggtatcccaccaaatcattcatacgacacgcacactcaagcacaagcattcgtgatccgcccaattggctctcagggtgatcaagttataccgtttctgttacctggctgctgtccggtatttgcaagttgacctgttgtcatttccaagttcattagcgtggaagctggtgctgctggattttcacttaactggtgacttatcttgcattgtgataatgccacttcatcctagtcagaaaccagctggctttctgagtggcaaaccagcaggataccacaaatccaccatattgttggtcaagatgggttagatgcacatttctcatcgggttgtatctggaagccccatgactgcgattatgatgagctcatatatctact

SEQ ID NO: 106781 - DNA, 699 bp, Zea mays
  Clone ID: MRT4577_28885C.1
cgcttgccttgctcgctttgcctttcctttctcgactcctcgcattcgctgcgtcgtcaacgcttcttcctccccgcggggtccccttcacctctcggatccggcggccatggcgaggaaccccggctgcaccgtcttcataggtaggtcgtgttgtagacctacacatacctcgtgacaaggaaactagccgaccaaaaggttatgcttttgctgagtatgaaacagaggagattgcccagtatgccattaagctattttctggccttgttcgacttcgtaataaaacacttagatttgcgatctctgggcaagacaaaccctcattaaatggcaatattcctgtaattcctagtttaaactctgtaccacagccaaagcctcctcatcaacatatgaggtctagtgatacccctttgccacaacatacagcagtgagtggcaggagtgctgggtatggtatctcacaaaatcattcatatgacactcacactcaagcaccgtcaagtgggttaccgagtagaggactaagcaacggtacatatgaatatagtagacgtgtatttggttctgttctgaatgatgttagccgtcgagctaccagggaaccaattccatacccgtcctgctagcatgttgagccctggtggctgtgactctatatgctgacagaaaagtctctgaagagttgtctgttga

SEQ ID NO: 106782 - DNA, 755 bp, Zea mays
  unsure (1)..(755): unsure at all n locations
  Clone ID: MRT4577_28886C.1
gggaccctcgaggccggccggggaaattcttcttcnggtaggtcgtgttgtagacctacacatacctcgtgacaaggaaactagccgaccaaaaggctatgcttttgctgagtatgaaacagaggagattgcccaatatgctgttaagctattttctggtcttgttcgacttcataataaaacgcttagatttgcggtgcgtttctttttactccctcattttacataagttacattagtgtagctggatagttgaatgttactgtccctttttatggtatataatactccctcaatccctaaatgtttgatattaattagttcaaaattaaactaaccaacgtcaaatatttagggatggggtaggagtatctattactatgtatgtatgtatgtgccggaacttgggactcagattgagcctatccccatatatttttgtacttcactaattgaggcactttcaattactatattctttttagtataagactcaactctgaaataactgtaattttggcagatctctgggcaagacaaaccctcattaaatggcaatatccctgtaactcctaggttaaactctgtaccacagccaaagcctctcaaacctaatgaggtctagtgatactcctttgcccagncatgcagcagtgaatggcaggaatggccgggtatggtatcccaccaaatcattcatacgacacgcacactcaggcactggtcgagtgggtaccgaatagagactaagcacg

SEQ ID NO: 106783 - DNA, 471 bp, Zea mays
  Clone ID: MRT4577_28887C.1
gttccttagtaagagggatagattctacagaaagactaaatatacattagtgattctggttctgtgttggtgtaggatgttcaggtaatcaggtacgaagtgcgactggagcagacagagataagtagttgacgtaaccttcagagaccgagatcacaaaccgatggcaagcaagcgcagtggtggtgagagaccactgatccttctctcatcctcagaaagaatggctcaaaccatgctgcttacttcaggcgtcaccgccggccattttttgaggaacaagagccctttggctcagcccaaagttcaccatctcttcctctctggaaactctccggttgcactaccatctaggagacaatcattcgttcctctcgctctcttcaaacccaaaaccaaagctgctcctaaaaaggttgagaagccgaagagcaaggttgaggatggcatctttggaacgtctggtgggat

SEQ ID NO: 106784 - DNA, 1583 bp, Zea mays
  Clone ID: MRT4577_28888C.1
tacatcctcgaggccggccgggaacaggagtctacaatgtgagtggcaaaatagtaattttcccgctcgcggcttgccactctgcttccgtgcttggcttgctcgctttcctttcccgtctcgactctcgagtctcgactcctcgcattcgccgctgcgtcaacgtgtcttccttcccgcggtctctccgccgcctcccagatccggcggccatggcaaggaacccgggctgcaccgtcttcataggtaacttggatgacaaggttcctgagagggttctgtatgaaattcttattcaggtaggtcgtgttgtagacctacacatacctcgtgacaaggaaactagccgaccaaaaggctatgcttttgctgagtatgaaacagaggagattgcccaatatgctgttaagctattttctggtcttgttcgacttcataataaaacgcttagatttgcgatctctgggcaagacaaaccctcattaaatggcaatatccctgtaactcctaggttaaactctgtaccacagccaaagcctcatcaacctatgaggtctagtgatactcctttgccacagcatgcagcagtgaatggcaggaatgccgggtatggtatcccaccaaatcattcatacgacacgcacactcaagcactgtcgagtgggttaccgaatagaggactaagcaacggtacatatgaatatagtaggcgtgtatttggttctgttctgaatgatgttagccgtcgagctaccagggaaccaatcccgtacccgtcctactagcatgttgagccccggtgactgtgactctgtgctgacagaaaatatttctgaagatgttgtctgttgtgtcagccacctgtaatatctctgtactcaccatttcatgcctgtaaatatgggttatggtggtaggacatatgcttgtttttttggttctgcttcgcattgtagtgagacttgtccctgcttgttaggtccttctcattccctagtgtgaatgtcatgcctccactaatatggctgcactaggaattaccaggcttagttgcatgaatgggtggcaatatgctcgcaattggtgttttaacattaagtgccattagctatttcaatgttatagcagggcgcgtttgtgtttgacatattagtatttggtggagtttgtgcttttcatcctgcatatgggacatctgaaggagagacatcgttttaaaagaaaattgtaaaataagtctcacaatttatgatgtttgatcatatgaatatttagttatatatgacttgattgcttgagctcccttggccttctccccaggtgatgagcccttcactagtatggctgcactaggaaataccattcctagttacatgaatgggtggcaatatgctggcaattgtgttttaacattagtgccattagctatttcaatgttacaacagggggtgtttgtgtttgcaaaattagtatttggtggattttgagcttctcatcatgcatctgggacatctgaaggagaaacattgttttaaaagaaaattgagaaataagtccccccaaaaaaaaaaaaaaacgcgccc

SEQ ID NO: 106785 - DNA, 388 bp, Zea mays
  Clone ID: MRT4577_28889C.1
cgctccgctcttggctctccccacctgcgggcgggggctgttggttcgggggggaggcgagggaatccgcctgcggctgaatcgggggagagggcccgcatggcggaggaggacaggcagcggcggtggcggcggcggcggttcgcgaacctgcgcagcgtccggtggcggatcgatctcggcatcctgccggcgtcgcccggggcctccgtcgacgagctccgccgcgccgccgcggattcgcggaggaggggagcctgatttggccacttgctggttggtgcgcttcttgtcggcaggattctcttctctttggttgggtggtccgctggtgttctcgtcctctcatgattatgacgagagagagagagaaaaaaaaatttggctt

SEQ ID NO: 106786 - DNA, 672 bp, Zea mays
  Clone ID: MRT4577_2888C.1
cgggcttgttacccgcctcctcatctgctgccaccggcgtctctccttcccagctggggccctgagctgagagcagagcagggagcgaaactttgcgctgagattgagctgctcctacttggaaggcggcggcgtcggcaatggggtcggagacgttcgtggagatcctgctggccatcctgctgccgccggtcggcgtcttcctccgctacggcatcggggtaattaacactcagcttagcatctgattaattgatgcatcgtcgttctcatcagatgtgtgtaagtaaagtaactgcttgctcgcgatctactgtgtgcctgccctgcaggttgagttctggatctgcctgctgctcaccatcctgggatacatcccgggcatcatctacgccgtctacgtcctcgtcgcgtgaaagcacaacatggtgtggtaggtatgacgacgatggtgaccgtccgcccgcccgccgggagctggaatatatgagacccagacccagtgcttctgatccatccattccatgcatgcagtgatgcaggcatacgtacgtttagcccatgctggatgtttgtgtcttgctttagttagctttagctagctgcttgcagcttagcttctctcagctcgtctaccggtccgttttgctgtgcccatggacatggatggga

SEQ ID NO: 106787 - DNA, 232 bp, Zea mays
  unsure (1)..(232): unsure at all n locations
  Clone ID: MRT4577_28890C.1
ctcttccttcgtgtcttctcncgctttccgctcggaacaaaatccatcacgcccgacctctccaaccttccctttacgtatccttctccatccattcatagcaaatacaccacccacgatccccttaccacttcctcaccaacggccatcccacctcaccccccgatccctttcgcctatacctcacgtttccacactcaccaaatcttcacttcaactgacccttactcca

SEQ ID NO: 106788 - DNA, 1394 bp, Zea mays
  Clone ID: MRT4577_28891C.1
ttgggtccctcgaggccggccggggttcttcgcttgccttgctcgctttgcctttcccgtctcgactcctcgcattcgctgcgtcgtcaacgcttcttccttcccgcggtctcctcttcgcctctcggatccggcggccatggcgaggaaccccggctgcaccgtcttcataggtaacttggatgacaaggttcctgagagggttctatatgaaattcttattcaggtaggtcgtgttgtagacctacacatacctcgtgacaaggaaactagccgaccaaaaggttatgcttttgctgagtatgaaacagaggagattgcccagtatgccattaagctattttctggccttgttcgacttcataataaaacacttagatttgcgatctctgggcaagacaaaccctcattaaatggcaatattcctgtaactcctagtttgaactctgtaccacagccaaagcctcctcatcaacatatgaggtctagtgatatccctttgccacaacatacagcaatgagtggcaggagtgctgggtatggtatctcacaaaatcattcatatgacacttacactcaagcaccgtcaagtgggttaccgagtagaggactaagcaacggtacatatgaatatagtagacgtgtatttggttctgttctgaatgatgttagccgtcgagctaccagggaaccaattccatacccgtcctgctagcatgttgagccctggtggctgtgactctatatgctgacagaaaaggtctctgaagatgttgtctgttgtctcagccatcagtaaggctatctctgtactcaccatttcatgcctgtaaatatgggttatggtggtaggacatatgcttgtttttttggttctgttcttcgcattgtgggtccgcttgtccctgcttgttaggtccttctcatcccctagtgtgaaggccatgcctccactagtatggctgcactaggaaataccattcctagttacatgaatgggtggcaatatgctggcaattgtgttttaacattagtgccattagctatttcaatgttacagcagggcgtgtttgtgtttgcgatattagtatttggtggattttgtgcttctcatcatgtatctgggacatctgaaggagaaacattgttttaaaagaaaattgtgaaataagtcccacaatttatgatgtttgagtatatgaatatttggttacatatgactttttgtttgcttgtgctgtatgtctgtcgcagcacaagcattcgtgatccgcccaattggctctcagggtgatcaagttataccgtttctgttacctggctgctgtccggtatttgcaagttgacctgttgtcatttccaagttcattagcgtggaagctggtgctgctgga

SEQ ID NO: 106789 - DNA, 474 bp, Zea mays
  Clone ID: MRT4577_28892C.1
ggggaaaattcggggggggcccggggttttttcccccggaatatttgggggtttgggggggggttttggaaaaaaacccgggttaaggggaggggggaaaaaaaaaaattcccaaagggaaaaaaaaagggaccctaaaccggccccccaaacgggaggggcaaaaaccggaaccttcccctgaaaaaaaggttttatttttttaaaccccaaccccaacttaagggtttttcccccccctttaaaacgaaaccaaaaattttttttaaccggaaaagggacccccaaggccccgtgggaaatttaatttaatcttctggaacccccctttggggaacctttgggggggaattggggccaaagggaaattgggggcccccctaaaaaaaaaattttggttaaaaatttggggggcccgccctggagcaaatttctttttaaaacccaaaagcttttaccccccccataattttt

SEQ ID NO: 106790 - DNA, 146 bp, Zea mays
  Clone ID: MRT4577_28893C.1
cttcactacaaccaaagttaatgcaatacattcatgcaaagttttgatatccagatcattggctaaacatatgcctgatatcttgtatagcttggccaacttgataccatctctgacataactcgtcaaaattacatcatgcatga

SEQ ID NO: 106791 - DNA, 443 bp, Zea mays
  unsure (1)..(443): unsure at all n locations
  Clone ID: MRT4577_28894C.1
cggttcgaattcgaggcagcggccgctgagctacaatatttgtactaccatgctgtagctgttgcaagcgtcgacctaaatgcgcaccgtggtcttaaccttgctggtcaatgccgaactcaagctctagctgatggcgctgatcctcaacatgcatactatactgaagacttaaccacatacactgctagaatgagctacacgacgcccaactctggtgttatatacactgtgaccaacagagtactcaacatcttcctctacatactacaacctcgacgagtgcaacctacacncgtcacacgagaactgagacacagattgtcatccaactggaacaccatctcattcgcgacgcaccatgcctttaacgctttgaccactatgaaggctcgctttatcgaccactgattggacagtgcactgatccaacacgagtagat

SEQ ID NO: 106792 - DNA, 936 bp, Zea mays
  Clone ID: MRT4577_28895C.1
atggcgagcccctcggtggcggtggctgaccggtgtgttggggcaccgacggacggcggagtggtggggacggcgggctggggacggcgggctggggacggcggtgagctcgagacagcgacggcacactcaataagatcgcatggtacagtaactgaacaagatccctggtgcagtgcacccgatgccggtgatcttcgtgccatgatccgcgtcgccgaacacgaggaagaaactgtggtagaagaagaggttgtctcccgtgctgaaaatcctccagcaaagaacaacttttacttcgacatctgtggtgtggaccctgaacctcctgcaacccaatgcaagccccgaggtacgacacataccaagactacccaacagaaggcaactggaccccgaggcgtgccctggcacctgttggctcctcgacatgaggggagcagtagcggaagtaatgatcccatacgagatctagaggttagagttgaacgactggcgtcagaactgcgccatggaaatagggagcgtgcacgagatagctaccatatttctgagctgtcggcggaggttgatcgcttgcagcaggagatcgtggaacgagacagggctatagatcgggctgtaaattcacgctctatagcctgggattgcgaggcaaatgctcgagccttggtggtggagctaagcatagccctggagaatctgcaagcatacaataacactctgcatgaggaagtgtatgtgctatacgaccatctgcacccgagcgtgccatcggaggttgccgcaatgggaggcggagcatctagagcagctgtcggaggaccttttggggaattggatctttttggagcccctccctccatgaacctcgcagatgatcgttctcccgaagttgatagtggagcgggagcagccaaggatgaagattactaa

SEQ ID NO: 106793 - DNA, 255 bp, Zea mays
  Clone ID: MRT4577_28896C.1
ggcaatcaagttcatataattaaacaacatactataattaacatatttttaatatataggttcacgattatattgtcccaaactcgaatctgcttttttcaaccatcagtcatcagcccaaccgaggggggggcttacaccaaacgagacatattccacacatgcaatgatacggtgcatgtcctagcttgttcatccattcacacacattgcttaccaactactggttatttcgggattttcaaaccatgcatg

SEQ ID NO: 106794 - DNA, 197 bp, Zea mays
  unsure (1)..(197): unsure at all n locations
  Clone ID: MRT4577_28897C.1
acccacacatccnatcccccctcccctctcttccacaccttccncctcgtctccctttcncncgtcgctctctctgttgtacgtacgacacacacatcannncnnnnacanagganaggtctcntccccccccnnctttcctctcctctcctcgccgcactactctctctcaatcccaatcaccaatggccaaagca

SEQ ID NO: 106795 - DNA, 688 bp, Zea mays
  unsure (1)..(688): unsure at all n locations
  Clone ID: MRT4577_28898C.1
cccggggggaaggaacaaacaaagggtttacaaagcagagaacctgctaaaaaacacaaacacaataccaaagagctagatggcgaaggaaccggccacattcaaaggccctagctaggtatatggaacctaggcccctagcatcagccataagtccataacccaacaaactgattcatcaaggaagctcctttgaagccttcccaaagaaggggaatccccatcaaagaccaccctgttacgatgaagccatatacaccacgcccctaagatgatgacactgttaagccccttttttgtgcttttctgcacactgatcttaaatttcgaatttccttatggctgaattctctttagctccctcttcctcttctcttggcttcttttgactttgtaaagtctgttttccttagtcttaataaaattttgctctaggggtttcccctacaacatttatacgtaaaaaaacaaagccttttcatgcggtcaaacacatctcttcattttgtattctgataacaatgtgccaaaagcttgaaggaaatgtctatatgttaaggaatatattgcttggaccaggaaattatttcagtagatgtttccttgactgatgatattctaaagtgcccttttgattagtattttcataactcttactnttgcctcttcttttgtttcttttgcctca

SEQ ID NO: 106796 - DNA, 399 bp, Zea mays
  unsure (1)..(399): unsure at all n locations
  Clone ID: MRT4577_28899C.1
tgatcagattaaatcaaatattctgatttatcatattgtgaagacacctatatctcgttacgttttctttcccaagctgtcagcctttccatcctctccaaatgtcacctatctaatgtttctatctatctcttaattacacaaatcataaatacctatcttctattaaacgttcactcctatccttcaatcttttctcccattccatatttcaacattatatcacactctcactcaatatccataaaatcctacaatcaatataacttcccttcccatcttacttttacatacctttatctatcatcatccccacttaattctatcttatctcctattttaataacaacccacccaattttcattttttatacaacaccctttattntcctttaacca

SEQ ID NO: 106797 - DNA, 369 bp, Zea mays
  Clone ID: MRT4577_2889C.1
atgtcttcaaatatttctagggttggctttactaaagaagttatccaactcggacattttgtcgaaggactaggttacgactcgtattgcactcttttttgtggtggtgcattgacaccgcttgagtgcattccagacactcatgagatagctattttgcaagagataatgggcatttttgatgtgcccattcttgagcacaaactcacatgccttgacaaagagaaagaaaaggccaaccacctgcaaagatccacgaccaatatgcaatcaatggtgggttcaaccaatgataccacttcatattgtgccccacacatgtatgataccttatcttctatcgaggcaaggccgaagcagaacccttag

SEQ ID NO: 106798 - DNA, 791 bp, Zea mays
  unsure (1)..(791): unsure at all n locations
  Clone ID: MRT4577_288C.1
gaggtcggccgggacgagagcacatgagggtttagagagcccagcaccgcagaggcgcagagacaggcgtgttcgtactcgcctatctccgcgactcaaagcttcttccatttcctaccgccgccgctgcagctccaccccattccgtcgacaccatgagggagtgcatctcgatccacatcgggcaagccgggatccaggtcggaaacgcgtgctgggagctctactgcctcgagcatgggattcaggccgatgggcagatgcccggggacaagacattgggggtggggatgatgctttcaacaccttcttcagtgagactggtgctgggaagcacgtccctcgtgctgtgtttgtggaccttgaaccaactgtcatcgatgaggtgaggactggcacctaccgccaggtcttccaccctgagcagcttatcagggggaaggaggatgcagccaacaacttcgcccgtgggcactacaccattggcaaggagattgtggacctgtgccttgatcgcatcaggaagcttgcggacaactgcgctgggctccagggcttcctcgtgttcaacgcggttgggggaggaacaggctctgggcttgggtccctcctcctggagcgtctgtgtgtggactacggcaagaaggctaagcttgggttcactgtgtacccatccccccaagtttcgacctcagtgggtgagccatacaacagtgtgctgtgcacccactccctncttgagcacactgatggggctatcctgctgggacacgagggcatctatgacatct

SEQ ID NO: 106799 - DNA, 510 bp, Zea mays
  unsure (1)..(510): unsure at all n locations
  Clone ID: MRT4577_28900C.1
gttgtacgagagggccttcggcgacgaggagaagcgggagcgcttcctcaagtggcgcatccagctcctggagcgcggcatccgggagcagctcgacttctcgcccagcggcatctgctccatggtgcaggtcaccgacctcaagaactcgccgcccatgctcggcaagcaccgcgccgtcacgcgccaggctctcgccctgctacaggacaactacccggagttcgtggccaagaaggtactgtataatttctctttacaatccaaaatactacactttcactaacaagtcgagaattcccccgcgtattcagttttgtgcagttgtgcttggttagaaatggggatctctctaaattctctacgcctctgccgtgcttgtttcagtaaagttgcataggctagtgctactgctaactcgaatgggtggtccaagcaaaggctgggactntttttttcccgccttcctgctttccctcttttctggttttgtttggttcttgattgggg

SEQ ID NO: 106800 - DNA, 392 bp, Zea mays
  Clone ID: MRT4577_28901C.1
aaaaaaaaaaaaaaaaaaaaaaaaaaaaaaaaaaaaaaaaaaaaaaaaaaaaaaaaaaaaaaaaaaaaaaaaaaaaaaaaaaaaaaaaaaaaaaaaaaaaagggggggccctttttaaggaaccaaggttaccttcccctgcattccaacataaaattttttttttggggcccctaaatttaaatcaccggcccgggttttaaaaacttcggacttggaaaacccttggtttacccaaattaaatcgctttgaaaaaaatccccttttccccggtggcctaaaaagcaaaaggcccccaccctttgccctttccaaaaatttgccaaccctaattggaaaagggaaccccccttttacgggcccttaaaccccgggggggggggggttaccc

SEQ ID NO: 106801 - DNA, 442 bp, Zea mays
  Clone ID: MRT4577_28902C.1
aggatatatatatatatataggatcaaatcatatcatcgggggccaattaatatatgggtaccggagacccaatcgggtcaaccaacatgcatgtagacccacgtacatgagcccaaagactggcgccaaacatgcggggggggggatagcaaactgaaaaactctggttttttttttttttcacacaccaaacaatacctatgtatgggagccagctcggcctcgcttattattggtcaaccccccccccaagctagatagataataatcatatccctgggcgccgatcgatgggaacaacaattgcagggggcgcacttgcaactgctaccccagccccaggggggggcgggctccccggactcccccgggggctcaacaaactcgggcgcggcctttttttccggggccaccccaaggaccacggtggcctgcgcgggg

SEQ ID NO: 106802 - DNA, 395 bp, Zea mays
  Clone ID: MRT4577_28903C.1
acgcatgtacgggcacaccttcgaggccttcaagctcacagttgccgaccgtgacgccatccttgacgcactcacctatgaggagaaggagggcggcccggatgggcaggaggtgactaaagtggcgcctgctgtcacccccgagggtaaggattgtctggataagaacataaggaggaggatgacaccacagactgtcaagaaccgtgctgatatagagatgaaatgcttccagtgtgatggatggctccatatcaagcatgctatgaaggacgctgaagctgcaggcagtgataactgtgctgtgacgattaagctagctggctactccactttatgttatgaccacacagacccttgacaaggaccaaggcatatcagatctcactactgca

SEQ ID NO: 106803 - DNA, 301 bp, Zea mays
  unsure (1)..(301): unsure at all n locations
  Clone ID: MRT4577_28904C.1
aaagaacgcagaaaagaaggtgacccangcaganttcaaaaaggcaaaggagaaggtgatgcacaagaaaaagccaggtgttccggatggtctcaacangaagcccggccggatacctatgccgaacagttacccgattgtgtgtgtactagcacatctcttcatcatgggagatatgttaccacaatacttgttgcatactgtgctaagtggtcaggagaaccttgtattaattaattatcctttcattgtctcaaaaaaaaaaaaaaaaaaaaaaacccgcggcccgctcgcgtnctag

SEQ ID NO: 106804 - DNA, 530 bp, Zea mays
  Clone ID: MRT4577_28905C.1
gaagaggatgccagtttgtttacgaggccgtacacatcttcagggtgggttctataacacgcgcaaaaaaacaaactgttctatacatacgggcggacgggtgttatgccactgctggtatgtgcaaaaccatatgaggttgcggaactaatactgcttatacattcacccctcaagattttgcagtgcacctgccgttcaattgtcttgcccacatgcgaagcattttctatctgcctgaacttttttgaagtttggcacttatatgcagcgcatgtaaccgcttcaggtaccaataagcgccacgttcaccacaaagagcagggggaaacccatttgactccttgcggttcccttatttcttaggaataccattttttgctgcagctcatgcatatcctgggtgtgctttttgctctcttctcttagccttattttcatgttttcatcctgttccaattttgattcaagaatgatgagctttgatttcatattctgaacatcttgttttacatgggataatagatgat

SEQ ID NO: 106805 - DNA, 908 bp, Zea mays
  Clone ID: MRT4577_28906C.1
gtcccttcgcgcccctgaaattgtccgaccgcgtggcgactcgggtcggacggatgccggtcgacgtcgaggcggcgatggccccgccccaggcggcatcggcctgcagctcgtcgtcgataggcagggacagcgacgagtgctcgccgccggggaaggaggaggaaggggagggggaggtgcagagcgcgtacgagggaggaggagggggcagcctcgctgggttggaggcattggaggaggcgctgcctattcggctctgcaaaagacattactaagtcagagaatgcatactccagaaaacggaagaatctctttgcctacatcatcatgtatggaaattcacatgaaccacgggcagctcaagtttatgaaactgccgcccctaagaggcatgctagtttgagtagaaactctttggtgactttggctagcagcagttccaggagcagcagcagtatcagcattgaagagcatgaactgcccgagcatcttgattctccgcgttcacctgatggttttatatccgcaccacgatctggctcttgcgtgcctgatgcatctgtgcctaggtcattgtcaatgatggacttgcatcgtctgaataggtcaagttcctcagttcgtctcaaagatgggaaataggaaatacgactggacttggatccagaggattttctatttctttttgtcatcttttgctcgaggtttctagcaccatcttctctaatagaactaaggatggcatggaggtttctggataaataagtgatcacttagtttggcgaggggtatatatgtgtttgtaaaatagttcttcactccattgtaattagcatataatgtactaatatgaatgcctctactcatgtgaccatcttcagctgtaaattaacaaataccttttt

SEQ ID NO: 106806 - DNA, 1099 bp, Zea mays
  Clone ID: MRT4577_28907C.1
ccgaagcagttacttccccactccactcatgatcacaaaactaattacaaaccccggggaaacaattccactcgccgcggaaaccttccttctgggcctcgtccggtcgtccgtcccttcgcgcccctgaaattgtccgaccgcgtggcgactcgggtcggacggatgccggtcgacgtcgaggcggcgatggccccgccccaggcggcatcggcctgcagctcgtcgtcgataggcagggacagcgacgagtgctcgccgccggggaaggaggaggaaggggagggggaggtgcagagcgcgtacgagggaggaggagggggcagcctcgctgggttggaggcattggaggaggcgctgcctattcggcgcagcatatccaaattctacaatggtaaatccaaatcatttgtgtgcctgaaagaagctataacattttcaggctctgcaaaagacattactaagtcagagaatgcatactccagaaaacggaagaatctctttgcctacatcatcatgtatggaaattcacatgaaccacgggcagctcaagtttatgaaactgccgcccctaagaggcatgctagtttgagtagaaactctttggtgactttggctagcagcagttccaggagcagcagcagtatcagcattgaagagcatgaactgcccgagcatcttgattctccgcgttcacctgatggttttatatccgcaccacgatctggctcttgcgtgcctgatgcatctgtgcctaggtcattgtcaatgatggacttgcatcgtctgaataggtcaagttcctcagttcgtctcaaagatgggaaataggaaatacgactggacttggatccagaggattttctatttctttttgtcatcttttgctcgaggtttctagcaccatcttctctaatagaactaaggatggcatggaggtttctggataaataagtgatcacttagtttggcgaggggtatatatgtgtttgtaaaatagttcttcactccattgtaattagcatataatgtactaatatgaatgcctctactcatgtgaccatcttcagctgtaaattaacaaatacctttttatgcc

SEQ ID NO: 106807 - DNA, 268 bp, Zea mays
  Clone ID: MRT4577_28908C.1
gatgatagcagcaaatttcagaaagtgtgcctttcccctctgtgactgctccctgtattttcttaacactatgctcaagtcagtggtctggaatgagaatcagagtaatatgtgtagtgttcaatgtaatttagcattattcttaatggccttaaaaataagcatttcagtttcaggtgtttgtaattgtaataaggtttacacttgtatatacaccttgttgagtgatgtctctgtagtggattagtggtcatatctcaatggcctt

SEQ ID NO: 106808 - DNA, 575 bp, Zea mays
  Clone ID: MRT4577_28909C.1
ctatttcaatgttatagcagggcgcgtttgtgtttgacatattagtatttggtggagtttgtgcttttcatcctgcatatgggacatctgaaggagagacatcgttttaaaagaaaattgtgaaataagtcccacaatttatgatgtttgagtatatgaatatttggttatatatgactttttgtttgcttgtgctgtgtgtctgtcgcagcacaagcattcatgatccgctcaattggctctcagggtgatcaagttatagattttctgttacctacctgctgtctggtatttgtgagttgatctgttgtcatttccatgttcattagtgtggaaagttggtgctgctggattttcacttaactgctgaattatctagactagtcggttgcccgtgcgttgtgacggccaacaatacccacgtaaactatctaccggaaagatctcaatattttttttgatattgcattgccataatgctacttcatcctagtcagaaaccagctggctttctgagtggcaaaccagcacgataccacaaatgcaccatatcggtggtcaagatgggttagatg

SEQ ID NO: 106809 - DNA, 300 bp, Zea mays
  Clone ID: MRT4577_2890C.1
aaatattttggccccctatacccattgagccaattggaaatgcttcttccggctgcaattttcccgcaaagttaccagcctccttatcatacatttttatcgcgtaccttttaccagcgttgactctcaaatgtgaaaacccaattcttcaaccctacacgatccaacattctatggcatcacgcatcttacctttatcacccatgatccttcaacaatcatcaggcctattacagcctatccatttggtgcatttattggcgcaaaacattatggcacaacaactcgtgctagcaaacc

SEQ ID NO: 106810 - DNA, 236 bp, Zea mays
  Clone ID: MRT4577_28910C.1
ggcgctgtactaggattatcttccctatgctgcgctgctcgttctccgcatctaccaggatctttctaatgccatggctgcttctgagatcactgacaagctgggatacacgctccctgcggcagcgacactggtacatgcgaagcgctagtgccacagctggcgagggtctggacgagggcctgcactggctgtccagcaacattgcgagcaagggttgactataaatgcgaact

SEQ ID NO: 106811 - DNA, 124 bp, Zea mays
  Clone ID: MRT4577_28911C.1
cccacacgtccggccacgcgtccacctgcactttcactctatcatcaggtagcaggcgactagcataacaagtcaccaatccctcccccgagatagtcagagatggcatcacctcatagttgct

SEQ ID NO: 106812 - DNA, 241 bp, Zea mays
  Clone ID: MRT4577_28912C.1
cccacgcgtccgcaggaactggtaaaatttcaaaagaagcaacctttttgtgttaccatagttctgttcagttctatgatcaaaagcttcgccatggtttccttagggtgctttcatagtgttgcctatcattgcattgggttgtatggtacagttacaatctgctatccaatgctaaacatcttgttgggagcttttgatctgatcatgaacggaaattagttacctggaagtttggcta

SEQ ID NO: 106813 - DNA, 290 bp, Zea mays
  Clone ID: MRT4577_28913C.1
acctatgcgttcggttgttttgttcctccccactcactcctgcgcttcctttccggacaagatggctttgcgtgagcctccttttgccttttgcgttagtgcagacgaaaaagagacagcgcttggcatttagtcgcccagaaggtaaaaaaaaagactttttgcacttctacgggaaataccaacatgggcttttttttttacaagggggcggtgacaggtttctcaaacctactctttcagggatgcgaggagggagcacgaggtatttgctcctggcttttgtccca

SEQ ID NO: 106814 - DNA, 947 bp, Zea mays
  unsure (1)..(947): unsure at all n locations
  Clone ID: MRT4577_28914C.1
ccggccggccggcccttctccgcttcctccgctgcctcgctttccggcgaaagtatcggccgctgcgtcctccacacctaccccacaggcgcattgttcggctgtttccgtctccccgaacggccgaaccctgtcgtttgcccgggcgcctcgctgtcgtcgagtctgaaccgtgctgcgtcgcggagggaagtgagtgacatagagataggggaaaaggaagatcagatataatggcggttgccgtcctgttgcggcagagggcgctctcgtcgccccacgcggtctcatgccgaaatgctgtatatactagtggccttttttccaattccgatctacactcaaaggtgaattctactagtttgagattttggaggacctaccataattctgggaagtttgatttgactgatctgacgcatcctcatatgtggtacccgaaagctcgagaaaagaagcgtaatgtgtttttacatgttggccctacaaatagtgggaaaacttatagtgctctcaagaggctagaagcaagctcttcaggtgtgtactgtggacctctgagattgttagcaagagaggtagcccaaaggttaaacaaagttaacgtcccttgtaacctgattactggacaagaaaggaatgaaattgaaggtgcaaaacatagctcagtgacagttgagatggctgatatgacaactaactatcaatgtgctgttattgatgaaattcagatggttggctgtaaatcaaggggttattcgttcacacgtgcacttctgggactttgttcagatgaacttcatgtctgcggtgacccagctgctgttccccttatccagcgaattctttgagctactggtgatgtagttacggntcaatattatgagagactatcttctttggggttctctgaaatctccacttgngtctttctctaacatcaaggc

SEQ ID NO: 106815 - DNA, 394 bp, Zea mays
  Clone ID: MRT4577_28916C.1
ccttgaataatggtttacatggacataaaaaaacagttaatctacaatcacaagtcatgcacacttacactgttacacataattatagatgcacaaattattaattaaaaatgatatgagtatatgacacatgaaagttcgagtacccgaattgcctaaattaagtttgtattttataagttgctacccgaaattaccaaacgaaatttgagtattccgggttcgggttacgagtccagtccacttcgcatgttgtgtggaccataaaatacaaacacctcaaaacttgtaggtccaaagaagcagacagtgtatgagagatctgggtgtcgatcgatcatcgatgtatcccctttagacgacgcttcggagatgaagcactggcagacacgga

SEQ ID NO: 106816 - DNA, 289 bp, Zea mays
  Clone ID: MRT4577_28917C.1
acattactgtttatttgttcaaccagcgagcggatgcgggcaaacattaatgccatggcatggacacatccaaagaaaaacaatggccaaccaaggccataataatccagccgaacacacacaaactaataacggacagacagctacaccagctatgcagactgaaatatgggaaactgacacgcctaatcgcacgtggacagccaggacatcgaggacacggtcaaaagcgataatgccgacgagctggacgtccgtatgcatgaagggcacacgcttggcgacaatg

SEQ ID NO: 106817 - DNA, 936 bp, Zea mays
  Clone ID: MRT4577_28918C.1
gccagtccgttgacacccccccccccccctcggccatccccggagatgggcgccgccggcaagcctcctcccctcgtctgcttcaaatggccgtggggccctaatcctatcccatcggcgagctccagccccagcccctgcggcgacctcgagctcccctggctcttcaagtccatccgcaccctcgcgcagggcctcctcatcgccggcgacatcccctcccccgcctcttctcccagcggaggagtaaggggcgttcagaggcgcacgggtgccgcggtggtggaggtggaccgcggggacgctgaacagcgcgccctggcggcatcgctcgcgagcgggaggcccgccacggtgctggagttctactccccgcgctgccgcctgtgcgcctctttgcagggcctcgttcgcgagctccaagacggtgccagtggctccgccagtttcgtgctcgctgacgccgaggacgaccggtggctccccgagcttctgcattatgatatcagatacgtcccttgcttcgtgctcctggacaagcacggtagagctctagcgaagactggagtaccaaccagccggcagcacgttgtcgccggtctccatcacctcctgaggatgcagcagccatccggactggaaggaaaccagaatgcgcctccgtcatgaagcccaaatacctgagcaaggcctgtattgacaaagaaaaattttcagaatgtgccttttgtttttgcaagcatgaacaatgggcaaacattgatgcgttaattctttagctggtaagtacagattgaagttggtgcaaaagcaaaaggcaggtggtattttttttatgatatccgccttgaaataaccttggaatttgtctcatagatcttctaggataattttttttcttgttcattcatcagcagtcattcatattcttggtcc

SEQ ID NO: 106818 - DNA, 231 bp, Zea mays
  Clone ID: MRT4577_28919C.1
gaaccaccaacttagtaccatcgggtgtgcctaagggccatagcatataaatcggcgggcccacagaccaaaacaacgggatctggcgtactaaccaatacagcacaaacatagaacaaaccaaattcacgcccaaagttcaacagaaggtacctcacaagttgcaacctaccattcatgtaccatgcgacaggattcttgtaactaatccccagatgccactttcgctgc

SEQ ID NO: 106819 - DNA, 787 bp, Zea mays
  Clone ID: MRT4577_2891C.1
cttgcttgctaccacgcctcgcctcctcatctgctgccaccggcgtctctccttcccagctggggccctgagctgagagccgagccgggagcgaaactttgcgctgagattgagctgctcctctacttactactactagaaggcggcggcgtcggcgtcggcgtcggcaatggggtcggagacgttcgtggagatcctgctggccatcctgctgccgccggtcggcgtcttcctccgctacggcatcggggtaattaacactcagcttagcatctgattaattgatgcatcgtcgttctcatcagatgtgtgtaagtaaagtaactgcttgctcgcgatctactgtgtgcctgccctgcaggttgagttctggatctgcctgctgctcaccatcctgggctacatcccgggcatcatctacgccgtctacgtcctcgtcgcgtgacagcacaacatggtgtggtaggtatgacgatggtgaccgtccgcccgccggccgggagctggaatatatgagacttgagacccagtgcttctgatccatccattccatgcatgcagtgatgcaggcatacgtacgtttagcccatgctgtatgtttgtgtcttgctttagttagctttagctagctgctgcagcttagcttctctcagctcgtctaccgatccgttttgctgtgcccatggacatggatgggaagaaggaaccgtagcttgtatgcaagtgtgtactagagtccagagtttctactctgctactgattctgaatccagacatgttttctgag

SEQ ID NO: 106820 - DNA, 868 bp, Zea mays
  Clone ID: MRT4577_28920C.1
cggggtcgttagcagctacaatgtcgcctctccatcgttcactgcatccccttcctcctctcccctcccgttttcgaggccccgttttcttctctctcactcgagatggaggggctctatgcgcagacgcctgttgcctggcatcccccgcccccgctccagctgctctccggaagattccaaagtcactgttggcttcctcgctacgctggtcttggcgatgacagaggcagcgtccgcccacttttcccctcgcgcggccacgacggatggtagtcggatccgattgatcgacctggaagaatctccaccgtcctgctttaccgagcgagatgctcggatcctgcagcgaagggagagagtgcatcgccgccgccatccgtgtccgccagtgcttcatctccgaagcgtcgtctgaaggggatacatcgatgatcgatcgacacccagatctctcatacactgtctgcttctttggacctacaagttttgaggtgtttgtattttatggttcacacaacatgcaaagtggattggactaaggttctgaggatgcaactatggttgagcaaaaaactcgtaatccaaactcggaatacccaaatttcgtttggtaatttcgggtagcaacttataaagtacgaacttaatttaggtaattcaggtactcgaattttcatgtgtcatatactcatatcatttttaattaataatgtgcatgacttgtgattgtagattgactgttttatgtccatgtatatcattattcaaggtgtgcttttatactaatttaatagggtgtatgtgtttttatgaagcttacaccacaattcgattagttcgggaatacccaaacccaaaactaaaa

SEQ ID NO: 106821 - DNA, 1001 bp, Zea mays
  Clone ID: MRT4577_28921C.1
gggtacccctcgagccggccggggccggtcatccctgctccctcggcttcaaacctggccgcctctcctccatctcctccctccccagcgcctccctctctgctcctgcactcggagcccagtactccagctcgccaacgctccctccctgctcaccggccaccaggaaggtccgagctcgcccatcctctgctcggtttcaacttcggtcgtgcctgcagaccgctcccttgctcctgcagctcgccccatcccctgacttgtcgtgtcttgggccgtcacggcactctcatcttgcgtcgtcgccttattgctgttctgcactacggcatgattaatggagttactgaagaagggcacccaattcaattgcccccggttgctgatcggacatttcatttgctcaaacagaagttggtccaagctcctgttctaggtcttcctaacgacttcagcaagggtttcgtgctagaaacagctgtcttcatgcaatcgaagaatctcgtggcttatttgaataagcacctttgtccaagaaaccaagcttcatcgaggagtgtttggcaatctttatggcaattattgacgaatggcggccatacttgcagcaccgtcaaatcgtgattgtactccatcttactgagcagagggtgaccttacgtttgtagcataaagtcctgctcaagctcattgacttgcattatcaaattcgcacaaacaggcaacggctgtaccgagcgactgatttggcacatatatatatataagccgagacagtgggagaggagagctggacaacaggcaacgaattgtaattgaatcttctgaatactaaaggaaagcggtcacatcccattaatttgcacggtctctgtgggctgattccccacccttactcatccttatctctcatttcaaacttgtaaacagtacagtctcccatttatatgaatctatcattatgtatacgacgatatatataataatatagactattgctt

SEQ ID NO: 106822 - DNA, 556 bp, Zea mays
  unsure (1)..(556): unsure at all n locations
  Clone ID: MRT4577_28922C.1
aagtcaatgagcttgagcaggactttatgctacaaacgtaaggtcaccctctgctcagtaagatggagtacaatcacgatttgacggtgctgcaagtatggccgccattcgtcaataattgccataaagattgccaaacactcctcgatgaagcttggtttcttggacaaaggtgcttattcaaataagccacgagattcttcgattgcatgaagacagctgtttctagcacgaaacccttgctgaagtcgttaggaagacctagaacaggagcttggaccaacttctgtttgagcaaatgaaatgtccgatcagcaaccnnnnncaattgaattgggtgcccttcttcagtaactccattaatcatgccgtagtgcatgattaaaccaaattgcggatgcgatgataaattctgattcaaacatttcgtcaagcacaaggtgtgtgatgcactagannnnnnnnnnnnnnnnnnnnnnnaacagcaataaggcgacgacgcaggatgagagtgccggacggcccagaccgacaagtcaggggatggggcgagctg

SEQ ID NO: 106823 - DNA, 1296 bp, Zea mays
  Clone ID: MRT4577_28923C.1
cctcgaggccggccggggccccgggaaatgtagtagagagccgccgcccctcccaaatccctgccttctcccttaaaaacacgtctctctctccccaagccgctcctcaccaagcccatctcagccgctccctccagccctcacctcgccggccctagctgctggtcgccgtcgaccgcgagctctccaacgcaggcggctcgctgcgccttcccctcgccggtcatccctgctccctcggcttccaaaccatggccgcctctcctccatctcctccctccccagcgcctccctctctgctcctgcactcggagcccagtactccagctcgccaacgctccctccctgctcaccggccaccaggaaggtccgagctcgcccatcctctgctcggtttcaacttcggtcgtgcctgcagaccgctcccttgctcctgcagctcgccccatcccctgacttgtcgtgtcttgggccgtcacggcactctcatcttgcgtcgtcgccttattgctgttctggtgaggccatgtcgttcttgtcctactcatttccctaccggcatcaaatccttactgttgtttatacgtatgtttttgtgtgagttgggaggtggagaagaaaggaactctagtgcatcacacaccttgtgcttgacgaaatgtttgaatcagaatttatcatcgcatccgcaatttggtttaatcatgcactacggcatgattaatggagttactgaagaagggcacccaattcaattgcccccggttgctgatcggacatttcatttgctcaaacagaagttggtccaagctcctgttctaggtcttcctaacgacttcagcaagggtttcgtgctagaaacagctgtcttcatgcaatcgaagaatctcgtggcttatttgaataagcacctttgtccaagaaaccaagcttcatcgaggagtgtttggcaatctttatggcaattattgacgaatggcggccatacttgcagcaccgtcaaatcgtgattgtactccatcttactgagcagagggtgaccttacgtttgtagcataaagtcctgctcaagctcattgacttgcattatcaaattcgcacaaacaggcaacggctgtaccgagcgactgatttggcacatatatatataagccgagacagtgggagaggagagctggacaacaggcaacgaattgtaattgaatcttctgaatactaaaggaaagcggtcacatcccattaaaaaaaaaaaaaaaaagtctgctcgtagcagagctgggtatagttcatgtttgc

SEQ ID NO: 106824 - DNA, 681 bp, Zea mays
  Clone ID: MRT4577_28924C.1
tgcccaactcggcgactcgaccgaccgccatttggcatcgcccgccggccggacggccgccagcaggattcaatggatcggatcgatcgagaagacgaggattcatcggtgcacattgactgactctcagtacgtacgtgtcacctctgccctgtccgtctcgcgtgtccgtgtcttctccccggccgtgcatatatctctgctgctgtccggtcgttctggccgtggaatgtgcttattgggcgaatccaccagctaaacagccatggtcaagatcacgtcgtgcgtacgtgtgtgctgcaatcacgcggggcgtcccccaaggaaaaatggatgccgtaaatgcgcgtcactggttgcttctgctcgcgcgtcgtccctcccctcctctcgtcctcgtccgatcatcccctgtcgtgcacgtacacgtgcactgtagttcgctcagggtagatggccggggctcgggtggatggacatggacagatgaagatggcccgatagatgcacgtgcagtcgtgcacgacagatggccggggctcgggtggatagatgcatgtcgtgttagcattttaatggattcatacaaaacttaatgcatgtgttttatatatgtgtagatttattatcatttaattgaatatagatataaaatttaagtgcgaaaaaaaaaaaaaaaaa

SEQ ID NO: 106825 - DNA, 432 bp, Zea mays
  Clone ID: MRT4577_28925C.1
ccgggtgtaggaggcacatagggactgatcggataggcatgcgtggcaggccgtcttcattgccggtaacggagggatgagaagcacagaggcatggtgaaagactcctagtaggagttaaccaccatctacggtttttgaacgattagggactacatgtattgttatgccagtgctgaaccttaaagggtttgagcggaccatactataccaccgtacaggtcttgttcctttgccttattagattgatagagagatactgatcttgaaaaaaactttatgagccgatgctggcttggtaccctgtcgtgacggtgatacgactcagaaggaaccctatatttgctggatgaacatgctgacccacaaaacatatggctgcatgcacgggctgaaagaacactagctggatccagaccattgttcttgttt

SEQ ID NO: 106826 - DNA, 367 bp, Zea mays
  Clone ID: MRT4577_28926C.1
ccggccgggagcgcccgtcgcctccctttccccttacctcgctcgcatggagagtttagccgacatattcaataagctgctatggttcataaagctgcccctgcccagaagcggatgccctacccaagccttgaagttgacaatgctgtgaaggttggcgctcgcatgaagaataccaggagcatacgcacgtgtgggacattagaccgacccacaacctctgaagaaggctacaggaccccaagtacccaccaactagggactacacggagggaacacgcttggtcagcatcaagccttaaagggctcccttaccatacaatcagcgaataaaaaaattgaagatggcagacaatgtggaattaat

SEQ ID NO: 106827 - DNA, 353 bp, Zea mays
  Clone ID: MRT4577_28927C.1
gttctagatcgcgagcggtcgcccttttttttttttttttttttttttttttttttgttttgttttttttttgggggggccggcaagcttgcgcgctacaacaagaagcccaccatcaccttccgcgagatccaaacctccgtgcgcctcgtgctccccggggagctcgtcaagcacgccgtttttgagggcaccaaggccgtcaccaagttcaccttcttctaggcttgcacgctcgccctttgtaggcttctcttgggttgatgttccccttgagttgtaactagatgttgcttggttatttgtcggcgctgctcttcttttgtaagaactgcgtcatgtaacccaccaag

SEQ ID NO: 106828 - DNA, 262 bp, Zea mays
  Clone ID: MRT4577_28928C.1
ctccgatatttcggcacctactccgggggagtacacctccactcctccagcgagtcaccactgggcactggccacccgcgaccgggtccgactactcaggtatgtattagcacacactgtacacgctgctttgcgtctaccaaaagatcaatccctgggggtacacttgcggccgggagcaaagcttattcttgacgcccaacctcccgttgcctattccctagaatttggaatattcctttgggggaataaggacttgttt

SEQ ID NO: 106829 - DNA, 775 bp, Zea mays
  Clone ID: MRT4577_28929C.1
atttctaatttctttcctaccagaaaaaaacacagtctcgatctgcatcggcgccattccggcgacgccatgcgcgccgatgagaagccccatgccgtgtgcgtgccgtacccggcgcaggggcacgccaccccgatgatgaagctggccaaggtcctccactccaggggcttccacgtcaccttcgtctacaccgagcacaaccaccggcgcctcgtccgctcccgcggcccaggtgctgtcgctggcctcccggacttccgcttcgccaccatccccgacggcctgccgccgtccgaccccgatgccacccaggaccaggcgtccatctgccactccaccacgaccacctgcctcccccacctgaagagcctgctcggcgacctcgacaacaaccgtgcaactgggacgccgccggtgacgtgcgtcgtcgcggacagcatcatgagcttcgcggtggacgccgcggcggagctcggcgtgccgtgcgcgctcttctggaccgccagcgcctgcggttacatgggctactacaacttccggttcctcctagaccatggccttactcctctcaaaggtgaagagcaactgacgaatggctacttgggcacgccggtgacaaatgctctcgggatgaccaggcagatgcgtctccgggacttcccgtccttcatccgcacgacggaccgggacgacatcctgctcaacttcatgatacacgagctagagcgggcgagccgtgcagccgccgtcatcgtcaacacctttgacgagc

SEQ ID NO: 106830 - DNA, 826 bp, Zea mays
  Clone ID: MRT4577_2892C.1
aaaagtacagagaagagaagagaagagaagagaaaaagacgctgccttgcgaacgaggtgagagagtgttggggccgccgctcttgagtgatagaggaagaggatacagcaagcgggggttgcgaggaggcggcggacgctatgggcaacgccgggagtgcgccggaccagcccaagaactcggcggatggggccggcgctgccgacgcggagtctcgccgcgggccgccgtctacggtgcgtttcttccccgatgcggagcgccacaaggcacggcagccgccgccaataaagctcgaggaggaggagggcgtcccgccgccgcccgccaccgaggaggagatggccccgcgcaacctctggcaggtgtatgcgcttggggcgttcattgtgttgagatgggcctgggctaagaggaaggagaaccaggacagaaaggactcacctgatgctggggatgggaatgcaccggacagatcgacttaatctccggttgctgctgcgtggactaggctacccgcgaagatgaatgccgtttcgcgataagccaacgatgatggatcattctagctaatgcatcatataatggtcatcgatgttgctgtggatttatgtattttcctgacaatttgcaagttacattctccccctttttcactctagtgggatcctttttatctgaggtgtggcacctgcctgttcactctactgataaacgatgcctgtcaatgaacatgcgtggaagagaaccatcaggtggctaatttttggcaggcatcgggttaaaaaaaaaaaaaaaaaaaaaaaaaaaaaaaaaaaatccgta

SEQ ID NO: 106831 - DNA, 172 bp, Zea mays
  unsure (1)..(172): unsure at all n locations
  Clone ID: MRT4577_28930C.1
gttttggacccactgtaccgaaacattgaaccaatggacgagccaaccgctcttcatgtatgcattctattattggatattccattagctttgcaagatgcaacnaaggctgtggatatagtacagtacttggaaaggtcgtttggagtagctaacacaatgaacccgaatg

SEQ ID NO: 106832 - DNA, 598 bp, Zea mays
  Clone ID: MRT4577_28931C.1
agctccgcgcagctgggcggacgcgtggggcgggagctttttgcaccacatcgacaacctcacagatcttagacccgaatggcatcgattgctaaactgttgtcgccacgggcgtttcttcaggccttggctttgaagctatcaagcagctcctttctcagcaggctcagccctgcaaagtgttcctgggggctcgaaacacgcagagcaccattgccgcctacgacgctcttgcatatgaccgctctggccacgccgtgacggtgctgccactggagctttccgacctacagacggtcaagacattttcgcagcaggtgttggacaagattgggggcgagaagattgattatttgctcctcaatgcagccatttccgaaggcgcagagacgcctggcccctatgggtggcgatggtgccagtcgctggttgtgaatcacttctcacagcactacctgacgcatctgctaaaggacaagctggtcgagtcaaagtcccgtattgtcgtggtgtcatcgggagcgattcgtcggataaccgaccctagcatcctggatgaaatgctcaagggcggctccggcgcagaatacatgaacgt

SEQ ID NO: 106833 - DNA, 647 bp, Zea mays
  Clone ID: MRT4577_28932C.1
gagcatggcggagggttctcgcatgctgcgggcaaatgactgcaatgttgtgtgggcaagctgaaatagagttatacatcgaaagcttggctaatgctagcagtcgcagtaatcccaggataagtccgaactgcaaccaaaactcatgggcactcgggtgccagcctggctgggcttgcatggtatcaggcaccgaaccatctgatggaccatcagctgaattggttccgcaaagagcagagagctgcaggccatgttgtccgggtttcttctgccctcggggcctgacatgcatgatgctcatggttgtttctgcttacctgctttaaattcactatcaactgttttccagcttgtcctttgggtgcttattgtccacttgggacattgaacgacactactggactttgtgatccgtatttttaccaaattactccaggaaagagcactgcatgtggtgcagcagattctggggctgatattgctacaactaatgatatcttctgccctccagggcactactgtccatccacaacccagaaatacaattgcagcagtgggcactattgccgcaaaggttccaccgatgaaaagaagtgcttttggaaaaacacttgccaggataatgcgataaaagaaaatctgac

SEQ ID NO: 106834 - DNA, 257 bp, Zea mays
  unsure (1)..(257): unsure at all n locations
  Clone ID: MRT4577_28933C.1
aagataaggctgttctatttgtaaattagattagtctctacggttctcaagcccgggtgtacttctttatgcttgtctgatttactagattttgcggctggcgtgttcttgttgtagattatcactggtatagatttcatagtcagagtccggacaaacaaaggtttggttcttgagatggtggttcttgttccaatttcaatattgattgcttatgtcaaccaaacatagaangaaaatgcactgcattccgtttt

SEQ ID NO: 106835 - DNA, 2390 bp, Zea mays
  Clone ID: MRT4577_28934C.1
gggtacctcgaggccggcccgggtgtcgtaccctccggatcgaaggctggacgacgcgaccgcgcggcggcggctcgacgcgaccggtggctttgacgcgaccggcacggcggcgacgcacagcccgacgacgaccctccccgctgccttctccccgggcatttgctggagctggaaggcggaagcgttcccgttggattacttcttgggctggaaagagtgaaagacccggatgcactaaatcctgtcttggaacagttacggccctggaattgatcccatgctgccgaacgggccctaagttggaacctgttcaggcggggggtcagctcgcagctgactggggatccggcaccgcatcgccagacgccaggaggggactatcagccatggcagcgaggcagccgccgccttcgtccgcgtccgcgcccgcgcccgcggcgggtctctccatgaaggactacctcaagaggtacgtgtcgggcccagggaccgacggcgaccagaagagggcgaagaagaagacgaagaagaagcccaagcccgccggcggggtgctcatcgtcgacgaggacccagtgtggcagaagcccgtgcaggtggacgaggagcccgcgtcgtcaggtgacgacaagcctctggtcgacgaggacatcgaggtcaagcggatgcgtcgcctggaggcaatacgcgccgcaaggccgtacaatgctatcgccgaggatggcagcgggtgggttaccgtggccgccccagaggagcagggcggtgggtccacccaccagcgcaggaacgacacgccgttgccagagcggggacgtgctcctacgagggaggacctttctcctgtgcggcggaggcagcggcgcgacacgccctcacctgtgcatggcgatgctgctgcaaaggatttttcaccacctatgcggaggcagcggcgcgacacgccctcacctgtgcatggtgatgctgctgcaaaggatttttcaccacctaggcggaggcagcggcgcaacacgccctcacctgtgcatggcgatgctgctgcaaaggatttttcaccacctaggcggaggcagcggcgcgacacgccctcacctgtgccggacggtgctgctgcaaaggatttttcaccacctaggcggaggcagaggcgtcaggacacgccatcaccaaaggacagtggtgcagcggaccaggacgatatgtcaccaccgcggaagtctaggcagagagaggacctttcgccgccaaggaagggtgctcgtcatatcactgaggagccccgggatatctcgccacgaaagaagagagacatttctccctcaaggaagagtacaaaggaaggagcctcaaaacaggtgaggaaatctggactgatgacagcagaagaagttaaagaggacataagaaagattaaggaggctgagatgattaagtttgcatcacaggatccttcgctggttgggaaaggggcaaaggcagtattcagagataaggaaggaagacgaataagtgaagaagaaatgcgcaaggcaaaggaacctgagaagccaaaggaaatacatatagaatggggtaaagggttggttcagaaacgagaagctgagtctaggttgaaagagattgaagctgagaagagtaaaccttttgctcgaacaagggatgatcctgagcttgataatatgctaaaagaaagaatccgatggggtgatcctatggctcatctggtcaagcggaaagatccagaatttattttggaagacttgggagatgatgaaaagatgaaagaatctggcttcatagtaccccaaagtatacctactcacagctggctgaaacgtggagtggatgctcctccaaaccgctatggcataaaacccggtcgtcattgggatggcgtggatcgcagtaatggatttgagaaggacatgttcaagctgaagaacgagaagcaagcaatggagcaagaagcctatctttggtctgtctctgatatgtgatcccaactgctgctccttacgagaggaatacagttgtgtaaaggaagaaccaatggaagacctttcaaacgattttttttcactcttcttattacacaaagtgacagcattggtgatgctgcgccggagtagcctgaatattttccaggaaagcattttcaggaatgcagttcaatgaagctgcattacgtatttgttggaaatctgttactgctgtaccatttgtcatccttcacgttttgtaatatagatgaacgcactgcaaggttttggaacagttcaaaagatgagattttatattcactttctggtttccatgtgtataacttgtcttagcagctgtcgcggtttaatttaaattaaatgatggtggatttgagagccggc

SEQ ID NO: 106836 - DNA, 753 bp, Zea mays
  Clone ID: MRT4577_28935C.1
aattcggcacgaggctttgtcgtaccctccggatcgaagcctggaggacgcgaccgcgcggcggcggctcgacgcgaccggtggctttgacgcgaccggcacggcggcggcgcacagccccgaagacgaccctccccgctgccttctccccgggcatttgctggagctggaagcgttcccattggattacttcttaggctggaaagagtgaaagattcttaggctggaaagagtgaaagacctggatgcactaaatcctgttctggaacagttacggtcctggaattgatcccatgctgccgaacgggccctaagttggaacctgttcaggcggggggtcagctcgcagctgactggggatccggcatcgcatcgccagacgccaggaggggactatcagccatggcagcgaggcagccgccgacttcgtccgcgtccgcgcccgcgcccgcggcgggtctctccatgaaggactacctcaagaggtacatgtcgggcccagggaccgacggcgaccagaagagggcgaagaagaagacgaagaagcccaagcccgccggcggggtgctcatcgtcgacgaggacccagtgtggcagaagcccgtgcaggtggacgaggagcccgcgtcgtcaggtgacgacaagcctctggtcgacgaggacatcgaggtcaagcggatgcgtcgcctggaggcaatacgcgccgcaaggccgtacaatgctatcgccgaggatggcagcgggtgggttacc

SEQ ID NO: 106837 - DNA, 618 bp, Zea mays
  Clone ID: MRT4577_28936C.1
gcgcgtacagtctcctgagactgagagcgcgagagagacaggcgagagggacggcgggaaggatgaggctcgtcggtcttgtgagcctggtcgctgtcatcttcctcctgagcttcaggtccctcctccacccgcaagtgcttgctggagacggctcagcggtgacggtgacaagccggcgccgcgacaggagccagcagcacgccgagcagtgggctgaggagaggaagaggatgaggtggttcatgacgagggactacgcgagcgcgcggcggcacacgccgaggaacaaccggctggatccttaaccgcgtggccctctcacgcctcggtgctgggcttgggtgccaactgatcggcgacgacgtcgacgacgagtcggtcggtggtcgttcttggtctctctctctctcgtcgtgtgtgtgtgtgcagtcgtctgcctgtcaaatggctcaatgcacacaagttttgccccaccccctcacccctgaccatacaccatagtaggaacgatagatatacagtagtggtatggagttatatagttgttctgtttcttgtgaaccctgtaatgagaaccaagatgtgtttcggtttgaatctgtgatgctgctgtgc

SEQ ID NO: 106838 - DNA, 215 bp, Zea mays
  unsure (1)..(215): unsure at all n locations
  Clone ID: MRT4577_28937C.1
ataaaagttatgaaaagaatatgtgtaaagttggaaataggtttatttgtggaaaaagataanatgtgtagtaggngatttattgtggatatatgtgagatggaaggaaagggagttgatgtgtgaatgagaatgtataagggaaattgaatagttaaggataagggagtggggnggtatggtgattgngataagttggttttttgtgtgggggg

SEQ ID NO: 106839 - DNA, 1430 bp, Zea mays
  Clone ID: MRT4577_28938C.1
cattgggacctcgagccggccggaggctcaatccaaaacgcgtcgttctccttccccttttccttcacgcgcgtcaatttgccatcccaggaaggcagaaccccacacctctgatctgctctgcccatcgtccggcgcatccccggccctgacttaacttgctgctcacctcgccatgggaatctcccaccctctctccgacgagtacgacgccctccgcggcgccgtcctctcgccggatacgacgcctccctcatcgccgctcgcccaccgccacctcctggagcacgaggttactaggatggacacgctcgccggcatcgccatcaagtacggcgtcgagatatctgacatcaaaagggcaaacagtttggtaactgacagccagatgtttgcacacaaatcgctgctcatacctctaccaggaatgcccatgccatccctgaatgcttgtggtcaaagaacgataagaacgtgtgctccaaaccatcggcaaaagagagacgcgcccaagtctcgtcagcagggtgcgtcatctgcaatgaataccttgcagagatactatggcctaacaccacctcagaaaggaggaaataccatggatagcagcactgaactgtctgtgtaccataagggcggcggcttccagagtaacctcagcgaaacattgctcaatccttccgcagctccaggcaccgacagcagctggaattttgaagcgctaggcttttcagcgaccgagggcgatggcggggcaccgaaaccagagcaagatggttctatgcggcggcgacagaaagtggaagcagagtctaacgcccagggtgattttctagtgaaggcgatcaagagtctgttgatttccagcgtccgtctagacacgtatgcaggcagcccaggttccagccagaagagcggcttcagatctatgactgtgaggaagtcaccgagcgcgccaagcgcgttggactgaagatgaactgaatacacacatgtttgagcgtctccgttgatgaacgacgagctgtggcgtgactaggcgactgacttggcagcagagcatatctgtctgcagctctggtgttagcacaattgattggcttgtacaactcctacaaaagagaagagttacgatggagcctagctacatgtaatgtatacaacatgcatacatgcatgtgttgatggaatgaattgtattgtatcccatcccaggcagtgctacacacagatattctgtctgctgtgtgatggggtgaatttggtttcagttactcaataaatcaaatggcagttcttctttttttttcccctattgtatcccatcccaggcagtgctacacacagatattctgtctgctgtgtgatggggtgaatttggtttcagttactccctaaatcaaatggaagttctttttttcccaaaaaaa

SEQ ID NO: 106840 - DNA, 746 bp, Zea mays
  unsure (1)..(746): unsure at all n locations
  Clone ID: MRT4577_28939C.1
attttgaagcgccaggcttttcagcgaccgaggccgatggcggggcaccgaaaccagagcaagatggttctatgcggcggcgacagaaagtggaagcagagtctaacgcccagggtgattttctagtgaaggcgatcaagagtctgttgatttccagcgtccgtctagacacgtatgcaggcagcncaggttccagccagaagagcggcttcagatctgtgactgtgaggaagtcgccgagcgcgccgagctttgcggatgctgacaatggagtctctatgtggtcaagttccaagtggacgttcaggcatgactccttcacccgaccgttgcttgatggcctgcccaaaccagcgtcagctcggaggaccaaccaaaaccgcgttggactgaaactgaactgaatacacacatgtttgagcgtctcccttgatgaacgacgagccgtggcgtgactaggcgactgacttggcagcagagcatatctgtctgcagctctggtgttagcacaattgattggcttgtacaactcctacaaaagagaagagttacgacggagcctagctacatgtattgtatacaacatgcatacatgcatgtgttgatggaatgaattgtattgtatcccatcccaggcagatattctgtctgctgtgtgatggggtgaatttggtttcagttactccctaaatcaaatggaagttcttctctttttttcccaaaaaaaaaaaaaaaaaaggccccta

SEQ ID NO: 106841 - DNA, 236 bp, Zea mays
  Clone ID: MRT4577_2893C.1
catcacgtgcagtccaggacatcaacgtcttttggtgtgagcctaacgaacaactcacagggaggctgggaccactcgactatggcctgttctgaacatgagggctctcagggctcaccagaccacactatttcaccacttaaatttcattgccaccccaaatttatcttcatgactggctcggggactcatagattatggccgacctgaagacacgcactataggatggctcgcc

SEQ ID NO: 106842 - DNA, 1110 bp, Zea mays
  unsure (1)..(1110): unsure at all n locations
  Clone ID: MRT4577_28940C.1
cggacgcgtgggcggacgcgtgggcggacgcgtggggcggcctcccacccatacaccttgggcgggcgccgcgccgtcgagggccatccagagctcgccatggcggccgtccggtccaacagggcccacgcccaccagcactgccgctccgaggcgtcgtgcccgacgacctccgtggccgtggcggcggcgagggccggcgacgccccacgccaccgttcgcaggctccggtgcaggtctcgaaagggcatcaccagatgcggcggtcagcggcgttcccaccgcgtcgcccggggccagggcgtcgccctcctcagcgttgtgacagcgacctcaacatccggcagcaccgcacctgcagcgaggtggccggcggcaccgcggcgggctgtgcggccgtgtgctgctgcttcccctgtgtcatggtggaggtcgtggtgctcgccacggtgcgcgcgcccgcggcgctgtgccgcaaggcggcccgcgtgagcaagggcgggcggcggcgctccgcctccgtggggcaggccacggagatctacgagctcccggtggacaacgccggcgtcgtcgtcaaggtggacgccagcgccgtcgaggcggtggcgctgccggtgaagcccgccttgcagctggaggagacgggggagcttgagaaggaggtgtgggccaggttctacggcacgggcttctggaggagcgtgtctcagctcgacgacgacgacaggtgaccggaacaatcaggcccgtgagtgagcgagcgatcgaccagctcctccggcgatgcttaagcaatagcatgcgtttccttggttgggtttccttcgttgttttccgcggaaataagagaagatcgaggaaaaggaaatgtgatgcatggtcgtcgatcgactatacgagtttcttttgttttgctttttgaagggagaaccattctcttctacgatgccctgcatatttaataaaatgtatgtctattgaacaatgtgactgaaaaaaggaaatacttgaggaataaaaaaagaaaacgtagtaggaaacaaaaaaaaaacaaggggggccgcctcgcgatctcagaccacacgcgtcccgcggacgcngtgggt

SEQ ID NO: 106843 - DNA, 408 bp, Zea mays
  Clone ID: MRT4577_28941C.1
gagggagattttgatgtcacgctttcaattgccacgaccgaccgtggtgccaaaagtctggtagacggtcccatgtttgcaaaattctcctattctatatagccattctatatagccatggacgaattcttcctgcgtagcaacgaccgcgtcgtcgaccagccgccgccgccggccccgccgcggaacatgtcgtcgagggcgatgacgagcgccatggaaagcggcgcgccgagacgtgaccccgccacgacgaggcggaacacgtcgtcgccgacggcctccttcctctgtacctccgcgacgacggcgcccccgcgctcctcacgcaccgagcaggcgcgccgaccgtaggagcgtttcaccacgtacgacagtgcagccggcgcctccacgacgtcggagccc

SEQ ID NO: 106844 - DNA, 294 bp, Zea mays
  Clone ID: MRT4577_28942C.1
gattaactatagaagcaacagcttcattcttttgaacttttacaatctcattgtgcatgttagaatttgccagcttcaggtttcattagttttctacatatcttaaatcctatcaagttgttgcgatagatcattctcaatattcatcaaagaagcctttagccgctctatctctaatgtggtagaattcttctacttccatagttccacaatatgactattgggaacactttttgttgactccagttccttttccaaatccttaacattagaatgtgcctcctcttcctctaa

SEQ ID NO: 106845 - DNA, 460 bp, Zea mays
  unsure (1)..(460): unsure at all n locations
  Clone ID: MRT4577_28943C.1
ttttggcacaagaatcataaaataaatttcaaattaagtttccacattcatagttaacaccattcaaagtcaaaattctttagcacaaattttaacaagatctttttttcactcacgaataactcaacagcttaactctttgatgcctgcttttcttttgccttctggatcttcaatacctttttcacaattttttgctcttcaacaaggaaagcgcgaataatcctttctctaacagttccccggattaaaccacttcactggctcgggttacgggcctggcggttctaaggaatctagaccttttgtattcagcaggtcttaaagggtggaatcccttggatcctcttgccagtgacagggcacttaggtccacttgctctcttcttagtggtctggtacaccaacttcccaccaggggtcttaancaacccgtgctggttggatttggtagcatagc

SEQ ID NO: 106846 - DNA, 775 bp, Zea mays
  Clone ID: MRT4577_28944C.1
gccggccggtccgggagcactcgtccattcatccgttcgcctctgtgcctctttgagctcgcactcgctcgtgaacgctccccgacctccgtgttgtccagctcactttagcagttcagcctaggactctctgcgagtagcatagcagcagcttcttgcgaagcagaggcagagccttgtgttgcgttgcgtcttccttcctgcttgagcttattagttggctcgcgatggccggcggcgtggtggtgagctccggtgggggcaaggactaccccggcaagctcaccatgttcgtgctcttcgcctgcatcgtcgccgccaccggcggcctcatctttggatacgacatcggcatctctggtacggcgccaagcactgtccccgcccctctatctatctgatcgcgatgttttcggtttttgttttttacccatggctgctgtggttggaaagagagaagaaaaatggcagtcctcgtctgcaccgcatctctcgcacagacccacgcagccacgctgctctgttctcgcgttttgcgaatcaggcagggtattttctcgggcgcggttcacctaccgtccggtcgggagactgggcgcgcatggttcaagggcgtctttttgcgcatgcatacagaactgcgatattccccctcgttttcttattttcctcttgccagattcttgcaagcccgggaagaagaatctttccatgcatcacctcgtcatcttacagtttttgacactattagtggttggttacgttaaccgataag

SEQ ID NO: 106847 - DNA, 441 bp, Zea mays
  Clone ID: MRT4577_28945C.1
gagggaaccaaagcacagtccaaatcaacaatggtacaacctgagcagggaactacatatactaggcaacagaaaatcaacaagggcttcaaacagtaagaagtccttacaacatgtgatggaccataagaacactagatagcatgaaataagccctacagacataatattacctggatgacccaacccaccctgcaaaaactaaaacaaaaaaagagggccaacttatatgcagaaatgtggagcgcaagaaccatggagtgaacagatgcaaaagcgatcattatagtacagtggacagcaggagcaacttaacacaatatgaacaaacgatggtaaactgagatggagctactactgagttcacttgtgccacactactacggcgactcatgttgagatgcaaggaaactgtccatcatatatgcatatgcacagtca

SEQ ID NO: 106848 - DNA, 125 bp, Zea mays
  Clone ID: MRT4577_28946C.1
ctgcaggtacccaagaaaaatacaacactacacatgtaaacttgggtagcaatggcactacaagaacactcttatttggcacatcatgcatctcaaaagtcactctacaaaaccgagtaaactat

SEQ ID NO: 106849 - DNA, 382 bp, Zea mays
  Clone ID: MRT4577_28947C.1
tgtgtttttttttttatttgaaacatgaatttgcgcttccataaccatatcctggttgtccccagtgtttttgcatatgcttgcatacaatcgctgactcgcccagctgcgtgctagcttcgctaagtcactgtaccgcagccgaggtggggcttaacaagctttccctgctgtaactaattccgcaaccttacaggtcgcgctgacattaatgtataactcgagctttccctcattaatagatattatattgtctaacgctgcttaggacacttccctttgcaatttgacttgatgcactttggggcagaataaagaccaagggtcttgggtcattggaagggcaactccgaaaactttcacgtcttaaaaccttctgtac

SEQ ID NO: 106850 - DNA, 304 bp, Zea mays
  Clone ID: MRT4577_28948C.1
ccacgcgtccggaagatgccattatcggcgtcgccggcgaccccgcgcgcgtggggttccggcgtgcacccgaccgtggcgcgctgccactgccgcatccgcctcaacaagctgccctaccagacggggtccgcgccggtgctgccggccacggaggacggtccggccgtgtgcacggccgtcatcgacgactgctttcaagtttccaaggacgacctggaccgggccgccgacaggccggtcgaggaactgatctgtgacgcgcgcctgcgacgaagcgcttcgctttaaggtgggacgtgta

SEQ ID NO: 106851 - DNA, 109 bp, Zea mays
  Clone ID: MRT4577_28949C.1
gtctaatttttcgagcctacaactctccgcaagcggccgatcataaaggactgctgggtgacttcggccagaagacgggcgatgctgcccaccaaggcggtcctgtccg

SEQ ID NO: 106852 - DNA, 303 bp, Zea mays
  Clone ID: MRT4577_2894C.1
ttggtcccacacctaatggcctcagatttttatttgagactttcccgcggcggcaacacttacaatctttcagtgcctatttatttttttaccaatcaaacacttcagattttaggcttggttactgctgatacggacaagctatgttggatcatcgcagacctagtttagcacgtacaatctgatactataaaaactgatttgcgatggaccggggactggttcctggttttgactcatgtacggggactgccgctatgcaccatggaactgacaaagcacacatctagatcagagagcttt

SEQ ID NO: 106853 - DNA, 1096 bp, Zea mays
  Clone ID: MRT4577_28950C.1
gttctcgccgaggccgggccgggaaatataataagtaaatgagcaactttttctcgcgtgtggtccagactcccgtcttcttcctcgaccgctaaccttaccggtccccaaatgtcgcctctcgtgctgctgctcctcgcgcacctactcgccacggccactgcagcgggagcagcgccgaccagggacgacgggcctcctgctccgtcgtcgtcgtccccgcgggtgccggcgacgacgccgccgtggccggaccagttccacgcggtggtggtcacgaacctgagcgcgcgcggcggcgggctgcagctgatcgacctgtactacgactggccgcgagggcgcgacctgaacatcgtccgcgaccagctgtccggcgagcggcgctggagctggaacgtggagtggagcaacggcaccgccttcctgttcgactccgcgtcctgccgcaccttccagttcgccgtgggcctcctgccgcccgactggaaggcccgcggcgccgcctacctggggcgcgaccgcgtcgacggcttcgactgccacgtctggtccaacttcgtcttcgcccgctactacgaggacgtcgccaccggacgccccgtcagctggaacttcaatgggctgcagcggcatgtgctgagcttcgaggcgggggcagtgctgcaggactcctccaagtggcaggcgccggcttactgcttcaccaacaccaatggcagcagtgccaacgccgccgcttcgtcttcctgagatcacgtcgctgggcctccggagtccggtgtccgggctccacctgcagctggacgctgcatgtcatttggcagtcggctctcatcttgatggttgactcaggagaggcttttactattagtcagtactgattctcgcgtcgcgtgggctagaatcttaagacataattattactagttactaatctctgtaccaaaaagatgtaactacaggttacattacatctttaaaaaaatatgagaagcctcaacactaggcaaaacacccttagtctttgttgaggtactatagtattgatccctattgaaagagatccaagaaattccaacacacgtttaagcat

SEQ ID NO: 106854 - DNA, 288 bp, Zea mays
  Clone ID: MRT4577_28951C.1
atccggtcgaccacgcgtcaccccgcaccaccgacgctgggatgaaggccgtgccagccgacagccggccccgggccgatccgcgaccaagatcaccattcgtttcggggggcggcgcggagcggctctgggaagggcggacaggttgggctggcgcatcggctctgccttggccatgtcgcgctcgctactcgtggtctctggtgactgctcgctacggaccgacgcccgtcgcgacacctgattctggaggagagagggaatagtggacaatggggacagtcacac

SEQ ID NO: 106855 - DNA, 450 bp, Zea mays
  Clone ID: MRT4577_28952C.1
atgcagcactgcccgccccggacggacggtcctactgatcactccgctgctgactcgcgggccggcgtcggcgtcggcggaggcggaggcggaggaggaggccaccaagccatgggcgtggtccgcgccgagcgcaaggcccggagtgcggtggatcgatgccgatgcctacaagagggccgcgccgctcgtctcgtgtcctccatcctgtgctcacccataccatattcccaggcggacagcggcaaagctcgtttgtctcggagctgcgctattctggtgaaagcccaagaacgtgacgtcccgggaacggccaaacccatccgcttccgcctcgtaccacactgtcggcttcctttcatcacgctggcgggtccgggattgctgtttggagtacgcgctcctttcaaaatgtttggtgaattgcatgatgcctatgctaccagctag

SEQ ID NO: 106856 - DNA, 173 bp, Zea mays
  Clone ID: MRT4577_28953C.1
acgttgaccggtgctcgggacgaagatgtttaccgggacgagcagaagtgcaatgtgtgcaccaagacggtgtaaccgatggaccagctctccaccgacggcgtcgtcttcgaccgcacctgcttcaagtgacagcactgcgagtctaccctctcactgagcagctattcctc

SEQ ID NO: 106857 - DNA, 216 bp, Zea mays
  Clone ID: MRT4577_28954C.1
gccacgcccacgccccaatggaagacagcgctaccaatggccatggagttgtgacggctgtacgggcctcgtggaactttgagccagcacgagaccctcctgggcctttcggcgctctcagctcgcggcgtgctgaccaaagtcctggccgagatgttgcccgacgaggcaccggacggcagtccggttggacagctgcgactcgacagacttgcc

SEQ ID NO: 106858 - DNA, 319 bp, Zea mays
  Clone ID: MRT4577_28955C.1
gctataaaaccgcttcaccatttgatacgaagtgtccctctatttaagtgttgggttgcgttcttaaacttgtactttgcaatgtcctctgaggcttgatactgagatcatgtatatattttgaatggtattatagaggggagtctggtagtatgtattagtaagttcgcagattgccagaggcctaaaataagactggcgagtgtgagaatgagatgtgagacgaagagtgtgtgacggatgcaagtaggttcagacgcaagcgagcttcttcgccatgccaatggacttgccgatggcgttcttgcagacggacatg

SEQ ID NO: 106859 - DNA, 694 bp, Zea mays
  Clone ID: MRT4577_28956C.1
tgtgcaggcgctcgaggccggccgtttccgagatcgcttatcatctgcgcctctaatttcttctctctctgctcctccgcctccgcctgatccatccatgacaggaatcgccatgtcggagtcggaggagcaccacttctaatcgaacgtcgacgcatggggcgtccaatacctacccgcagcaggatggcaccgtccgtaagaacggcttcatcgacatcaagaaccgtccctgcaaggttgtgtaggatactacctcctagactggaacgcatagggcacgccgcatcccactttgccgacatagacatattcaaagggaaaaaggttgaagatattgttccttcatcacacaactgtgacattccgcatgggaaacgtagtgagtatcatctgattgatatttgtgagagatggatttgtgagccttcttacttcatatggcaacactaaggatgatcttacactcccaactgatgagactcttgtgggccagattaaggaagggtgcgaaagcggtaaggatcttgttgtgactgaccatgctgagacgggtgatgatcagatctgcgcggtggatgatgatggccccgcgtaacttccttggcttaggagacggaaccctactgtatctcatcttagatcggaaaagaagtgcatcaccaaaggattgctaccgagacattcacgtgga

SEQ ID NO: 106860 - DNA, 712 bp, Zea mays
  Clone ID: MRT4577_28957C.1
ccgggggtacaattacgaacgaaaacactccttcatagcctcgattcgaaccacagcctcgctcacagaccgtggcgaatcaaaagtagtgaatacgaaaggaatggagagagaggttgggcgtggagagagaaggtggggcggagctagcaaggcaaggtacctgtcaaactcgtggtcgaagtcatccatgccgccgtgctcccatcgcctcttgtcggagacaagcacctcaacgggttccttcgccactgcagccatgacagggacagaggcatgcttcgcgcataggactcgtcccccatgtgaacgcctaccatggcaccgctgccgtcgttcccgtccaccatctctgtcttcgtgtcgtgcccctccgtcgatggctgcgtcatctatggcatcgcgctcgatgctcccaacgcctcttgccgaagaaaagcgccttggcggggtccttcggcaccacaaccatggcagggacgaaggcgcacttcggcgtagaggactcgtcccccacaagaatgcatgccacggtgccgcttgatgaccgccttgcaagcttgggtggggaggagctcgttgcagcctgcgccgatctgttgattggctgctagggttgggagaggcggcgtcgatagatcgatgtgaggagtctcggtgggggaggtccgacgctccgcatatgggtgcaggaaaagcgagtggcatgggt

SEQ ID NO: 106861 - DNA, 119 bp, Zea mays
  Clone ID: MRT4577_28958C.1
cgatcattctctcacattcaaaggaggatcgggaacctcctatcgagaatggctgcctacctagaactcctacctgctcatgctacgcgctcttagtgcacaccatattcacgcaacat

SEQ ID NO: 106862 - DNA, 349 bp, Zea mays
  Clone ID: MRT4577_28959C.1
ctctccctgtccggcctcgcgggacccactgaccagtttctcctactttgccgccgagatctccgtgcgcacggcgccgacctccgcgtgaaccgcgggccagtcgcgagcttggggactccgttacaaaccctgtcccaagccataaataaagcccataccacggacgtgatccttcccaagtttcgagaatcgctggcacctaggggcgggtgggggaattgtgtgagacaccgccgccggagatccacgtcggggttgcgcatggtcttcatagcttgggaccgaggccttgtttctggtaaggggagggcgcctatggatgccttgagctcgaaggcccggtcga

SEQ ID NO: 106863 - DNA, 4784 bp, Zea mays
  Clone ID: MRT4577_2895C.1
atggatcctaagggaaaggggatggtggtcaacgacaaggaggagtccctcttcaacgagccaagggacgacaagcccattgactcaggtttgagtcacaggacgagggacgggaagaagaagaggtgcatcaagaaaatcatctactgcgacagtgatgcctcctcttcttcaccaagagacgacgacgacgactcttcgtcgaaaaagaaaacggttaatcaaaactactcttttgactattctcgcattccgtacaattcaaatgctcatttgctatcaattccacttgggaaacccccacactttgatggagaagactattctttctggattcatcaaatgtgtagtcatttattttccctccatcctagtatctgggagattgttgaaaacggaatgcattttgatagtactgacaatcctgtttttataaatgagcaaatccataagaatgcccaagctactactgtgttgctagcatctctttgcagggatgagtacaataaggtgagtggcttggacaacgccaaacagatctgggacaccctcaagatatcacatgagggaaatgatgccaccatgatcaccaagatggaactggtggagggtgagctatggaggttcgcgatgatcaggggagaggagccaacacaaacctacaacaggctcaagaccctggtcaacaagatacgaagctatggaagcacaagatggacggatcatgatgtcgtccgactcatgctaaggtcttttactataattgacccccatcttgtcaatcttattcgtgaaaatcccaggtacaccaaaatgatgtccgaggagatcctcggaaaattcgtgagcgggcgcatgatggtgaaggaggctcgatacgtggacgatgctctaaatggtccactactcatctacgagccacagctcgttgctctcaagggaactagcagcaaggagacgctaccaagcaaggtagcacaagtggaggctgctgggctgaatgaagatgagatggcgcttatcatcaagcgcttcaagaccgcactcaaaggacgcaaggagtaccccaacaagaataaaacaaggggaaaacgctcctgcttcaaatgcgataagactggtcactttattgctcaatgtcccgataataaaaatgacctggcacaagaaagacatgggaagaaggagaagaagaagaattacaggaaggcaaagggcgaggcgcatctaggaaaggaatgggattctgactgctcttcatcagactccgacgacgaaggacttgctgcctcggccttcgacaaatcctcactcttccccaacgaacgccatacatgccttatggccaaggaaaagaaggtacacattcaagatacccccaagtacacttcttctagcgatgaggaatcttctgacgatgaggtagattactcagatttatttatggggttagatcaagctaaagtagagaaaattaatgaattgatcgatgctctcaatgaaaaagatagattagtagaaaagcaagaggatattttacatgaggaacatgacaaatttgttagtgtgcaaaaatctcttgctttagaaattaagagaaatgaaatgctatcttctgagttatctgttcaccatgaatctgtctctagtttaaagaagttaaatgataaattaacagctaatctagaggaagttaataaaactagttcatgtgtagagcacgttattatttgtaatagatgtaaggattttgatgttaatgcttgtgatgaacatcttgcttctattactaagttgaacaatgaggtggcaagtcttaatgctcaacttaagacttgcaaagttgattttgacaaagtgaaatttgctagggatgcctacatagttggtagacacccctcaattaaggatggacttggctttcaaaagaaaaccaagaacttaacaagccaaaggactcccattctcaacaaggagaaagggaagacccctatggctagtagtcctcaaaggaatcatgcctttatttatgataggaaaattgctagtcattctcataggagttatgatcatgttgcttattatgattcaaatgctatgttagcttctagctccactcatgattatggtagaaataggcctaggacaatgtgcaataaaccttctactatttatcatacttgcaatacttcttttgtactcacatgcaaaaatacaaaagtagtggctagaaaattgggatccaaatgcaagggagacaagacttgtatttgggttccaaaagttatttttactaaccttgtaggacccaacaagagttgggtttatgcaaccgggggctcaagctggattatcgacagcggatgcacaaaccatatgacaggggagaagaagatgttcacctcctacgtcaagaacaaggattcccaggatacaatcatatttggagatgagaatcaaggcaaggtcaaaggtttgggaaagatagccatcacaagcgagcactccatttcaaatgtatttttagtagagtcgctaggatacaaccttctgtctgacaaattagaaacccaagggaccctaaagcgctttctaaggagggctcaaaatgaatttgagctaaaggtgaaaaagataaggagcgacaacgggtccgagttcaagaatctgcaagttgaggagtatcttgaggaggaaggcattaagcacgagttctccgctccatatacaccacaacaaaacgctgtgaacacagcttgccacgccataaaccggctctacctgcatcacctcctaaagaagacctcccacgaactccttaccggtaacaaacccaatgtctcttactttcgtgtatttgggagcaaatgctacattctggtgaagaaaggtagacactctaaatttgttcccaaggcagtagaaaggtttttactagggtatgactcaaatacaaaggcgtatagggtcttcaacaaatcatcgggattggttgaagtctctagcaacgttgtatttgatgagactaatggctctccaagagagcaagttgatcttgatgatgtagatgaagaagaaattccgacggccgcaatgcgcacgatggcaataggtgatgtgcgaccacaggaattacaggaacaagatcaaccatcctcctcgatggtggtgcatcccccaactcaagacgatgaacaggtacctcaagaagaagggcatgatcaagtgggagcacaagaagatcaagtgatggaggaagaagcaccacgggtccctccaactcaagtcctagcgacgatccaaagacatcaccccgttgaccatattctagttgacatcagcaagggagtaactactcgctcacgattagctaatttttgtgagcattactcgtttgtctcttctattgagcctttcagggtggaagaggccttgcaggatccagactgggtgttggccatgcaggaagagctcaacaacttcaagagaaatgaagtttggagcctggtgccatgtccaaagcaaaacgttgtgggaaccaagtgggtgttccgcaacaagcaagacgagcacggggtggtgacaagaaacaaggcttgacttgtggcaaaaggttatgccaagtcgcaggtttggatttcgaggaaacttttgctcctgtggctaggttagagtcaatttaaattttattagcctatgctgctcaccattcttttaggccgttccaaatggacgtaaagagcgctttcctcaacgggccaatcaaggaggaggtatacgtggaacaaccccctggctttgaggatgacaggtatcccgaccacgtgcacaagctctctaaggcgctctatggacttaagcaagccccaagagcatggtatgaatgccttagagatttccttatttctaatgctttcaaggttgggaaagccgatcccactctttttacaaagacttgcaatggtgatctatttgtttgccaaatttatgtcgatgacataatatttggttctactaatcaaaagtcttgtgaagagtttagcagggtgatgatgcaaaaattcgagatgtcgatgatgggcaagttgacctacttccttgggttccaatacacacaagatcttctcaagaggtttgggatgaaggacaccaagctcgcaaagacaccgatgggaactgacgggcacgttgacctcaacaaaggagaccccaaggaatgtcaccttgtggtcgttaagcgaattcttaggtatttagtttctacgccttgctttgggatctggtatccaacggggtctacctttgacttaattggatactcagactccgattatgctgggtgcaaggttgataggaagagcacatcggggacgtgccaatttctaggaaggtccctggtatcctggagttcaaagaaacaaacatctgttgccctatccaccgttgaggccgagtatgttgctgcaggaaagtgttgggcgcaactactttggatgaggcaaaccctccgggactttggctacaatctgaacaaagtcccactcatatgtgacaatgagagtgcaatccgattggcggataatcctgttgaacacagccgcactaagcacatagacatccggcctcacttcctgagagaccaccagcaaaagggagatatcaaggtgtaccatattagcaccgaaaaccagctagccgatatcttcactaagcctttagatgagaaaaggttttgcaggttgcgtagtgagctaaatgtcttagattcgcataacttggattga

SEQ ID NO: 106864 - DNA, 1758 bp, Zea mays
  Clone ID: MRT4577_28960C.1
gcacgagctccatccgaacaatgacgcgagcttcgacatttcgaaactgaatggtgtatactgttctacaaggccacttcgtgtggaggtggcgactcatatgacagctgcaggtgattctggctcttctccgccaaggcaatctgatgttgactctactaacaggacggtatatgttggtgggcttgccctcgctgccacttcgcctcacccgcacacactgcttccgcatcaccatatgccgcaaccgcggtgggtggtcatcccataccctcctccacaccatcccatggtggccgcgccgccgccaccttctctgcagtttgtgaagcattttacgccgccgtcctcggtaacaccgccgccgccgactggatccggcgggaacgggggcgaggataaccggaccatctgggtgggcgacctgcagtactggatggacgaaaactatcttcacagctgcttcggctctagcggcgaggtggtgaatattaaagtcattcgcaatagacactcgggagtttctgagggttatggttttatagagttttatactcacgtttcagcagagaaggcactgcagaatttttctggtcacgtaatgcctaatactgaccgggcttttaagttaaactgggcatcatatagtatgggagaaaaacgctcggaaatttcgtctgatcactcgatatttgttggcgatttggctgttgatgttactgatgcgatgttgctggaacttttttctaacaaataccgatcggtgaaaggagctaaagttattattgatgcaaacacaggccgttctagaggctacggctttgttaggtttggagatgataatgacaaaattcatgcaatgactgaaatgaatggtgtttactgttccacaagaccaattcgtgtaggaccagcgactcctagaagatctcaaggtgattctggcacttctccaccaaggcaatctcatgttgactctactaacaggacggtatatgttggtgggcttgaccccaatgttagcgaagatgaactgaggaaagcatttgcaaaatatggtgatcttgcctctgtcaaaattccttttgggaaacaatgtgggtttgttcaatttgtaaacagagttgatgctgaagaagcactgcatgggttgaatggatcaactattgggaagcaggcagttcgactttcctggggccgcagccctgcaagtaaacagtctaggggtgattctggccaccggcgcaatggcaactgcaacggcatgtactacgggacaccattctacggtggatatggctacgcctccccgattccgcacccaaacatgtacgccgcggcctacgaagcctacccgtactatgggaaccagcagctagtgagctgatgtagtgatgtggcgagatgctctctgctcagttttcctcccttggaggaaacgagtttttggtcccagtaaaagcatagtagctatgatgagatatatgataggtggccataaaaatgggcgcgagagacgagacaggcatatgatggtaacgctacctgcagatttgtgctgctagtagaacctaaaagagcttgtagtagacaaataaaaccttttcttttgtcttggaaattttgactcgctaataaaaagtgaagctatctgttgttgtggcaaaaaaaaaagaaaaaaaaaaaaataaaaaaaaaaaaaaaaaaaagaaaaaaaaaataaaaaaaaaaaaaaaaaaatagaaaaattaggaaaaa

SEQ ID NO: 106865 - DNA, 2509 bp, Zea mays
  Clone ID: MRT4577_28961C.1
ctgagctcctcgaggtcggccgggaacctttccttcgtctctccgctccgctcctcgaccccgaaccccgacgaccgggcggcctccttcccgaatcctagcccccccccaccctagcaccaccgcggcctgccttctctgggcgggtccttcccagatccagcacgggaggttaaaaaggaggcgggcaggtggtggatggacgggccgaagcgacacctgcgggtgcgcctccgcgtcactgcgcgccggcggggcgcctacggcgatggcgctggaggcgcgttggggcccaggcggcggaagtgccggatggagacccccgttctcaactccgctgccaagcttcagcgccgcgagatcgggggtcgccagctcgcggcacgcggcggcggccccgccgccgccgtgcccgagcgcttccggaacatgcagctccaggaggagttcgatacatatgatgacaatgctaacctatttgtgaagctgcagtttcttaaaagaagatccaaaattaatgagattgttgcagcaaaggatatcatatttgcccttgctaattctgggctttgtgctgcttttaaccgagtaacaaacaagcgcataggcttcttgaatttgagcccagatgaagtgattcggagcttgttctacaacaagaacaacgattcccttattaccgtttcagtttatgcatctgacaatttcagcacattgaagtgcagaacaaccccggttgagtatattagaaggaatcagttagatgctgggtttcccctctttgaatcagagtctctgaaatggcctggatttgtggagtttgatgacgtgaatggaaaagtactcacatattcagcgcaggatggtatatataaggtctttgaattgaagaactactccttcctatattcaataccagatgaaaacgtgcaggagataaagatcagtccaggaatcatgctcttgatatatgataggacaccaagttatgtcccattgaagatactatctattgaagatggaaagcaactgaaatcttttaagcacttgttgcatcgcaacaagaaaattgatttcatcgagcagttcaatgagaagctccttgtcaagcaagagaatgaaaacttccagatatttgatgtgcggagttctgagctaattgaagtcagtgtctccaagtttatgaccccttcagcattcatttttctgtatgagaacaacctcttcttgacattccgaaacagaacagtcgctgtatgggacttcagaggagagcttgtgacttcatttgaagaccatttgctctggcataatgattgtagcaccaacaatatttacatcacgagtgaccaggatctcattatctcgtactgcaaatccgaggcagtggctgaggatggtacagttgttccagttggatccatcaacataagtgagattatgacaggcaggtgtatcgccaagattactgccaatgatccttccctaagtgtacccggacgcagaaatggttacagcaagcggtcctcggactggagcaccgttccagaagctctggaggacgtcactgcactgttttatgatgaggacaggaatgagatctacaccggcaacagccatgggctggtgcatgtgtggtctaactagatagtagcatgtacatacatcatttcgcccttttgatttgacttggttagctttactgcatgctgtataatccctggctcgggggctcacctagcttttctatttggcaatagaatgtgtttccttgagcaattgtgaatgcatagtgttcttgtaaatatcttttgttcagctaccttgttcaagtaacatagaaataggcctgccaaatgtaactttgctggatactgccagccaagtttcgggcagcaagagagtgaagacctgcagttctgaccatcatgttattgttattttcaagtgtgttgtagtgttcgttttgtctgtaagctgctgaattatcgtatctgaagccttggatgaaccacctttaattatcagttaatccgttaaaaaatgaaatcaaaaaaaaaaaaaaaaaaaatcttgacactggtgtcgtgcagttgttccagttggatccatcaacataagtgagattatgacaggcaggtgtatcgccaagattactgccaatgatccttccctaagtgtacccggacgcagaaatggttacagcaagcggtcctcggactggagcaccgttccagaagctctggaggacgtcactgcactgttttatgatgaggacaggaatgagatctacaccggcaacagccatgggctggtgcatgtgtggtctaactagatagtagcatgtacatacatcatttcgcccttttgatttgacttggttagctttactgcatgctgtataatccctggctcgggggctcacctagcttttctatttggcaatagaatgtgtttccttgagcaattgtgattgcatagtgttcttgtaaatatcttttgttcagct

SEQ ID NO: 106866 - DNA, 716 bp, Zea mays
  Clone ID: MRT4577_28962C.1
aaggaaataaatcagttgagaaagctggaggtgacctttgggacaaacaccatggctgaaactgatcatggccaagataattgtctggaccaagaagttcctcaggaagccgaacgaacctctgataaatcaaataaatcaagtgggacagaggatgtgaaatctgatcttgctttggacaatgttgcagagtttgagatccaatgggaagaaatttctattggtgaacggattggccttggatcgtttggagaagtttatagaggagaatggcatggaacagaagttgctgtcaagaagtttttgcaacaggatatttcaagtgatgctctggaagagtttagagctgaggtgttggggtcaataccaattcaacaatagttgattatttgttgactagagattctgcggcgcaatgttgagcaagatatatcaacgatgccctttgtctgcattcaaaggattcatctattgatgtcgcaagcttgtgacaactggcgagtgtgaatcctgatctacgactccctgcaatcataatcctgtgactgctggttagtgtcaaatgcagtctgttaaacttgttgatgcggtcactaatacaagttcatcaaagatttgtccgaatgccataattctgtcataaaatttactctctgtaatgtaacacacaatgctaaatgtttattcattatcgatcttggaatcagctgttcatc

SEQ ID NO: 106867 - DNA, 1405 bp, Zea mays
  Clone ID: MRT4577_28963C.1
ctgagctaattgaagtcagtgtctccaagtttatgaccccttcagcattcatttttctgtatgagaacaacctcttcttgacattccgaaacagaacagtcgctgtatgggacttcagaggagagcttgtgacttcatttgaagaccatttgctctggcataatgattgtagcaccaacaatatttacatcacgagtgaccaggatctcattatctcgtactgcaaatccgaggcagtggctgaggatggtacaggtgcagtactcaaaccctgaccatttcctcagtatttagtttgcactatctatatagatgcaactgctcccatatcccaattgggatttttcctttttactggcctcttcaactagcctctgatgtcaacatgctggatgtttgcaacattgaatataggctgatagatatcgggcaccattacaaggtcatgaatatgaccacataaaaaaaagtgaactggcattatagaaatctttctttgattgtgctatcaggaaataatcttgacactggtgtcgtgcagttgttccagttggatccatcaacataagtgagattatgacaggcaggtgtatcgccaagattactgccaatgatccttccctaagtgtacccggacgcagaaatggttacagcaagcggtcctcggactggagcaccgttccagaagctctggaggacgtcactgcactgttttatgatgaggacaggaatgagatctacaccggcaacagccctgggctggtgcatgtgtggtctaactagatagtagcatgtacatacatcatttcgcccttttgatttgacttggttagctttactgcatgctgtataatccctggctcgggggctcacctagcttttctatttggcaatagaatgtgtttccttgagcaattgtgattgcatagtgttcttgtaaatatcttttgttcagctaccttgttcaagtaacatagaaataggcctgccaaatgtaactttgctggataatcttgacactggtgtcgtgcagttgttccagttggatccatcaacataagtgagattatgacaggcaggtgtatcgccaagattactgccaatgatccttccctaagtgtacccggacgcagaaatggttacagcaagcggtcctcggactggagcaccgttccagaagctttggaggacgtcactgcactgttttatgatgaggacaggaatgagatttacaccggcaacagccatgggctggtgcatgtgtggtctaactagatagtagcatgtacatacatcatttcgcccttttgatttgacttggttagctttactgcatgctgtataatccctggctcgggggctcacctagcttttctatttggcaatagaatgtgtttccttgagc

SEQ ID NO: 106868 - DNA, 295 bp, Zea mays
  Clone ID: MRT4577_28964C.1
gtagaagaacaccacatgaaccgcatatgttccacgaccaaaggaagaggacgactactgaccaagcagataatgattaccagtcacttaagctctgatccctggtacacatcgatgcgctagaccctctaggagtcgaatagccaccagctaggagagcgtgcaaatgaggccgacgacggcatgttcactgatgcatgcggcgacgcaaactgttagcctgatcagccagctcatgatactgtcctcaactccatatccaatatagcatggactaaatgaacgaatgcactca

SEQ ID NO: 106869 - DNA, 335 bp, Zea mays
  Clone ID: MRT4577_28965C.1
ggaacaacttttttttttgatggggggggccagtttaaatcaaaccccaaacacgaccaacaccaacagggcgcggggggaaactacctacacctacctccggaccgggggggcgagggccatcaatttggccctacaagaacccaggctgaaaaatttttttcccccccacaacgcagggccaaacccttatttatcaacccatgttgcacccctttctgtttccttgaccccggtgatccacccccatcctttaaaccggagctgtaaaagggaccaaattcaaacacaccccccccccccccatttttggaccggcgaaaaaaaacccggcc

SEQ ID NO: 106870 - DNA, 741 bp, Zea mays
  Clone ID: MRT4577_28966C.1
gacgaattgcagaatgatgatgccgaagcacgcatcaaactctggatccggcatatcctgaagtgcaaaactggggtactaggggtgtgtttggcatggctctgctccaccccagagcagctctactctaaaactctgggtggagcagctctgctccagagtttagattgtttctcataaccagtggcaatggcggttaaataactcaaaactccatgactaggttgcttttttggagttttcagagcagcaaaagaggtactccaaaaaattgtactgcaactccaaaaactccatagagtttacaactctggagttagggtgtttggcatgctctggccagctcctccttggagttttgctctggagccatgccaaacaggcccttaaaggcctgtttagatgaaagggggttgcgctagcagcacaaggtatttagttcaaatttgaactaaatcttaactaatctgttccaaatccccgacatccaaacatgccttttatatatatatacattttttgtttgcccggttttgctgatagcatggtgagaagctgtatattggagccattcgatgtaaccattcttttttttgttagaagataatgtaattccctggagtatggggcggcagctgtattggcaacgaaaagattaatcgcaaagaatatacccttttgtatccactgaacattttctttcgttatacgtgtggaatgcagcctgtaattgcttttacc

SEQ ID NO: 106871 - DNA, 644 bp, Zea mays
  Clone ID: MRT4577_28967C.1
tttagccttcgtcacagatctctagctcgccgcacaacggcaggagccaggcccagaattcacagtgagggcgtggttgatgagatccagctcccagctcctacgagggcgaaactactccgccgcatacgggctggcccagcggaagggggacgggctcctggggcgggatgggatcctggagcctctacaggtgcacatgagatgcagccactctcttgctcccgcgcgatctacgataatggacatgatgcaaacgctcatggccgaggtactccacaatgacgcatccgcatcggcgtcttcatattagggtgatgagtgtctgggggaaatgctagaggtgtcgcaacaggtaaagatagcgttcataaattctatcaacccgcatgtgactcatgactgcctgtaaatgatcttagatgaactggtcatgatactattgcggtaatggattagtactgcaagcatatgacctatgatgactgggtcaaaagaatctggggaatcgaatgtgtgaccgttggataaaaaaaaaaaaaaagagggctgcgagatatggtgtatagtaacctgttaggcgggaccaattgctgaggttggtggaattaagactatatatgctgccagggtgaaatagctat

SEQ ID NO: 106872 - DNA, 481 bp, Zea mays
  Clone ID: MRT4577_28968C.1
gcacgaggccagatccaacatccaaagactgcttggctgcaaacgcgcgggcgcgaggaggagagcagatggccattggtcagtacgtagggcacccggccggcatcggataaatggccctggaggcgttggccgtccttctcaggggtcgatcggccagtgcaaacgctccaaggacgacgaaggacagacaccggcagcgccatgtgccgggctatggcggccacaggttgctgcatcggccatgtggtgcccgcgtgccgacgggccccctccttacctggctctgcctcgcgcatcgatggatcccgctcgctcgccgtatgcaaattaaaggacggatccgatattgatcaggacggccgatcgaggccccggcccgcaggaatccccactgcctgcctagtgcttggataagaatccatgcatcgccgccgcctgtacctgtgactgtcatctgctggttttattttatttttat

SEQ ID NO: 106873 - DNA, 267 bp, Zea mays
  Clone ID: MRT4577_28969C.1
gggtttttacgctcagttgcagagtagtccgctgcatattcacacagtgaagctgtgtccgtttccccatcactgtcatcaatgaggtcgcctcgccatgcctggtcctcctcttcttattaatggcgtaactgtaccgcgcatatcccgcacctgctaatgttcttcttcgtccctcccgctccattcctccactgctgcccgttaacggagtaacagctacacctaatattcttttctctttactatgcgagctttaatgcccgt

SEQ ID NO: 106874 - DNA, 4614 bp, Zea mays
  Clone ID: MRT4577_2896C.1
atggatcctaagggaaaggggattgtgatcaatgataaggagaaggagtccttcgccaacgagccgaaagatgacaagcctaccgactcgggctcgggtcacaaacgaagagatgggaagaagaagaagacgaggcgcatcaaggagatcgtctactacgacgacagcgacgagtccacttcttcccaaaagggcaacgacgataacgactacgacaaaagaaagtcggttaattcaaacttttctttcgattactctcgtattccgcaaagtacaaatactcatttgctctccattccacttggcaaacctcctcactttgatggagaggactacggattttggagtcacaaaatgcgtagtcacttgttctctctccatccaagcatatgggagatagtagagagtggaatgaaatttgatagtactgatagtcccatgttcattaacgagcaaattcataaaaatgcacaagctactactgtgttgttagcctcattgtgcagggacgagtaccataaggtgagcggcttggacaatgccaagcaaatatgggacaccctcaagatctcacatgaggggaacgacgttaccatgctcaccaagatggaattggtggaaggcgaactcgggagattcgcgatgataagaggggaggagccaacccaaacatacaacaggctcaagaccctcatcaacaagataaggagctatggaagcacgcgatggacggaccacgacgtcgtccgcctaatgctaaggtcctttaccgtccttgatccacatcttgtgaacaatatttgtgagaatcctaggtacacgaagatgatgcccgaggagatccttggaaaattcgtaagcgagcggatgatgatcaaggaggcaagatacgtggacgacgcgttgaacggtccaatccatgagcctcaacccattgctctcaaggcaacgaggagcaaggaggcgctacctagcaaggtagcacaagttgaggcggtcgggctcaatgatgaagagatggccctcatcatcaagcgcttcaagacggcgcttaaggaacgcaaaggacagccttacaagaacaagacgaaggggaagcgctcatgcttcaaatgtggtaaggaacaagggaacaagagggaaaagaagaaaacttacaagaaggctaagggcgaggcacaccttggcaaggagtgggactcggattgttcgtcatccgactccgacaacgaaggactcgccgccaccgccttcaacaaatcgaccctcttccccaacgagcgccatacatgcctcatggcaagggagaagaagaataaattattagaaaagaaagaggatttgttatatgaagaacatgataaatttgtagaggcacaaaaatctcatgctttagaagttaaaaggaatgagatgctttcttgtgaactatctacttgccatgagaaaatttctagcttaaggagcataaatgataatttgaatgctaagttagaaatagctagtaaatcaacatcgtgtgtagaaaatgttgtaacttgcactaggtgtaaagatgttaacattgatgcttgtagtgaacacctagctcgcatttctaaattaaatgatgaagtggctagtcttaatgcccaacttaagactagcaagagtgattttgataaactaaaatttgctagggatgcctacacggtttatacatccgggggctctagctggattatcgacagtggatgcacaaaccacatgacgggggaaaagaagatgttctcttcctacgtcaagaacaaggatccccaagtttcaataatattcggtgatgggaaccaaggcaaggtgaaagggttagggaagattgctatttcatccgagcactctatttctaatgtgtttttagttgagtctcttggatataatttgttatctgttagtcaattatgcaatatgggatataattgtctattcactaatgtagatgtgtctgtctttagaagaagtgatggttcattagcttttaagggtgtactagacagcaaactttatttagttgattttgcaaaagaggaggccgatctagatgcatgcttatttgctaagactagcatgggctggttgtggcatcgccgcttagcacatgtggggatgaagaaccttcacaagcttctaaagggagaacacgtgatagatctaaccaatgttactttcgaaaaagatagaccttgtgcagcttgtcaagcaggtaaacaagtgggaggagcgcatcacaacaagaatgtgatgaccacatcaagacctctggagctgctacatatggacctcttcggacccgtcgcctatctaagcataggaggaagtaagtatggactagttattgttgatgacttttcccgcttcacttgggtattctttttgcaggataaatctgaaacccaagggaccctcaagcgcttcctaaggagaggtcaaaacgagtttgagctcaaggtgaagaagataaggagcgacaatgggtccgagttcaagaatcttcaagtggaggagtaccttgaggaggaagggatcaagcacgagttctccgctccctacacaccacagcaaaatggtgtggtagagaggaagaacaggacacttatagacatggcgaggatgatgcttggagagttcaagacccccgagcgcttttggtcgaaagccgtgaacacggcttgccacgccatcaacagggtctatcttcatcgcctcctcaagaagacgtcgtatgagctactaaccagtaacaaaccaaatgtttcgtattttcgggtttttgggagtaaatgctacattctagtgaagaagggtagaaattccaaatttgctcccaaagccgtagaagggtttttgttaggttatgactcaaatacaaaggtgtatagagtcttcaacaaatcatcgagtttggttgaagtctctagcgacgttgtatttgatgagactaatagctctccaagagagcaagttgttgattttgatgatgtagatgaagaagaagttccaacagccgcaatacgcaccatggcgattggagatgtgcgaccacaggaacaagatgaacaagatcaaccttcttcctcaacaatggtgcatcccccaactcaagatgatgaacaggaggcgtgtgatcaaggggagcacaagatgatcatagtagaagaggccttgctagatccggactgggtgttggccatgcaggaggagctcaataacttcaagaggaatgaagtttggacactggtgcctcatcccaagcaaaatgttgtgggaaccaaatgggtgttccgcaacaaacaagacgagcacagggtggtgacatggaacaaggctcgacttgtggcaaaaggttatgcccaagtcgcaggtttggactttgaggagacttttgctcctgtggctaggctaaagtccattcgtattctgctagcatatgccgttcaccattctttcaggttgttccaaatggatgtgaagagcgctttcctcaacgggccaatcaaggaggaggtgtacgtggagcaacccctggcttcgaggatgaacggcaccccgatcacgtgtgttgggaaagccgatccaactcttttcactaagacttgcgatggtgatctgtttgtgtgccaaatttatgtcgatgacataatatttggttctactaaccaaaagtcttgtgaagagtttagcaggatgatgactcagaaattcgagatgtcgatgatgggcgagttaagctacttccttgggttccaagtgaagcaactcaaggatgggaccttcatctctcaaaccaagtacacgcaagacttgatcaagcggtttgggatgaaggacgccaagcccgcaaagactccaatgggaaccgacggacacaccgacctcaacaaaggaggtaagtccgttgatcaaaaagcataccggtctatgatagggtctttactttatttatgtgctagtagaccggacattatgcttagcgtatgcatgtgtgctagatttcaatccgatcctaaggagtgtcacttagtggctgtaaagcgaattcttagatatttagtcgctacgccttgcttcgggatctggtatccaaaggggtctacctttgacttgattggatattcagactccgactatgctggatgtaaggtcgataggaagagcacatcggggacgtgccaattcttaggaaggtccctggtgtcatggagttccaagaaacaaacttccgttgccctatccaccgctgaggccgagtacgttgccgcaggacagtgttgcacgcaactactttggatgaggcaaaccctccgggactttggctacaatctgagcaaagtcccactcctatgtgataatgagagtgctatccgcatggcggataatcctgttgaacacagccgcacaaagcacatagacatccggcatcactttttgagagaccaccagcaaaagggagatattgaagtgtttcatgttagctccgagaaccagctagccgatatctttaccaagcctttagatgagcagaccttttgcaagttgcgtagtgagctaaatgtcttagattcgcggaacttggattga

SEQ ID NO: 106875 - DNA, 156 bp, Zea mays
  Clone ID: MRT4577_28970C.1
ctcatctgcatacacggtctccctcttcctgtcagtactagagtgcgagcgcggcagcgagtcggacacaaggtgaaatggggacacctttcttcaattcacttgccttcgttttacaacatttctgactcttaaaaccttgctatttcccttctt

SEQ ID NO: 106876 - DNA, 447 bp, Zea mays
  Clone ID: MRT4577_28971C.1
cgccactccgcggactcgaccaccactccgctccggacgcgtcttagctgcatgctcgcgccgccctcctctccatcatacaatgctctctcctctagcgattcgctcagtctcgatcctagcttaccttccaagaagtgcagcgcccatggccatgggcacgcaagcctccggcggcacgcgacaacaggaggaacgcctctgtgtcgccgcgggagaagccgcgcgatctgagctcgtatttctcgctgtcgtcctcctcctccaccggaccggccccgctccgccggccaccgaggaggcggtggaggcgcccaaagggttcgtggccccgcaggtggaccccagcacgccgtccccgatctttggcggcagcacgggcgggctgctccgcaaggcgcaagtggaggagttctacgtcatcacgtggacgtcccccaaggagca

SEQ ID NO: 106877 - DNA, 948 bp, Zea mays
  unsure (1)..(948): unsure at all n locations
  Clone ID: MRT4577_28972C.1
gcgctgtagtaccaccatcctttcctctagagttcaaaaatctactgatctagaggcgggccggcctcccatgccgccaccgccgcctccaggaccacctcaccagcgccgtcgccgcggcgcttcttcgcagcttcgccctctggccgtgggatatggtccagtcacggcggcgcagcggcaactaccgttgcccgcgccgcgccgcactgccggcggcagcgctcctgctcttcctcctcgccgccgtcgcgctgctctacgtctccccgccgccgctcgcagaccaccccgtgctcgcttcctcccgccgccgccgctcggcccataccttgctgaacagctccggcgccggtagcatggaggagttcgagcgccgcgagatttcccgtgctccgacgaatggttcggccgtcagggatgacctttggggttcaaagcttgctagcaaattttatgggtgcagcaactcaagcagcaggtttcttgactcaaatattactacccaaccagagcgctatttgatgattgttacaagtggaggcctgaatcaacagagaacagggataatcgatgctgttgttgctgcacgcattttaaatgccacacttgttgttcccaaactagaccaagcatccttctggaaagattcaagcaatttttcggatattttttacgccgactggttcatctcatctctatcaaaggatgtaaagattgtgaaagagcttccacatataggaggtaaacttcgggctcctcacagaatgcgtgttccccgaaaatgtactgagcggtgttancttgaaccgtgttttgcctgcacttcttaagaaacatgttattccggntgacgaagtttgattatagatttagcaaataggttgcaaatggacttgcaannnagtgagatgtagagtcaactatcatggcattgagatttactgc

SEQ ID NO: 106878 - DNA, 455 bp, Zea mays
  unsure (1)..(455): unsure at all n locations
  Clone ID: MRT4577_28973C.1
gtacgcctgcaggtaccggtccggnnattattcccgggtcgacgagctcactagtcggcggccgccctttttttttttttttttttttttttttttttttttgaccaccatggtttgctgtttttaactgaaggctaatcagtgagttcgttcattccactagagctttttaccagcctacaattaagccaaacagaggagtggaaaagtagcattggagccatcaacctttgttgagaccacttggaaggtcaatgtttccattagcagcattcttgttcccaacaaaactacatacatttccctgctcgctaacacccgatgttatggcgtcgttgacaggaaaagaaacttaaaagcctgtcatttgccttaaaaaccctcgagccgaattccgagcttacaaacccgtgcattggacgtccttactcttatatagaggcaactaaatttaa

SEQ ID NO: 106879 - DNA, 945 bp, Zea mays
  Clone ID: MRT4577_28974C.1
ctcaattttcgtttcttttgcttcctttcctctatgaattggttttttgctctatgaagtaataatcacagcaagcttttttcgagtatgaatatcatcagctctttgcacttggttgttgcctcgcagactaggcgccagccttctgcgaactgtctctacccttacgaaggaaaaggcagccttctcaccgtcggacccggcgatgcagcggcacgtcgcctccggccggccgtcgggcacggacggctccgacttttcttaccgcatggtcgtcgaatcccgtaaccatccaccgcccacaccgccaaagccacgcttccaacgcctctttcataacctcgcaattttgtagggtaccagagggtcgccgagggcagatcccgcctcgcgcgcctcatcctcgtgcagggcgaatgcggaccatggcagtgctgcttcggctttacacaagcttgtcatcaattgcggttgcattctctgtgacgtgcattatccggtcagagttgttcttgaaggttatgaagcaaaacacagaggccatcacaagctacgaaatgcttgatgcggttcgtgttgctcttggtatcctgctgcaaatggtggttatagctacaactaccagactcctgcagaatatgtctcctcccaagagagcttcatgaatgctatgacattttagctttgtttcaagtagtaagggatacaaacttcgagttaaaaatattggccaagtgcgatagtcttgtaccgaagatgctactggtgtacaactgtcaggaaatcgtggtttacttgtttcctcttttgtttttgttttacttcttcccttttctggatctggaaaattcgtagtcgttggcgagctttgcaagctaaaggctaacggagcatatgtgtttttaattccgtcttcatgtttgtgtccatgtaaaaaaatcaaaa

SEQ ID NO: 106880 - DNA, 990 bp, Zea mays
  Clone ID: MRT4577_28975C.1
gtctctacccttgacgaaggaaaaggcagccttctcaccgtcggacccggcgatgcagcggcacgtcgcctccggccggccgtcgggcacggacggctccgacttttcttaccgcatggtcgtcgaatcccgtaaccatccaccgcccacaccgccaaagccacgcttccaacgcctctttcataacctcgcaattttgcagggtaccagagggtcgccgagggcagatcccgcctcgcgcgcctcatcctcgtgcaggcgctgcacctagtggccggaggcttgcttctattgctgtcgttgtccaagggggcggcggtgaacaagttcgccgtgctgtccatggccgcgggattcctggctatagtggtgggggaattagggcgaatgcggaccatggcagtgctgcttcggctttacacaagcttgtcatcaattgcggttgcattctctgtgacgtgcattatccggtcagagttgttcttgaaggttatgaagcaaaacacagaggccatcacaagctacgaaatgcttgatgcggttcgtgttgctcttggtatcctgctgcaaatggtggttatagctacaactaccagactcctgcagaatatgtctcctcccaagagagcttcatgaatgctatcgacattttagctttgtttcaagtagtaagggatacaaacttcgagttaaaaatattggccaagtgcgatagtcttgtaccgaagatgctactggtgtacaactgtcaggaaatcgtggtttacttgtttcctcttttgtttttgttttacttcttcccttttctggatctggaaaattcgtagtcgttggcgagctttgcaagctaaaggctaacggagcatatgtgtttttaattccgtcttgaaaaaaaaaaaaaaaaaaaaaaaaaaaaaaaaaaaaaaaaaaactggggggggggccaaggaacccaaatccaccctatagagaaaagtattacgcgcgctg

SEQ ID NO: 106881 - DNA, 401 bp, Zea mays
  Clone ID: MRT4577_28976C.1
gggggggccccccgagagagaaaggaccattttttatttggaaaaagaggagggggtcctttcatttacaaggggggggggccccgcacacaaaaacggggacaagggatggtccacccaacctatgctaaaagcccaaacaaccccaacatccacaggaccaaacaaggcccgaggcctgagtcctgaccaaccagaacacacacaggtgaggggatcaaacccttaccaacccccccatgaccaaaggacccgggaaacccttggggccggggccgaggaaaccccaagggggggggggggctgggaacaagtcacaaacttttgggaaaaacaaaagccagggggggggggcaaaaccacaggcccggacccggggggggaccccggggcggcacccc

SEQ ID NO: 106882 - DNA, 1213 bp, Zea mays
  Clone ID: MRT4577_28977C.1
cccggtcgccttgacacgcagactaggcgccagccttctgcgaactgtctctacccttgacgaaggaaaaggcagccttctcaccgtcggacccggcgatgcagcggcacgtcgcctccggccggccgtcgggcacggacggctccgacttttcttaccgcatggtcgtcgaatcccggtaccagagggtcgccgagggcagatcccgcctcgcgcgcctcatcctcgtgcaggcgctgcacctagtggccggaggcttgcttctattgctgtcgttgtccaagggggcggcggtgaacaagttcgccgtgctgtccatggccgcgggattcctggctatagtggtgggggaattagggcgaatgcggaccatgtcagtgctgcttcggctctacacaagcttgtcatcaattgcggttgcattctctgtgacgtgcattatccggtcagagttgttcttaaaggttatgaagcaaaacacagaggccatcacaagctacgaaatgcttgatgcggttcgtgttgctcttggtatcctgctgcaaatggtggttatagctacaactaccagactcctgcagaatatgtctcctcccaagagagcttcatgaatgctatgacattttagctttgtttcaagtagtaagggatacaaacttcgagttaaaaatattggccaagtgcgatagtcttgtaccgaagatgctactggtgtacaactgtcaggaaatcgtggtttacttgtttcctcttttgtttttgttttacttcttcccttttctggatctggaaaattcgtagtcgttggcgagctttgcaagctaaaggctaacggagcatatgtgtttttaattccgtcttcatgtttgtgtccatgtcttcaaaaaaattgcaacttgctgaaagcccaagataaccacaaaagaatgccaataattctgtcggtatctttgattgccatgtctgctttggaaataagactctgaatatgacctgtagctactcagcgtttcctgtgttcatgccttttggatcctatttctaaaatctggatctccggacactgctggtactgacgagcgctttgccgttggataatcatcggtgtgtgtaaagtctactcgatgtcattgtgtagtagctgtaggactcgagccagtaaaatggacatctttgatcaccaatttactgacagcagagcagaatgtattcc

SEQ ID NO: 106883 - DNA, 245 bp, Zea mays
  Clone ID: MRT4577_28978C.1
cgggcaccccacttactcctaccaacccttggcgtaacgtccccatgcacatctcgtactatctcaatcattgcagacaccaaaccctagccaggccccacggcattccccagggtgctgctagcaagccttgtcgatagaatcatcataaggctggtagagaggccctaatcgctccagacactatggtcgacgggagtatagaaagggggagaacccaatggtggaggcctaccggatccaac

SEQ ID NO: 106884 - DNA, 1236 bp, Zea mays
  Clone ID: MRT4577_28979C.1
tcgaggccggccggtccgggacctgctctctggtctctgctcgtggttcgcggcttcgcgcacgcgcagcaatggcgctccggccgcagctgcttcgcctcctcctcccatcgcctccccaccggaaccctccgcctccgcctctgccctcctccccgtacgtcgcacccattggccgccgcaccgccgcagcagccgtcctcctgctcgccgcgggcgtctccgccccgcctccgcgccccgcccgcgccgagcccgacggcgaggacgtcgacgaggcccgcatcgtccgcctgttccaggaggcgtcgccgtcggtcgtattcatcaaggacctcgtcgtcgcggggccgcaggggcggggaggtggtgaggatgaggacggggacgaggagggcggcggcgccaaggtggagggcacaggctcgggattcgtgtgggactccacgggccacattgggtatatctgtgaatttagtagtcctctgatcgatggcaattcgttgcttcaagtttcaaaaattcagtgtgtatttacgctgccacatcaggtcacgaattaccacgtggttgcgaagttaccgggaggcctttccgtgtcgcatcgcttgattgagttcttagtcagcgctattgactgctgctctttatccccattgctctgtatttccggtcgagtgaaattccacagaacccacgcgatctatttcatgcgacagtaacattatgttacgcccctcaattcaagaaaacaagctgcagtgttgtacgtacgtctagagacatagatatagatgtgtagatcttgcgctgctgtgtactggctgggcgtgaggtctcacctgtctctggcagtccggaccggcgagcatagcaacactccagggaagatttagcgaggcagacatagtctgcgtgtgcgagatactgggtccagaagagaagatatggtatactgaacatcattacccccttttcctttttttgcaggatctgggatctcgtccggggtgaacttcgccatccccatcgacacggtggtgcagtcggtccccaacctgatagtgtacgggacctccgtgagcaacaggttttattaactgtgttgtacatcatcatgatccgttccagtgcgtgtcctcactctgtctttgctacgctctcgttactccatatatgcgtacttgtgtgtgttaattactaaaaaaaaaaaaaaaaaaaaaaactcgagaaagg

SEQ ID NO: 106885 - DNA, 5898 bp, Zea mays
  Clone ID: MRT4577_2897C.1
atggatcctaaggggaagggaatcgtgatcaacgataaagagaaggagtccttcgtcaacaagcctaaggatgacaagcctatcgactcaggcttgggccacaaacacaaagatggaaagaagaagaagacaagacgcatcaaggagatcgtctactacgacgacagtgatgagtccacttcttcccataaggacaacgacgacaacgactacgacaaacgaaagacggtcaactcaaacttttcttttgattattcgcgtattcctcaaagttcaaattcacatttgctctccattcctctcggcaagcctccacactttgatggggaggactacggattttggagccacaaaatgcgtagtcacctgttctctctccatccaagcatatgggagattgttgagaatggaatgaaatttgatagctcgaatagtcctatttttattaatgaacagattcatagaaatgcacaagctactactgtgttgttagcctccttgtgcagggacgagtaccataaggtgagcggcttggacaatgccaagcaaatctgggacaccctcaggatctctcatgaggggaatgacgtcaccttgctcaccaagatggagttggtagaaggcgagctcggaagatttgcgatgataaggggcgaggagccaacccaaacatacaaccggctcaagacccttatcaacaaaataaggagctacggaagcacgcgatggacggaccacgacgtcgtccgcctaatgctaaggtcctttaccgttctcgatccacatttggtgaataatattcgtgagaatcccaggtacaccaagatgtcgcccgaagaagtccttgggaagttcgtaagcgggcgaatgatgatcaaggaggcgagatacgtggacgatacgttgaacggtccaatccatgagcctcaatccattgctctcaaggcaacgaggagcaaggaggcattacctagcaaggtggcgcaagttgaggcagcagggctcaatgatgaagagatggccctcatcatcaagcacttcaagacgacgcttaagggtcgcaagggacagccaagcaagaccaagacaaaggggaagcgctcatgcttcaaatgtggtaagcttggtcattttattgctaactgtcccgataatgatagtgaccaggaaaaaggaaacaagagggagaagaagaagaattacaagaagaccaagggcgaggcacatatcggaaaggagtgggattcggattgctcctcctccgactctgacaatgaaggactcgccgccactgctttcaacaagtcatccctcttccccaacgagcatcacacatgcctcatggcgaaggagaagaaggtatgtactcgggataccacttatgcttcttcaaatgatgatgattctagtgatgacgatgagatagactattctagtttatttaaaggtttggatagaattaaaattggcaaaattaatgagttaattgatgccttgaatgacaagaataggttactagaaaagcaagaggatttgttgtatgaagagcatgataaatttgtcagtgcacaaaattcacttgctttagaagttaaacgaaatgatatgctttcttgtgaaatatctacttgccatgagacaatttctagcttaaagagcataaatgatgatttaaatgctaagttagaaaaatctagtaaattaacatcttgtgtagaacatgttgtgatttgcactaggtgtaaagattttaatgttgatgcttgtagtgaacacctagattgcatttttaaaataaatgatgaagtagctagtcttaatgctcaacttaagactagcaagagtgaatttgacaaactaaaatttgcaagggatgcctacacaattggtagacacccctcaattaaggatggtcttggcttcaagagggaagccaagaacttgacaagccataaggcccccatctccgccaaggagaaagggaaggcccctatggctagtagtgtgcaaaagaaccatgcttttatgtaccatgataggagacaatctagaaatacttataggagttgtaatgcatatgatgcttttgattctcatgccatgtttgcttctagttcttcctatgtgcatgatagaaatgttgatgtgtctgtctttagaagatgtgatggttcactagcttttaagggtgtactagacggcaaactttatttggttgattttgcaaaagaagaagccggtctagatgcatgcttaattgctaagacttgcatgggctggctgtggcatcgccgcttagcacatgtggggatgaagaacctccacaagcttctaaagggagaacacgtgataggtctaactaatgtacacttcgaaaaagatagaccttgtgcggcttgtcaagcagggaaacaggaggaagataaatctgaaacccaagggaccctcaagcgcttcctcaggagagctcaaaatgagtttgagctcaaggtgaagaagataaggagcgacaacgggtccgaattcaagaatcttcaagtggaggagttccttgaggaggaggggatcaagcacgagttctccgctccctacacacctcaacaaaatggtgtggtagagaggaagaacaggacgctcatcgatatggcgaggactatgcttagagagttcaagacccccgagcgtttttggttggaagccgtgaacacggcttgccacgccatcaacatggtctatcttcaccgcctcctcaagaagacttcatatgagctgctaactggtaacaaacccaatgtgtcttattttcgtgtatttgggagtaagtgttatattcttgtgaagaaaggtagaacctctaaatttgctcccaaagctgtagaagggtttttattaggttatgattcaaatacaaaggcgtatagggtcttcaacaaatcatcggggttggttgaagtctctagcgacgttgtatttgatgagactaatggctctccaagagagcaagttgttgatcttgatgatgtagatgaagaagacgttccaacggccgcaatgcgcaccatggcgattggagatgtgaggccactagaacaaaaggagcaagatcaaccttcttcctcaactatggtgcatcccccaacccaagatgacaaacaggtacctcaagtggaggcgcatgatcaagggggagcacaggatgttcaagttgaagaggaagaagcacctcaggcacctccaacccaagttcgagcgacgattcaaagggatcatcccatcgaccaaatattgggtgatattagcaagggagtaactactcgttctagattagtaaatttctgtgagcattactcttttgtctcttctattgagcctttcagggtagaagaggccttgctagatccggactgggtgttggccatgcaggaggagctaaacaacttcaagcgtaatgaagtttggacactggacgagcacggtggtgacgaggaacaaggctcgacttgtggcaaaaggttatgcccaagtcgcaggttgtaccaaatggatgtgaagagcgctttcctcaacgggccgatcaaggaggaggtgtacgtggagcaaccccctggcttcgaggatgaacggtaccccaaccacgtgtgtaagctctctaaggcgctctatggacttaagcaagccccaagagcatggtatgaatgccttagagactttttaattgctaatgctttcaaggttgggaaagccgatccaactcttttcactaagacttgcgatggtgatctttttgtgtgccaaatttatgttgatgacataatatttggttctactaaccaaaagtcttgtgaagagtttagcaggcaactcaaggacggcaccttcatctcccaaacgaagtacacgcaagacttgctaaagcggtttgggatgaaggacgccaagcccgcaaagacgtcgatgggaactgacggacacaccgacctcaacaaaggagtcgctacgccttgcttcgggatctggtacccaaaggggtctaactttgacttgattggatactcagattccgactatgctagatgtaaggtcgataggaagagtacatcggggatgtgccaattcttagtaaggtccctggtgtcgtggaactctaagaaacaaacttccgttgccctatccaccgctgaggtcgagtatgttgccgcaggacagtgttgcgcgcaactactttggatgaggcaaaccctccgggactttggctacaatctgagcaaagtctcactcctatgtgacaatgagagtcctatccgaatagcggaaaatcctgttgagcacagccgcacaaagcacattgacatccggcatcactttttgagagaccaccagcaaaagggagatatcgaagtgtttcatgttagcaccgagaaccagctagccgatatcttcactaagcctttagatgaaaagaccttttgcaggctgcgtagtgagctaaatatcctagattcgcggaacttggattgattcatagcatacatgtatttatgcctttgatcatgttccttatgcatattgttgcttactatggtgctcaagttgtacaaacactccctggacctcacaagtccgttgcaaagtgatgcacatgtttagggggagatgtgttacaacttgaccctttgagactaaccatgtgcttgagtttgcttgttttagtctcaaaggaggtttgaaagggaaaaggtggacttggaccatgaaagacttccactgcactccgatgagagggtaacttattccaagttcatcttatgtactcttattgcctttatattcttattagagattttggtgaggcaatggggttcttgggccaagattaatcccgttttggtgcttgatgccaaagggggagaaaataaaggccaaagaaataaatggatcagctaccacttgagaaattttgaaaatagtagaatagagcttttggtttgtcaaaactcctttattgtctctcttgtcaaaagttggcttcttgtggggggaagtgctgattatgggaaaaagggggagtttttgaaatcttgaaacaatttctcttggaatgactctctttatgtcttaacatgtgtgtttgacttagagatagatatttgagtttgatttgcaaaaacaaaccaagtggtggcaaagagtgatccatatatgtcaaatttgaatcaaaacaatttgagttcttatttgaagtaagtttgtatttgttctacttgctttatattgtgttggcataaatcaccaaaaagggggagattgaaagggaaatgtgcccttgggccatttctaagtattttggtgattaagtgtccaacacaagtgcttaagcgataaactatgccaaattgtggataaggtgcaaatcaatataaaggtatgattatagacttagtacattggtttttgtgtactaacatgtttgtctaagtgctagaatcagagaaaagataaatggaaaagcttggctcgaagcagccaagactctgctcagtctgggtgcaccggacagtgtctggtgcgccaggctggcgctgatcaactggccgctctcgggaacagaacggcggcgtacggctataaatcaccagactgtccggtagtgcaccggactgtccggtgagccaacggtcggccgagccaacggtcggccgcgcaatccgcgcgtgacgcatggccgtgccaacggtctgatgaggcaccggactgtccggtgtgcatcggacagtgtccggtgcgccaacggctccaaatcttcaacggtcggtcgcgccagaataggaaagagatctgcatcgaacagtgtccggtggtgcaccggactgtccggtgcaccagtcgactgaaggcaag

SEQ ID NO: 106886 - DNA, 515 bp, Zea mays
  Clone ID: MRT4577_28980C.1
acaagctttttttttttttttttttttttttatctgggaccccaccacgggccaggccaagggggaagatttccaatatacagcccaccggcgggcctttcaaggggcgggtacagggccccctatggcgtattacaatacactggacagggcgctggaccgcaatgtccggacagggaaatgcgtgaacccacccaattcactagctaagcatcccactcccctttccccttttggcagcttagagaataggcccgaagcccccgcccatcacaattgcaaaccaaatggcaaggggaatggccccgcgccggcccctttaattaagcactaagggcggggagggtaagcgcaacccgaacacttgacttgacactagcctacggcccattccctgcgctttcttcctttttttcctcgctacgcgggacggcccgccaagttcaacattaaaggctaaatttagggttccgtttcaaggtactacttaacggctccccgaaccaaaaaaacta

SEQ ID NO: 106887 - DNA, 399 bp, Zea mays
  Clone ID: MRT4577_28981C.1
caaacccaaatgggcccaaatatcacattttatgggggggaaattcgatgggaccagccaaaaagttttgggcccacgatggaaaccccccgagggccatagaaaatcctccatacagggcccaagacactagggggcggggaaaaccctaccatccggggattacccgccagggcataaaaaacaaatttaacctaactgctttccaagacaaaattggtcctgaaattaaaaaaggaaacctacgtttccaaccatttgcccacccccggccgacacggggtggcccatgcccacaaagaaaccctaggcttgggctctgcctgggggccaccataacttcgtaaaaggttggggggagaaccacaagtataacaaagggaagaagggtagttgggg

SEQ ID NO: 106888 - DNA, 427 bp, Zea mays
  Clone ID: MRT4577_28982C.1
atcagagtatttaatacatagcggaagtcttacaaaataaaagataaatataacacgaactaaggatcgtcggcgccaatgtcaattgagaaacgccacctagatcagatcgaactcctcgccttgtggctccttctgaaccacctgctcttctcctgacacttgagattccagttagcagggtgattcatcagatcctcgtgaccgcaccgcggattgcgccgcccaagccccgccgatgcgcgccgcagacttggtgaacccggaacacgaccctggctcattctggcaactgagttgtagtcttcacggctagatgcgattctctggcggtggcgtctgtcttcctggtcggacggcgctccttccctttttttttttgcagtggcggctgtgcgtattcctatgggcgtgtatggtggctctc

SEQ ID NO: 106889 - DNA, 1014 bp, Zea mays
  Clone ID: MRT4577_28983C.1
ctcactcggagtcggccactctcaccggccgcggcgcccgcaaccgacctcccctccaggcgaccgcatggcggagcgggagcggaagcggaagcgagcggcggaggagtgggagaggcggaagaggggcaggaagagggagaaggagaggcaggtggggtggacgagcgaccccgttgaggcgcttggggaagatgtgatggggcgggtgatggagttcctggacgcgcgcagcgtggcacgatgcaccgcagtctcctgcgcttggcgcggggtagcggcagacaaccgcctctgggcacctatgtgtactgaattgatggcgggaaaggctcatatcccacgtttaacatcgatccgcactggatccaagttgtctacatattcaatggtcattatggatgggaaacggagtcggatcacaaaagaggatctctgcgatcatgcgtgggaatatcgtttcaccatagcagcacctgattactggaggaaccttgatccatcatggaagcacactggtccacctatgcgacgctacttccaccccgatggctaccacagtgcagaccctcatgacgccgtgtggggtggccatgagtgcacctacaccgtcataacgagctttgtcgacgatggccagatcagggagcactacgtgaggatcaaccggtggccgccaatgaaggtgtcaaggaaggacgactggagctgggagctatcgaaccacatgtaccgctataacagcatacccgattcccacaggaaaggatgcactggtcctctgttcccagtttggtgaatgcaagtctacggtagtaatcagcggctacggttcatgctgccgcagtcttatctgctagtagaaatcaagcttgccatacgttcgtaactgaggacaactgaaaaatggaatgtggcatcaggaggttgtatttggtacggctgccgagggtcaaggctaggtgtgtatgcaatatacataaacaaggtatatatatgtattatatgttttgt

SEQ ID NO: 106890 - DNA, 330 bp, Zea mays
  Clone ID: MRT4577_28984C.1
taacggccagtattcattctatgacctttgtctggtgctgcaaatgatcgttcctggtcaggaatcctgtctaggatggcctacaggttgtctgacaggtaaaaatataataacaaaaaaaaaaaaaaaaaattatattttttattataaaaaaaaaaaaaaaaataatattatattaaaaatatttaataaactattaatatttaatgttatgaattaaaaaatttattatatgaaagggggggccgatctataatttcaaaatttattatcccttgttttgcacaatataaattcttttattgggtacccaaaaataaaattaattgg

SEQ ID NO: 106891 - DNA, 321 bp, Zea mays
  Clone ID: MRT4577_28985C.1
agcacactctgcttcttcggattccgatcgcacgcgccgtcaccatggtgaacgttccgacaacatagaagacatactgcaagagtaaggagtgcaggaagcacacgctgcacaaggttacccaatacaagaagggtaacgatagcatagctgcccaaggaaaacgccgttatgatcgcaaacaatccggttatggtggacaaactaagcccgtcttccacaagaaggctaaaaccaccaagaagattgttctgaggttgcaatgccagggttgcaagcatgtctcccaacacagctataagaggtgcaacactttgagat

SEQ ID NO: 106892 - DNA, 695 bp, Zea mays
  Clone ID: MRT4577_28986C.1
gtttccaaccttggtcttacatttaagcaaccttgcctcttcacagaacttgttccagccgtatgggcaatggtagcactattcttggcggttatatcagttatagctatgcggaggaccggaccaagtttgctgctggagttcagcattcagttgatagctctatgtatctgaagagctgcattggaagtgacaaagttctcagaagtgttgtctccaagagcttcggcaaatcccgtctcaatcttgtagctgaagttaatttcaaggacttccggaagctttcccgtgctgggatttatttttcattcccttgagacacttaacaggtttcaagagttggcacccttcaagaagtatatttgctcttccaggtttcaagagttggcacccttgttgctcttccaggtctcgaaagttggcctgtcaaactcacgcctgagcaattttgttctgttttgtgatggatgtacagcacacaacaacacaaaccccccatgggttttgagcatccttttgctcgtgtaaagtaacttggatagatatgatagaatcgattgcatacggttgcgggttttgagcattggttttgctcctgtaaaaaaaagcttggagagactagacaggtagaattgattaccagttgggcggagatacgttagaaagtatacgtaatagtttggtggatgtctttt

SEQ ID NO: 106893 - DNA, 601 bp, Zea mays
  Clone ID: MRT4577_28987C.1
ggaccctcgaggccggccgggaggtgcgtgtttggttcccaggcgacagatgacgaggcctatggtgtccaccccgtgccggttccacacatccggccggctcatattctgctccttttcctttcccagcgtatcacgcaggatggagattcgcggcggcgagggggcccccggacacgatggcgacggagaagctgaggatcaaggcggagagcaacccgaccgagacccgcctctcctatgtcgctgtccgacagtggcccaagtgtgggtgctataacagcaagttcccgtggacctactcctccaaggacacgtgctacctgctgcaggcgaaagtgaaggtggaccccgaaggtcgcggaatagtgagatcgtggatatccggtgcgacagaacttgtcgtcttccccaagaggcatgaggtgcacctgtgacgacaccgagggcgtcgactagcacatacaatcttcgagtagacagcggcgctctactagccctgcggctgctcgatgtacactctgctgagctcttggactccgagaccaccgtgtaatagagctcgctattatgctactacgatactgaactatctgcttac

SEQ ID NO: 106894 - DNA, 211 bp, Zea mays
  Clone ID: MRT4577_28988C.1
gaccaaactgccctgcacgctcgaggagctgtccccagcttaacacggcagggggaggacttcgggggggtggggagccattggcccttggaccgattggatttacctcgatattacccgtgtggaggggccaagtacttccgcagggacggcgcgaccatccgcgcctgtttgtatgcggaaaccatgcctgtccagggggaacgcctct

SEQ ID NO: 106895 - DNA, 1083 bp, Zea mays
  unsure (1)..(1083): unsure at all n locations
  Clone ID: MRT4577_28989C.1
ccggccgggaaccttatccgtttatctatccttctatccccattcccatcccgagacaggagagggcaaggatgctgctcctgagctcccccttcgtgtccgtgtcgccgccgccgccgccgctcagctcccatggcgctcgcccggcgctgcggatcgaggcggccaggcagctgacggggcgggtggtgacgaccaaggcgaacaagacggacgcgtatccggccggggctgcatagtgactccgtatcgctctatatacctcgaggccggccgggagtcgtcgtcgttaaaaccgagaagagaccaggccgaaggaaaacaatcctgaaaccaagccatgggtctgcaggaggaatttgaggagcatgctgagaaggcaaagaccttgcctgagagcacgagcaatgagaacaagctgatcctctacgggctctacaagcaagccacggttggagatgtgaataccgatcgtccgggcatattctaccaaaaggacagggccaagtgggatgcctggaaggctgttgaaggcaaatcgaaggatgaggcgatgaatgactacatcaccaaggtgaagcagctccaggaggaggctgccgcctcttaaaagtctcttaatagtgttgccaaacagctatttgtcagatgagctttgtgccatttcctcattagaagtatatcattcgatccattggggatctgtgaaccatgtacctgtttatgtaacttttttttttttcgaaagagcgcaggaggactgcgcacccatatattaaagtagagggaaaataaagggccataatgatgatatccatctatctatctatgtaactggtttatgtaccatgtacctgtttatgtaactggttaccagtgttatccatctatctatctatctgtgaagacttgagtcttctaaattatgaaaaaaaaaaaaaaaaaagaaaaaaaaaaaaaaaaaagccaaaaaaaaaaaaaaaaatataaaaaaaaaaaaaaaaaaaaaaaaaaaaaaaaaaaaaaaaaaaaaaaaaaaaaaaaaaaaaaaaaaaaaaaaaaaaaaannnaaaaaaaaaaaaa

SEQ ID NO: 106896 - DNA, 386 bp, Zea mays
  Clone ID: MRT4577_2898C.1
ggatgattgtttacttggttggggtcattttatgagcgagctttttgtctttatctcatatgggtaacatcatcttctttttctttttgttttatagggacacgagacggcccaaactaagataaacccagggggaccagggttaacacagaaacagtcgcgtgcgttttatggggcctcagcaaaccaaacttataagtttttaaagtggggaaccaaaagggtaaatccttagtggggggggggggaaaaaaaacggcaccggggaattaccctttaagatgaacacctggggggggcccgacatcgccataaacggggggatgaaggggggggccataaaaaaccccaccaccgccttgggggggggggcataactggggggg

SEQ ID NO: 106897 - DNA, 702 bp, Zea mays
  Clone ID: MRT4577_28990C.1
aattcggcacgagggttcattcagctagcaagctctcatcgtctctgatcacaagcaatcaacagctagctgctagtaggctctcttcttgctgtagcctctaccatttagcctgaacaccaatcgcattttaacctgtgacctaaaccatttatatggccacctcatcacgcgctgccgtagtgatcgtcgtcctatccttgcttctgttggcatcaggactgtctctcgtgcacgcaaggacgacgatgatgcatgccgaggagaaggagagcactcgttccacttcatcgtcgatctcttcgtcaacgactcttgtgctgtccaaaggcaaagacaaggccgagatcgccatggctaacaaccgtagtaggcggataatcatggaggttgtcgagggatcggttccgagccccggcatcggccaccacaattagctcaccgtgtaccttcttactgtctctcatatatatacgcataaacaaaaatgacatgcaagctagctttggtatagtcgttgctagctagatctacacatgtttatggtgtatacatacaggagatcgagtgaattttttcctctgttgttggtacttgatttgtatcaatcttactaaaatgagagatgaataaatgagtatatatgtaaaaaaaaaaaaaaaaaaaaaaaaaaaaaaactcgagggagggcgccgtgtaccc

SEQ ID NO: 106898 - DNA, 1374 bp, Zea mays
  Clone ID: MRT4577_28991C.1
ccggccgggactgcatagtgactccagtatcgctctatataacaagtggatccgatctggtcgccagtcgtcgtcgttaaaaccgagaagagaccaggccgaaggaaaacaatcctgaaaccaagccatgggtctgcaggaggaatttgaggagcatgctgagaaggcaaagaccttgcctgagaacacgagcaatgagaacaagctgatcctatacgggctctacaagcaagccacggttggagatgtgaataccgatcgtccgggcatattctaccaaaaggacagggccaagtgggatgcctggaaggctgttgaaggcaaatcgaaggatgaggcgatgaatgactacatcaccaaggtgaagcagctccaggaggaggctgccgcctcttaaaagtctcttaatagtgttgccaaacagctatttgtcagatgagctttgtgccatttcctcattagaagtatatcattcgatccattggggatctgtgaaccatgtacctgtttatgtaactggttaccagtgttatccatctatctatctatctgtgaagacttgagtcttctaaattatgattaaaaaaaaataaaaatgtttaggaccatgtatctgtttatgtaactggttaccagtgttatccatctatctatctatctgtgaagacttgagtcttctaaaaaaaaaaaaaaaaaaaaaaaaaaaaaatctgtctgtgtgatatctgaggctgtgtttcgttttacaggctagtttggcttctactgttttcacaatgtttttgtctctatagctttttgaaagtgtttctactgttaaaacgtggaaactcaaccaagcggttagaatccgaagctggtttttcaaaagctggcgctttcccgtagcctgcttttggctttcagttttgttttttttttttccaaatggatgaaaatacagatatgtttttacaactgtaccaagcaagagaaagagaaagataaaagagatagctaaattcacatagctcacagcaacttgtttttccagaactcaaagttgaaccagaatttgagttgcataataacactggtttgcaaactagtttgtatcttagataaatcagtaggtaagcataaggctgtctccagcaacgtcctttatatccatcatctatatccgtattttacagtctcttctaaaagattacatcctctatatctcttttctctccaacaacatcctctaaatcatgtcctctatactcaaatatctatattagagacattttttatttttattttttgtacatacgtatttgtcatactctcaaatgtattgtacatattttagttttgctaaaccggttatttaaaatattcaaatgatag

SEQ ID NO: 106899 - DNA, 259 bp, Zea mays
  Clone ID: MRT4577_28992C.1
aaagtacaaattcagtttattcatctgtttatgacacagcacacaggaggcaaagtgtttcacatcatagacttcacttccaactccttggaatgttcatttctttggcttacaggagagactagacaggaaggccaggcaatgcttaggcaactaaaatgaggttgggggtaatgctaacgtcaccctcacagggatggccacggggacttgtattcgaaagctggttttctagacctgttagctggaagcatggtga

SEQ ID NO: 106900 - DNA, 802 bp, Zea mays
  unsure (1)..(802): unsure at all n locations
  Clone ID: MRT4577_28993C.1
ccggccgggtacacattctgccttgtaatcgacgcgcctgcgccacaatatcaatctcaacaacagccacaccttgccgttgtcgccaaccgcagccatgtcttcctccatgactacctcggcgccaaccacaacctatccctattcatacaccacattcactaatgcgtcaccggagcccttcacaacgccaacggccataccctccatgttcccatggggcggcctcccatccagcgcctgccccgctccatccaacgccccctcgtctgaccccgacgtgccctatatccgccccgacggcaagttcggcagctgcgcaatcagcaacgtggaatccgtcaacgaccactccttctgggacatgtacgactgttgcaacacgggcaaaatgaccgcaaccggcgccactctgccctgcacctccatttgctatgcaaacgaacagcgcagtttcctcgagattggcgagtgtctgagtaagaggaacaagattgtcgtgtgtagtccgcctgaggatcagaggggcgagccgaagagttcgggttcgggtgagagtaagagttcgagcagtgcgagcgctaccaaggcggatacgacggtcgtcagcgcaaggcctacggcggcggcggcccagggtgcggcgaacacggttgcgggtgggcagggtgcggcgtccaaggctgngttgggtggtgtttggcctcatggncttgtcgtctgctgcgggcatgctgctgtaatcgtggcgattgattgagtgggacattttctaataggctgttcaatgtatatagtatca

SEQ ID NO: 106901 - DNA, 348 bp, Zea mays
  Clone ID: MRT4577_28994C.1
ttttgggggggtttatgaactagacagtgtttacggcatccatcatgatcattaattacacggccgctaagttgactcatgcaaatggcacatcgatggctatgaaaagggttacggttccaagccggtatctagacatgcccataggatgtagcaaagacattgctaagatgattggatataacgaaactgttgcaatggcaatactgcgcgaccgtggactggcgaacactcaggaggagctactactttcttaggttcactgatttatgcaccatttacactggctgatttaacccctctgttgaagatcggattatcacttttctttcccttgttaaactgact

SEQ ID NO: 106902 - DNA, 787 bp, Zea mays
  unsure (1)..(787): unsure at all n locations
  Clone ID: MRT4577_28995C.1
aagtccggcaacccggactctttcatcggctccttcatccgacggttcgggcgcacgggcgtgtacaggaccttcatgttcagcaagccgacggtcctggtggccaccccggacgcgtgcaagcgggtgctgatggacgacgacagcttcttggaagggtggcccagggccaccgtggcgcttatcgggcgcaagtccttcctcaccttgccctgcgaggagcaccggcggctgcggaagctcacagccgcgcccatcaacggcttcgacgcgctcaccacgtacctgggcttcatcgaccggactgtcgtggccacgctgcgcgggtggtcggacgccggcgagatcgagttcctcacggagctgcggcggatgacgttcaagatcatcgtgcagatattcctgaccgccgccgatgacgccacgacgctggcgctggagagcagctacaccgacctcaactacgggatgagggccatggcaattaaccnttcccggtttcgccttccacagggctttcaaggctcgcaagagctggtgtncggtgttgcaggggtgtcctgaacgagaggagggcgacgaaacggctcccggccgggtcgagcgtagacatgatggaccgcttgattgaggcggaggacgagcacgggaggcggctggatgacgangnagatcatcgacatcctcgtcatgtacctgaacgcgngcatggagtcgtccggccacatctgcatgtgggctaccgtgtatctacagaaacacccagagatatttgcaaaagcgaagc

SEQ ID NO: 106903 - DNA, 543 bp, Zea mays
  Clone ID: MRT4577_28996C.1
tttattttgaggcaggcgattcgtatattttctatagcgacgtcgttagtttcttgattcaaaactgattgtaaatatgcagttgtagccctagatatccgtgtcagaaacacagcgcagatgatgctggttagtaccttatctcagaatcagttgagcaaaaaaaaaaaaaatgaacaaattcacttcggaggagcgctagggtggcgggggtgctagagcggccgtttattttgaggcaggcgattcgtatattttctatagcgacgtcgttagtttcttgattcaaaactgattgtaaatatgcagttgtagccctagatatccgtgtcagaaacacagcgcagatgatgctggttagtaccttatctcagaatcagttgagcaaaaaaaaaaatgaacaaattcacttcggaggagcgctagggtggcgggggtgctagagcggccgcttattttgaggcaggcgattcgtatattttctatagcgacgtcgttagttgcttgattcacaactgattgtaaatatgcagttgtggccct

SEQ ID NO: 106904 - DNA, 339 bp, Zea mays
  Clone ID: MRT4577_28997C.1
ttacacacccgacaaccaccccggcaaagagggaagctacgcaagcgaccgaccacgaaggacgccacagcggccgaggacccccgaaccgcgcccaccgaggcggcagcgcatgcggccacccgcacccaggcgccggcacgggggagcgaggcgcggaggccgagcaacggcgggcagccatcgccggcccgaggaaccgcaggcgcggcgcgggggggagaaggcaggccccgatgggaacagggagcagcaaggacacccaccccccccacccagaccacggcggcagaggcgggcggcgaggctaaaaggcccaatgggaccggcaaggggagg

SEQ ID NO: 106905 - DNA, 221 bp, Zea mays
  Clone ID: MRT4577_28998C.1
atcaaaaagatttaaatacatccttaacatactaaacattttaccggggggggctggtatttaaactggactggaaacaaaataacaccggaaaaatgttggcttttgacaaatctgacacttaataccccaaagaccacagttggtaccaaaagaaatgccgaggttcaatttttcactctcaccttttagacaaccacaggaaccagctggtacaactt

SEQ ID NO: 106906 - DNA, 468 bp, Zea mays
  unsure (1)..(468): unsure at all n locations
  Clone ID: MRT4577_28999C.1
gagttactgacaatgaaatgctgaattttgcaactccctgatttaagacaaaacaaagcgtgcgtgcctagtttgtccaaaaaaaaaaaaaaaaaaaaaaaaaaaaaaaaaaaaaaaaaaaaaaaaaaaaaaaaaaaaaaaaaaaaaaaaaaaaaaaaaannaaaaanaaaannnnaaaaaaaaggggggggccttttaaaaaaaacaaatttaacttacccttgaatgcaaggtaaaatttttttaaaagggcaaccaaaattaaattcatgggccgttttttaaaaacggggaaacggaaaaaaccttgggttaaccaaattaaatccccttgaaaaaaatccccttttcccaagttggaaaaaaaaaaaaaaggccccaaccaatcccttttcaaaaaagttgccaacccaaaagggaaaagggaaccccccttaaaggggctaataaagcgcgggggggggggg

SEQ ID NO: 106907 - DNA, 2475 bp, Zea mays
  Clone ID: MRT4577_2899C.1
atggatcctaagggcaaggggatggtgatcaatgataaggagaaggagtccttcatcaatgagcctaaagacgacaagcctagtgactcgggctcaagtcataagaagaaggacggaaagaagaagagatgcatcaagaagatcgtctactacgacgacagcgacgagtcctcttcttcccaaaaggacgaggacgactacgagaaaaagaaaacgatttgggacaccctcaagatctcacatgaagggaacgacgtcaccatgctcaccaagatggagttggtggaaggcgaactaggaaggttcgcgatgatcaggggagaggagccaacccaaacgtacaaccggctcaagaccctcgtcaacaaaataaggagctatggaagcacacgatggacggaccacgacgtcgtccgcctaatgctaaggtcttttactgtccttgatccacatctggtaaacaatattcgtgagaatcctaggtacaccaagatgtcgcccgaagaaatacttggaaagttcgtaagcgggcgaatgatgatcaaggaggcaagatacgttgacgatgcattaaatggcccaatccatgagcctcaagccattgctctcaaggcaacaagtagcagggaggtgctacctagcaaggtggcacaaattgaggcggctgggttaaataaagatgaaatggccctcatcatcaagcgcttcaagacgacgctcaaaggtcgcaaggagcatcccaacaaaagcaagacgaagggaaagcgctcctgcttcaagtgtggtaagattggccattttatcgctaattgtcccgaaaatgatagtgaccaggaacaagagaagaagagggaaaagaagaaggcttacaagaaggctaagggcgaggcacaccttggcaaggagtgggactcggattgttcgtcgtctgaatccgacaacgaaggactcgctgcctcggccttcaacaaattgtccctcttccccaacgagcatcacacgtgcctcatggcaaaggagaagaaggtttatgcatccgggggatcaagctggattatcgacagcggatgcacaaaccacatgacgggggagaagaagatgttcacctcctacgtcaagaacaaagtttcccaagactcaatcatattcagtgacgggaatcaaggcaaggataaatctgaaacccaagggaccctcaagcgcttcctaaggagagctcaaaatgagtttgagctcaaggtgaagaagataaggagcgacaacgggtccgagttcaagaaccttcaagtggaggagtaccttgaggaggaaggaatcaagcacgagttctccgctccctacacaccacaacaaaatggtgtagtagagaggaagaacaggacgctcattgacatggcgaggacgatgcttggagagttcaagacccccgagcggttttggtcggaagccgtgaacacggcttgccacgccataaaccgggtctaccttcatcgcctcctcaagaagacttcgtatgagcttctaaccggtaacaaacccaatgtttcatactttcgtgtatttgggagtaaatgctacattctagtgaagaaaggtaggaattctaaatttgctcccaaagctgtagaagggtttttgttcggttatgactcaaatacaaaggcgtatagggtcttcaacaaatcatcggatttggttgaagtctctagcaacgttgtatttgatgagactaatggctctccaagagagcaagttgttgatcttgatgatgtagatgaagaagacgttccaacgaccgcaatacgcaccatggcaattggagatgtcggccacaggaacaaaaggagcaagatcaaccttcttcctcaacaatggtgcaacccccaactcaagacgatgaacaggttcatcaagaagaagcgtgtgatcaagggggagcacaagatgatcatgttatggaggaagaagcacctcaagcccctccaactcaagttcgagcgacgattcaaaggaatcatcccgtcgaccagatattgggtgatatttgcaagggaggtagaagaggccttgatagatccggactgggtgttggccatgcaggaggagctcaacaatttcaagagaaatgaagtttggacactggtgccacgtcccaagcaaaacgttgtgggaaccaagtgggtgttccgcaacaaacaggacgagcacggggtggtgacaaggaacaaggcacgacttgtggcaaaaggttatgcccaagtcgcaggtttggactttgaggagacttttgctcatgtggctaggctagagtcaattcgcatattgttagcctatgccgctcaccattcttttaggttgttccaaatggatgtgaagagcgctttcctcaatgggccaattaaggaggaggtgtacgtagagcaaccccctggctttgaggatgaacggtaccccgaccacgtgtgtaagctgtaa

SEQ ID NO: 106908 - DNA, 317 bp, Zea mays
  Clone ID: MRT4577_289C.1
attcggctcgagctctagccggctgtttgtcaatgacagcgactctataagtgcaaaaatatcttgctcagtagatcacgctgcaacgagcaggcacgccgtacctcatgcaggactcggtatgaccggggattgcgtgaacatgcaaagaatgctataacagcgtctcctagcatgcccagtaagatacccaggtaattgaaccactaagactgaacatgtcacccattcactatgacacttgacactttggtagatgcacttgaaaggaacgcacgtcttttactgccagacttaccaccaccgagcaatctgtg

SEQ ID NO: 106909 - DNA, 3136 bp, Zea mays
  Clone ID: MRT4577_28C.1
ccttcctttcgctatacgacctgagttcgcttcaggcagccgccgctctctctctctctctctcccgcgtccgtcccaccgtcgcaagccagccacctccctgagaggcctgaccgtgatttcggcgtggcatccaaaggcggtcaagattcgagaggccggaggaaccaagcgtagggcctccgaccccacgtcgtcgtccgcgcgcgccgcccgccgtcgcagggagatgggggccgattactacaaggtcctcggcgtcgaccgcggcgccagcgacgacgacctcaagaaggcctatcggaagctcgccatgcgatggcaccccgacaagaactccaccaataagaaggaggcagaaaccaagttcaaggagatctctgtggcatacgaggtccttagtgatcccaagaaacgtgcaatctatgatcagctaggggaagaagggctcaaggggcagccgcccccaggagcaggaggtcctggcacatctcccttcttccctggcggggttcattccaccgctcaccattttaatccgaggagcgcggacgatatatttaaagagttctttggatcccctggcatgggtggcatgagaacggaaccaggatttcaaagtcggccttgcagatctctacaagggtgtgacaaaaaagatgaaaatctcaagagagactattgatgccagcgggagaatctcaaacacagaggatattctgacaatacaagtaaaggctggttggaagaagggaacaaggattacatttcctgacaagggaaatgaagctccaaatatgaaacctgctgatattgttttcatcattgatgagaagccccatgatgttttcactcgggaggggaatgatcttgtcgtgactgagaagatctcactggtggaagcactgactggctataccgcacgtgtcactacgcttgacgggcggagcctatcactgcacatcaactcaataatccatccaaagtacgaagaggtgatgcctggagagggcatgccaatgcccaaggaccccacaaagaagggaaatctgcggattaagttcaacataatgttcccctctaggctgacttctgatcagaaggccgggatcaagaggctattgggttcttaggccgccgcctcaaatgacatcttctttatgatgaaagttgtttgtaaatattgccagtgatttgtttgtaacgggatggtcacaatttagtttttttttaaggtggtgcccttggttttgctgttgttctcatttttaaccttagtcgtatttttttggctcaattttgcctttccagtgctatacagcagaatggtaaaactgataaaaaaatacgactaagggtaaaaataaagaagatggtaaaactaagggtatgaatttaaataggttttctggtgggtgggtagttgatgaattgtaaatcccaaacaaaccggccggcccttagcaaccacaacaaggctgaaccttcaccattttattttagtcaggcagagtgttgtgccctttgcatcacggtattccattcagttacaggtgaattaataccgctgtgtaccggcaaccggatttacttaaagaagccaaatttgtatcgctgccaattccacaaacagaatttgcagacttttaatcaccagactgggaacaaacaatggaccgactgactcaagatgaaaacaaaacaaggtatagaagtaggtcgtgattgtcgacgatgttgtgtccgaggaaggtcccgataatattattcacagcagtcatgcgctctttttccttttctcctcttcaatcttagccttaatgtaagagtacatagcaacaccagctatggcaatggacgtgccaattccagtttgtgtgctaattttgttgccaaaaacaatgattgagaaaccgatgacaaaaacacgtttcaacacattgccgacagcatgtgtcagaggagccactcgctccaaggtgtttgtagcaatctggttatacagatggtagaacagtccaaccaagaataggtcactgacaaactttgtcaaacctacttttgcaatggcatcactaaatccatgctgcattagcttgggcccttcaaagatcaatgcaggtggaatgcaaacaattagagcgattattgagatgtaagcatacacgttggtgctatccatgtcagtcatagctttcttggaataaatgctcctgtaagtgaatgagatgtttgatatcatggcattgatgaagccagtccagttgaatgaaagctcagtaagggatgccattgaaacaccaatgaccacaggggcaagagaaagccacagagagaagggaacttgctgtccaaggataaactgagtagccgctgcgctgaagaagggctccagagctttgatagtgtgagcaaatgagactgcaacagcagcgaaggacacattgctagtgatgtgaccaataccatggcacagggcgactggaaagagaagcttgaggagcgtgccattgataggcgctcgcttggggagaccgacactccagctgatgaggcagtatacgacacccactactagatggatcaaggacacaaagtatgggtatgggaagtagttgtagatcttcttgttgaggatgttgaatatgacgttgaggaagtaccacatgaagaagaagaagccggtgaccagggccgggtacttctccaggaaacccacagacttggcctcccctgcggactcggcggctgcggcgggcggctgcagcgtgtgcctcctggcgggctgcgacgacgacgggagcagcgccgcgggtaggaggagcgccgggcggagctgacggccccagacgatcggggcggcatcgggcacggcggccgcgcacttgacggtcccagcggggaggtgcgacggcgccgcgatcgcgggggctggggcggcccggcggcggaggcggaggaggccggagacaccggcagcgccgccggagagcgtcccgagagccgacattgcggttgcagtctgcaggtgcagggggtgctgtggctgctttgcgcttgcagcgagcctgcgcgggcgctgtggagtgtgtgggagaggcaggcgcgcgcgacgataggataagaagggtttgtg

SEQ ID NO: 106910 - DNA, 1167 bp, Zea mays
  Clone ID: MRT4577_29000C.1
gacgaggtcgccgcgctccgtgcctgcctcgccgccgtccagggttcgctccgggacgcagaggcgcgggcggctctggaggagagcgccaggggcgaggccgacgcgcggctcgaggaggctgccgcggagagcacgcggtcgatgaagctgctccgggagaaggaagcggaggtggcggccgtgtccagcaagggtgcccgattggaggcccttgtggcggagctagagggcaagaactctgaattttttggtgagaagggtgagctggcggagaaattgggggaggccaaggaggcggttcggattgtgtcgagtgaaaaggcggaggtggagaggagcctgcaggacttcaggaaggcggctgaggcttatcgggtggacatggagggaaaattgaaggcaaagttggatgaattgaaggtgttgggtgccgagaaggcggagattgaggccagagtagagtcattggaggcgaagctggtggctgcaatggttgacaagagggaactgcaggctgaggtggtggcaaagaagaaggagtctggtttggtgaagggagaaaatgataagcttcagtctgaggttgtggctgctgagaagaagcacaactttgctgtcgcagaggttaaaagtctcaggatggaattgtccacgttgctggctgagaatgaggctgctgctaaggcatttgatgctgagaaggctagacttttgggcgagttggagagcctgaagaggaagttggaggaaatccaggcagacaaagaagtagctgaggtagcaacccgtgagaaggatgctcaggccattaagttgagggccaaattggaggagctccacagttccatgtcccaacttcaagcttcctgcaatgatcttgatatgaagtgttcacgcctgcatgatgagaagaattcagttctgaaggctctggacactcagaaggctgaagcagtaaagctgtggtcaaaaattgaggagctcgagaagtgcagtgggaagaaagatgatgacattgggaagttgaatgcagcattggaggaaaagaaggggaagatcaataacctgagcaaggatatcgagctactgcaactcacagtggctgaggcggagaaaagaaggaagggtggcatctggacatggttgtatgctgctaccacaaca

SEQ ID NO: 106911 - DNA, 276 bp, Zea mays
  Clone ID: MRT4577_29001C.1
ccgtccgagtgagtcccgcagcccctgagagacaggaaggcagcagcctcaccctgacctgtgaggcagagagtagccaggacctcgagttccagtggctgacagaagagacaggccaagtgctggaaagggggcctgtgctacagttgcatgacctgaaacgggaggcaggaggcggctatcgctgcgtggcgtctgtgcccagcatacccggcctgaaccgcacacagctggtccacgtggccatttttggacccccttggcatggcattcaac

SEQ ID NO: 106912 - DNA, 1017 bp, Zea mays
  Clone ID: MRT4577_29002C.1
ctagacctgaaggatccattgcagaagcatatgttgctaatgagtgcttgacagcttgctcgaggtacttcgatgatgttgacacacgacacaatcgggagggtaggaacaaagagcgtgttgatttgagcagaggcaaatttttatgtttttcagcatggagttgaacttcttggagcaccaagaattacatacctccaagatgattatgataagatggtttggtatgtcctaaacaattgttcggaggtggagccatatataaagatgtataaggaagagttagagaatgaagggattgttgatgttgaaaaaaccattgagaagcaattttcctcatggtttaagaagcatattgcaagattgcgatttgttgagggagaaggcattgatgacgacctatatgcattggcatgtgaaccggatttgcgagttcgaattttttctgcatgtcttgttgatggtgtccagtaccacaccgttgaccgtgagagaaatagaagaacccaaaacagtggagtcatggttgagggcactcataataatgaatgcattgatttttatggctgcttaaaagaaataattgagttgcagtataactcagatttgatggagcatcggacaccattaatgcattgattccagtgtgattggtttgacactcatagcaagaaagttaatatgaaatgtgatggatattttagaagcatcaaccacagtagtcgctggtacaaaaatgatgcttttattttagcagcacaagcaactaaggtattttatttgcaagacatcaagaatgctggaagctggaagattgttcaaaaatttacacataggcacttgtggagtgtggctgaaaacgacattgatgaaatacctagtgcctcaggactgtcataccaagatgatacatgtgtaggttttgaagtgcaagttaatgaaggagatacggagatgattgaacatcaggatgctgacgggttctgttaatgtcagtgtaagtgtgggttgatgaat

SEQ ID NO: 106913 - DNA, 468 bp, Zea mays
  Clone ID: MRT4577_29003C.1
atgggaggagaccccgatgacggaggtgatgacagcaactcgagccacagcaccgacctttcggaggagcaggattcggagggatgggttgctcgacccatcactcgtgacactgctcgcgggtgtcacttccatgatgcactcgacaccttgctgcgccaagcactcgaccagcgcacttggtccatcgagtatcattgtgttgtcttccagcacaatcgcagggcttactcggaccgctgggaggcgacttgtttggttcgtcgtccggaggatagtctccggggtgcggaggtctcctcggagcattattctatctctgagcgggactcagctaaggcagccatgcaagatgtcgcacggcgtgcgctttcgcactatttctcagtgctcggtggggtggccgatggtcttgacctgaggtattgttatatactggcccctgggatgttgatttcctggccctag

SEQ ID NO: 106914 - DNA, 564 bp, Zea mays
  Clone ID: MRT4577_29004C.1
gatctctgcccatgattggctccttcatatacacgtgcgagcttgtctctcgatcactgacagcgtgatcatcacggggacaccaagttctatatatttgaggtcgattgcggtctgcctcctccatgaccttatgtggcccctcatgccgcgactttcggagatcattgtactcacagccgaaagatgtggatacagatggagacaattgcctcccaagagaaggtgactgctgggacgactgtggatggtgccgcccaggacgtggacaatcaggacgccgctggtacacctgtactgttgagagcactctatgacgcataaagtgaaagtgcggacgttgttcccaggttagccagtctgccgtggccttccttgtgataaggatgatctcaagtacactgcgcaagcactcagtatgatctgcagcctgtgttgctggcttcttcatcactgctgacgaaaccattctacgtgacgcgcgagaagacaccatcgggaagcttgacgagtccacctgatgcagagatgtggctgaagctgaaaagggtctctgggtgccgc

SEQ ID NO: 106915 - DNA, 1273 bp, Zea mays
  Clone ID: MRT4577_29005C.1
cgggaaggaaaagcctctctagccgatccaattcactgccggtctccagcaccttgcatcttcccagccgatctcatccgcgtgcagtggggagaaaaatcttctcgccgccgagcatcctatccttatcaagccaccgcccttgagctcctacaaatttctctgtcggcgctctgctctgttctccccactcgacgcccagcccctctgctcgctcgtcgtcgttgcagccgagctccactttggctgctgcccggccgagcttctccccgagctccctgccctggtgccgcgccccttcctgttcggccgctatttcctctctgctactcgcagattccttttctcccatgctgcagcacatctccatggctgccgtcgaccatctccccaagttgagcaccgcagtccactcctatggcgagatcgccttccctgccccaagcttgcctccatcgtgtccctgaccctctgctcgagctcgcccttgcgcgcaagttctcctgtgtcccaccctggtgcgcgctgctctctgtctctcttctagccacgctcgcccagcccagcgtcgcgcctagctccgtgcgccgaggagcttgttcctgtgcgcgccggccaccggatcatcttcaaactccggccgtggagctctcacggctatctcccaccctcagccgcgtctttcagctcggagccctgcttttctgtctcccgttcgccggccgtgcgcatctccctctgctcggccgtccgcgttgctgttccctgcacgtgcgcaactccctgcgcgccgcggctttctcctccccagttgcgtctgtggtcgttaagcatgtcagcaagaaatctcaagagtcgggtgaaaacggagccaacaacatggtgttcaccaagtgcacgacaggaagctcgagccaggatttatcagtattcgtacgagtattgggtcgcgtttgatgatggtgagccgatttataatttttgtcagtttatctaatgataggattaactagaattattagtcgtaataatcctcgtatttagtgcaggcgcgttgtggtagtgttaaaaaaaataagtgaagtacgatgggtttagtaatgcgaaaggtagattaaattatacgatatttgggcgagctgatgacatagaaaaataggcttagtattcctatcagctagttgatagattttctagtgtcgttatgtcaatttggttaatggatgtagtcgatgctctgctgtgatatcaatggtgcttaatgcttgatttt

SEQ ID NO: 106916 - DNA, 778 bp, Zea mays
  Clone ID: MRT4577_29006C.1
cgggctgaaggatccattgcagaagcatatgttgctaatgagtgcttgacagcttgctcgaggtacttcgatgatgttgacacacgacacaatcgagagggtaggaacaaagagcgtgttgatttgagcagaggcaaattttatgtttttcagcatggagttgaacttcttggagtgccaagaatacatacctctaagattattatgataagatggtttggtatgtcctaaacaattgttcggaggtcgagccatatataaaattgcaagtttgcgttttgtcgatggagaagacattgatgatgacctatatgcattggcatgcgaacctgatttgcgagttcgaattttttctgcatgtcttgttgatggtgtccggtaccacaccattgaccgtgagagaaatagaagaacccaaaatagtggagtcatggttgaaggcactcataataatgaatgcattgatttttatggctgcttaaaagaaattatcgagttgcagtataactcagatttgatggagcatcggacaattgttcttttccggtgtgattggtttgacactcatagcaagagagttagtatgaaatatgatggatattttagaagtataaaccatagtagttgttggtacaaaaatgatacttttattttagcagcacaagcaactaaggtattttatttgcaagacatcaagaattctgggaactggaagattgttcaaaaatttacacataggcacttgtggagggtggctgaaaatgacattgatgaaaga

SEQ ID NO: 106917 - DNA, 4181 bp, Zea mays
  Clone ID: MRT4577_29007C.1
ggcacgagcaccattaatgctaggcttgatttggaggaggtcgccccggctgggattcctcctccacgtagctctcctcttcacgtcacacaacgccggaggcctgtcgtgcagccgccgctagagacctgtcgtgcagccaccaccgaaggcctgtcgcgcagccgccgccgccggagacctgtcgcacagcagctgccgccgggcttgggcgctgctagggggacgaggactccataggtgatccgcgggggatgggtcgtgggcgctgccaggggacgaggactccgtaggcgatctgcgggggacgacaagaattgctctgctttgcacgtgctgccagtctgcctgtgctaccaaatttcaacctcgacatcgacgcgcatcaccaatttgttgcgcctgttgttgtattctgggtactccgtagatagaaaagacagattatttgatagtgatggacaaattttggatcaatgcaacactatttagcaagccacacctagaaggagttagtgagttcatgaaccttggaaaagagggagtttatgcgaatgaagagatactttgtccatgccgcaagtgtttgaatcagcttagtagacatagaggacaggtggaggaccacttatatcttcatgggatggctagtacatacactaggtggatgtatcatggagaagccatggatgacataattaatgaaattggtgaccacgaggatgaacatgtgagtttcaatgatgatgttggtatgaatcaagatgaagaagatcctgatgataggattaatggtatggtagaggagttatacacagccgaagatcaagataaaaggtgaatctatgtttgggagatatactacaagagatgaaacaggaacttcaactcttgtcaacttatatgaggatttcagtgataacgagtagcatatttttgtttgatttttaagaagtgaactcgctacggttatttgtgagaagtgaactctatgttgttctatgtttgattttcaagaagtgtccatcttttggagaagcaaagaaacttattcgtgcactaggacttgggtatgtttcaatccatgtgtgcgtgaataactgtgttttgtttcggaagaactatgcaaagcacgatcaatgtccaatttgcggtgaatcaagatggaaagatacaaataaacggatccctcaaaaggtattgcgccattttccattgatccctaggctaaagagaatgtttgcttccaaagaaatagcaaaacaggcacaatggcataagttcaagaggaaacatgtggagaatgagcttagtcatccagctgatggagaggcatggaaagattttgatagaaaatatggtcagtttgcagaagatgcaaggaacattagacttgggctcgctactgatggtttcaatccttttggcaaaatgagctcatcatacaacatgtggccaatatttcttataccatacaactttcctccatgggaatgtacggaacaatccaacttcattatgggcctactcattcctggcccaaaatgcccaggaaaggattttgatgtctttatggaaccactcattgaagagttgttggagctttggaaaggtgtcactacttgggatgcattgagtggaaacaattttgaactacatgctgcagttatatggtgcattcacgactatccagctttgagcacattgtcaggtcgggtcacaaaaggctattacgcttgtgtgcattgtgacaaaaatccttgctccaaaagaataaggaacaagatatgctatgtttatcatcgacgtttccttccaaaagatctcatatggaggagaaataaaagttttgatggtcatagtgaacaacgtgagaaaccagaggaatttagcatagatgagttgatgcaacaattggagagggtaaaagatgtaagaccaggaatacatactaaaagcaaaaagagaaagagggaagtagaaggtcaatgttggaagcgaagatcatgtctatgggatttgccatattggtcaagtttgaagttgcgccacaatcttgatgtaatgcacattgaaaaaaatatatgtgagtactttcttggtacatttcttggcattgttggaaagacaaaggacaccattaatgctaggcttgatttggaggacatgggcataaggagacatttacacttaaagcataatggggactcatacaattttccgcatgcaccatacacaatgaataaaacacagaaggttgatttttgtgactttttgagaagtgtgaaattccccgatggctatgtttctaacttagcaacatgttttagtactgatggatgcaacctccaagcattgaaaactcatgattgtcatatccttcttcaaagaattttacctgctgctattagaggaatcatgagtaaggacatatatgaagcacttgctgaattaggtatttctttcagcacttatgtgctaagacattgaagttggatgttttacaaagaatgaaagttgaaatcccaatcattttgtgcaagcttgagaaaatatttcctccttctttctttgatgtgatgctgcatttggctattcatttacctgacgaggcaatcctaagaggaccagtgcaatatgggtggatgtatccagtggaaagaaggttgtatacattgaaacgttttgtaagaaatatggctagacctgaaggatccattgcagaagcatatgttgctaatgagtgcttgacagcttgctcgaggtacttcgatgatgttgacacacgacacaatcgggagggtaggaacaaagagcgtgttgatttgagcagaggcaaattttatgtttttcagcatggagttgaacttcttggagcaccaagaattacatacctccaagatgattatgataagatggtttggtatgtcctaaacaattgttcggaggtcgagccatatataaagtacgcatttccttatacgtttgtcatttttatatgaattgttattatcgcctctaatatataccatatcaggatgtataaggaagagttagagaatgaagggattgttaatgtggaaaaaaccattcagaagcacttttcctcctggtttaagaagcatgtgagtttcaagttcatatcctcagcatcaataattgacttattttcaccatggatttttttatgtcttcagattgcaagtttgcgttttgtcgagggagaagacattgatgatgacctatatgcattggcatgcgaaccagatttgcgagttcgaattttttctgcatgtcttgttgatggtgttcggtaccacaccattgaccgtgagagaaatagaagaacccaaaacagtggagtcatggttgagggcactcataataatgaattcattgatttttatggctgcttaaaagaaattatcgagttgcagtataactcagatttgatggagcatcggacagttgttcttttccggtgtgattggtttgacactcataacaagaaagtcagtatgaaatatgatggatattttagaagcataaaccatagtagttgttggtacaaaaacgatacttttattttagcagcacaagcaactaaggtattttatttgcaagacatcaagaattctggaagctggaagattgttcaaaaatttacacataggcacttgtggtgtgtggctgaaaatgacattgatgaaagacctagttcctcaggactatcataccaagatgatacatgtgttggttctgaagtgcaagttaatgaaggagatatggagataactggacatcaggatgctgacgaatctattaatgtcagtgcaagtgtggttgatgaatttcgggtgcaacgagaagaggaagtggaagagtatgagacaagcgacaatgaagatgaaactggatggcaatatgctagtgacaacgaagaatcaataactattgtcaatgacgatgatgatttcagcgataacgagtagcatgttttttgtttgatctgagagaagttaactctatgccgtattttgtttgatttttaagaagtgaactagctactgttatttgagagaagtgaactgtatgctacaatttgtttgatttttaagaagtgaactagctactgttatttgagagaagtgaactatatgctgcaatttgtttgattttta

SEQ ID NO: 106918 - DNA, 221 bp, Zea mays
  Clone ID: MRT4577_29008C.1
gagctgtatgcgagtgcggtgcacattgcatggtacatcatacatcgagcactcgaggcgaggcagttttgccaagggtggatccactgttcgtcgtgctcgtcgttgacgataacagacggcagtgacatacctacaccggatgttatgaatcgctcagctcgaactggatcgtatatgctggcgaagcactacgcggatgccactggatatcacattgg

SEQ ID NO: 106919 - DNA, 401 bp, Zea mays
  Clone ID: MRT4577_29009C.1
gcttttccccccacctcccggctcctggcagcaagagagcgggcggtgcatcgagatctagcttccggaggctcgcgagtgcgaatcgccaccaccatctactgcggcaatggcgggcacggtgacggtctcggggtcgtcgccccctcccgccgctgctcaagacgaactcgacatcgtgaccccgactatccgcaacctcgacttcctggagaagtggcggcccttcttccagccctaccacctcatcatcgtgcaggacggcgacccgaccaagaccatcaaggtgcccgagggcttcgactacgagctctacaaccgtaccgacatcaactgtatcctttgtctcaaggcctcctgcatcttattcaagcacttcgcctgccgctgctcggttacat

SEQ ID NO: 106920 - DNA, 1707 bp, Zea mays
  Clone ID: MRT4577_2900C.1
atggataagtcagaaacccaagggaccctaaagcgcttcttaaggagagctcaaaatgagtttgagcttaaagtgaaaaagataaggagcgacaatgggtccgagttcaagaatctacaagttgaagagtttcttgaggaggaaggcatcaagcacgagttctccgctccctacacaccacagcaaaacgttgtggtagagaggaagaacaggacgcttatcgacatggcgagaacaatgcttggagagttcaagacgctcgagcggttttggtcggaagctatgaacacagcctgccacgccataaaccggctctatctgcatcgcctcctcaagaagacctcatacgaacttcttactggtaacaaacccaatgtttcttactttcgggtatttgggagcaaatgctacattctggtgaagaaaggattagttgaagtctctagcaacgttgtatttgatgagactaatagctctccaagagagcaagttgatcttgatatagatgaagatgaagttccgacggccgcaatgtgcacgatggcaatagatgatgtgcgaccacaggaacaagatcagccttcttcctcggcactggtgcatcccccaactcaagatgatggacagcctttcagggtagaagaggccttgcaagatccagactgggtgttggccatgcaggaagagctcaacaacttcaaaaggaatgaagtctggagcgtggtgccacgtccaaagcaaaacgttgtgggaaccaagtgggtgttccgcaacaagcaagacgagcacgaagtggtgacaagaaataaggctcgacttgtggcaaaaggttatgcccaagtcgcaggtttggatttcgaggagacttttgctcctgtggctaggctagagtcaattcgaattttgctagcctatgtcgctcaccactcttttaggctgtttcaaatggacgtaaagagcgctttcctcaacgggccaatcaaggaggaggtatacgtggaacaaccccctggctttgaggatgacaggtatcccgaccacgtgtataagctctctaaggcgctctatggacttaagcgagccccaagagcatggtatgaatgcctcagagatttcttaattgctaatgctttcaaggttgggaaagctgatcccactctttttaccaagacttgtgatggtgatctctttgtgtgccaaatttatgtcgatgacataatatttggttctactatccaaaagtcttgtgaggagtttagcagggtgatgatgcaaaaattcgaaatgtcgatgatgggcgagttgacatacttccttggattccaagtgaagcaactcaaggacgacactttcatctcccaaatgaagtacactcaatatcttctcaagaggtttgggatgaaggacgctaagcccgcgaagacaccgatgggaaccgacgggcatgtcgacctcaacaaaggagacattatgcttagtgtatgcatgtgtgctagatatcaatccgaccccaaggaatgtcaccttgtggtcgttaagcgaattcttcgatatttagttgctacgccttgcttcgggatttggtatctaaatgggtctacctttgacttaattggatacgcagactccgactatgccggatgcaaggttgataggaagagtacatcagggacgtgccaatttctaggaaggtctctggtgtcctga

SEQ ID NO: 106921 - DNA, 1927 bp, Zea mays
  unsure (1)..(1927): unsure at all n locations
  Clone ID: MRT4577_29010C.1
aattcggcacgagggcatcagcaacatcccctctcctccctcgctccttcttcctcctcttcccgccgccgtcgtccgccgccgccgctggcttggcggccgcctctcgtacacccatcgcagttgcgggcgacgacgaccacatgactatgatgacgccgccccctctcgagcagcagcaggaggacgacgagatgctggtgccgcatcaggagctccctgtcgctggcccagaagcagccccacagccgatggaagttgttgcgcagacagagcctgccaccacagcggagagccagccgcctgaggacccgcagacgacgcgcttcacctggacgatcgagagcttcagccgtcttaacactaagaagcactactctgatgtatttgtcgttggaggatacaaatggcgtgtcctaattttccccaaggggaacaatgtggatcacttctcgatgtatttggatgttgcagattctgggaacctcccatacgggtggagccggtatgctcagttcagcttggctgttgtgaatcaggtccacccaaagtatacaattcggaaagatacccagcaccaatttaatgcacgtgagagcgactggggtttcacatcgtttatgcctttgagtgacctatatgacccaaacaggggttatcttgtgaatgacactgttgttatcgaagctgaggttgctgtccgcagaatggttgattattggacttatgactcgaaaaaagaaacaggttttgtaggtcttaagaatcaaggtgctacctgttatatgaactctctccttcaaacgttataccatacaccatattttagaaaggctgtatatcatatgccaacaactgagaatgacatgccatctgggagtatccctttagccctgcagagcctgttttacaagctacagtatagtgacaacagtgtagcaacgaaagagttgactaaatcctttggatgggatacctatgattctttcatgcagcatgatgtgcaagaactcaacagagttctttgtgagaaactggaagataagatgaagggaactgttgtggaaggaacaattgaacaattatttgtaggccaccacattaattacattgagtgcattaacgtggactataaatctaacagaaaagaatcattttatgatctacaacttgatgtgaaaggttgtcgtgatgtttatgcatcatttgataagtatgtggaagtggagagtctagagggtgataacaagtaccatgcggagcgttatggcttacaggatgcaaggaaaggtgtgcttttccttgatttccctcctgttttgcagcttcaactgaagcgttttgaatatgattacatgcgagatacaatggttaagattaatgaccgctatgagttccctcttcaacttgatcttgatagagacaatggaaaatatctatctccagatgcagatcgaagtattagaaacctctatacacttcatagtgttcttgttcatagtggaggagtacatggtggtcactactatgctttcattcggccgacactctcggatcagtggtacaaatttgatgatgagcgggttacaaaagaagacactaaaaaggcacttgaagagcagtatgggggtgaggaagagttgcctcaaataaaccctggtttcaataacacaccattcaaattcacaaagtattcaaatgcctacatgcttgtctatatacgtgagaatgacaaggataaaataatgtgtaatgtcgatgagaaggatattgctgagcatttgcggataaggttgaagaaagaacaagaagagaaagagcacaagaagaaggagaagtctgaagctcatctctacaccatcataaagattgctcgagacnnggntttaaaggcagcatttggtnaanatatatattttgacctggt

SEQ ID NO: 106922 - DNA, 704 bp, Zea mays
  Clone ID: MRT4577_29011C.1
tttcgctgctccgtacgcctcctaaccgtctcttctctccccctagcatccgatacttcgccggcgctgacatgttgccttatcaagacctcctatctggcaacgaactcctgtcggattctttctcctacaaggagctcgagaactggcgtcctgctgggaggtcgaggtaaattgcgtcaccctaggtcctgttgatgtagacattgaagccaatccatccgccatagggtgtggatgatgacagtgctgatgacacagccgtgaaggtgattgatattgttgacacattccgtgtacaagagcaacctctcttttagacaataaatcatttgtctcttacataaaacaatacatcagagaactctcgactgcatgttgttaggtaccatgacaacattggatgagatcaaaaaggctgtcgagggagcaaccaagtttctccttaccaagctgaatgaccttcaattttttgttgatgagagcacgaaggacaaagcgtccgtggtattcacctattacaaggatggtgccactaatccgacattcctctatttctctcatggtcttaaggagatcaagtgctagattagttacccatgttgggtactatatatgttctattgatataggcacaactatatctgccctgcctgaactgaactcttgtttttttacgagcagactgttcaagattggattgc

SEQ ID NO: 106923 - DNA, 324 bp, Zea mays
  Clone ID: MRT4577_29012C.1
atgggaccttcatctctcaaaccatgcacacacatgacatcctcagaggtttgggatgaaggatgcgaagctcatcaagacaccattggcaacaaaagggcatttggacctcgacataggagatttcaatccgaccctaacttatgccaccttagggctgtgaagcgtattttaagatatttggttcatatgcctcactttgggctttggaatccaaaagggtctacctttgaccttgttagatatttcgatgtcgattatgccgggtgcaagaatgtcatcctcatacctcacaagtccaagtgtaatgatgcacatgcttag

SEQ ID NO: 106924 - DNA, 432 bp, Zea mays
  Clone ID: MRT4577_29013C.1
ccgggctcgagttttttttttttttttttttttttttttttttttttttcggcaacaatatgcaactacatataatgctgactgaaactttacagtgtcatttacattctatacaagaaaaccaaaacagagggggctcccagtttcccagtacgctcgccagaaaacagagagcgagcacggttataaactcaatctctgaagagagggaacatcactccagtaaaaaaaaaaaacgtctgaagcagtccactcagatccagtgtgaaggccaagagaatgaatcccacaagctggcatcaatcaaacctggttggacaaagataagggtacccgattcgaccaatacaccatgctacactgcacattcagaaaagcatactggaacagcaggtgattaacaggcagacacattcataacaattttttcca

SEQ ID NO: 106925 - DNA, 570 bp, Zea mays
  unsure (1)..(570): unsure at all n locations
  Clone ID: MRT4577_29014C.1
gccttattagatacatgttctttgaatttcattttggcaatttcactttgaagtgaagtaacgcaataagctggcatgttctcccgttcagggaaaaaaaagtaaaagaaaacaaagaagaactggcttatgcaatacatactcgctcgatcagaattcagaagttcactcttgggatatcatctagctctagtgtctttaacatccaatgaaaattgtttcttgggtccttttaggagatttcaagcactgtatgtcagtgagaacttagtacaatctggtggggagattgatgagcttgttggtcacacttatctctacttaaaagaacagcttgagcgccctaccatgcctccttccagcatacttcatggcaccatcattggtgaggttttctgttccaacttgcacaagagtgaagttcatctgttttttttttcagtggcagtgcgcttccagtgtttaatgatgatagtggattagtggtcaaaggaatgctcngaagataaaaagaaaatgggtatcctgcatgaaatcataccaactagtggaatattttgatagaatatg

SEQ ID NO: 106926 - DNA, 1399 bp, Zea mays
  Clone ID: MRT4577_29015C.1
acctgcttgcagcggacgcgtgggtaatttacagcttacaccaatttcagaacactctagattcagaactattccagacagcaaggatgtcgccatcatctttgagatactacggtattggactcgagaatggaaactacacagtcacacttcaatttgcagagtttgactttgaagattcacaaacttggaagagtgttgggagaagggttttcgatatctatctccagggcgagcgtaaggagaagaactttgacataaggaaggcatcaggggggaaatcttacactgctgtcgagaagcattatattgttcctgtcactagaaactttcttgagattcatcttttctgggctggcaagggcacttgttgcattcctgctcacggctactacgggcctgcaatctcagctttgagtgcaactccaaattttacccctacagtgcgtaattctgcacagaagaagaacagtagtaaaacaggtgtaattgttggggttgtggttggtgcagcagttttaggagtactagcacttgctggaatctgtatgttgaggcagaaaaggagaaaattattattggagcaacaagagctttacagtattgttggaagacctaatgtatttgtttatggtgagctaaggaccgctactgaaaattttagttccaataaccttcttggtgaaggaggatatgggtcagtttataagggtaaattagctgatggaagggtggtggctgtaaaacagttatctgaaacatctcatcagggaaaacagcaatttgcagccgaaatagaaactatttctcgagtgcaacaccgtaatcttgtgaagttgtatggttgctgtcttgaaggaaataaaccactgttagtttatgagtacctagagaatggaagccttgataaagcattgtttggaaacgggaaactgaacctagactggccaacacgctttgagatatgcttaggcattgcaagaggcctcgcttatctccatgaagagtctagcatccgtgttgtgcatagggacataaaggctagcaatgtcttgcttgatgcaaatctcaaccctaagatctcggatttcgggctcgccaaactttacgatgacaagaagactcatgtcagcaccaaagttgcgggtacatttggttatcttgcacccgagtacgccatgaggggtcatatgaccgagaaagttgatgtgtttgcatttggagtggtcatattggagactctagctggaaggccaaactttgacaatacgcttgatgaagacaaggtttacattttagaatgggtctggcaactgtacgaagaaaaccaccctctggacatgctcgacccgaagctcgcagaattcaacagcgacgaggtgctccgtgccatccacgt

SEQ ID NO: 106927 - DNA, 330 bp, Zea mays
  Clone ID: MRT4577_29016C.1
ggggggttgggtttttttgggggggggtgtaaaatgggaaccattcttttccattcaagtgaaataagtaaaattaaacttaggccgattactttatgtttaacttagggaacagagataacagggatactttcttttgctcaaacacgggaaattccttttaagcggagtccctaatcgccgggactttggcagtcccacccacacccccaccaaataattacacgggcgggaggaggaaaatgaaacaaacttttgtttaatgccctcacaaagaaatgaaaactttttgtaaccgagcccccattaaaccttaaggggggggggacc

SEQ ID NO: 106928 - DNA, 309 bp, Zea mays
  Clone ID: MRT4577_29017C.1
ggggcgattcacaaaagaatccgaataaaatctatcgaacttttttgggtcccagggacgggtaatcattgggggcccccctcccaaacctgaaaactaaaactggggggaaagaaaaagggaccccaaaagggggggggggagaaaaagaacccttagtaatgagcctttttggtttccttgccgttcccatggccgaccacatttccggggcctcggatccaaccctctggaggcttaaacctttctgccaagttgtgactcctatggcccgaccccctggtggatagaactccaggggttggaagg

SEQ ID NO: 106929 - DNA, 508 bp, Zea mays
  Clone ID: MRT4577_29018C.1
cgaaggatacttgataccaccacaaaaaaaactctctaaattacggacatccgtataagcggacaccctacatggctaacgcgaagcgaccaaccaaaaaaatcaaaccacacaaaggccctcaccgctcacaagaaaaggcgaccacgatcaactagctgatcaccggcattgaactactacagcaaagcacacgcgggcctcacctacttacgtacaactagctagagactcacgtatcacgacgtcccggtggataaccggaggaggtgggactgctagcgcaagagctccttcctcagccgaagggataagagcctgcacgcgaccatgctgaggaccacggacgccgcgaggcctacgaccgcccccgcgtcctcaaagaacacgatgtgcgcgacccagacctcaaccgcgggattgttgcaccggccctcgacttggaccgcgggctccattacgagctcccgacggctccctaggggccaggtgacttatgtggccggtg

SEQ ID NO: 106930 - DNA, 268 bp, Zea mays
  Clone ID: MRT4577_29019C.1
cccggaaacagcgtatcactgagaccgagtcgcgttatcaggagctccagggtcagaggtcggatgtctacagcgacctcaacacacagaggccgtattacaaatgagcccgaatcatgacagtcagcaacatgatacctggatccagccattcctgaagcccaccctgcacctcattccaactcctaccgcgatacagacccacagagtgccatccctgagagaccagaccgctccccaatactctcctaaaataaacatgaagcac

SEQ ID NO: 106931 - DNA, 499 bp, Zea mays
  Clone ID: MRT4577_2901C.1
acatcccaaaggggggggctaaggacattttggggcccaacctttggccggaaaggggttttgggcagaaaaaattttttggcaggccaggcaaacaaagggggggtcaaaatcggctcccccccagggcagaaaaataaaaaaaggcccaggcgggcaaaagcaaagttgggcttttaatgggcggagcttttttttttttaaaagggggggggcctgggggaaaccacagaaggggggctccgcccgaccaataaaatctaaaccctttttaaagcctaaccgcccggaggggggggggaaaaaacccccccatgttttggggggccaaccagggcaacccttttgaaagtttcacctatttggcccggctgccccgaaggttggggagggaaaaaaacccccttggggctctgggggggggggcacccccggtcctcccccgtggttaacccggttcaaaagggttaaacctcccggtggttgatggccctaaaaa

SEQ ID NO: 106932 - DNA, 1492 bp, Zea mays
  Clone ID: MRT4577_29020C.1
ccgaacgccaacaacgaaaaactccgcagcagtccacccagtccaccagacatccgacagggaattgggaggggttgataggactcatccgcctaattcttgtagtggaattcaaccaattgattgctatttgggacagcggatttgtgatcctgttaccacagtcttcttgcgggccagaaacgcgaatcacgatggttccaggaatcgccaccaagacggcggcgcgaccggtggcctgggcacctcagcctcggaacatgttcgtgttcggcgcaggtttcgtcggccgctacgtctcggagcgcctcctcgcgcagggctggcaggtctccgggacgtgcaccactgtcaccacgaagagggagctagagatgctgggcatgaatgcttccgttttcgatggcacagaggacagcctggaaaatattcacagtttacgacaagcaactcacttgctcatctccatcccacccatccctggagttggtgatcctctacttattaatttagatgaagatctgaggagaatactcggccatggtaatcttgaatggctatgctacctttcgtcaacaagtgtgtatggtgattgtggtggtgtattggttgatgaggagtaagggactcgttggttcttttctcgtccatgaagtacattttaatagaaagctaaatacactgctgtgtatgcagtcatacagtaaacccaaagagcgagtctgccaaattaagatataacgcagaaaaaggatggctgaatcttattgatgatccaaaactgtcagcttttgtattccgtttaggtggaatatatgggcctggaagaagtgctttggacaccttagcgaagagcaaatctttgtcacggaaacagaagttgcgagaatctaagcaatatactgcacgaatccacgtggctgacatctaccaggctgtcttggctagtatgagcatcagatgtgcaaggaaaatatttaatgtggtggatgacgaccctgccccaagagctgaagtttttgcgtttgctacgagtttgatacagaggagatatcctgatatgataactgaaaccattgatgccaagcctgcaggcttagattatcaagagatgatcgtacctgcagagaaacgggtttctaatgctcggatgaagcaggaacttggtgttaatctgcttcatccaacttatagatctggtctgcagagtatccttgatgcttggcaaattcagcctccacttcccaatacaagtcaatgatgatttagttttgaaaggcatataggtgtatgtacatgtatttgtgcttgatttggttcttgtataaaaaagaacggagtgaataataatttagtgacgttgtagccttttttggcggagttggtctggtgctcgtgttatttttagcattgtttacgaattatatagtacaatctagtcgccatggatctgactagacgattaatcgtgatgagattgattagtggagcc

SEQ ID NO: 106933 - DNA, 287 bp, Zea mays
  unsure (1)..(287): unsure at all n locations
  Clone ID: MRT4577_29021C.1
cctgcaggatccggtccgngattcccgggtcgacccacgcgtccgcccatcgctttcgtggatcgcgtgagcggaggactgcgggcgatccatggcgctccacgtccccaaggccccgggctttgcccagatgctcaagggtggagccaaacatttctcgagattagaagaggctgtgtatagaaatatacagggctgcaaggagcttgctcagactactcgcacagcgtgcggaccaaatggaatgaataaaatggtcatcactcgcctggagaaggtgtttgtga

SEQ ID NO: 106934 - DNA, 293 bp, Zea mays
  unsure (1)..(293): unsure at all n locations
  Clone ID: MRT4577_29022C.1
gtcggcgaccagcctccggcagtcntcctgcgtgagtacgtcagctgcgttgacggggacattnccagcacccagcatccgcgcgttgtcgcggatcgcgaacagcctctgctcccgtcgcgccaccagcaccagtacacgaccatacgtacctctccaattgcggaggatgcgcccgtaatgacgaccacctttccgagcatgtgctccttcgtgagggtcttgagcgcccactcgactcctcgcaggaacgacagtgtcatacacgcgaacgccatcattaccatactatt

SEQ ID NO: 106935 - DNA, 328 bp, Zea mays
  Clone ID: MRT4577_29023C.1
gtaaatactgttgcacgaacgccagattgcagatattgcatatcaatccatattgcctgtctcaatccactgttttgttgctgatggcgccatttcgtgccgttgttgacaccatttaaagtctattcaggcagctgtcaatctaggttctatcattcaaaagagagcaccctccacttggtgctgcgtctcaagggtggcatgcaaatcttcgtgaagacacttactggcaatacgatcacccttgcggtggactcctgggacaccatccacaatgtcaaggctaagatccatgacagggaatgcattgcaccagaccagcatcggc

SEQ ID NO: 106936 - DNA, 788 bp, Zea mays
  Clone ID: MRT4577_29024C.1
ctcgaggccggccgggaaatataaatatacgcatcgaacctcatatccaatgcgcttctctccattcttatcaaacatcatcttcactttctcaaacattacccgtgtgagacctccactgacttcacacttggcctatcgacctaatcttcctcttcgatctatgtctggaattcccatcctaggcgctttgttcggcacttcatctagcaacaactccaaaatgtcttatcctgaccagcgttcaaacgacgagtggcgagctgtcctcaacaaggagcaattccgtattctccgtgagaagggtaccgaggctcccggttcaggaacgttcgacaagcactacccagacgaaggtgtctacacttgcgcaggttgtgaggcgcctctctacaaggctacccacaagttcaagtctggctgcggctggccggcttactttgacagcatccccggcgcggttgttcgtcatgaggatcgcacctttggtatggcccgaacagaaattgtgtgctccaactgcggcggtcatctaggacatgtgttcaagggtgagggctatgacacgcctaccgacgaacgtcattgtgtgaacagcgtcagtcttaacttctcccccaatgacaagattgtcaaggataagcctgaaagcaaggcttgatattgagatttgggaccttggaaaggctgttgatgagatcatgaggatatgagtggatgagaagtacttggcgtcgaggatgcggttgtgttgtactcagagagttgaatagccaatgggatttatg

SEQ ID NO: 106937 - DNA, 336 bp, Zea mays
  Clone ID: MRT4577_29025C.1
atgcagaaggcgtgcaaccgcaccacggttgggcacccttttggcttcatcgcatccggtggggactgggaaaggggatatttcgaaagggatccttctccgcgaaggaagcgggccctgagccctcctactgatcaggggttcgaaggctggcccctcggaagggttcgacagccgccccagagcactcgggcttcaagctcattactgatcaggggttcgaaggctggccctcggaagggttcgacagtcgccccagagcactcgggctccgcgcccactactgatcaggggttcgaaggttggcccctcggaagggttcgacagccgccctag

SEQ ID NO: 106938 - DNA, 352 bp, Zea mays
  Clone ID: MRT4577_29026C.1
acctatactgagcatacgcggtcatcaactgacaggacaactgaatagtaccagcggtgagtcaccgtccgcacactgaccgacatccacgagtcagcatgcgactactagtacaggacatcctctcgatgatgctcatgctacgggattagcacaagaccatgacggtggtgcatattgacagtaatcagaagaacgtccatacatgaccctatctgcgccagcactactaccgacgacagagatgacgctaattgagaacacacatgtcggatacacaccaaggctactacagaagacgtagaaagtgctgacatactggtatacattcagtaattgccagctgacgaac

SEQ ID NO: 106939 - DNA, 545 bp, Zea mays
  unsure (1)..(545): unsure at all n locations
  Clone ID: MRT4577_29027C.1
aaagtctcctaagggtgcagccagacaaaacccaataagtgcacggcaccacccacggggtgcgaagtcttctacgaagacaacatccgagcaaaagtcgcctaacagtgcagccagaaaaaccaaagaacacaacacttgcggcacgcggtctcccctacatacgcaaccaccgagtaggggtcgcctaggagcggaaccagataagtgaaaaaggttgtgcagtcacctgtcaaaagtggagtcacctatggcacgcacacgactacaaattgcagccaactcgcaataggcacaacataattacatagcgcaatcataaatgagcaacaagcaaagggctcaaaggcaccatcgcacaacgctagtgcacaccacggtatttacccctctagcacgaccatcgcagctctattgcgaagaggggggagggcagcgttttcattcaatatcgcaatagagcagcgagggcaactaaaatgtcacataggctcctccttcggaataagatccgcctcccttttgtgtggtccaaannnnaaaaa

SEQ ID NO: 106940 - DNA, 352 bp, Zea mays
  Clone ID: MRT4577_29028C.1
attactgtgcgggttgttcaggaaccacagaaatcgtgtttggctacagtctacgcttacgaaggcaacagcgaagagagccaccatttacagacgggggctaattagtatccatacgaggcctcgaacatgcaccgggaagagcccacacaaaacggaccgagcaacctgaacagagaactggacagaggagcagacaaatcagttccaaccaacacccgagacattagacaaccatcagatcatcaccccccacgggaggccacctaatcaactgggttttggcacccgaggaaaacccgaggagacagatttacgcctggaacggcacaacgaggcaggatatatgacc

SEQ ID NO: 106941 - DNA, 216 bp, Zea mays
  Clone ID: MRT4577_29029C.1
gcgggccatcacacgcggccatctccctccctaaacgctccccaaatccggtttccaaggccggaaaaatttaaccggccgaccgggcaacggtattccattcaatcccaattagggcgaaaaaattccaatccggcggaaggaatggcttccgaaaacaacttcagttacttaacctccggcggcggcttcccggcggggtacccggcccggaat

SEQ ID NO: 106942 - DNA, 4809 bp, Zea mays
  Clone ID: MRT4577_2902C.1
atggatcctaagggaaaggggatggtggtcgacaacaacgagaaggagtttatcttcaacgagccgaagaatgacaagtctaccgacttgggctcaagccacaagcgcaaagatgggaagaagaagaagacaaggcgcatcaaggagatcatctactacgacagcgacgaatcctcttcttcccaaaaggacgacgacaacgactacaagaagacggtcaattcgaacttttcatttgattattctcgtatgccacatagttcgaattcacatttgctttccattcctcttggcaaacctccacactttgatggggaagactacggattttggagtcacaaaatgcgtagtcacttattctctctccatccaagcatatgggagattgtagagaatggaatgaaatttgatagttcggatagtcccatgttcattaatgagcaaattcataagaatgcacaagctactactgttctattagcatccttgtgcagggaagagtacaataaggtgagcggcttggacaatgccaagcagatatgggataccctcaagatctctcacgaggggaacgacatcaccatgcttactaagatggagttggtggagggtgagcttggaagatttgcgatgataaggggcgaggagccaacccaaacatacaaccggctcaagacccttatcaacaaaataaggagctatggaagcacgcgatggacggaccagacgtacaccaaaatgtcgcccgaagaagtcctaggaaaattcgtcagcgggcgaatgatgattaaggaagcgaggtacgtggacgacgccttgaatggaccgatcaacgagccacaacctcttgctctcaaagcaacaagaagcaaggaggcgctacctagcaaggtggcacaaattgaggcggccggacttaatgatgaagagatggctctcatcatcaaacgcttcaagatggtgctaaagggtcacaaggggcagccaagcaagaccaagacaaaggggaagcgctcatgcttcaagtgcggtaagattggtcattttatcgctaactgccccgataatgatagtgaccaggaacagggaaacaagagggaaaagaagaagaattacaagaagaccaagggcgaggcacatcttggaaaggaatgggattcggattgctcctcttccgactccgacaacgagggactcgccgccaccgccttcaacaaatcaaccctcttccccaacgagcgtcacacatgccttatggcaagggagaagaaggtatgtactcggaactctacctatgcttcttcaagtgaggacgaatctagtgatgaggatgaagtagattactcatgtttgtttaagggcctagatagaaccaaggtagacaaaattaatgaattgattgatgccttgaatgataagaatatgcttttagaaaagcaagaagatttgttgtatgaagaacatgataaatttgtagaagctcaaagatctcatgctctagaagttaaaagaaatgaaatgctttcttgtgaaatatcttcttgccatgagacaatttctaaattaaggagcattaatgatgatttgaatgctaagttagagatcgctagtaaatctaccacttgtgtagaaaatgttataatgtgcactaggtgtaaagatattaaccttgatgcttatagtgaacacctagcttgcatttctaaattaaatgaagaggtagctagtcttaatgcccaacttaagactagcaaaagtgattttgagaaactaaaatttgctagggatgcctacacggttggtagacacccctcaattaaggatggacttggcttcaagagagaagccaagaacttaacaagccataaggctcccattcccgccaaggagaaagggaaggcccctatggctagtagtgtgcaaaataaccatgcgtttatataccatgacaggagacaatctagaaatgcttataggaattgtaatgcatatgatgctattaattctcatgccatgtttgcttctagttcttcttatgtgcatgatagaaatgtttgtaggagaaatgttgttcataatatgcctaggagaaatggtgttaatgttcctaggaaagctaatgaaccttctacaatatatcatgctttaaatgcttcatttgctatttgtagaaaagataggaagatagttgctagaaaattaggggcaagatgcaagggagacaaaacttgcatttgggtccctaaggatatttgtgctaaccttgtaggacccaacatgagttgggtttatgcatccgggggttcaagctggattatcgacagcggatgcacaaaccatatgacgggggagaagaagatgttcacctcctacgtcaagaataaggattcccaagattcaattatattcggtgatgggaatcaaggcaaggataagtctgagacccaaggaaccctcaagcgcttcctaaggagagctcaaaacgagtttgagctcaaggtgaagaagataaggagcgacaacggatccgaattcaagaaccttcaagtggaagagttccttgaggaagaaggaatcaagcacgagttttccgctccctacacaccacaacaaaatggtgtggtagagaggaagaacaagacgctcatcgatatggcgaggacgatgctaggagagttcaagacccccgagtgcttttggacggaagccgtgaacacggcttgccacgccatcaacagggtctaccttcatcgcctcctcaagaagacatcgtatgagctactaaccggtaacaaacccaatgtatcttactttcgtgtatttgggagcaagtgctacattctagtgaagaagggtagaaattctaagtttgctcccaaagctgtagaagggtttttgttaggttatgattcaaatacaaaggcgtatagggtcttcaacaaatcatctggtttggttgaagtctcttgcgacgttgtatttgatgagactaatggctctccaagagagcaagttgttgatcttgatgatgtagatgaagaagatgttccaacggccgcgatacgcaccatgacgattggagatgtccggcctcgggaacaattagagcaagatcaaccgtcttcctcaactatggtgcatcccccaactcaagacgatgaacaggttcatcaacaggaggcgtgtgatcaagggggagcacaagatgatcatgtgatggaggaagaagcggaaccggcacctccaacccaagttcgagcaatgattcaaagggatcatcccgtcgacctaattctgggtgacattagcaagggagtaactactcggtctcgattagttaatttttgtgaacattactcctttgtctcttctattgagcctttcagggtagaagaggccttgctagatccggactgggtgttggccatgcaagaggagctcaacaacttcaagaggaatgaatgggtgttccgcaacaaacaagacgagcacggagtggtgacaaggaacaaggctcgacttgtggcaaaaggttatgcccaagtcgcaggtttggactttgaggagacttttgctcctgtggctaggctagagtccattcgtatcttgctagcatatgccgctcaccattctttcaggttgttccaaatggatgtgaagagcgctttcctcaacgggccaatcaaggaggaggtgtacgtggagcaaccccctggcttcgaggatgaacgataccccgaccacgtgtgtaagctctctaaggcgctctatggacttaagcaagccccaagagcatggtatgaatgccttagagatttcttaattgctaatgctttcaaggttgggaaagtcgatccaactcttttcactaagacatgtgatggtgatttgtttgtgtgccaaatttatgtcgatgacataatatttggttctactaataaaaagtcttgtgaagagtttagcagggtgatgacgcagaaattcgagatgtcaatgatgggcgagttgaactacttccttgggttccaagtgaagcaactcaaggacgacaccttcatctctcaaacgaagtacacgcaagacctgctgaagcggtttgggatgaaggacgccaagcccgcaaagacgccgatggggaccgacggacacaccgacctcaacaaaggaggtaagtccgttgatcaaaaggcataccggtcaatgatagggtcattactttacttatgtgctagtagaccggatattatgcttagcgtatgcatgtgtgctagatttcaatccgatcctaaggagtgtcacttagtggcagtgaagcgaatccttagatatttagttgctacgccttgcttcgggctctggtatccaaaggggtctacctttgacttgattggatattcagactccgattatgctggatgtaaggtcgataggaagagtacatcggggacgtgccaattcttaggaaggtccctggtgtcatggaactctaagaaacaaacttccgttgccctatccaccgctgaggccgagtatgttgccgcaggacagtgttgcgcgcaactactttggatgaggcaaaccctcagggactttggctacaatctgagcaaagtcccactcctatgtgataatgagagtgctatccgcatggcggaaaatcctgttgagcacagccgcacaaagcacatagacatccggcatcactttttgagagaccaccagcaaaagggagatatcgaagtgtttcatgttagcaccgagaaccagctagccgatatctttaccaagcctctagatgagaagatgtag

SEQ ID NO: 106943 - DNA, 584 bp, Zea mays
  unsure (1)..(584): unsure at all n locations
  Clone ID: MRT4577_29030C.1
ccaccccccggaagtatttataaacgacccggcggccgctctatactaggggatccccgttctgcagggaggggccacgagggcagaggccaggctccctgcgacttctccaggctctctcgttcttcggatgcggctcaagtagccagcgcggatggcgagacacgggtcatcgagcgacgggcgaggcgaccacaggcgcacgtggttctgcccgtgtcggcgggtgggttttttttttgtctgtctcgccaaacatggggacccgccgtcgccttaaggggggcgtgtgccgcgtagaatcatggagcctcctcacagattaaggtcttcacgtggccttacatgatacgtttgatcaagcgacgcaaggtggtgtgcatatcctagtctgcacaccaaagcctagtaagaataatgagagacggatggccaactcacatggtgtggcacatagacgatgntgcagcaatgggagcttgagttataagtcgttggcctatgggattctgtactcaagcccttcccggatgcttgtgctcgtcgatacgtgatagtatgccgttgcaggcgctctcccattc

SEQ ID NO: 106944 - DNA, 344 bp, Zea mays
  unsure (1)..(344): unsure at all n locations
  Clone ID: MRT4577_29031C.1
cgccccgcgtccttttgtaggcccccggcnttgctagctgtacgtgtgtgtgtgtgcatctgcagcagggtgcaggctggggcccgtacgtacgtgtctctttctctctctcatcttgtcaccgttcctatctagagtgtgtgtgttcgttctaattaaaatgttcttgtcgtcgtcgtctgtgcatgcgtgggccgtgtcgtcgtgcatgtctattatgtgtgtgtcgtcgtgtcgatcggttcgtttcgatgcctgttgtttgcatgtgtgttattacctagtcgtgtgtcgtgtttgtttgtgcttgccgggcacgggtccccgcnttcactntcaccaag

SEQ ID NO: 106945 - DNA, 404 bp, Zea mays
  Clone ID: MRT4577_29032C.1
cggatcggcgacacgcagcaaggaccgaggcttgtggtgccagaccttgtccaccgaggaggcgatcccgaacgccatgccgggcatgaacggcaaggacctggacgggcgggacatcaccgtgaaccaggcccagtcccacgagctgccgggggaggcggcggctgcggctacggtggcggccgtggatgcagctgctacggaagtgggggccgccgagatggccggggtggttacagcgggggcggcagctacagcggaggcgaggctcggtggtggtggcggcggctacggcggtggcaacctgtgcggcgggtacagaactgcccgggaactgcaggaactgatcggtggggcccgtgcggacaagttatactgatagctaccgtgatgtttaccctaaa

SEQ ID NO: 106946 - DNA, 358 bp, Zea mays
  Clone ID: MRT4577_29033C.1
gtgtattatgcttattttttataattttatataaatttaggcttttgattttgggcaacaaagatcatgcgttattttaatttaagttttattagcaattccacggggaaaagttgcatcctaattcctaaggatcttcttaaccgagcatcaaactaaaaggtctgctacagacaataaagtaatccactttgtttaagattttgaagaacaaaacttagtaacaactaaaacctcctcgttgccaaatcctgaaatcaagaggccaatagatgaataaacaaaccaaaaagttccctattaataaaggattgactgctgatactgtctttaccgtcaaagatctttaataaaccac

SEQ ID NO: 106947 - DNA, 250 bp, Zea mays
  Clone ID: MRT4577_29034C.1
gccgccatcatgggtcgcatgcatgctcccgggaagggcctgtcccagtcggctttaccctatcgacgcagcgtccccacttggttgaagttgacatctgacgacgtgaaggagcagatttacaaactggccaagaagggccttactccttcacagatcggtgtaatcctgagagattcacatggtgttgcacaagtacgttttgtgacaggcaataaaattttaagaattcttgagtctaagggacttg

SEQ ID NO: 106948 - DNA, 407 bp, Zea mays
  Clone ID: MRT4577_29035C.1
gctgatgcagtttggtctcgctttatacagctaaccaaacaaaggctgtcttttagtcaacgcatgtgttgagactggatagatgtgcgcacgataccaatcagaaggataatgtatacaatgggttgtttcaggacagtggcgcttacctggagcaccgtctggccggcgtcgacagggtgcagatcaagggcctcaacgcgggcacgctggacctgacgaataacggctggggccacatcgtcggcctcgtcggcgagcagaagcagatctacaccgataagggcatgggcagcgtcacatggaagccagccgtgaacgacaggccgctcacctggtacaagaggcacttcgacatgccgtcgggagaggacccgatcgtgctggatatgagcacaaatgggcaa

SEQ ID NO: 106949 - DNA, 896 bp, Zea mays
  unsure (1)..(896): unsure at all n locations
  Clone ID: MRT4577_29036C.1
gggtacctcgaggccggccggggactacggaggactactttggccaaaagaagtcaaattggcttgagccgaggttcagccgttcaggtcgccgacgccgcgcacgtcccatccgatggctgccgcagtccacctccggcctctccactcgttcgccttccctctccccgcagtgaaggccgcgcccagctggctcccgctccaggcgaaacccggcgcgcggaggacgggcagccgcgttgctctgctcgtcccctccgcgtctgcccccgcgccagcgtctccatctccctcgggcaaggatggcaccactgcgtcggctgcgacaaagtgggtggagtggatcccgcgcgctgcggcaggcgctgggtcggcagtgggccccgagcaggtgctcaggctcatctctggcgccgcggccacgcccatctgccagttcgttgacagcccgcgaacctttctccattccgtcgacccgcgcgtcaagctggtgtggctcttgtcccttgttgtcctaccagccaggtcaaatatttatatgcggtttggtttggtagtattcctggcccttatttcaatgtgggttttaccaaatcatgtttggaaggatcaacttggaagggttactcttctttcaggattcatattcatcatgctgggatttggtgctgatggtgcaccttcattagtccagatgagaacgcctccaccttctgttctaggcataccgaacattccttgctccacaagtgngtattcttacacaatcttgaaactgggaccactgcaatttacaaggaaaggcctatcattagcaagtacttcagcaagcctctcctttgcaatattccaaagtgcaagtctctgcttgacaacaaccactcctgagcagctgc

SEQ ID NO: 106950 - DNA, 130 bp, Zea mays
  Clone ID: MRT4577_29037C.1
aacttaacctcggttattcgatatttccggcaatttctagctaaccataatagtacaagcaaccgccacccctgaaacataaaccaacttaatggccctagaatgtgaagtgagaaaattgatagaaaaa

SEQ ID NO: 106951 - DNA, 682 bp, Zea mays
  Clone ID: MRT4577_29038C.1
gccggcctggccgggctcggccctcactactcacacccctcacttttggcggcgccgactgggcacccgcgtcgaccttcgccaggtcttcgtcggccctttggctggaaacaagcatccaccaggaacagcgcaagggatgctcgattggctctagttacttagcagaaccaaaagaggaaggccatcaaagatacgagggctttttctcgccatgtctcggtcgccacacctcccaccccgctgcccacccctgggtcctcagatcactcgaagggatgacagcatgttcacgcagagctgcaggtttccatctggggatacgttctttagtgagccaccgtgctggctcgatgatctccttgcagattccgggaaagctcccaagcttcctcctctcagaagggcctgtagcgattctgatgccatcttggatgctctgtcaacatttgaaagcccaatttgtcgaattgaggaaggcaatcaaatctctggtggtgaagctgatgacttgttggatgctggcgaaggtggtgaaagcggttctgtggtcgaggctagctgtgtttatggtccgaattcaccaagacagaagagtaggctgacaacttcagagagttccatggtaaatgctgtgcttgagaatgacccagcaacccttgcagtacttgagcatcgatgc

SEQ ID NO: 106952 - DNA, 557 bp, Zea mays
  Clone ID: MRT4577_29039C.1
gcttgttcttggacaaactaacccccgccctatttgccaggggacctacctcggtacataaatgctgggctgaccaaaaaaacaaaacactgggggaaatctttcaccttgttaaagggggaaaagttgaaacttgaaaagaacttcctgagtttggttttacaaaacactgaaaaactaacatctcagggggcgccacacaaaaagcctgccggggtttcctccggggcaattttaaaaaaaacaaggggtttttctctcgccctaaaaaggtcaacaacaaagggatctggatgcccaaaaactggaggaagtctacaatcttcggtaggccaagacaggcacttcgtcctccggagcatcgagggcttggtaccttcgaattcgggaaggatcacgcatatgaggaggggaacgacccccaaaaattggggatgggccccccattgaaggaccaccacccttccctgttttcctaagagggggacccccggctggctcaataagggggggcgcaccctgatctctcaaatatgcatggcaacttcggggggggc

SEQ ID NO: 106953 - DNA, 319 bp, Zea mays
  unsure (1)..(319): unsure at all n locations
  Clone ID: MRT4577_2903C.1
tnttttttttttttttttttttttgcctgtttgggggtactttttgtttgattttttgggggggccaattttaagctctttggggcaaaagacaaaaccaaaccaattgcgtttttagtggggggtcaagatttttttttaacccgggtatacacagatttttttaattggaatacttgggggcagggtttaccccccaaatggtggttttatttaccggggaaaaaacaggtaagaccacttttgaacccgcccccgtgattattaaatctctaccgggaagggacccccaatccaaccttctaaacctcgccggggg

SEQ ID NO: 106954 - DNA, 445 bp, Zea mays
  Clone ID: MRT4577_29040C.1
ctacctggcgctggttgtgagcaggtaggccagcctcggtaacgacataggacggctctatagcgcttgcggatggcgctcgtccatatcattcacggcttaaccatacaagccttccgactgcttggttttgatgggcgacgcgaatagcatacttggggctactgtaccagcagaccaacaacgtgctcatctctttatgtgcaacgttatacgagatccacgaacctacacacttcacacccccgataggcatcagatcctgatggcacttgtactacaacctcaatcgccatgcatgcactcatgtacaagctcttggacgctatcctaggcgcctcttcctagtcgtgctacttattaggggacatgaatatgttttacactgcctgcgggttattgctctaatattctactaatccatggatattgagctgaaccgcta

SEQ ID NO: 106955 - DNA, 556 bp, Zea mays
  Clone ID: MRT4577_29041C.1
ttttttttttttttttttttttttttttttttttttttttttttttttttttttttttttttttttttttttttttttttttttttttttttttttttttttttttttaccaacccaatttgggcccctttttaatttattggggggggggggggggggggccccccccgggttttccccccggttgggaaaagagccccccggcccgggggctagcttttttttgggtccgggggggccgccgcccccaaccaccaggaaaaaaagcccccctttaaaatttaacccgggccccccccccgggggttagcttggttccaaaaatcccaaggcacagggtccctttggccttatgggggttccccgggaggggcttcggtccggtgggggcccgggggccccccatttgggccccgggggattggggtgggtttcctcccggggggtccccgggggggtggggggggccaccctttcctggtgtgggggcccgggaaccccccttaaaaggttctttggttttgccctcctttcccccctggggctgggaagcccc

SEQ ID NO: 106956 - DNA, 148 bp, Zea mays
  Clone ID: MRT4577_29042C.1
accttaacttggggtgttttttttacgcatgtggagatttatacctccaacatgcgccccaaaggaaatcagtccagacagaatttgaagaaattgcaaaaaaacatctaacactaagtctgaaaggattgtatgcgagactgaatat

SEQ ID NO: 106957 - DNA, 179 bp, Zea mays
  Clone ID: MRT4577_29043C.1
ggaggggaggagagaggataccatagggacttcacacgtagccgcgcgctagtttgtacttccctcctggcttcattaaggaggactaatggtagaacactgcagccaatctcaggcgtaaataaatgtgaatatgacgcgatttctcttgtaacccaagcaactatatctactgtaat

SEQ ID NO: 106958 - DNA, 449 bp, Zea mays
  Clone ID: MRT4577_29044C.1
agctcgaattccgttgctgtcgctccaatgacacaagagggttacattctccatgctcgctcggcgctgctttgtccccgtcctcccgtccgcaacccgtgcgcacagccgttacctgctcggccaggggcttctccttcccatttgctctagcgacaccgtcgagacggcagtggcggtggtcccaggcccggcacgccggcgcgggtggctgaggaagctcatacccacgaactacctgccccggagcagctggtgctggaggctgaccgtcctgtcagccaccggtgcgtccaggtttgcctcgtcgctctctcgcttcctcaggaggaagcgccgctcgaaccacccagtgcgtctcctccacgctcatctccgtcgcgtgcctcctcctccccgctttgccacacgagcgcgctcgtcgctcggccatcacagccacacgccgc

SEQ ID NO: 106959 - DNA, 252 bp, Zea mays
  Clone ID: MRT4577_29045C.1
cttcgatgaaccaactagcacatttttttttcaatatgcaccaataatggctgccaaatattttgcctattatgccccttttctttctgcaagtgctgcttcggctagcatttttcctaatgttcacaagctcctatagcttccctttatcccccattcctctcaccagcgattttttattatatgtgaaaaaccaattctttctactcctactagatccaactttcaatttgtaattatgcattttacctt

SEQ ID NO: 106960 - DNA, 227 bp, Zea mays
  Clone ID: MRT4577_29046C.1
attatcaattctgtttcccctttaataattaattattggtcccggagaaagaacccggaacagccatcaacctcctggcggggcgaataatcaacccaggggcaagcaccaggccaacccaaaagccacaaggctcttccaagtaactgggggggaaccgtccccccccggggaaacccaggggcgtccgcgaaggcggctgaggggggcaggggggcccccccccg

SEQ ID NO: 106961 - DNA, 199 bp, Zea mays
  Clone ID: MRT4577_29047C.1
acaatgcagatgagtaaagcacaagtccggagagaggatcgcagcacagtacagtctgaagatgctaatagttttcgccttcttgctctctttgccctctcacagtgcctattaaatgcatataccatttcacagtgctgatttgttccactatgccattatttcacatttactaccacttatttcttcaatggtcttc

SEQ ID NO: 106962 - DNA, 524 bp, Zea mays
  unsure (1)..(524): unsure at all n locations
  Clone ID: MRT4577_29048C.1
tctatatttatttttattgtttttatttttttttttttttttnncangaaacaggaagtggccaaagattattttttagggttttaaaatgttaaaattgcccttaaaattacccaactttaatggcctccaaaccgggagcggtttaattccatataattagcaccccctgggcaaattgaaaataaaccaagttggtttgcactcaatttggggggttaacagataccggggagatccgactaaatttttaaaatatggggcccgggtgcggaaattttttccaagttaccttgggtggacatgagtttttgctttttttaaaaaaatgtcccttccgaaagataaacaattttggggttgtggggcaatgtcattttttttttgagaggggttaggatgttttcctttgaataataacgctgccagttaccaaaaacgttgaactttttcgggcaaacccctccattttcattattaacgcatgtaaattttattcttgaatgaaacccaactgggggggg

SEQ ID NO: 106963 - DNA, 151 bp, Zea mays
  Clone ID: MRT4577_29049C.1
aattgtcggatcgacccatgcgtccgcggacgcgatgtcaaccagcaaaaatatgcattaatcacttctattatcttaatcacgctctcctgcacagggcagtacaatttattttgcccacctcattcattcatcgctagagtacacaccc

SEQ ID NO: 106964 - DNA, 1148 bp, Zea mays
  Clone ID: MRT4577_2904C.1
tttgtggctccaaaatctgtagtcctccccatcaaagtgtgggggcttgccgagtggaatggaaagcaaatgtgaatttgaactttgcggaatacgagagtagtcaaaagaaaagttagaattaaccggtttcctttgctcgtagtcgttgtggtcgttgtccttttgggaagatgtagactcatcactgtcgtcgtagtagacgatctccttgatgcgtcttgtcttcttcttcttcccatctcttcgcttgtggcccgagcccgagtcattggacttgtcatcccttggctcgttgacgaaggactccttctccttgtcgttgatcacaattcccttccccttaggatccatctcttcgggcggttagtccctttcttgaagagaacgactctgataccaattgagagcacctagagggggggggtgaataggtgatcctgtaaaagttcaaaacttaagccacaaaaacttgttaagggttagcacaagtatggccaagtggctagagagaactcaaaacacgataaccacaagaaagcaatcacagagttgacacggtggttatcccgtggttcggccaagtacaaaacttgcctactccacgttgtggcgtcccaacggacgagagttgcactcaactcctctcaagtgatccaatgatcaacttgaataccacggtgtttttctttcctttgatcttttcccgtttgcgaggaatctccacaacttggagtctctcgcccttacaattgagttctcaaaagaggcacggagtaaggtgggaatgagcaacgcacacaagactagaaaatcagagcaacaacacgcacataagtcgcaacaagagctcgcaacgcaacacaaagagttcacaactccacaagagctctatatgctatcacaacgaaacgaatgcgtgagatcgatgtcttggtgcttagaagtgttgtgggaatgcttggtgtactcctccatgcgccaaggggtcccttttatagccccaaggcagctaggagccgttgggaacaaatctggaaggccatctttgccttctgtctcgtggcgcaccggacagtccggtgcacaccggacactgtccggtgcccgatttctttccttaacaggcgcagccgaccgttgccgac

SEQ ID NO: 106965 - DNA, 238 bp, Zea mays
  Clone ID: MRT4577_29050C.1
tgccagatttatgagccccaagtgccgacttttattttgttaaattatcttgtactgactaaaatagggtagactgagtgccggtgccggaggtccaacatgagtgggtcaggcgaagggataaaccaaggcaagtctcccccgcaaatgcggagaggctgctttaaacccgcgacctagtgttgtactatgtttggaaaacaatctccatttttgatttggcattcggtttatgatg

SEQ ID NO: 106966 - DNA, 699 bp, Zea mays
  Clone ID: MRT4577_29051C.1
gcgccaaaaaagacaacatatataataacagagtgtatagagataaatgtcacaataacatcagagtatttattacatagcggaagtcttaatacaaaataaaagataaatataacaggatctaaaatccatccttggcgccaatgtcaactgggagacgacgacctagacactctcacgaacacagcgcaacatccaccatgcgcctcatccagtggtacctgttcttgacctgacacttgagattccagttaccagggtgattcttcagatcctcgaaacctcactgggacttgagattcaggtaccaggatgatcttcaggtgactcgtaacctcgcgcgtcgattaaggttgcggcagtgctggccacatgtaggttgacccagcggcgaggaaaacgctctagcgagaaaccccggcagcgccagcctccagtcttcctggcgaggccataaccacgatccaggtgtttcttcttccttgtgcacaccggcagcaactaatttgattcttcccagcgccatggtcggccacatgcgccgcatgcacggcaacaggtgctacgcgcggccagcgactatacaccacggcgaccacgacggctagcgaccatactccacggcctctccgtcacgctgctcacggcgtccgggctcgaccagcactcaggctccctgtatgacagttcctatagctt

SEQ ID NO: 106967 - DNA, 544 bp, Zea mays
  Clone ID: MRT4577_29052C.1
aattcggcacgaggtttcttaattggcggcggcggccggccttttcggttggccgttacggccgttgaagaagccatgtggtggtggtggtccacggaaggaaacatttccaagggtccgatttttcgggacacaacccggggggccgggggggggacgggggtaaggggcaagtaaatggcgggcaacttcttggcggcgggttacgttttaacggttttaaacgggacggattccaaaaccaagggcctggtttccgggggggccagcttgggggacagcccgggcgcggccgccggggttgccgatgtaattttcttaatggtgggtttcccttcggacgtcggttcaacggccttggatcattcaaaaggggccttttttggcctaacccaaggcggtttcctagtggacatgacaacttcggacccaaccttggcggccgaaatagccggggccgcggccgccgccggttgttgggccgtgaacgcccccgtttccggcggggaccgaggggccggaaaggccaccttttcaattttgg

SEQ ID NO: 106968 - DNA, 422 bp, Zea mays
  unsure (1)..(422): unsure at all n locations
  Clone ID: MRT4577_29053C.1
gcgatctanaaccgtttttttttatgttgcagaggccaggggagcagcacaagggggcgcgcgggcgagaagggacaaaacacagcacacatgaggaccacccgcaggaaggtcctgaacacccaattcggcacgaaagagaacaggaaggatagagcgagtcccggggcgcacggacagaccacgaccccacaccacagcaaccacccaaaaagccagagcaacaaaccaacacagggcgaacaacgaggacactgcccaagacacgaacacgaactcgagccggtgcgacgtgggcaggcaagacaacaacaggaccaaagggacgcgcgagatccaaacaacccacagggaaaacagggacgaggacaccacggacagagatagagccggagaacccagggacgaccagaacacgaggc

SEQ ID NO: 106969 - DNA, 351 bp, Zea mays
  Clone ID: MRT4577_29054C.1
ctgagtttgttcagtttgagtcgtgtcctcggatgtagccgagtttgttgagcttggtcagggggtaagcgtgtttctaggggaccccaaaaattttgtcccaagtgaaatacaatcaacatcaaggtttaggatcccactggcaactgaacaatcaacaccggtttatagaaatcaaaggcttccacctggatgggaaaattatgatggttgggttggttccgaaaaatccaaatcaaagtttttaatagattttcttcatatagacaaaaaaatcaatcatgggggaattctcaatcaacaatacaaaaatcagtcaatcaataaacaagataaaattctaataaaaat

SEQ ID NO: 106970 - DNA, 392 bp, Zea mays
  Clone ID: MRT4577_29055C.1
aacaagacacaacatgattccaattaaaattacttatactacggactacatgacacgaccatgggcgcgagccttacaggacaattttccgtaaatatccaggctcaatcatacaaccgtagcatgtatactggcgagacaaactccctgctttcattctgcatggcctcaaaccaacaacagtagaagcgctcaataaaccataatgtgatttcgagcgattaacggctggtatacaccaccggcctttactccccttcccattggctgcataatctaacgacggtcacctgggcccaacaactgacgcagatctctgcatgagcaccatcctctggacctctcacagctcgccttcacattgtattacttgcgcgggatacgaacagcca

SEQ ID NO: 106971 - DNA, 231 bp, Zea mays
  Clone ID: MRT4577_29056C.1
attattaggaccaaccacttttatttgaatcacaggcacaacagcttaaacgttccccaacaaaatgggtattttaatgttttcctagagtttccctaaggcattgtttggaaaaggaactaatacaatcttttttacaaagcttactaaaaagagtaggataagaaaggcttttcacacaagagattgtccaccaagcttgcctgaacaaaaaggatgttgcagattaaa

SEQ ID NO: 106972 - DNA, 1232 bp, Zea mays
  unsure (1)..(1232): unsure at all n locations
  Clone ID: MRT4577_29057C.1
gcacgaggtttttgtctggatgggtcagtgcgtggagacaaaagaaaaacagaaagcatttgacattggccagaaatacgtacaaaatgccgtggcctttgaaggaatttctcctgatgtgcctctctataaagtcaatgaagggaatgaaccttgcttcttcaggacattcttctcctgggatagcacacggtccctggttcatggaaactcttcccacgcgtccgtttcagttcttttcggaatgcgttcagagggtggcaataagagctcaggtgatggtggaccaactcaaagggcatcagccttggcagctctttcatccgcattgaatccatcgtcgcaaggaaaacagtcagatgagaggcccacaaaacccagcagcacacaggcgcagtctcattcaggccaagggtctcagagagccgctgctgttgcagcactttccaatgttttgactgcagagggatcgcacagcccccgccacagtaggtcgtccccaacagcagatgctgagaagactgaattagctcctgcttctcctcaccagttggaaacagggcctgcagaagatgtccggacagagcctgatgtctcacaggaacaaactgctaacgaaaacggaggccagaccacctttagctacgaccgcttggtatcaaagtctactgaccctgtcagtgggatagaccacaagcgcagagagacatatttggtggacaatgagttcgagaccgtgtttggcatgaccaaagaggagttctacgagcagccaaggtggaagcaagagttgcagaagaagaaagctgatcttttctgaactcacacacacggctagctacgaataaaagccctcccgttgcgcgtccacggctgtcgtccagcattctcaccatgctcgttccacggatgcgtgatcaccagcagctttatccgtgagttgtatactctttatctgcacacgttttgggcgcgttatatatattactattcccctagcccctccattattctgaagtccacgttctggaagatgacctttcacgtgtttcttttttttaatcattaaaaatcaattggttcagatgtcattaccagtgagattttcgtatgtaatgatgcactggcaccaaggtgtatggaacattttttttttgctataagacttgagcttctattgttnnnnnnnnnngnaaaaaaaaaaaaaaagcggccgcttttttttttttttt

SEQ ID NO: 106973 - DNA, 2603 bp, Zea mays
  unsure (1)..(2603): unsure at all n locations
  Clone ID: MRT4577_29058C.1
gaaacaggggggtgagcgactagctgcgggggcgcataggagggagcgggggtggagcttgcgctgacacacaggagcgcgatgagatgcactgcgtcagtcacggatgatgaggcggcggacgcggcggcctggatgaagcagtgcggtcgccggttggaaagccgctgagatgtcaacaagaataactcaagtgatccaaggttacgagaatcatacgttcaagtctaagtttgagtcatggccagtaagtaacacgtcagggagtgccagcacggaggaaggccgagggaaagttacagcactcttgaagcagaaaggtgttgatgtcaaaggaatctcaaaaactagtgtgccagtaaatgacgaagttcctcctttgctcgatggcggtggaaagcttgagggttggtgtattgatggcagtaccaagactgctcttccaaaggaagaacttggaaaattctacagcggagactgctatgttgttctctacacttatcattctgctgacaaaaaagaagagttctatctagcttattggattgggaaaaatagtgtacaggaagatcaagaggcggcttttcaaatagctaatacaacttttaattctttgaaaggaagacctgtccagggtcgtatgtatccacgaaaagagccaccacaatttgtggctattttccagccaatggttattcttaagggtggtactagctctggttataagaaatttgtagaagagaagggtctgaaagatgaaacgtattgttctgatggcactgctctcattcaaatttctggaacagcggttcataacaataaaacgcttcaagttgatgcggtcgcaacatccttgagttccacagattgttttgttttgcaagctaaaaactcgatgtttatatggaatgggaatgcaagttcttttgaacaacaacagtgggctgctaaagttgctgaatttctgaagaccggtgttgctgtcaagcattgcaaggagggcactgagagctctattttctggtcttctattggtggaaagcagagttatacaaatagaaatgctgcacctgatgttgttattagagagcctcatttgtataccttctctctgaggaatgggaagctggaggttactgaaattttcaatttttcacaagatgatctgttgaccgaagacatgatgatacttgatacacactgtgaggtttttgtttggatgggtcagtgtgtggagacaaaagaaaaacagaaagcatttgacattggccagaaatacgtacgacatgccgtggcctttgaaggtatttctcctgatgtgcctctctataaagtcaatgaagggaatgaaccttgcttcttcaggacatacttctcctgggatagcgcacgatccgtgattcatggaaactcttttgagaagaaactttcagttcttttcggaatgcgttcagagggtggcaataagggctcaggtgatggtgggccaactcaaagggcatcagccttggccgctctttcatctgcattgaatccatcgtcgcaaggaaaacagtcagatgagaagcccacaagctcagatgacagcgagcatactcaacgagcttcagcaatggctgccttgtcctctgcccttaatccatcgacaaaacctagcagcacacaggcacaatctcattcaggtcaagggtctcaaagagccgctgctgttgcagcactgtccaatgttttgactgcagagggatctcatagcccccgccacagtaggtcgtccccaacatcagatgcagacaagactgaattagttcctacttctccccatcaattagaaacagggactgcagaagatgtccgaacagagcctgatgtctcacaggaacaaacagctaaagaaaatggaggccagacaacctttagctatgaacgattgatatcaaagtccactgaccctgttagtgggataaacaacaagcgcagagagacatatttggtggacagtgaattcgagaccgtatttggcatgactaaggaggagttctacgagcagccaaggtggaagcaggagttgcagaaaaagaaagccgatcttttctgagacaaggctggcttcgaactaataaaagcccttacgtcgcacaggattgtccagcattctcatcatgctcgttccgctgatgatgatcgatcaccagcagctttatccgtgagttgtataggctactcttttatctgcacatggtttgggagcattatatatatatcccccttgcccgtccattattctgaggtcgttcttgatgttgacctttcacgtgttttctttttttattgtattataaaaaatcaaactggtgtaaatggcattactagtgagatttttgtaagtaatggtgcatgggcaccaaggtgtatgcaacatatttttgttgtaagacttcagcttctattgttctggtggtgttctattgaccactggtctaatcatctttactggcttaggtaatggccaactcaaaccatggaaataacctcgagagggggggccaggcaaaaaaaaaaaaaaaaaaaaaaaaaaaaaaaaaaaaaaaaaaaaaaaaaaaana

SEQ ID NO: 106974 - DNA, 190 bp, Zea mays
  unsure (1)..(190): unsure at all n locations
  Clone ID: MRT4577_29059C.1
cttgctcacgaggaaaattcggtactactaaggtgagagacnctcttttgtgagagacgacacccacnacnnacatatttgcaaatagtcttttcgcagacaatacanttttaattaaaaaccaaaaaaattctgtgcgcacaaacattttacaaaacacaccgaaaactacctcccacgcggggctggc

SEQ ID NO: 106975 - DNA, 1497 bp, Zea mays
  Clone ID: MRT4577_2905C.1
atggatcctaagggcaaggggatggtgatcaacgacaaggagaaggagaccttcgtcaacgagcccaatgatgacaagcccaccgactcaggctcgggccacaaaagaaaagacgggaggaagaagaagacaaggcgcatcaaggaaattgtctactacgacagcgacgaatcttcctcctcccaaaaggacgacgacgaccacgatagacgaaagacgatccataaaaatgcacaagctactactgtgttgctagcctctttgtgcagggacgagtatcacaaggtgagcggcttggacaatgccaagcagatctgggacaccctcaagatctctcatgagggaaacgacgtcaccttgctcaccaaaatggagttggtggagggcgagcttggacggttcgcgatgataaggggcgaggagccgacacaaacatacaaccggctcaagacccttatcaacaaaataaggagctacgggagcacgcgatggacggaccacgacgtcgaccgcctaatgctaaggtcatttaccgttcttgatcctcatttggtgaacaatattcgtgaaaatcccaggtacaccaagatgtcgcccgaagaagttcttggggaattcgttagcgggcgaatgatgatcaaggaggcgaggtacgtggacgacgccttgaatggtccgatcaacgagccgcaaccccttgctctcaaggcaacacgaagcaaggaggcgctacctagcaaggtggcacagattgaggcggccggacttaatgatgaagagatggctctcatcatcaaaagattcaagacggtgcttaaaggtcgcaagggacagccaagcaagaccaaagccaaggggaagcgctcatgcttcaaatgcggtaagcttggtcattttattgctaactgtcccgacaatgatagtgatcaggatcaagggaacaagagggagaaaaagaagaactataagaaggcaaagggcgaggctcatcttggcaaggagtgggattcggactgctcctcgtccgactccgacaatgagggactcgccgccaccgccttcaacaagtcatccctcttccccaacgagcgtcacacttgcctcatggcaagggagaagaaagataagtctgaaacccaagggaccctcaagcgcttcctaaggagagctcaaaatgagtttgagctcaaagtgaaaaagataaggagcgacaatgggtccgagttcaagaaccttcaagtggaggaatttcttgaggaggaggggatcaagcacgaattctccgctccctacacacctcagcaaaatggtgtgatgaagaagatgttccgacggccgctatacgaaccatggcgattggagaagtgcggccacaggaacaagatgaacgagatcaaccttcttcctcaacaacagtgcatcccccaactcaagacgatgaacaggttcatcaaaaggaggcgtgtgatcaagggggagcacaagatgatcacatga

SEQ ID NO: 106976 - DNA, 422 bp, Zea mays
  Clone ID: MRT4577_29060C.1
attgggtacctcgaagccggccgggaagccattcgacgcgagtgagtgacaccagccgtattgtcccgagtcccgaccccgaccgatcctcgcctgctgcagccatggcgacctccgcggcgctctccaccgccgccaatcccacccagctctgccggtcccgcgcttcgctgggcaagccggtgaaggggcttggcttgagcataggccgcgagcgcgcccaccggagcattgcgtgtcaagaggagagcagcatctacggcgaccgtcttcctgacatggagacccggaacctaatgaaggtaatcccgtactgcaacaatgacgtagatgccggcggcgccgccaccgccaacttaaatataaggacccacagacgggggtgcccgctccgatagaaagaccggcgcctccagggacga

SEQ ID NO: 106977 - DNA, 326 bp, Zea mays
  Clone ID: MRT4577_29061C.1
aaaaggtttggagtgagctcatcgcatttacttacttaactattgcggatccctcttaattgaacgacgattcctatgactcaagaatttgtaaaagtaaattgtcgttggtcccaagcacttgaagcacgttatatgatatagaattttaatccgctgtgcttttcgatttgcgtacatatatgatctgtgctttctcctgtctgtagaataactgtatacatactaggagcaaacttgttagaatctcagtttggtttgtcatttaatcaccaaaactctcagttagggttgattacacttacactaagccggtttggtttttt

SEQ ID NO: 106978 - DNA, 376 bp, Zea mays
  Clone ID: MRT4577_29062C.1
cgaatttagagtttatgtcagcttgccaaacagaaaactgaactagtcacagtacacaagagacaaccagctgacatgactccttcctaattctacttcagacagatccgtgtattgctagtaccgtacgtgatttccttccaatactgaacatgtatagatctgaatctttccataagtataaatacgaagtgatatatagcatgatcgcttcttggttttagttaaaaaattaaatgaaagcacattgaattcacatacgaggtcggcacgctcaccagagaatccaccattggtgagggtgccggcgccaagaaacctgccctcgtgcctcccgggctgctgctcttggcagccgtggcggtagcagggcacg

SEQ ID NO: 106979 - DNA, 197 bp, Zea mays
  Clone ID: MRT4577_29063C.1
gagctgaaggctgcctgccctgtgttgtgtctgttggctccatctagagagctactagtggtcggtctatggacgcggaagggacttctacaacggtggcgtctccggggcagtggccgcggcggcccaagaacggcggtggcgcggtggctgtgcccaccacgaggagagtagtgttttgagcaaccggggggggg

SEQ ID NO: 106980 - DNA, 822 bp, Zea mays
  Clone ID: MRT4577_29064C.1
ccggccgggaaaatttcagtatacacatcatgcgtttctctcgcgtggtaccgttcatcccattggcgtctgccttggtgatcaccgaagctgaggtgttcgagaagctgcccaagtcgaacaggcacattgagaatgcgaagctctccggaaaggaactgctcgacaacgcacaggatatccttgacgacacttacaacaaggttaaggagagtgcacaggatgtctacagccggttccacgatgctactgccaatgttgagtcttggttagaaggttcatcatttgatgatgctaccatcaactatggtggcggtgaccaccctccacaccaccctccacatgacgggccaccccatcacggccctccccgtcacgggcgtcctcaccacggacacgatggacacgacaagcccaacaggactgtctacgagctcatcaacgagagcaagtacaccaccaagctggctaagctgatcaacaagtacgatgacttggtcgagaccctgaacagcaccaaggccaactacaccatctttgctcccacagacgaggccttcgagaagatccccgatcacggtcgccacccctcgaaggaggttctcaaggacatcctcctgtaccacgtcagccctgacttctaccctgccggccgtgtgctccacagctacaccatcccgactctcttcgagcccgagaagctcggccacaagcagcgcctgaccgtccgcgtcactctcaagggccccgccatcaacttctacagcaagctcgtcgcagtcaacatcttcggcaccaaggcgtcgtgcacggcgtcgactc

SEQ ID NO: 106981 - DNA, 490 bp, Zea mays
  Clone ID: MRT4577_29065C.1
acttataaaagaaaaaaaaaaaacaaaaaaccgcattaaggggattaccggtggcgcggtttgggggcaccggggggccaaatccgggggaaccgggagggaccactggcccgaccctgaggccccacacaccccgaagcaaaaaaagacaaacaaaaaaacaaaacaaaatgaaaaaaacaaaaaaacggggaaaaaaaaacaaaaaagccaggaaaacaaaagaccctacacaaacttgcgggggatcactggggcccagggggcggggggaaagagggcaagggggaaaagggcctaggggacccgggccacccgggaggcccccccggcggggccggggaggaggggcaacaggggcaccggggagcccggggggaggccccgggcggcccgggtgcggggatcctcaaccgggaaccgggccaagaggagccccaggcagtccggccggaggccctaccccacggggaccacgggggaaaagggg

SEQ ID NO: 106982 - DNA, 500 bp, Zea mays
  Clone ID: MRT4577_29066C.1
ctgggagcggcccacacccatggacggcgatttccttcgccatggatactgttgccagcgacctgcgtcgcgcagcaaccgccggtccaaggccccgccctgctgctctgcttattccgcactggcgtgcggcccgccccctgtagagatggcctgtctctcctgcctccgctgaatatagcacccaccgcacgtctgcgagatgccgcgcatacccaagcgatcctgcccggactacttcaagaaggccttaccagcgttcctatgagctctccccggacgacaagcttaacaaccttgaagtgcaaggagatcggacaggaactatgatgaggcgggtatggccctgacccatgccattagcgaggagtacctggaagagaacatgactgcaggtgtgggctccgacaaagaccatgaggttccagccgacattggagcatacactgtggtacgctcccgtgtcaggaggaacgtctgccgcggctgctgaatgccaa

SEQ ID NO: 106983 - DNA, 352 bp, Zea mays
  Clone ID: MRT4577_29067C.1
gaccgccgccgcgccgccatcatggtcaccagccgtgtgcagcctatcaagctggccagggtcaccaaggtcctgggcaggaccggttctcagggacagtgcacgcaggtgcgcgtggaattcatggacgacacgagccgatccatcatccgcaatgtaaaaggccccgtgcgcgagggcgacgtgctcacccttttggagtcagagcgagaagcccggaggttgcgctgagcttggctgctcgctgggtcttggatgtcgggttcgaccacttggccgatgggaatggtctgtcacagtctgctccgtttttttgtccgccacacgtaactgagatgctcctttaaataaa

SEQ ID NO: 106984 - DNA, 855 bp, Zea mays
  Clone ID: MRT4577_29068C.1
cgaggccggccgggaactcatctcagtccttcaggcatcaaacttgggaagaccccttctcttcaccatgttgctgctcaagatctttaccgctctctttttctacatcacctccatcgtctccgcggcggacacaagtgcatggaagtcacgcagcatctactttgtcctgacggatcgtattgcccgcagcagcagtgacacgggcggctcagcttgcggcgacctcggcaactactgcggtggaactttcaagggcctcgagtctaagctcgactacatcaagggacttggattcgatgccatctggatcacccccgtcgtctcaaacaaggctgctggataccatggctactgggccgaggacttgtatgcggtcaactcaaactatggcactgctgccgacttgaagagcctcgttgctgctgcccatgccaagggcatctacatgatggtcgacgttgtcgcaaaccacatgggtcctggggcaatcacaaacaaccgccctgaacctctcaaccaagcttcatcataccacaccgcttgcaacatcgactacagcaaccaaaacagtatcgagatatgccaaattgccggacttcccgacatcaacaccaccaagagcgagatccgtacactcctcaacacctgggtcaattggctcgtaaaggagtacagcttcgacggcgtccgcatcgataccgtcaagcacgtcgaaaaagacttttggcctggcttctccgccgctaccggtgtctacagcattggcgaggtattcgacggaaaccaacctaccttgccgagtacgccaagctcatgcctggtctccctcactacgcagtctactacccgatg

SEQ ID NO: 106985 - DNA, 496 bp, Zea mays
  Clone ID: MRT4577_29069C.1
gggggcgggcgagggactgcattttcattgatttcttttgatttatttggacttttccagggaaaaaaattcccttagtagggaaactaaataacggttttaaatcggcctttttccaatcacatacctaatttaagctaatcaaaataagctggtaaacatggcccccaaggattactttttacattttccccctaaaccttgaggggcccgctgttgtacattaatcaggccgatttttgatcttagctttaaaaacttggttttacccaacggttttgtcaaaaaggcgctaagttgatcttccctcctgaagaacttcacattgattaggccttttttttaaaactcccggacaaaaggggacttaacttgaatatgcttgctttgcccatgggggactggatttttaattaaagcaatgggggactgattggccacccttaacattggggcctttgttgttgttccctgcacctttgccagtacccgagcc

SEQ ID NO: 106986 - DNA, 5010 bp, Zea mays
  Clone ID: MRT4577_2906C.1
atggatcctaagggaaaggggacggtggtcaacaacaacgagaaggagtctatcttcaatgagccgaaagatgacaagcctacggactcgggctcgagccacaaaagaagagacgggaaaaagaagacaaggcgcatcaaggagatagtctactacgacagcgacgaatcttcctcttcccaaaagtacgacgacgactacgagaaaaagaaaacggtcaattcgaacttttcttttgattactctcgtattcctcaatgtgcatatgctcatttactatccattccacttggtaaacctcctcattttgatggagaggactacggattttggagtcacaagatgcgtagtcacttgttctctctccatcctagcatatgggagatagtagagagtggaatgaaatttgatagctcgaatagccctttgtttatcaatgaacaaattcataaaaatgcacaagctactaatgttcttctagcttcattgtgcagggatgaataccacaaagtgagcggcttggacaatgccaagcagatctgggacaccctcaagatctcacatgagggcaacgacgtcaccatgctcaccaagatgcagttggtagagggcgaacttgggagattcgctatgataaggggggaggagccaacccaaacatacaatcggctcaagacccttgtcaacaagataaggagctatggaagcacgcgatggacggaccacgacgtcgtccgcctaatgctaaggtcctttactgttcttgatcctcatcttgtgaacaatattcgtgagaatcctagcgggcgaatgatgatcaaggaggcgagatacgtggatgatgcattaaatggcccaattcaagagcctcaaactattgctctcaaagcaacgaggagcaaggaggcgctacctagcaaggtggcacaaattgaggcggccgagcttaatgatgaagaaatggccctcatcatcaagcgtttcaagacggcgctaaggggtcgcaaggagcatcccaacaagaccaagacaaaggggaagcgctcatgcttcaaatgtggtaagattggtcactttatcgctaattgtcccgataatgatagtgacctggaaaagaagagtggaaaatgggaaaagaagaagaattacaagaaggcaaagggcgaggcacatattggaaaggagtgggattcggattgctccacgtccgactccgacaacgaaggactcgccgccaccgccttcaacaagtcatccctttttccaaacgagcatcacacatgcctcatggctaaggagaagaaaggattagatagatctaaaattgataagattaatgagttgattgatgccttgaatgacaagaatagattactagaaaaacaagaggatcttttatatgaggagcgagataaatttgttagtgcacaaaattctcttgctctagaaattaaaaggaatgaaatgctctcttgtgaattatctacttgtcatgaatccatctctaatttaagaagtgttaatgatgatttgaatgctaagttagagatcgctagtaaatctaactcttgtgtagaaaatgttgtaacttgcactaggtgtaaagatattaacattgatgcttgtagtgaacacctagctcgcatttctaaattaaatgacgaggtagctagtcttaatgcccaacttaagactagcaagagtgattttaataaactaaaatttgctagggatgcctacacggttggtagacacccctcaattaaggatgggcttggtttcaagagggaagccaagaacttaacaagccataaggctcccattcccgccaaggagaaagggaaggcccctatggctagtagtgctaaaaagaaccatgcttttatgtatatgataggagacatgctagaaatgcaaatagaagttatgatgcttttgattcatatgtttatgattctcatgccatgtttgcttctagttcttcctataagcatgatagagatatgtctaggagaaatgttgttcacactgcgtaggagaaatgttgttaatgttcctaggaaagttaatggaccttctacaatatatcatgctttaaatgcttccattgctatttgtagaaaagacaagaagatagttgctagaaaattaggggcaaaatgcaagggagacaaaacttgcttttgggtccctaaggatatttgtgctaaccttgtaggacccaacatgagttgggtttatgcatccgggggttcaagctggattatcgacagcggatgcacaaaccatatgacgggggagaagaagatgttcacctcctacgtcaaaaacaaggattcccaagattcaataatattcggtgatgggaaccaagacaaggttaaaggactaggaaagattgctatttcatccgagcattccatttctaatgtgtttttagtagaattgctcggatataacttgttgtccgttagtcaattatgtaatatggggtataattgcttatttacaaatgtagatgtgtctgtctttagaaggagtgatggttcattagcttttaaaggtgtactagacgacaaactctatttagttgattttgcaaaggaggaggcaagtctagatgcatgtttaattgctaagactagcatgggctggctgtggcatcgccgtctagcacatgtggggatgaagaaccttcacaaacttctaaacggagaacatgtgttaggactaacaaatgtgactttcgaaaaagatagaccttgtgcaacttgtcaagcaggtaaacaggtgggaagtgctcatcgcagcaagaatgtaatgaccacatcaagacctctggagttacttcatatggacctcttcggacccgtcacctacctaagcataggaggaagtaagtatggtcttgttatagttgatgatttttcccgcttcacttgggtattctttttgcaagataaaacagaaacccaagggaccctcaagcgcttcctgaggagagctcaaaatgagtttgagctcaaggtgaagaagataaggagcaacaacgagtccgaattcaagaaccttcaagtggaggagtaccttgaggaggaaggaatcaagcacgagttctccgctccctacacaccacagcaaaacggtgtggtagagaggaagaacaggacgctcatagacatgacgaggacgatgcttggagagttcaagatgcccgagcggttttggtcggaagccgtgaacacggcttgccacaccataaaccgggtctaccttcatcgcctcctcaagaagacttcatatgagctactaaccggtaacaaacccaacgtttcatatttttgtgtatttgggagtaaatgctacattctagtgaagaaaggtaggaattccaaatttgctcccaaagctgtagaagggtttttgttaggttatgactcaaatacaaaggcgtatagggtcttcaacaaatcatcgggtttggttgaagtctctagcgacgttgtatttaatgagactaatggctctccaagagagcaagttgttgatcttaatgatgtagatgaagaagacgttccaacgaccacaatacacaccatggcaattggagatgtgcggccacaggaacaaaaggagcaagatcaaccttcttcctcaacaatggtgcaacccccaactcaagacgatgaacaggttcatcaagaagaggcgtgtgatcaagggggagcacaagatgatcatgttatggaggaagaagcacctcaagcacctccaacccaagtccgagcgacgattcaaaatcatcccgtcgaccaaattctgggtgatattagcaagggagtaaccactcgctctagattagttaatttttgtgagcattactcctttgtctcttctattgagcctttcagggtagaagaggccttgctagatccggactgggtgttggccatgcaggaggagctcaataatttcaagagaaatgaagtttggacaatggtgccacgtcccaagcaaaacgttgtgggaaccaagtgggtgttccgcaacaaacaagatgagcacggggtggtgacaaggaacaaggcacgacttgtggcaaaaggttatgcccaagtcacaggtttggactttgaggatacttttgctcctgtggctaggctagagtcaattcgcatattgttagcctatgccgctcaccattcttttaggttgttccaaatggatgtgaagagcgctttcctcaacgggccaatcaaggaggaggtgtacgtagagcaaccccctggctttgaggatgaacggtaccccgaccacgtgtgtaagctctctaaggcgctctatggacttaagcaagccccaagagcatggttgggaaaagccgatccaactttattcactaagacttgtgatggtgacttatttgtgtgccaaagttatgtcgatgacataatatttggttctactaaccaaaagtcttgtgaagagtttagcaggcaactcaaggacgacactttcatctcccaaacgaagtacacgcaagacttgatcaagcggtttgggatgaaggatgccaagcccgcaaagactccaatgggaactgacggacacgtcgacctcaacaaaggaggtaagtccattgatcaaaaagcataccggtctatgataggatccttgctttacttatgtgctagtagaccggatattatgcttagtgtatgcatgtgtgctagatttcaatctgatccaagggagtgtcacttagtggtcgtaaagcgaattcttagatatttagtcgctacgccttgcttcgggatctggtatccaaaggggtctacctttgacttaattggatattcagactccgattatgctggatgtaaggttgataggaagagtacatcagggacgtgccaattcttaggaaggtcactggtgtcttggagttctaagaaacaaacttctgttgccctatccaccgctgaggccgagtatgttgccgcaggatag

SEQ ID NO: 106987 - DNA, 148 bp, Zea mays
  Clone ID: MRT4577_29070C.1
tcatctggagtaaatggtggtgtggccaatccattacccaataaggataaactctggcgatcaaagcagcatctcttacagcaagcatgacaaagaagtgtacgccgttggcacctatgaagactctgcagcctgagcaatgcatttc

SEQ ID NO: 106988 - DNA, 1087 bp, Zea mays
  Clone ID: MRT4577_29071C.1
ccggccggatttttgggcacgtagccgccgtcgccgcctcgctttctcctcttccgccccaccccggtgaggcgctgatccatcgcctcggacagcggctccagaacctccgcgttgcagttgcagtggttggggttggcttcgtgctattcagaaacacagtagcgagaactattcggtggggccgaagatggtgtcgctgaaggtgccaaagcgcctcgccgcaagcgttctcaagtgtgggaaaggcaaagtgtggcttgaccccaatgaagttagtgagatctccatggcgaactcccgccataacatccggaagttggttaaggatgggtttatcatcaagaagcctcagaaaatccactctagatctcgtgcaagaagggcgcacgaggctaagcagaagggacggcactcaggatatgggaagcgtagaggtaccagggaggctaggctccccaccaaggtactgtggatgaggaggatgcgcgtgctgaggcgcctgctccgcaagtaccgcgaggccaagaagatcgacaagcacatgtaccacgatatgtacatgaaggtcaaaggtaactcgttcaagaacaagagggtgcttatggagagcatccacaagtccaaggctgagaaggccagggagaagacgctctccgatcagttcgaggccaggcgcgccaagagcaaggcgagtcgcgagaggaagaatgctaggagggaagagaggctggcccagggcccaagagaaataccaccaccagtctcagccacagctcccactaccggggcaccgaagaaagcaaagaagtgaagtattgcaacaaagctgcagctttctagtccagtacttcgtaattttggagcgccctgatcaattttgctgttatacagcttcgtgtcttttattttccaaaagctaccgtacctggattgttagagatgtttacgcagagtttctttggaagaggatccgctcaaaaatgtttatttggatcagatggtctcaggaaatgtggttatgttttatggaaatttatcctgttgctatttgattgatcaattgacgatggtgccccattatttg

SEQ ID NO: 106989 - DNA, 392 bp, Zea mays
  Clone ID: MRT4577_29072C.1
taagcttagattaaaaaaaaaaaaaaaaatattatttaaaaaaaaaaaaaaaaaaaaaatattttttatttttttttttttttttttttaatttattaaatttttaataaaatttttttttttttttttgttttttttttaaaggggaaaattttttaaatttttttaaatttgggggccgtttaaacttttttttaaagggccaatttttccttttagggagtttttttaaaattcatgggccggggttttacaactttttaattggaaaaaccttggcttatcccaattaatttgctttgcaacaaatcccctttttgcccgttggtgtaaaaggaaaaaggccccccccattcacctttcccaaaatttgcacaccctaaatggaaaag

SEQ ID NO: 106990 - DNA, 938 bp, Zea mays
  Clone ID: MRT4577_29073C.1
gggcttggagctaaacaactcggtctcctgctctctgttgcattgcgaatcatcttcgtgcgtgccaagggacacgatactaccaagctaatactactgctacagtagctgacacgactgattggttacagctcttattctgtgaccgaaggatggatgcatggtgcatgcggacgaacgctagctagagcctaaagctggcgggacacgctgccgggcttggggcaaaagacgaccttgatctcgccggggtcgacgcagtcctggggcgtgtcctcgatgtcagtggcgttggtccgcgtgtcggggcacaggtgcttgaacagcgccgcctcggtcgcgccggcgccgcaccctcctccgggcgcgcgggcgcgcggggggcactcggcgccgaggtccacggcgcaccccagcgtggggcaccgccggcgcggcccggcgccctctggcggcatcccgtgcggcgtcaccacgaccgccacgttgaagccgtccaccaggctcacgctgtacgccgcggccccgcccgtcccgcccacgctcacctgcgccaccgtcaccggcggcgcgtcgccagtcgtgcaacggagaggaggggtcggaagcagcgggtcgtacgcgtccgcctcgtcgttgtcgtccccgccagtgcagcccgtccgcgccaccacgcggcccgaccacgcgcccggcgggaacgctagcgtcgccaggccctcgccgttgccgtccagccgccccgccggctcgccgtcggcgtcggtggggatggacggattgcccgcgttggcggtcaccagcggccacaccgggtacgggcacaggttgtggagggtcaggttggtggtggtcgtggacataaccggcgacggctgacgtgcagcggtggccagcagcacagcggcgagcgccaagatcatcatcggagccagagc

SEQ ID NO: 106991 - DNA, 388 bp, Zea mays
  Clone ID: MRT4577_29074C.1
cgtaagctcggaattcggctcgagctaaactaactttattaggtaataagtggagattcttcatggtcggcattaatacgcttgggatgggtttccttatggggcacctggcagtcgcatcatcgttcgtcaaatcacttgagaagtgccgatccgcaagctcttggggagcaaaatgatgaagaactctcacgagacaaaaaagcttctccgccaggttgctggtgacacggactttcttacagagtgataacatatctgatacagactatcaggttacgagagtcatacatgaccattatgacacggtccctgacatacacattaaagcgcatacgctatacaagttcaaagggtgtgaccataatcgcccctagcaacggcgttt

SEQ ID NO: 106992 - DNA, 411 bp, Zea mays
  Clone ID: MRT4577_29075C.1
cggaggcgtgggcgacgacattcctgacctcgcccggagcatctcaaatagattcataaaaatgatatggacaaaaggcgggcgagagaaggctggggacgaagctcgaagtcatcttgaaccagatgacgaagctgaaggtgatacttaaaggatatgccgccgaagcagaaacctgacgaagattaataggagtagactagaaaaaactcaggagaatttgtaacaacttttcgtaaatacaattaatctattctcaaggaactttgttcataccttgtaatatattcttacccttttattgagacgctttgatgtggacgaaatcagtattttgagccgaaggcgaaaaaacaccttcccttcttttcgtacacaacgaagcataaaagaccatttcttctttttgcc

SEQ ID NO: 106993 - DNA, 241 bp, Zea mays
  Clone ID: MRT4577_29076C.1
ggcctggccgggtattcccttgagcacaagcagcgccaccaccaccctctccgtcccttccatctctctctcccttgtctccgcgcgcgcggaccacggtgctatgccacgcgcatcgggcacggcaaagaactcgacgtcgagatgaggggcgccgacggcgacaaggaggcattcttccactgcctggaccgcgtgccgtccggcatccacatcgacaccgaccacccccccgacgacg

SEQ ID NO: 106994 - DNA, 340 bp, Zea mays
  Clone ID: MRT4577_29077C.1
cctgggagtacttgggggggtacattagaaggtttttttgccgtctaaccaccagtcgaaggcgcagtacgcgggcactactaatgcaaacgaacacgtaagtcgagacactaggcggtgcgcgagaacgccctaacgctgccggcgagcctgccggcgttaaagcactcgtaagtgatggagaacatggccctggcggcccggcagaagtcgggcatcgcatgaaggtgttagctaccatactagaggtggaacggtcgagcccaatgccaaggatacgcacgcgcgcatgacacggcataagtattctatagtgacacctaaaaacaagtcactgggc

SEQ ID NO: 106995 - DNA, 434 bp, Zea mays
  unsure (1)..(434): unsure at all n locations
  Clone ID: MRT4577_29078C.1
nagctccatccaccatccatcacaggctagctagcgcttcatacgaataatcatctgtcttcacctgcactatgctaacaccagctagcagctcgatcgctctggcctgtaataatggccgatcgctcctcctcccagcagctggtcgcggagaggcccctgtcaacggcgatgatgctgctggcggaggtggccgagacggaatcggagtgattgacctgccacgaggagacgtcagcgatggagcctggcctccgatactcgatgggcagcgcgcagtcgccctccgcaggatgttccaacggtgtgcgctcgctcaacggccgcgcgtcttcgggagcggaccgtgatgacacctgcaactgcctcctaaggatgacagaccggttcgaaggcggcgtcagcatggccaacgccgacaacatccccggcaa

SEQ ID NO: 106996 - DNA, 815 bp, Zea mays
  unsure (1)..(815): unsure at all n locations
  Clone ID: MRT4577_29079C.1
atcgtttcttcctagtggcagtggatagtggacacagagcgcgcacacatacccacagagatttgcactcttttcacttcatcgtgaacgggaagcgagcatacaatagactgaaacccaaataatggcctgttctacagcagcgaggaggcatcgtcgtccactcttcaccatcctggtcgctctctccttgctgcaagtatccgcgatgatcgtacccctagacgagcaggaaggcgaccgggtgggtctcctcccggggcagccgaggagccctgccgtctcacagttctcggggtacgtcaccgtgaacgagcgcagcgggagggcgctcttctactggttctttgaggctcagacgtcgccggctgaaaagccgcttgtgctgtggctcaatggaggtcctggctgctcgtcggtgggctacggagcagcttcggagctggggcctctcttggtcaatagcaacgggaccggattggagttcaacaagtttgcgtggaataaagaggccaatctgctgttcctggaatccccccgttggtgttggcttctcgtacacaaatacttcctctgacctaaaaaacctcgacgatcgcttcgtcgccaatgatacctacaccttcctagtgaactggttcaacaggtttccacagtacaggnagccatgatttctacatatcaggagagagctatgcaggccattacgttcacagctttgcagaaagtggtgtatgagcacaacaagcaccttgaagcgaagcagcgaatccatctggaagggatttattgccggcaacgcagnagactgacga

SEQ ID NO: 106997 - DNA, 3045 bp, Zea mays
  Clone ID: MRT4577_2907C.1
atggatcctaaaggcaaggggatggtgatcaacgacaaggaaaaggagtccttcgtcaacgagcccaatgatgacaagcccaccgactcaggctcgggccacaaaagaaaagacgggagaaagaagaaggcaaggcgcatcaaggaaattgtctactacgacagcgacgaatcttcctcctcccaaaaggacaacgacgactacgatagacgaaagacggttaactcaaacttttctttcgattattcgcgcatcccgcatagttcaaatgctcaattgcttcccattccacttggcaagccccctcactttgatggagaggattacggattttggagccacaaaatgtgtactcacctgttttctctccatccaagcatttgggagattgtggaaagtggaatgaaatttgatagctcggatagccctatgtttattaatgaacagattcatagaaatgcacaagctactactgtattgctagcctctttgtgcagggacgagtatcacaaggtgagcggcttggacaatgccaagcagatctgggacaccctcaagatctctcatgagggaaacgacgtcaccttgctcaccaaaatggagttggtggaaggcgaacttggacggttcgcgatgataaggggggaggagccgacgcaaacatacaaccggctcaagacccttatcaacaaaataaggagctacgggagcacgcgatggacggaccacgacgtcgtccgcctaatgctaaggtcatttaccgttcttgatcctcatttggtgaacaatatacgtgaaaatcccaggtacaccaagatgtcgcccgaagaagttcttgggaaattcgttagtgggcgaatgatgatcaaggaggcaaggtacgtggacgacgccttgaatggttcgatcaacgagccgcaaccccttgctctcaaagcaacacgaagcaaggaggcgctacctagcaaggtggcacagattgaggcggccggacttaatgatgaagagatggctctcatcatcaaaagattcaagacggtgcttaaaggtcgcaagggacagctaagcaagaccaaagccaaggggaagcgctcatgcttcaaatgcggtaagcttggtcattttattgctaactgtcccaacaatgatagtgatcaggatcaagggaacaagagggagaaaaagaagaactataagaaggcaaagggcgaggctcatctgggcaaggagtgggattcggactgctcttcatccgactccgacaatgaaggactcgccgccaccgccttcaacaagtcatccctcttccccaacgagcgtcacacttgcctcatggcaagggagaagaaagtaagcactcataatactagtacttatgcttcttcaagtgaggatgagtctagtgatgatgatgagatagattactcatgcttattcaagggattagatagaaccaaggtagacaaaattaatgaattgattgatgccttgaatgataggaatatacttttagaaaagcaagaggatttgttgtatgaagaacatgataaatttgtagaagctcagaaatctcttgctctagaaattaagaggaatgaaatgctctctagtgaattatcttcttgtcatgaaactattgccaagttaaagagttttaatgatgatttaaatgctaaactagaagtagcgactagtcttaatgcccaacttaagactagcaagaatgaatttgacaagctaaaatttgcaagggatgcctacacaattggtagacacccctcaattaaggatggacttggctacaaaagggaagccaagaacttgacaagccataaggctcccatctccgccaaggagaaagggaaggcccctatggctactagcactaaaaagaaccatgcttttttatatcatgatagaagacaatctagaagtgcttataggggttataatgcttatgatgattttgattctcatcacatgattgcttctagctcttcatatatgcatggtagaaatatgtctaggagaaatgctattcatcatgtgcctagaaagaatgttagtcatgcttctaggaaagtagtaaatgaaccttctacaatttattgtgctttaaatgcttcctttgctattcgtagaaaggataagaaaattgttgctaggaagttaggggcaaaatgcaagggtgacaaaacttgcatttgggtccctaaggatatttgcactaaccttgtaggacccaacatgagttgggtttatgcatccgggggttcaagctggattatcgacagcggatgcacaaaccatatgacgggggagaagaagatgttcacttcctacgtcaaaaataaggattcccaggattcaattattttcggtgatgggaatcaaggcaaggataagtctgaaacccaagggaccctcaagcgcttccttaggagagctcaaaatgagtttgagctcaaggtgaagaagataaggagcgacaacgggtccgaattcaagaaccttcaagtggaggaattccttgaggaggaagggatcaagcacgagttctccgctccctacacaccacagcaaaatggtgtggtagagaggaagaacaggacgctcatcgatatggcgaggacgatgcttggagagttcaagacccccgagtgcttttggtcggaagccgtaaacacggcttgccacgccatcaacagggtctaccttcatcgcctcctcaagaagacgtcgtatgagctgctaaccggtaacaaacccaatgtatcgtactttcgtgtatttgggagcaaatgttacattctagtgaagaagggtagaaattctaagtttgctcccaaagttgtagaaggctttttgttaggttatgattcaaatacaaaggcgtatagagtcttcaacaaatcatcgggtttggttgaagtctttagcgacgttgtatttgatgagactaatggctctccaagagagcaagttgttgatcttgatgatgtagatgaagaagatgttccgacggcgctatacgaatcatggtga

SEQ ID NO: 106998 - DNA, 248 bp, Zea mays
  Clone ID: MRT4577_29080C.1
gcgcactctcgcctattttttcgtcgccacgaacaaagaagccatccatggatagcgaactctacaggcactgctgagtttagctgcaagcgggctcgtttcgagtgctcaagcgctggccccccgtctggaggatgcgattttttaccggatgtttcccggcggatagctagctcacgctgtttatgtttttcttggggggttttgccgccgcggcctgtgcccgaacaggaggatatacgcttatc

SEQ ID NO: 106999 - DNA, 377 bp, Zea mays
  Clone ID: MRT4577_29081C.1
acctctttcaaatctgggcccaagaacaaaaatggtctccgccaccactgaagccgaagtccgtgagtccctcggtacgaagttcggtcgtctcaaggaacaggcgaaagacatggcctccaggcaccccgtcgctggagccgcgggcgtcatcgctgtcagcgccgtgggcgcctacttcttgtggcccgtggcggccccggccgtggtcatgatgaaggagactggatccggcggagggaacggctcccgcgcgtcgtttctctggactaacgacgtgtacttctaaatctcgcgcaggacttcaggaccgagctcctgctgtagcccttcttttttttttaacccccccccccctgcgaggggtacttgtcggg

SEQ ID NO: 107000 - DNA, 446 bp, Zea mays
  unsure (1)..(446): unsure at all n locations
  Clone ID: MRT4577_29082C.1
gggggggggggggggcggacacaataagcttctgctggctctggcgggcatgccnacatgcagacgatatatacatatagatctattagagaggctagtaggtggccctcgaactatttttttttttttgcncancnnncannnntttttggtggggggggaggtnnnnncnncnnnncanccttactccttctcccgggggggggagccacacctcggggggcgcttcctaaccncgtccgagccgnccgtgtccttgcagctcggcgaccccggggccctctcctactccctctcctccaggcgctcctgcggggggggtcgttcgcggccattttttttttgttctgcctgttcgatggggtgctggacctcctgggtcgggtgatccctctgttcggtctgtttttcgtgggcgccaacaaaaaactcctcgtcctcgcggc

SEQ ID NO: 107001 - DNA, 193 bp, Zea mays
  Clone ID: MRT4577_29083C.1
atcaatcctaaaccaagactcgcgctacctgccatacgaagagactagcaaccgtctatactttgagtgctgtttagtacgatcagattggtgcatcttctatatgaccatccgctaccatccatcgcataattgatctacaccatatatgtacagggagtttacaggctcatgatagaacgaggaaatcgga

SEQ ID NO: 107002 - DNA, 752 bp, Zea mays
  Clone ID: MRT4577_29084C.1
cctgccgggaacttagcaatgaccgaagagtctagcgtttcttggggaacggggaacgtctcgcaggctgctgctgcggctgccgttttctacatctctggggagaattgctgggccattcagcgtgtgggtcccgtcctagatttcgttatatatatgagagagcagtggcagctcgtcaggtcgcagtaacatcagcagagcggcgagagccaaatcgcaactccagcctgttcggaagcattctctcctcaagatttcagccgttcctcctctttcggagcagagaaggttgcgtcgtccccggtccgagaccaccaggacgagtcttcaatttatgggattgtaccgcaacgaatgggctgaagctctgggcatagagatctccagcccgagggccaaggacggcaccatggtagtgaacaggaggaccggcttttccaacggcaagctgatgccgtcgctgagcttcaagctgtgggaggcagaggcggtagtcgcttccatggaccacgacggcagggccagcgagtgcctgcgggattccgttccggagttggtgttcatggcgtctccgacgaccaccccgagcccgcgggtgtcgtccagccccaaatgcgagctggacgccgcggcggtgaagctccagaaggtgtacaagagctaccgcacgcggcggaacctcgccgactgcgccgtggtcatcgaggagctgtgggggaaggcgctggacttcgcgtcccttagcacag

SEQ ID NO: 107003 - DNA, 319 bp, Zea mays
  Clone ID: MRT4577_29085C.1
gggacaaaaacggggggagaaaagggtaaaagccctaaaactaaagggttccctttaaaaaaaacttttgggcctggggctccaaacaaagcaaaggcccattgggaaacacaaattatgccccaatcttttaaatttttggatgaaaatatccttttaaacactgggggttacaccagtggggaaaaaatttttgtacaaatccgggataacaaacgggacatgcttctaaagggcaaaactcccatccttatggaaaattggcaaacccaaacctgtttttggcgaaggaaaaaaaagggggggggggccccaaaaa

SEQ ID NO: 107004 - DNA, 339 bp, Zea mays
  Clone ID: MRT4577_29086C.1
aaaaaaaaaagggtttaaaaaaaaggggggaccccaccctggggggaaaagaaatttttggaaaacacttcccccgggggccataaggcaaacggaaaaatggggggggggaaaaaaaccggttggaccaaacccccaaggggggggtatggggaaaaaaaaacccccctggggccccaaaacggttcccaaaaaaaaaggcggttgggaaaaaacaaccaagaccgtgttggtcccccgccaaaatctcaagtgggcaatcaaaaaaaaacatggaattttttgaaaccctggaacccaaaagaaagggcccaggggtcctggaacaaggggaggccc

SEQ ID NO: 107005 - DNA, 399 bp, Zea mays
  Clone ID: MRT4577_29087C.1
ggaatggaagggtggtgccgtggtggctggtgtcgcgcgcgctggatgggggctgcccgtgctgggtttgtgcggggagtcgatatggtgccatttgtaaaatccgccattccttgtttttcttcttcttcttcttctttcttattgggtttgtaccgttgtgtttcacaaaagaaaggaacgtttcgcagattaaaaaaaaaaaaaaaaaaaaaaaaaaaaaaaaaaaaaaaaaaaaaaaaaaaaaaaagaaaaaaggaacacactctaaaaaaaattaaataaacactataataagttataaaaaaatattagggggggggccctttttagggaacaaagttatctaacgcgtgcttgcaacgttaaattttttttttggggcaccccaaaataaat

SEQ ID NO: 107006 - DNA, 262 bp, Zea mays
  Clone ID: MRT4577_29088C.1
tctgcacaaactcatacgacaaccattaccacgaaatgctcgcaaactcctatagcttccctacttacaccgtacctctcaccatcgatgccttccatattataaaacccaattattcaaccctacaagatccaactggcaatctcagctatcatcttacctatatcaccctcgctcctgcaacaatcatcaaccatactacatcagctacctttggtacatatattaacacacaacattaaggcacaaccactaccacaac

SEQ ID NO: 107007 - DNA, 282 bp, Zea mays
  Clone ID: MRT4577_29089C.1
gactcagcgagctagagcagcacacacgcagcttgctattagcagcagcagagcagcggcgatggcggcctccatgatctcctcgtcagctcttgcggttgctcctctgggcctgacgcccctcggccgtcgcgcctcctccttcacagtcgtcttcgccaagaagatgatctataccgacaagccctacgtgattgtggggtggcctgatcgtcgacgtcgacgccaacgggtattaggggtcaaggcaatggcgtgtaccatttcgtcgtcaagtacggc

SEQ ID NO: 107008 - DNA, 149 bp, Zea mays
  Clone ID: MRT4577_2908C.1
tacagattgacagcgtcatctatgtcaagatcatggacccctacctatgcttcctgatggtcgtggagaatccaatctgaggcggtcctacaacgtgcataaagaaccatgagaagtgaactcgggaagataacctgagattagacgtt

SEQ ID NO: 107009 - DNA, 325 bp, Zea mays
  Clone ID: MRT4577_29090C.1
gggaggaaagaaaaaacatttacaagctttacttggcagcattctgaattactggtctaaaaaaaaagtttcccgaaacggacggggcttagcttacagggacctaaatccagaacaaatttttgcaatgggttggccaacagacaggtatattatgggggggttacatggtcatgccgggtttacatgggatcaggttgggcaccaacgggcatgtcatcaacatagtttgcttgatgctggttcccagcgtacaagttgcttggcccacgattgaccccatcgctttgaccatttggtgcctgaggaggccttggtgtggggg

SEQ ID NO: 107010 - DNA, 2343 bp, Zea mays
  Clone ID: MRT4577_29091C.1
agaccaacctccattggcgtggaaggtgaggaacgcgcttccgtgcgtgcaggagggtccccctatttgttgggggacgggaaggttggcagttcggtgtaccgcgcgctcgcgcccgaaatttcacaacaccaaacccgcaggggggagaagcgcaaagccacgaggagtgcgaggcgagggccgacaccggggacaagcgcggcgcggcggcggaggcagcaatggcggcgctgcagagttggcgcaaggcgtacggcgctcttaaggacaccaccaccgtcagcctcgccaatctcaactccgacttcaaggatctggatgtcgcgatcgtgagggccaccaaccacgtggagagcccgcccaaggagcgccacctgcgcaagattgtggcggcgacgtccatcgcgaggccacgggcggacgtcacttactgcatccatgcgcttgcccgacgactcgccaaaaccaggaactggatcgttgctctaaagacacttgtagtgatccataggcttcttcgcgaaggtgaccctgcattccgcgaagagtttctaacatttacacagagagtgcggattttgcagctgtcaaacttcaaggatgattccagcccagttgcttgggattattcttcatgggttcgcacatacggtttatttttggaagaaaaattagaatgcttcagggttttgaagtatgacattgaagctgcacgtttatcaaagcaaggtcaaggacctgaaaagggccacagtagaactacggaattgaattctcaggacttgctggagcaattgccagcactgcagcaattgttatatcgacttattggctgtcgagcagaaggagttgcaaaaaacaattatctggtgcaatatgctctagcccaggttcttaaagaaagcttcaaaatttattgtgcaataaatgatggaattatcaaccttattgacaagttctttgagatgccaaagcatgaagcactaaaagcccttgacgtttacaagagggctgtccaccaggctgggaacctatctgacttctatgaaagctgtcagggtttagagcttgcaagaaatttccagtttcccactttgagggagccaccacaaacattcctttcaaccatggaggagtacgtgaaggaggctccgcgtatgatgccagttgtagagccactggagcttcctgagcggcttcttctgacatacaaaccagaagaagaagttcgtgataccgttccaattgtagcggagaaactgcaagttgttgaagaaattgctccagttccttcttcccaaatagctttgcctcccaagcctgagattgcagatactggtgatttactggggttaggtgattcaacccctactgtgttggcgatagaggagagcagtgctttggccttggcaattcttccgacaggtattgataactcaacaacaactacacagcaagatagtggatttgatccaacaggatgggaacttgctcttgttactacaagcagcaatgcgattccactgtctatggagagtaatttgggtggtggatttgacaagctcacattggacagcctatacgatgatggaacctacaggcagatgcagcaacaacagctatacggatcagcccctcccaatccattcatggcaagcgatcccttagccgtatcaaatcaagtggctcccccaccgtcagttcaaatggcggccatggctacacagccccagcatttgcccatgatgattgaaccaaatcccttcggaccaccacagcagcatcacgcgggcgtcgctcctgcagcaaaccccttcctcgacgccgggttcggtgcgttcccggcagtaaatggaatgcatccacagaccaaccccttcggaggcgccgcacaacttctctagtcatatatactttccaaagtttgcattacaattacatagaagatgtgcaatctgtagatacccacgccacgatgcaagacaagcaatcgacgtctctggaatcgcttttctccgtcagaccgttaccaatcagggaatcgccatgttgcaccagcctcatctcgcccttccgtaggctttggccgcttggccttgtgtagctttctgttttgctgtgcctggttttccatcttccgtggcgagccattgcactcattgtaaagaaatttgtttcatcaggctttgggctgataaaaccatgagtacgtgccaataaggcaataatccatcagcgtttgcatttgtgtaacgcctgatgaccgtgcgaatatttccgcaattggtcccaaaccacttttggctaaaataaaaaacaggtaaagttgctgtcctggcc

SEQ ID NO: 107011 - DNA, 1217 bp, Zea mays
  unsure (1)..(1217): unsure at all n locations
  Clone ID: MRT4577_29092C.1
cctcgaggccggccgggttattgacaagttcntttgagatgccaaagcatgaagcactaaaagcccttgacgtttacaagagggctgtccaccaggtaactgccttacacggtagtaatatgcaatgtattttaacttgaagaagatcaagacataacaattatgtgtgcttagacgcttagctgaatttttacccatcaaacatctttgatgcttcaggctgggaacctatctgacttctatgaaagttgtcagggtttagagcttgcaagaaatttccagtttcccactttgagggagccaccacaaacattcctttcaaccatggaggagtatgtgaaggaggctccgcgtatgatgccagttgtagagccactggttatttcctgggctctagtaaaccatttggatttttgcatgacaccttcacattttataacaagtagcagcctcaatgtgtgatacttcatgtgccttgcatgttaaagtagagcatatcataaccatggcgaaactagagcaaattagagggtgatggttagtgggggtgtccttaccttgcacatacatgttccacaggggttgtatgtatggtgaaaaattagacaacatcattgctttaacatttatagggggtacatttgagttgagccccctaatctcaatgtagcttgcactgatcacaacttcaatcttcttttatatctaacgacagcaagctacctgatgtagggaaacagttaacatcaataattgtggcctagtgaacaatttctcttttactttgacatttttgtgataattgtgtcatcagtgtgaatgtcacacactctttttgggagataaatgattaccgtcaagtcaagtttataccagccgatttacttattgtggaatggattcttaaatacggactatccttcttatttcaccaggagcttcctgagcggcttcttctgacatacaaaccagaagaagaagttcgtgataccgttccaattgtagcggagaaactgcaagttgttgaagaaattgctccagttccttcttcccaaatagctttgcctcccaagcctgagattgcagatactggtgatttactggggttaggtgattcaacccctactgtgttggcgatagaggagagcagtgctttggccttggcaattcttccgacaggtattgataactcaacaacaactacacagcaagatagt

SEQ ID NO: 107012 - DNA, 372 bp, Zea mays
  unsure (1)..(372): unsure at all n locations
  Clone ID: MRT4577_29093C.1
ccggggcnctcatggacgatgcgttctttttttttacccagtcaagcncatttttgcggctgcggtggcgggtctgtgctaatcatttgtgacggcaaacttttaacggggtttttgtgcgatgggcctttttttcatgatcgactcctcttaacagagatttgtaacggggccttcttcctgcggttttagcgggggttgggggtgattttgacgcctttgctggcgagcgccgacgacgggggcgccttgttggcgctgaaagggcggttcgtggggatgggggtctggagggtgtaacacgtgacggggcctcaggtgttggggatgggggtgcgcgcctgtcggtcgtggctgccggtaacgtcggaa

SEQ ID NO: 107013 - DNA, 220 bp, Zea mays
  Clone ID: MRT4577_29094C.1
ttctagaatagtatacctatctagactgataagctttctttgagctatctcaggcgtggaactggctatcatctctaaggagcggtggataggatggaagcgctcatgcacaacaacgtccattggccaacatggagatgattaatcttccacatggcttgtatgagagtaccgctcagcgtcatgagactgccacctttatgatatacaggatgctttg

SEQ ID NO: 107014 - DNA, 323 bp, Zea mays
  Clone ID: MRT4577_29095C.1
ggttacacagcttagaattagcagttagaatttgaatccacacctaagctctttcaactatgccatgactagctcatatttgccagatatgtgtctaattgattggtgaatctaatttattttctaattaaacagtcaaatgttgtcttagtccattttatgttgctataacagaataccacagactggttaatttatacagagaagtcatttattagttttggaggctgggaagtccaatgtcaagagagctgcatctagtataagatggcttacaagcattcacagatagcctctgatgcaagcactctactgcatcatct

SEQ ID NO: 107015 - DNA, 315 bp, Zea mays
  Clone ID: MRT4577_29096C.1
gccagtttgtttgataagtcatgacaatgggctgattcatattggcctgattggcatgttctgacaaactcataatggatcatgcattttttttgctccaaaccttacatccgtggccactgaagtaacccaatgtttcaggctacaatcgtcaactacatgctgtcagcggatataaactgattttgggtcattgacagagcgataaagcaactttgtaactagatttcaatctccatggtgactttttggatggagctatattgcagtgattgattatttggctgaatgaaatggattgcacattatatatca

SEQ ID NO: 107016 - DNA, 353 bp, Zea mays
  Clone ID: MRT4577_29097C.1
attttgcgagacttgcttggtgggcatatcatgcttcctgttcggtctgttatcgaccgctttccgtacaagccaggctcgtgcgtccatgtgtttattcccaggtgttatcggtgcagcaccggcatagtgccttctccacccgtgtttttaggattctacatacatgctgctccatctcagtttctactgagctatggggctgatgatacatagatagagatatctaggtctttgaaccagctcttgctactctgagatgcacattgtgttggaggaggctatgacctaggctctggtgtggagaataccccatgctactatttactgggtcaggatcgtgctccctctga

SEQ ID NO: 107017 - DNA, 135 bp, Zea mays
  Clone ID: MRT4577_29098C.1
ctgcgcctcaagtccatggtcttcgacttagacgtcagcctgggatgacggacctgctcttggatggcgaccggatatacctcacacactcactattgagccgatgggaccagccttttttcggtgatgatcttg

SEQ ID NO: 107018 - DNA, 432 bp, Zea mays
  Clone ID: MRT4577_29099C.1
cgatcaagacacatacagagtttcgtcgacaacacgactactcacatggggaaacctgcgaagatcggatagtcgggtggagaccccggcgatcggcaggatctgagggctactccggacaggatgatcgacgtgaacgtcactgcggacaaccagcaggctgcaaccgctccatctccttcatcaacatcggagccgacgccaaagcctacgaagaagggccaaagggtttcagccaagctgcaacacggtacaacatagatctgtgcaagttccactatagcttgacggagatctccgggaccacgggccaaacccacaatattgacgatctagtcaagtctcagaaatgcgtcaccacaaaagcggctacggaacgtatagcaaggaccaaggcagcccgttccgtgtcaaagaaatgaacaacgggca

SEQ ID NO: 107019 - DNA, 774 bp, Zea mays
  Clone ID: MRT4577_2909C.1
atggccgatatggccaaaagtgggccagcagtaatggcggcggcaggcgggcggaagcaacggtcaagtcgtctgcaggcacacgtcccctcctgggacagcgagagagccctctcccacgacgtgaagacgacgcgcccgtgttccattcctcgaacggctcgcgcacgcacaacggctgcctcgcgaaccactcgtcccgtcgcattaactctgcggcaggacaagcggcacctttggcaggcgaagcaggcgacgcttcccctccgccataatgaccgcgtcaaaaaaggaaaacagcgccgtctgcgctgctccgactgctgtgccactcgtcagggtgaggctgacagtcgtcaagactggcctcaggcgccaaaggaagctccgcctcgcccaaccccagggctcggactccacctcggaagacggactccgcctcggccgaccccagggctcggactcaacctcgactccggaaggcggtctccgcctcgcccgaccccagggcttggactccacctcgacctcggaagacggactccgcctcgcccgaccctagggctcgaactcaacctcgactccggaaggcggtctccgcctcgcccgaccccagggctcggactcaacctcgaccccggacgacggtctccgcctcgcccgacccccgggcccggactcagcctcgacctcggaggagcctctgcctcgcccgacctcgggctcataccgaccacgtcacaggggggccatcattaccctacccctagctag

SEQ ID NO: 107020 - DNA, 682 bp, Zea mays
  Clone ID: MRT4577_290C.1
gcagagataggcgtcgtcgtactcgcctacctccgcggctcaagcctttccggggggtcccaattccctccgtggggcgccgctccatcccgtgcgacgacaccatgagggagtgcatttcgatccacatcgggcaggccgggatccagggcggaaacgcgtgctgggagctgtactgccttgagcatgggattcaggcggaggggcagatgcccggggacaagaccattgggggaggtgatgatgctttcaacaccttcttcactgagactggggctgggaagcacgtgccccgtgctgtgtttgttgaccttggacccactgtgatcggtgaggtgaggactgggacctaccgcgaggtcttccaccctgagcagctcatcagtgggaaggaggaggccgccaacaactttgcccgtgggcactactccattggcaaggagattgtggagctatgccttgagcgcgtcaggaagcttgcggacaactgcactgggctccagggcttcctcgtgttcaacgcgtgttggtggaggaacgggctctggccttgggtccctcctcctagagcgggtgtctgtggactacggcaagaagtccaagcgttggttcactgtgtacccttccccccaagggtctaccttcggggggtgagccctacaacagtgggctgtgcacccac

SEQ ID NO: 107021 - DNA, 754 bp, Zea mays
  Clone ID: MRT4577_29100C.1
cgggacctccccaaatcgaaatcccccacccatactgatccagtgagctccacgctcctcccccagctcgccccggcatcccgtcgccgggtggatctaccgggacgcgggcgcgcgtgcgcggcttgaggagcaaaggtgcctgatgaggtagttgggggcagtcaaggaagcaaaggttcttgctttccaccgggtgaacttactacctcgttacattcaccagatcgatgctatccagtgaccacccttcaggcccctcgtgctcctcccagtctgtggttcggggtgtgggtgctgatccagcgacgttccacgccgccgactctccggagttggcacaccaagatcctgcggatcttgtccaaccgtgtcccaccttctccataagagattatgtttttgattcgaggagcaaaggcatcaagagaagttggcctttccacccgcagtcgctggaactttgcttgaagcgtggagttaaagatctactgcctccattcgagcctcccgatttgctccggtcaaggtctttctatacttgcgtagactctgagcagtctgctgcatgcctagaagccgatgcttttgttgatttggtaaaggctagagaagctggtttgacaaatgtgaatacaactggtatcaacctccagtcatgtcaatcagcagatgagtcactttggtcatctcaatacactcctacagagggtgggaagactgctactgaccaaggtgggaatattaatgaatt

SEQ ID NO: 107022 - DNA, 328 bp, Zea mays
  Clone ID: MRT4577_29101C.1
acgcgtcgctaaacctgagccaccgcctccggagtcgcgtccggtgggacttagcgtggggagcccctcagggctagcggcgagaagtcggaaaccgataccctcctccttacggggagggagaaactagcggagagcgaatcagtcaaggggccgagaggacatgatcaaggagcgtgtggaagacacgggacaatctaagcggcggagaagtacggaagaaccatggcgcgcattgtgtgtcgccgaagtcgcaagcaggcaggccgtggtacagggtcgaccgtcataagaaaccgatggacaaggagaggatgaaaatacttat

SEQ ID NO: 107023 - DNA, 249 bp, Zea mays
  Clone ID: MRT4577_29102C.1
attgacggcggaaaactctggggcgattagttggtaggggggactgttacaagaatacgggcacccccaacatggcagtttatgaattgatacctcttaccaatttttacttgtaacctaaccttctgctttggcgcaaataataacggactgtggtttttatctatgggcgaaaccttgctggggggccccttgttgggcttggcattttcgtccggaagatcctcatgagggtgccccttacttttt

SEQ ID NO: 107024 - DNA, 824 bp, Zea mays
  Clone ID: MRT4577_29103C.1
aaaaaatctagaatctctctttaagagggtacagagtaggaaagagacagagggggcaaagagcgatggacgccgcggtgcggaaggccgcgggcgccggcatcgcgcgcgcgccggcgctggtgctagcgctggtggcggcgggggcgttcctgatctcctacaacttcttcaccatgctgttccacggcggcggcggaataggcgcggcggtgaccgctgggacgagggaccctgtggtggccatgccagcgtggatgcgcgcggcggcggacaccgaggcgcgacggcgggttcacgcgcgtgctgcactcggggaagcccgacgggctcatggacgagatccccaccttcgtcgtcgacccgctgcccgctggcaaggaccacggatatgtggtcctaaataggccgtgggcatttgtgcagtggcttcagaaagcaaagattgaagaagagtatatactaatggcagaaccagaccatatatttgtgaaacctctaccaaatttggcccatgacgatgacccagcagcatttcccttcttttacattacaccatcagaacatgaaaaaattatcaggaaatactatgctaaagaaagaggtcctgtcacagatatcgatccgattgggaattctcctgtgatcattaagaagacaattcttgagaagattgcccccacatggatgaatgtgtcaattcaaatgaaagaggatgaagagacagataaagtttttggatgggtggtggaaatgtatgcatacgctgttgctagcgcattgcatggagttcatcatatccttcgtaaagatttcatgatcca

SEQ ID NO: 107025 - DNA, 449 bp, Zea mays
  Clone ID: MRT4577_29104C.1
aaaaaaaaaactttggaattaaacccccactcggtggagggggggggggcttgttttttcgaaaaaaaaacaggggaacggcaaacaaccggggtcaggaggggtttggggggcacgggcccccccaggttcccgagcacaaggggggccatggccttgcccgttttgggggggcccctgcccacggggggaaaaaacacaactttgtccatccccaaaagcccctcgggcacgttagggttttcctaaaaaacgtccaacccggggcccccaaaccccccgtccccaaaggcccccaccatttggggcttgtccacggggggcccacggcccacttttataaaaaccccgggggggcctaaggcttccataacctgggggttaaaaatggggggcgtttggcctttaagggggccccccacccccagaaatttttttttcccccccag

SEQ ID NO: 107026 - DNA, 1478 bp, Zea mays
  Clone ID: MRT4577_29105C.1
tttaacttttactttcatttcttttcttttcctaaaatgtacaatgagaaaattatgtatcttcttctatcaggtatggtgtgcaagtgcaagcagctattttggatgtaaaccaaacaaccgactgcacctgatactttgatattccccatatacaagggcagatcaaaggaacctaagatataattgacatcatccaaagtttatattccatcatcccaccgaggaaggtttgcactagcttcattgaccattttcactagagtaaccacactttctggtactccaggagggggcaatgtaagatttcttggtggtggcctatctgggaatgatcttttgtcaaatcgccattcaccaactttaccataagtcagttcaccctttagtgagtagtcacatccataagtgaagtggattataaatgtattctggagctttgtatcaaaaggtggctggatcatgaatctttacgaaggatatgatgaactccatgcaatgcgctagcaacagcgtatgcatacatttccaacacccatccaaaaactttatctgtctctttatcctctttcatttgaattgacacattcatccatgtgggggcaatcttctctagccttgtcttcttaagatcacaggagaattcccaatcggatcaatatctggacaggacctctttctttagcatagtatttcctgataattttttcatgttctgatggtgtaatgtaaaagaagggaaatgctgctgggtcatcgtcatgggccaaatttggtagaggtttcacaaatatatggtctggttctgccattagtatatactcttcttcaatctttgctttctgaagccactgcacaaatgcccacggcctatttaggaccacatatccgtggtccttgccagcgggcagcgggtcgacgacgaaggtggggatctcgtccatgagcccgtcgggcttccccgagtgcagcacgcgcgtgaacccgcccatggcctctccgcccggccgcgcctgcatccgcttgtaccagaagtacatgacccggcactgccaccggctgtagggcgcgtccgtggccgtgagcgccacatggaacggccgccgtcgcgcctcggtgtccgccgccgcgcgcatccacgctggcatggccaccacagggtccctcgtcccagcggtcaccgccgcgcctattccgccgccgccgtggaacagcatggtgaagaagttgtaggagatcaggaacgcccccgccgccaccagcgctagcaccagcgccggcgcgcgcgcgatgccggcgcccgcggccttccgcaccgcggcgtccatcgctctttgccctctctctgtctctttcctactctgtatccctcttaaagagagattctagaattcttggcgtgcgagttcgggttgggacttgggactggagggaagcggctagccggctactcccggacatggccgaggtacccaatg

SEQ ID NO: 107027 - DNA, 2339 bp, Zea mays
  Clone ID: MRT4577_29106C.1
ctggtccggccaaagtggaggcagttgtatcctggcctacaccaactaactctaaggagttgcgaggttttcttgggttgacaggttattaccgcaaattcgttcaaaacttcggtgtcattgccaagccccttactgctctcctgaagaagcatgttgtgtttttttatgaacatcggatcatgctactgcttttgccttgttgaaatcagcctttgtcttcagcacccgtgttgggcctcctagattttaccaaacaatttgccattgaaacaaatgcttctagagcaggtgtgggggcagtcctgctacaaaacaaccatcctctcgcttacgtaagcaagcctttgggtgtcaagaatatgggtctttctgcttatgaaaaggagaacctcgccatcttgcttgcagtgaatcactggagatcatacttgcagcatggaacattcctcatcttcacgaatcagtgaagcttaactcatctcaatgaacagcgtctgaagactccttggcagtagtgtgtcttcactaaattgttgggactccaataccaggtggtatacaagcagggatcggccaacagggctgtggatgccctctctcggtgtcctcattcgcctctttcactcaatgcaatatcagtgggcactcttcaatggctatcgaatgtggtggtaggatatcatcaagattctcacgccttaaactgttggcagatctgtctaattcctctacaacagatggtccttacaagttgtaggaaggcattattcggtacaaaggccgcatttggattgtccacaatcccacactacaacaacagataatcttctcattgcacgacagttcggttggccactctggttttccagtaacgtacagtcgcctgaaacatctgtttgcctagccagcaatgaagtatgttgtccgacaatatgtctactcctgtgacatctgctcgcgtgccaaatcggatagatctcagtaccctaggttgttacagctgttgcaagttccttcacatgcttggcaggtgttgtctttggatttcatcgaaggcctccccaaatctggcaagtttgactgcattgtcatcgtggtggataaattttcgaaatttgcccatttcattgtcctcgctcatccttttactgcctacaagatagctcaggtgttcttggacagtatctaccgcttacatggtatgcactcggctattatctcggatcgcgatcggatattcacaagtgccttttggcaaggcttgttcaagctttcaggaactgagttacgcatgagcacatcttaccattcgcaaacagatggccagatggccagacagaggggagtaaatcaatgccttgaaaccttcttgcgttgttttgtcagttctcaaccgagccaatggagcaagtggctgcctcttgcagagtattggtacaactcctcattcaattcctccttgggtaaatctccgtttgaggtgttgtatggctatcatccacaccacctgggtatatctacagtagatgcaattcccttgtcagacttgcaatcatggttatagcagagggagcttatgacccatgatgtccgtcatcatctgctatgtgcacagcaacgtatgaagcctcaagcggacaaacgcctatcggaacgtgtctttgctgtcggcgacatggtgtatcttaagcttcagccttatatccagaattcagtggctactcgcgccaaccataagctctcctacatatattttggtccttacaaggtactccaacgtgtcggcagtgtggcatacaggctgcagttaccatcatctccgtcaatccatcccgtattccatgtgtcccagctgaagcccagtgtcaaatcttctattctggtcagcacttctttaccttatacatgtgctcgaccgacgatccttttcttggggcggccacaacgtcgaccaataagttcgagtgcgctggtctggttatgatgctgcccttgatacttgggaggacgaggctgctctgcgccagcgttttccttcggcagccgcttggggacaaacgccttcttatggagggggattgtcagcatcgctaggtaccgtgcgtcgagaagcaggcgtcgtcgtcggacatggctgggttggagttgggtcgtcgcatcaggaatcccaatgccaagtttctaggagaggactaggtggcataataggccgtccaaccttgtaatagttgatacttaaatactatgaacaggcaggcaccgtaacgatttcaggctgagaaatatatcgaacaactaccttcaaattcccaaaaaaaaaaaaaaaaacccatatt

SEQ ID NO: 107028 - DNA, 320 bp, Zea mays
  unsure (1)..(320): unsure at all n locations
  Clone ID: MRT4577_29107C.1
gcaagccgccacgacaagagaaaagcagcgcagcacagcgcaggccgaggggccagangaggacagccgacaagagcacaggcacacaccccaacaggcgagggagacaggcaaacaagcaagacaacangggaaagcaaaaagggggggaaacaagcacgcggcaccggcgacaaaacacancaacaaaaaacggaacccgcacacagggcacgaccggccanggaccccacngcccggcaaggaagccgagccaaagggagccaacgggaccaaaaagagaagcaaaccnggcggcaagaaaaaacaacaagcccgga

SEQ ID NO: 107029 - DNA, 272 bp, Zea mays
  Clone ID: MRT4577_29108C.1
acacgcgtgcggtatctttttttttaaaacgcaatcacctgtaacataaaaacgcttaactccatgggacaaagagacggaaaatacaattcctatataagcacgcttaggattgggcttaagccgctatgagctgcgaagtcacgaaaacttcggcaagcgcaaacgaagctccagcgagagataattggatacacaggtgccctgaagaacaacactgatgatacagtgaccacaacacgtttaacacagctgcccacacaatgagtgac

SEQ ID NO: 107030 - DNA, 297 bp, Zea mays
  Clone ID: MRT4577_29109C.1
aacaatacatttcagtccacttagaaccaagtgaattttgaataaccgaactagaccttatctgatcgcgctaacaagaccttatctgataacagtggactggatgacacagaggcgcgacggatacgggaacttcatatgtaagtaaagaaccagcgcagataaagtttgacataaaagatattctacaggcattgcatcgctgctacctataaatactgggataaatgatggacagttagggcacattaatgttgacatcttgataacacaacggggcagacgggctttcttttt

SEQ ID NO: 107031 - DNA, 1075 bp, Zea mays
  Clone ID: MRT4577_2910C.1
atgcaggcgacatgcaaccgcaccaagggggcgcaccctttcaattccgacgcgtccagcatgggggcccaggcccacacgtcatgtaaccgacgcgccggttactacatgcgggaaactgcaccgccacttgcgccagtaccgcgccttctcgactacagaatcggtgtcacgactcgaggcaaccctgcgcatggcccaatagtgccaaccgagcacatcgatcacgggtcagtcagccgcgggagaaggcgcgatggccgatatggccaaaagtgggccagcagtaatggcggcggcaggcgggcggaagcaacggtcaagtcgtctgcaggcacacgtcccctcctgggacagcgagagagccctctcccacgacgtgaagacgacgcgcccgtgttccattcctcgaacggctcgcgcacgcacaacggctgcctcgcgaaccactcgtcccgtcgcattaactctgcggcaggacaagcggcacctttggcaggcgaagcaggcgacgcttcccctccgccataatgaccgcgtcaaaaaagggaccgggaaaggggatactctgaaagggatccttctccacgaaggaagcgggccccgagccctcctactgatcagaggttcgaaggctggcccctcggaagggttcaacagtcgcctcaaagcactcgggctccgcgcccactactggtcagaggttcgaaggctggcccctcggaagggttcgacagccgcctcaggcccctcgggctccgcgcccactactggtcaaaggttcgaaggctggcccctcggaagggaaaacagcgccgtctgcgctgctccgactgctgtgccactcgtcagggtgaggctgacagtcgtcaagactggcctcaggcgccaaaggaagctccgcctcacccaaccccagggctcggactccacctcggaagacggactccgcctcggccgaccccagggctcggactcaacctcgactccggaaggcggtctccgcctcgcccgaccccagggcttggactccacctcgacctcggaagacggactccgcctcgcccgaccctag

SEQ ID NO: 107032 - DNA, 309 bp, Zea mays
  Clone ID: MRT4577_29110C.1
attaaaagctctggttagggggacactgaacatggtgagggcactggccactgatacctacgagcatttacagagatagcaggcatcaaaggctgcacgacacggcagtggcctagacttcaacatggccaagaagtgggtaccgagactggtttatagcagacccatttatatgccgacacatattccaatgaaatgacagcagtgatcaaaaataaactaactgggccccctacgctgactggaaaagtgaacaggccggaaagcggaaacacgcctgagaatccatctgccaggaagatgggaaac

SEQ ID NO: 107033 - DNA, 148 bp, Zea mays
  Clone ID: MRT4577_29111C.1
agcaaatccacagtacataaataggatcatcaaacataacaacatgaatatcctcatgcggctctttatttacctggctctggcagctaccaacacctttacaatgcaaatcccctacccctccacaactctccatctctcgtactac

SEQ ID NO: 107034 - DNA, 1044 bp, Zea mays
  Clone ID: MRT4577_29112C.1
ccggccggggaaggctgcccttgttgtgaaccgcatgctgcagaagaaggagacacccttgctcacagaaggtttcagtcggatcatgtgctgtaatgatgatggcgacattaaaaaagcagttgacttgtataatggtttagggccttcagatagtcttccatcaggagtttttggtcagaagagcaaaagacccgtacaagttggtataatgaagtttctaaagaaaactgatgcttctgttgttgagacatctagcggacctaagcaggcattgacagaaataaagccagcgcagcaaaatcctttgccaaaacaggaaaatgttgaagctggttttgcctgttccatggaagttgagaagggattaaatgacaagatggaaaatgaagagcatgctaaaggaagtgattattgtgatgttggttcccgtactctggcatttccatctatttctactgctgacttccaatttgatcttgacagagcatctgatattatagtggacacagctgctaatttcttgcagaagtttgataatataagactagttcttgtagacctgagtgagaaatcaagaattttgtcattggtcaaacagaaggctgctaagaagagcatcgactccaacagatttttcacatacgtgggagatatcactcagttgcacacaaaaggaggtcttcagtgcagcgtgattggtaatgctgccaattggaggctaaaacctggaggtggaggggttaatacagcaatatatagtgctgctggagaatctttacaacatgctactaaaaaatgtgctgatgcactgaggccaggaacctctgtagttgttccacttccatcaacttctcctctgcatcaacgggaaggtgtgacgcatgtcatacatgtgctcgggccaaatatgaatccaatgcgaccagactgtcttaagaatgactataccagagggtctaagattcttcgggaagcatacacttcactttttgagaattttgcatctattgtgcggagctacatgggagagcagaacaatga

SEQ ID NO: 107035 - DNA, 741 bp, Zea mays
  Clone ID: MRT4577_29113C.1
tgctgattctgtgaagctgtcaattttgaatcatccaaagcttaagttaaaatctgagcatgtccgagtcattgatagagccaagttgcgaatatatccagctggaactgacaagctcaaacttcagcttgaactgcataacctcaaatccatccttccaaaagtgattgtgaagggcattccaactgttgaaagggttgttattgatgaagttaaagtcaacaacgcgacagaaagataccaattgttggttgaaggaacaaacctcctggcagtcatgggtaccccaggagttgatgctaggaagacgaaaagtaatcacatcatggaaacgaaccaaacacttggaattgaagctgctaggagatctattattgatgagattcaatacacaatgaaaagtcatggcatgaacattgatcggagacatatgatgctcttggcagatttaatgacatacaagggtgaaattctcggcattactagatacggcattgcaaagatgaaaagcagggtgctgatgcttgcttcatttgagaaaaccgcacaacatgtattcaatgcctgatacagtggtcgtcaggatcagatacagggagttagtgaatgcattatgatggacattgccatgcagatcggttcccgtattcttaaagtcaggcaaggctctacatgtgcctgattcaagaccaaccgaccagaacatgcgagatcatacatgtggacgaagctgacttgaca

SEQ ID NO: 107036 - DNA, 317 bp, Zea mays
  Clone ID: MRT4577_29114C.1
ggccgaccacgcgtgcggacgttttcttccatccaaaccttttcccctcttacggagaccaaccttataaggagcttgttcgactaccaccacgcaccagatctctatgtatatgtcaatagggccccaaaatggtgctgcttatgtctccaatttatctcctcaaactcacgagaatatgctggattgtatattatcacaccataaagttgctaaagaaggacatataccatgggctctcaaaattttgcatccataccaacataaatcacaatgaaccaaacggtcatgcttcaattactttttatgatcaaaat

SEQ ID NO: 107037 - DNA, 719 bp, Zea mays
  Clone ID: MRT4577_29115C.1
ccggccgggtttcttccttaggaacatccttgagattgacaaagagaggatggttgccaaggtcgagccccttgtaacatgggtcagataaccagagctacctgcccaatgaaccttgcccttgcggtcgtcgccgagctcgacgacctcactgttggtgggctgatcaacggttacggcatcgaggggagctctcacctctatggccttttctctgacacggttgtcgcgatggagggaacactggggttccttgtctctgcagagatcaagctgatccccatcaaggagtacatgaagctcacctacactccagtcaaggggggtctaaaggagatcgcgcaggcctacgcggattctttagctccgagggacggtgacccggcaaaggtccctgactttgttgaagggatggtgtacacagagagcgagggtgtcatgatgacgggcgtgcacgcttggaaagaagaggcgaagaagaagggcaacaagatcaactgcgaggggtggtggattaagccctgtctctaccagcacgctcaaacggcactgaagaggggcgagcctgaggatgacatccgcgcgggggagtactaccaccggcacacccggtgcctgtactgggaggggaagctgatcctgcccttcggcgaccagctctggttcatgttcctgctgggctggctgatgccaccgtaggtgtccctgctgaaagcgac

SEQ ID NO: 107038 - DNA, 227 bp, Zea mays
  Clone ID: MRT4577_29117C.1
aacaaaaagacgctcgtgcaaaatttaaagccgtcacacgacggcaatcaccgagagaacttttcagatgaacatcaaccacagaagtgactagagatagtttaacactgacgcgtctgacaaaaccctgtgtttacccagctataatgtctatacgaaaagacgccttcctggagactgtagagcgccatggagtgccccactgaattgcatttgcagcaggagca

SEQ ID NO: 107039 - DNA, 207 bp, Zea mays
  Clone ID: MRT4577_29118C.1
gcgccggccgcttcgcttgaaagtttttagtgaatattttttgaatcttttttgattttgctgaagacggaactcgggcgcgttatgttcataaaatctatgcgtgcaaaggcatcccatttattcatgctgattctcacgttttctctttttgccaactctaaatgcaagcgctattttcacaaccgcctgaagcctgcaaagctt

SEQ ID NO: 107040 - DNA, 160 bp, Zea mays
  Clone ID: MRT4577_29119C.1
aactaaactacctttttccggtttattactttactacgcttactcagactataagcttggggcctgtggctattcttggggggcgtttggatccatgttggggcatttgcacccgaatggcatcaaccattggctgaggactgacggttcactctgctgg

SEQ ID NO: 107041 - DNA, 565 bp, Zea mays
  Clone ID: MRT4577_2911C.1
ctttatttgaattcaaatgaacatacatatccctggccccgccatccatctctcccagaatatttcataacacttcatacagtcatcatccaatcaacacccctcttcgtcatcattttaattatcacaaatcggatgcggttttatatggaaaatgttattgggaaaactctaaaatctagggcttttgctttttataaatttaataaatgattaattgaataaacatggaattccattccctcagaaaacgaaagggggtcaaattattttcgcctacagccccttaggccttctgcagatattgatcatacaggtagttgtccatgttaatgtccttggagcccacatacaagttcttcagatcgttggcgtagcccgcatattggcggaccgtgttggccaggctctccaagtgctcctcctcgatgaagtgggcgacctcgggatcgtagttctcgttcttgtgagcgtgcgaggcgaaattggggatctcgcgtgcgcgctcgaagagacgcttctctgggtccaggacgggggccatggcctgcagttcactcacctc

SEQ ID NO: 107042 - DNA, 360 bp, Zea mays
  Clone ID: MRT4577_29120C.1
aaatgccatttcggtgatcacggcatagaggaggagagctgcctaaaactctttgagcttgccactgccggagcaacgctccacaaaatgattatggggcccggcccaggcaagccccagtaaccgaatacatgacgaccactgaaccatggcgggggactatatgagagccacactctgacaccgaaaattccgtcacaagtggagacttccgaaaaagcataagcaatgttctggccaaagaccatacaagatgcgtctccatacttcccgaatcgagtgctagatattgtcgcactccccagctgagcagaccaacgcatacgaatccactgcaggcctgaaggcactattaatgga

SEQ ID NO: 107043 - DNA, 448 bp, Zea mays
  Clone ID: MRT4577_29122C.1
ggcacctaagaatattcaacatttgccggacataacatattatgaacaacggataaaagaaggcagacaggtgcgtacaatagtcacacgggctcaatctgataaacactacgggtatatacaagtactcaaaatgggagacatagcaccaattacgattaaccgataagtaatcattcctatttacaggcatcgtaccactcttctgtatacatatggaattaagtgcctccgtgttctggaaccctgaatctcctcctcttccgaccacctgtaattgagctcatgaacgatttcaccattctgagtttgaactgaagcatcttgcaccaccttatattctactcacagtggctgcatggtgtactcgcgaaccactcatgcgcgggtcggaccacagtgcctgcactcttgcctgaactgacaccgttactgaagattaacatga

SEQ ID NO: 107044 - DNA, 299 bp, Zea mays
  Clone ID: MRT4577_29123C.1
tgaacttgttcacacaatgatactaaaggaggcatttttaaaaatgttgattgtatgtatacatcccagcgagatgatagaatggaaggagtaccagaggctaacactgatgaagaacatgttctgtcagcctttttgctggatgcaaatcacctaaacgtagtcattaattctgaagaagtggtttgtgagggtgaagatagtaaggagcttctccattcggaagactgtaaagcttcatccgagaaaacagatgtgaatgatggcaatgtatatggtattagtgatgctgtagtgag

SEQ ID NO: 107045 - DNA, 620 bp, Zea mays
  unsure (1)..(620): unsure at all n locations
  Clone ID: MRT4577_29124C.1
cattgggtacctcgaggccggccgggacttctgctagcaaactaaccatgcctctgcgtgtcttcttggaattcacactcctctctcgatctcctagaataaaacccaagtttaaaccctaacctcngtcattctacgaatgtccaccgccacaaccggcccatcgcctgtggcgactaccccgatggagccgcctccgtccaactcgtgctctcctcctacgatctcctgtctccgtgggcgagtgagacggaggaagaagacgacctctatgatcggactcaagtcgcttcaaggacacatggagtgcttgcaagattcaagagtagaacgtgtagagacgatcacaatatgctatagctctgagtcctccgggcaccacaagaagtactgcgcatgccattgcggaccgctgcgacatcgcgacagtttatggagatggaccacggcaacctccccatctgactgtcgactacggtataaaactattatgtgctggatgctcatgaccatcaaccgtcagctgatgaagacacccgtatctgtggtgtcgtatctttactcctaggcttcaagcaaatggttggctgctgaaaccaaatgcaggatcccactgctgg

SEQ ID NO: 107046 - DNA, 550 bp, Zea mays
  Clone ID: MRT4577_29125C.1
cctcgaggccggccgggccgggattcctaccgtcccgatgacgaatacgttttcttgaactctggtacgtgctgccattttgccaatactatactccttctcctcttcttcttcttttcgcgccgatcacgcaacaacatgacgatcacaattgaacagccacttctcgatgccgtgcagcagaggaaagtccccggaggaggcgaccccgcggagctggtgctccacgccggctttgtactgccagaagtacacgccttcgggaataccttcatgtgaaacagcctactgatttgctaccgtgcgttcttgcatatccggacgtctacgccaaaacacaaaagacagccgccaacacacagaagattggggcttatctaaatatgcacatatttatataatggaattaaccaatacccgttgaggtgtattttaacaagatgactaagaggaatttttacttcaatctactccaacgcgcattgataataaagagcacactcacgtcacttgtgcgttaaatgaaaataacaaaaaggcccctacggcc

SEQ ID NO: 107047 - DNA, 609 bp, Zea mays
  Clone ID: MRT4577_29126C.1
gagcttctccttctctcctcctcttccccgctgctctcctctgccccgcaccggcaccgctaggcttttgccgccgacctctcgctcgcttccggtctccgattaggtaaccgtacgtaccggacgtatgaaatgtcggatagggcaggaggacgagaaaccagatcgtgatcatacatgaccctgacacacggcagacggatgacaccacacgccgacctcccctctcccgacggctctctcaacaggtcagtcaacggcttaaccacctgctctccagatccgccatcagaccaccatgcagccccaccgagtgttgaggttctgcaacgctgccaacaaacggcacgctttgatcagcccttctgccacaacgacaccgactcaccgactgatcctactcaaaaatcacaaaaatactctgctgataacatcccgcttcctggaccaaaaagagggcgcaggaagaacagatatatactctaacagcgagcgcaggaccatttctaggaaggatatggtccaagtgattcatcagatcctattcctgaacatgcattataaatgtatacgaactaccacgcttgtactatgccatacagaagatga

SEQ ID NO: 107048 - DNA, 1186 bp, Zea mays
  Clone ID: MRT4577_29127C.1
ctcgaggccgggccggggacggagacccacccgaccaaaatcccccacccgccggcgcccgcaccgcaccgcgcgccgcgctcgctgccgtgcccgtgtccccttcctttcccgtttccccctccctctctctttccccacgcccgacgcccccaccactctctcgacccaaagccagatcggcacgacgagcagagggccccccggagcggcgcggagcaatggcggcgggataccgggcggaggacgactacgactacctcttcaaggtggtactgatcggcgactccggcgtcggcaagtccaatctgctctcacgcttcacgcgcaacgagttcagccttgagtccaagtccaccatcggcgtcgagttcgccacccgctctctccaggtcgacggcaaggttgtcaaggcccagatttgggacactgccggccaggaacgatatcgtgctattactagtgcgtattatcgaggtgctgttggggcgttgcttgtatatgacgtcactcgtcactcaacctttgagaacgttgagcgttggctgaaggagttgagggaccacacagatcccaatatagttgttatgctggttggcaacaaatctgatctccgccatcttgtagcagttcaaactgatgaaggaaaagcattcgcagagagggagtcattgtatttcatggagacctctgcactcgagtcgactaacgttgaaaatgcattcgcagaggtcttaactcagatctaccgtattgtgagcaagagagcagttgaagcaggcgaagatgcagcatctgggcctggcaagggcgagaagattaacataaaggatgatgtttcggcggtgaagaagggtggctgctgctctagctgacctgccctgctgtattttttttggagctgtggtgatgtagcttatggtacggcatttccagcgaccgagaactggtagtggcattagcagcttctatgttacctagagagtttattgtcaaactgggggaaaaaaactgaaggttagatcggtgtagatctttctggtactgtattgtgtatccggcaataggcatggtattgttttttttggctgtgaatccactggtaccatgtttaaacttatgaattgttcaaaatagaaaggtgcttcatgcttgccaaaaaaaaaaaaaaaaaaaagccgccccc

SEQ ID NO: 107049 - DNA, 427 bp, Zea mays
  Clone ID: MRT4577_29128C.1
gggcaggacaacatttaaattaattaagggttagaaacgcatcaaaagaattccaggcggcaccgctgcaccgccaggatggttttcggccccaccacgaagtccaagaatcttgggtgccccatggtcaaggggtcacaggcatgggcgcgcgcctttagcagggttgcacgcttgggggggggatgggcagggggacgtccgccttgagcgcaacgggggacgttttcttcgagagcttggtgcggccgagctggactgggccgccccccccggacgtggagctcccgctccgaatacgggccttgccgaggagccactggcaaagagcgtatcccaccaggggcagctggatgcaccaccacccgcccccgttgttccggatggactacaacccctccatgagggcgcctgaagggccccgggc

SEQ ID NO: 107050 - DNA, 190 bp, Zea mays
  Clone ID: MRT4577_29129C.1
tggtcgcctgcgtccgtccgaatcccgtcgccccgcgtccgccccgcgtccgccccgcgtccgcccacgcgtcgggacgcgtgggcggaccgtgggggctgactgctgcgcgaacgagaggagaggagctagcgtgcctgaaggagggcgctacaaggacgagccccgtcgccgggtatggccacagcga

SEQ ID NO: 107051 - DNA, 394 bp, Zea mays
  Clone ID: MRT4577_2912C.1
aaaaaaaaaaaaaaaaaaaaaaaaaaaaaaaaaaaaaaatagttaataaaatagagagaaggaaaatatagaggataaaaagataaaaaaaaaagagaatgtggttttatatctgctggggtggggttttataggttcaattttttggccggcgtttttcaaagttattactttttatatggtgggggttaaataatttatagggtcgggggtttaacacctttgggcttgtgaaatccttgggtttaggaacttaattgtcttggttacaaatacttttttagcctgttgggttaatgggaaaggggctgtaacggttcgtttttcccaacggttgtggagcttaaatgcagattggcccctccctttttcggggccttaaagcccggtggtt

SEQ ID NO: 107052 - DNA, 646 bp, Zea mays
  Clone ID: MRT4577_29130C.1
ctcgaggccggccgggccgggagaatctccccctcctgcgcctccaccctcctcgacgcctcactccctctgaggtcgcagatccgtccggttagactaagccgcccgcagcccgtggcctccggtgagctcggctgcacgtacggcgtcctcgtcctcagcgacgacggccatgcgcgcatcacgcgccgcagaagatcgccaccatcgtgagggcggccaacatcgaggccgagtcctactgcgtcggcgctcttcgctaagctcctggagaagcgcacgcgtctgaggatctaatcctctccgttggatctggcggcggagctgctccagatgctgctgccgccccagctggaggtgctgcagctgctgctgcccctgctgcagaggagaataaggaagagccctaggaggagtctgatgacgacatggggttcaacctgttcgactgaggaggccctcggtacccagacattagcaaattccctgatgctggccaagagttatcttacgctatgactgtagacttatgatattacaagtactcaagctatgagttcctgagatgaggctatgacagagtgaggaagaaccctaaaccatcgtattagagtgagagaaaaaattaataaaggccccgagggcc

SEQ ID NO: 107053 - DNA, 504 bp, Zea mays
  Clone ID: MRT4577_29131C.1
cgtactatacttggatccctaaacggccgcccgggggggggggggggttaaaaaaaaatttttttttttttttttttttttttttttttttttttttttttttttttttttccaacccacaacagcgggcagcattggaccacaaaccattcattgtctgaaaaaacaccccaattccaaggggggggggggagatcctccaaaattaaccccaaacataaaaagggccaaaaacacaaatagcaaaactttaaaaacgcacccagaaacaggcccccttgtggccttaatggggaatgaccggacaggggcaaaatccaagcccccaacaagctgctaaacggaagcggcggagggaaagggcctggttcccctcccagggggcccccctggagggcctgttcttgggggggggggggcccttgccacccaggccacggaactttttgcctgcggaggggaggccacggaactaacggggcttgcgcacagggttgcaaaccc

SEQ ID NO: 107054 - DNA, 441 bp, Zea mays
  Clone ID: MRT4577_29132C.1
ctcgaggccggccgggaccgccctacatacacctctcccccgtaaaaacctgtgctcccactcgccaccgagtcgctgaagccacctataccataacgtcctcggccactttcgtctttatcagcgaaccactgcccagaaggacaggtaggctctctagctcagtccactcttcgcaggcgatgtcgtcgtgcgtcgccgtggagaccgaccccttgctggtggtcccggaggacaatagagagtccggcggacgtctacgtacgtggagggcatgaactcctacagcggcctccaaggggtcaacaaggagaaaatggtcggggagcgcaagaccaccgactaattcttcgaccaggatgttgcgacgatgaggcacgagggccgtaagcggagtggtagcgcgctcggcccccacatgaacgatgcagccgacatctt

SEQ ID NO: 107055 - DNA, 209 bp, Zea mays
  unsure (1)..(209): unsure at all n locations
  Clone ID: MRT4577_29133C.1
gaatnnngggccgacccatcttccgtaaaaaatatccccaaaccctatctcccgatttttttttcaaaccctctcttctttttcaagatgacttttttataaaccccgacgggccaaatctttttnnatctttaccccacacaattttcccaaaaccgcctaaaacttcctctctctttgcactaactataaatttttttcaattcctt

SEQ ID NO: 107056 - DNA, 441 bp, Zea mays
  Clone ID: MRT4577_29134C.1
tgaattcggcacgaggaatttggacggacaaatcagcggcataaacgaaaaaaccacgatgcaccatagctaaaccggtggccgctatccaatgtaagtaagtttccttaagcttaataaacgaaaaaaatatggacggataaacaaatcagtcacaaaaacaaaaaatctggataagaaataaatctagacggacaaatcagcgacataaacgaaaatctggacaacaaaaaaaatcagtttcaaagacaaaaaaaagtataaaaacatgcctatcatggggcttgaacccacaaccacaaggttaaaagtcttgagctctaccaactgagctagacaagttttgtgtcattagaaggctcccggcggcgcaaaaatctatggcgccgagctcggttccatgtcgatgccacgtcagtgcacgacgtccgtttgtccagc

SEQ ID NO: 107057 - DNA, 318 bp, Zea mays
  unsure (1)..(318): unsure at all n locations
  Clone ID: MRT4577_29135C.1
acgcgcangagcgaagtaggtcggaatcggctcgaggggccagtggtgctcctaggtgccggctgcctggactcgtgggtggcccttggtgacagagggaatcatcaaggctggacatgttacaaagtcaggctagggagataggtataaagccgggttgggtgggggtggtcaggggctttgatcgcagaggtccgtgggcctccaccccaatgctgcccactttaaattcacgtcattttcaaccaggattttctttatcttttactacaaatcaagccaagggaggtgcacgaagtgnggaacgggacacaggat

SEQ ID NO: 107058 - DNA, 810 bp, Zea mays
  Clone ID: MRT4577_29136C.1
ggtaccctcgatctggccgggcccttccctcgctctgaaggtatcttagggttctcgcagtgaaactcgcagtgaaatttcaacatccaatagcctgaagttgtcatccattaaagtacttgacactcatcctgcacagtgaaatttcaacatccagtaaagtatacactcgaaattttcatgggtatgagactagttggattacaagatgagtgaaattacttgacactcatctttagggaccttgttcttagggttctctctgttcttaagtatcaggtccaattatgtacattacttgcagcctgaagttgtttgttactgttgttgtagcctgaatcacatgtcgcgtgcgagtagttcgtcgaacagacgacatcaatggcctcagtatgggacagtgccacttatgcgctgccccgagtgtgaacggccagagcctcttttgcggctcacatcgaggaaaactgagaatggcaactatggtcgtgagttcgtgaagtgcccatggaaggttgatccttattttgccatccctatcaactttagtttatttgggattatttatgctcaactttgtttgttttgattaggatttgcgaaaatgtgacttcttcatgtggctggatgattatatgaagatgatagaagcagaagggttggcgggcggtccaaatgaatacattgggcaccaacacgtggcgactgctaacgcgaaagcaattagtgacctgatcgctgaagttaaagaggtgaatcacaacttgagcgagatgaagaagaatgttgggaggcttttgcgctactatg

SEQ ID NO: 107059 - DNA, 629 bp, Zea mays
  Clone ID: MRT4577_29137C.1
ataatacgcagcagcaggagtagcacatcaccaaacacacaactaagaaaatcaatggccatctcactcagctcggagctcctctcccagccccaaaaatggcagcttctcctccttctggcactcgtctccctcgtgctcttcacgaggagactgagcaacaaagggctcaagctaccaccaggcccagcccgggttccgatcctggggaacctgcaccagctaggcgtgctgccgcaccggagcttacgggatcttgcacggaagcacgggccggtgatgcagctgcagctcggcaccgtgcggacggtggtggtgtcgtcggctgaggcggcgcgcgaggtgatgaagacgcacgacgaggactgctgcacccggcccgtgtcccccgggatgaagcggctgtcctacggcctcaagaacgtcggcttctcgccatacggtgcctactggcacgccatgcgcaagttcttcgtggtcgagcccttcggcgtgcgccatgtcgaggcagcatggcatgcacgccagcatcaggtggagaaactgatgagcaccttgagcggcttcgctggagagccggtagcgctcaaggagcacatcttaagtctggccgatggcatcatcggcat

SEQ ID NO: 107060 - DNA, 343 bp, Zea mays
  Clone ID: MRT4577_29138C.1
aatcgcacggcccctcttttttatgactttcaccagacatctaggggttaagaaatatatttaataactataaccattattattatataacgacaagccgactgctgaacttaactgctgactataagtcccaccttcttctcgatccaaagtccactccacatccacacccccaaaaacacacaggctccatgaacaattgcatcctgcttcctccacacgaccccacacccaaacttaagtctaccagtcaagaccccttcctgcattcttgaaaccaccgtttcatgaccgcccggcccggccggctgcaagcccatctcactcgcgtcacgggcccact

SEQ ID NO: 107061 - DNA, 2140 bp, Zea mays
  Clone ID: MRT4577_29139C.1
cattgggtacctcgaggccggccgggatcgcgtcactctcgtcctccccagtcccctccgtggctgtggctccgctcccagtccgccaccgccgcgtcatgccatgctccctctcctcctcgctctcctcaccggagctgcccctacggtgtcagcatccggggacggttgccgcgtcggctgcccgctggccctcgccgcgtactacttctcagcggagtccaacctcagcttcatcgcctccctcttcggcatcgccgaccacaacaagctgctcccctacaaccccggcatcgtggacccgaactacatcgtcaccggggaacgcgtgagcgtcccgtttccttgctcctgcctcgggctccccgctgacccagcctccaccttcctcgcggggtcgctcccctacacgctctccggcggcgagacgtacgacgacgttgcctcggaattcgccaacctcaccaccgcctcgtggctgggggtcaccaacgcggacccggcgggcaagttgcccgccgctgggaagatcaatgtcaccgtgaactgctcctgcggcgacaagagggtatcgccgcggtacgggctgttcctcacctatccgctctgggaaggggagacgctctcctcggtggcggagcaatacggattctcgtctcctgcgcagttggagctgctcaggaggtacaaccccgggatcgggatggacagggcctccgggaaggggatcgtgtttgtcccagtgaaagatgcagacggcagttaccgccctctggaatcagatgctggaaatatcctttctggaggagcggtagcaggaattgtgatagcctgtatcattattttgattgctggcatctggctgtttgcaatgtattataggaagcagaaaatgagaaaagccataccactcacatgtctagaagattctgtccaacttagcaaggtttcacaagatgagggcataaaggttgacagatccatagagttctcatatgaagaactttctgatgctacaaacaactttagtatggaccataagattgggcaagggggttttggttctgtttattatgctgagcttagaggcgagaaagctgccataaagaaaatggatacaaaggcatctcaagaattcctcaatgaattgaagattttgacacgcgtccatcacacaaatctggtgcgcttaattggttattgtgttgagagttgcttatttcttgtttatgaatttattgagaacggaaacctaagccagcatctgcatgggacgggttatgaacctctctcatggaccagtagagtgcaaattgcccttgattcagcaaggggtctagagtatatacatgagcacactgttccagtgtatgtgcatcgagatatcaagtctgcaaatatcctgatagacagagacttacgagcaaaggttgcagattttggactgacaaaactttcagaaattggaactacatcacagtcactcccatcactacgagttgttggtacatttggttacatgcctccagagtatgctcgatatggtgaggtttctcctaaggtggatgtctacgcttttggtatagtcctgtatgaacttctttctgccaaagaagctattgtgagatcaacagaattcactgatgcacaaggcctggtttatctgtttgaggagactctcagcatgccaaaccccatggaagctcttcaggaaatgattgatccaaggctaggaggtgactaccccattgactcggctgtgaagattgcgtaccttgcaaagtcatgcacgcatgaagagcccaggatgaggcctaccatgagatctgtagtggttgctctcatggcgctttcatccaaggaccatgagttaactcggggacacgattagcatagcacattgtccctggggctgctttccatgtcagatgaaaacaatacaaaagctatcgtgtacagatgcaatgtattttcgttctgattttgtagcgcttaagttggctagtaacattgtgtgtagttttctttgcctgcttctctataacaacaaaaaggggatgaccgagcggtctaataagagcccccacccaattaagatgataatggatatggctcggccacttccgagccggcaatattt

SEQ ID NO: 107062 - DNA, 862 bp, Zea mays
  Clone ID: MRT4577_2913C.1
cattgggtacctcgaggccggccggggaccccttcgccccgtatcgttcccttcctcctctcttttccccaccgccccctttcttggcgtctacccggcgcgaccaggaccgaatcctaaggccgccggccgccgccgccgccgcctactcccgttggacacggtaaaacctcctccctcctcgtccgtgtcgccggggtccggggtccaagcggctgcgcgcgcggtctcgccgccggcgccgatctgggcgccaccggcgttgaccccgtccgattcgccccgggctgcgagacctgtgcctccgcgaccggttactcggaacttctactcgcctgtgggatcctcgagcggatcagatgagcacatcgacttgagcaccacgctttttggttggaaggcgaatcgtagagctttcctgggtttctctgagggctcttctcagatgtggcgtcctccagagtctaccacatactgtttgaggagtcctggttcttttcggaatccggactaaccaagggctcctactgtgcacgactgcttgacaggatatttcggattattattatgtgcgtgcgcgcgcgcgtgtgcgccttctagagagtttggagtaaagaaaccaaccctgcatctgtattctgtctgtctgtgctgctttgctttggattccagaacaaaattcgaataagccttgcatctcgctgacttgggatataactatgccgaaggacaggagctcccgcgtttcctcttacgagagccgccgggctggtgcctccccatacttctcatcgtctcatggacagagcagttcttctcgccggtcagagaagtcttgtgtggcagcagcggcggcagcagc

SEQ ID NO: 107063 - DNA, 318 bp, Zea mays
  Clone ID: MRT4577_29140C.1
gagctcactagtcgttggccgccctttttttttttttttttaggggggggtgttttaattattatgggggaacaaaacctgccggtaaaaacggcagggttacatacgctccaccaaaaagggaaacaaccacaggcggaggagcagatctaaaagcacacacggcccccggaaccgcagacatgacacgcactggggacaagaacgaataaaaaacccggtctaataccacaataggggccagatcccttaaacaaccagtttacttggactgcgcaaagacaacctaatcaccaggcccacactaagccggacaaa

SEQ ID NO: 107064 - DNA, 1431 bp, Zea mays
  Clone ID: MRT4577_29141C.1
gaggccggccgggaaaaaaaaaaaaaaaaatctcacaagaacattgctaccaccaagtgtcaggacccatggttctcgctcctgcgctcctcgtcgtggcggcgctcctggcccagccgctcgggagccgctccggcgacgacgccggggccgcgaacttgcacccggtcgtgctcgtgccgggctacggctccaaccagctgcaggcgatgctgacggcggcgtacgagcccccggcgcctgcctgtgccggctccgcggaccagggttggttccctctctggccaaaccacacggcgatgcgcgacgctagccaggtcccctgcttcgccgaccagatgagcctcgtctacgacgccggcgccgacgactaccgcaacgccgacggcgtcgctacccggaccccgttcttcggctccgcgcgcgccctcatcgggtgggacaggctggtgcagcagctggaaggcatgggctaccgcgacggcgagaccctccacgccgcgccgtacgacttccgctacgccgtggcgcctcccggccacccgtccgcggtgggggaccgctacttccgcgacctcgggcgcctcatccaggagagccgcctcatccatggccgcccggccatcgtggtcgcgcacagcttcggctgcgcgctcacctaccagctcctcctgtcccgcccgctcccctggcgccgccgctacgtgaagcacgtcgtcctcctgggccccgcgctcggcgggttcgcgcatgggatgcgcctcctcagcgccggcatggactacggcctcccgaacgtcccgcggccggcgatgctccggatggcgcggacccagcagagcgccctgtggcgcctgcccacgccgctcgtcttcggggaccggccgctggcggtgaccagggccgcggcctactcggcgcgcaacgtgtcggcgttcctcgaggccatcggcttccaggaaggcgtgcggccgtacctgacgcgggtgctgccgatgtgggaggcgctgccgccgccgatggtgccggtcaccagcgtcgtcgggttcggcgtcagcacgcccgagacgtacgtgttcggggccgacgggctcgagggggaggccgaggtgctgtacggcgacggcgacggggagatcaacatggtgagcctggcggctgtcgagagatggtcggaggtggaaggccaggtcttgaaggtcgttaggctgcgcggcgtccatcacgacggtttcttcagcatcgatttcgcgttgaatagcacacttgctgagatatcggaggcaggagaaagcgtcattgaacagatcggcattgtatcgtgtcagcagaaacgcagtgattactgagaatttggtggacgggtcctaaaacgtgtcctgcctcacgattgactgattgagaataaaaatggtaggtgatgctagtgct

SEQ ID NO: 107065 - DNA, 698 bp, Zea mays
  unsure (1)..(698): unsure at all n locations
  Clone ID: MRT4577_29142C.1
caatgccgtggacgcctacctgtgaatttccgcatcctttctctcatgtgaagcaacctgctggatatagactttcataccagattgttgactcttttgtctggcttggcataagggatatgataaatgatctccgaaaaaggaagttgaaattgagaccagtcacatacctaagcggacacatgcttattcgaatgatattcctcatgcatatatctggagtccttaccttgtccccaaaccaaaagactggggacctaagattgatgttgttggattttgtttccttgatcttgcttcagattatgagcctcccgagacccttttgaggtggttagggagtggtgacagtcctatttatattggttttggtagccttgtaagtttttatttattgttcagaactaatttgatgtgtttacttttcttcctacatgtaagccatgattatgctttaaaatgtttcatttatacctggctaaatgctgtattcatactgtgtattctatgttggtcggtccattctttgtttcctatcatgtggaacaaatggaaaatagagttggtaggtttgttatagatggaatggaactgacatgcaataaaatctgtgaaataaatatgtgcccatgagcactccaatgaaccataaaaatggaacttggtngttgaggtctggaaatgccactgtatgactc

SEQ ID NO: 107066 - DNA, 805 bp, Zea mays
  unsure (1)..(805): unsure at all n locations
  Clone ID: MRT4577_29143C.1
gagcatcncgcagacccacccttgctcaaccgattagcttcgacaagctcgcagccatggcgcggtggccagccgccgccgtggcgtgtgcgctcggggcggccctcctgggcatgctggcggtcaccgctgacgagcaaggtagcaacagcaagttcacgtgcacggacacggagaagaagcggccggggtgcacgggcacctgccccgacaggtgcccccagagctgcatctcgctctgcccctcgtgccagacatattgccctgaccaagtgcaaccagtgcggccggcgctctttgtgttcggagacgggtttacggacgtcggcaacaacaactacctagagaacaacgaagtagggaaccctgtaagagccaatcactcttactatggcatagacttccccaattccgtggccaccggaagattcagcaacggattcaacttggctgacttcatcgcaaaggccatgggattcgagatgagccctccgccttatctgtctcttaatagtcccacaaaaatggatgccggttttgctggagtcaactatgcttcggcgacttctgggatttggagagacatcgacaccggactggacatcccactgatggaccaagtgaagaacttcgcggacacgatagggcagatgggtgccaaccgtagccagcaagacctgagcaagatgttgtccaattccctcttcctcgtcagcaccggcaccactgacctctactcaatctacaacatcaacaacaatgggggctcagacactaaaaccaatgtcccacacctcatctcctt

SEQ ID NO: 107067 - DNA, 244 bp, Zea mays
  Clone ID: MRT4577_29144C.1
cgggttgggcaaaataagatgggcgcacttaaatgttggtttcaaaagtaactaaagttatggtcccattatctgattcatttcttaaatcttatggttaaaaatttatagaccattgcaaactgcagctggctcggctttggcggcctccagggagcggttgaagcccaaaagctcgcgctggggccttgttggttgggtgtccgattactccccgtcggtactcactgtgatgatggcctcc

SEQ ID NO: 107068 - DNA, 298 bp, Zea mays
  Clone ID: MRT4577_29145C.1
gcggatctagagagcggccgtttgcgaagggtgctctgattccagaggtcgtggtggacaaaaggactgggtgtggtggcggaactggcggtcacgtagctgtgcgagacatcgaactgtcttgatactgcgactcatgcttgctttcattcagcatacaatgccatgttgggtatgctgcctgaggtggaacggtgagtgggttaagcaaggtttttagagcgtctgatgactttgccaagaggattgggacacgctctagactagcgcatgaagtgctgggtgcactgcatgctag

SEQ ID NO: 107069 - DNA, 582 bp, Zea mays
  Clone ID: MRT4577_29146C.1
gaaaacaaacatctcctgctatctaccgcccgcctgtaacttgcgttcttgttctcttcctgctacatcatcactcgctcacacacatgtcaggcctgatcgatatctggacgctggagagggagcggatgctccgggccgccggggccgcgcgggcgttcaggtcgctcggcggaggcggacggcgcgacaccgctcggccggatgagtctgctgggagcagtagcgacgacggagccggtgccgcgcgcgtggacgctgcggatgagcgggccgctgtgtctgctgctgctgctgctgctgctaccactagcacgccggggttcgtccgagaagacgcccttttgtccatcctagtcgattgcttcggccagtaggtagatcctatcttctgaacatcagtaggtcgcagtgctacagtacatatgtgctagaaaattaaacaataaggatatatcgatatgtagaggatccgcgtggaagcaagaagctgtaaaccgtagactcatcgcctgttcaccaccgccccggctacaaacgggatatttgaactcaatacacttgtcaaatgtcttcaagaat

SEQ ID NO: 107070 - DNA, 219 bp, Zea mays
  Clone ID: MRT4577_29147C.1
gtcacgcggtcgttcatcctgtgacttaaactgcactttttggggccttcttcgcacaaggagagggcttaaaacgtactccttcaacaataatcaacaagtgaggtactctattgctctactgctgtacgacacggcgaatgccaaggcgaaaaacatggattttcagaaccatattaaagcaccctcgtagctgtcacccggggggtgttctctata

SEQ ID NO: 107071 - DNA, 344 bp, Zea mays
  Clone ID: MRT4577_29148C.1
gagcttattagtcggcggccgccctcttactttcgggggcatgctaacaaataggggctttatggtgcttgcgcatttaaaatacactgcctgggttatacatcagcctgactaggtacacgaactcaagcccgcacttacaccatgcgactgacatgcttctgttgctataaatccccagaccaccgaggggactgctaaccgaaataccgaactgaacatcagacggaaatgataacgatactcgccgttgatgggggcattaagctgctcgccaatcttggggacctccacctggacgacctcacttgtctgcgccttatctggggccggtttggggatgc

SEQ ID NO: 107072 - DNA, 185 bp, Zea mays
  Clone ID: MRT4577_29149C.1
ccttacctaggcttctatcctctagaccgagcgcttttttttttttttttttacaggtagttttaattagcatcttacgttcataccgtgtagagcctaatcgtgatgggtcataccatataattaccgacacgggaatgtaccctactgcttggcaaaagccaaactgaacccgacacacaagc

SEQ ID NO: 107073 - DNA, 2916 bp, Zea mays
  Clone ID: MRT4577_2914C.1
cattgtacacctcgaggccggccgggaccccttcgccccgtatcgttcccttcctcctctcttttccccaccgccccctttcttggcgtctacccggcgcgaccaggaccgaatcctaaggccgccggccgccgccgccgccgcctactcccgttggacacggtaaaacctcctccctcctcgtccgtgtcgccggggtccggggtccaagcggctgcgcgcgcggtctcgccgccggcgccgatctgggcgccaccggcgttgaccacgtccgattcgccccggcctgcgagacctgtgcctccgtgaccggttactcggaacttctactcgcctgtgggatcctccagcggatcagatgagcacatcgacttgagcaccatgctttttggttggaaggcgaatcgtagagctttcctgggtttctctgagggctcttctcagatgtggcgtcctccagagtctaccacatactgtttgaggagtcctggttcttttcggaatccggactaaccaagggctcctactgtgcacgactgcttgacaggatatttcggattattattatgtgcgcgcgcgcgcgcgtgtgcgccttctagaggcatgattcttaaatcagagccttcgtgtttaaatccgagtttgccttcgtgttgaactatgagtgaatttcattttctgcgggagttgaggtcgatttagatcaggacagtgtttcttgcgatctgattaagcctttttttttcttgctattggggatttcttttttcagatcggccggccgggatcccttcgccccgtatcgttcccttcctcctctcttttccccaccgccccctttcttggcgtctacccggcgcgaccaggaccgaatcctaaggccgccggccgccgccgccgccgcctactcccgttggacacgagtttggagtaaagaaaccaaccctgcatctgtattctgtctgtctgtgctgctttgctttggattccagaacaaaattcgaataagccttgcatctcgctgacttgggatataactatgccgaaggacaggagctcccgcgtttcctcttacgagagccgccgggctggtgcctccccatacttctcatcgtctcatggacagagcagttcttctcgccggtcagaggagtcttgtgtggcagcagcggcggcagcagcaaagcaagctgcagagtgggaggatgttcggtgtccggtgtgcatggaccacccgcacaacgccgtcctgctggtctgctcctcacacgagaagggctgccgccccttcatgtgcgacaccagctcgcggcactcgaactgctatgaccagctcggggccggccggggaccccttcgccccgtatcgttcccttcctcctctcttttccccaccgccccctttcttggcgtctacccggcgcgaccaggaccgaatcctaaggccgccggccgccgccgccgccgcctgctcccgttggacacgagtttggagtaaagaaaccaaccctgcatctgtattctgtctgtctgtgctgcttcgaataagccttgcatctcgctgacttgggatataactatgccgaaggacaggagctcccgcgtttcctcttatgagagccgccgggctggtgcctccccatacttctcatcgtctcatggacagagcagttcttgtcgccggtccgaggagtcttgtggggcagcagcggcggcagcagcaaagcaagctgcagagtgggaggatgttcggtgcccggtgtgcatggaccacccgcacaacgccgtcctgctggtctgctcctcacacgagaagggctgccgccccttcatgtgcgacaccagctcgcggcactcgaactgctatgaccagtaccggaaggcctccaaggattcaaggacagagtgcagcgagtgccagcagcaggttcagctctcgtgcccactgtgccgtgggccggtcagcgattgcatcaaggactacagcgcgcggaggttcatgaacaccaaggtccggtcgtgcaccacggagtcgtgcgagttcaggggcgcctaccaggagctgaggaagcatgctagggtggagcatccaacaggaaggccaatggaggtagaccctgagcggcagcgggactggcgccggatggagcagcaacgggaccttggagacttgatgagcatgctgcgttcagggttcaacagcaatattgaggacgacagtggcgggcttggagacaccgaagaagggggagaggaagctgaaatgactccggcctccataaccatggtcttcatcatgccatctagaggctcaatcatgcagtacctatcggaacgcagcagaacgatcattctggtcagtcggaggcgagcaagcagcagcagcggtggcgacgctgaagccactgctccagacagcgaggaaggtgatgaccctatgccatcggcagaggcatctgctggttcacagcattcttccgaacaagaggaggctgacggtgaccctgcccaatgacgtaagtcagctggcaagaggtgtgccatggcatcttcttagcctgaagatcccgaccaacatggcaacatggtatgtggcgaagaaaaacatggatgcaggtgccaccaaggcgtagccaggacaatctgtctacgcaggaaaatcgaggggaatcagcatcgcgcgaaggcttcagaaacgtggtggcctctagtaccaattctaatgtttccgcggggttctgtggcaatggagagagagaaacaattgggtggtagctatcttgtctgaatggatttcattttccttgcattgtaattctctaatatatattatcatatgaaatagattcggccgtatttgcactgcaaaaaaaaaaaaaaaaaaaagcaaaaaaaaaaaaaaaaaaaaaaaaaaaa

SEQ ID NO: 107074 - DNA, 273 bp, Zea mays
  Clone ID: MRT4577_29150C.1
gaaaaccctagctgtttgccaccgaagcggtctcccaggtaagcaggatcgtccagcccgccgccgccatgaagcgcaatccccgcgtgacgagctcccgccggcaagtgccgcaaggcgcactttacggccccgtcctccgtgcgccgggttctcatgtccgcggggatgtcgacggagctccgccacaagtacaacgtgggctccatcccgatccgcactgtcttcgaggtgcaggtcgtgcgcggcacctacaatggccgagaggggaag

SEQ ID NO: 107075 - DNA, 542 bp, Zea mays
  Clone ID: MRT4577_29153C.1
agaatctagatattgattgcctttgctgtgccagtttacagtttatgaattatggacactacttaatccagacatgtgtatatatcagtctcagataaatagatttatctctctttgagagagacaataaacccaacaacccaacagaagtattggtataaaccgaatcaatcggtgatgttttttttaccatgaattcctgaagtggacccggttggcaaccatgtcggaaacacaaatccttcctttattgtgtactataataatcgttctgctcaatttcttgatcagagtagtggagtactggagttccagttgctgattgaccttgcagagttcctcctgccttggcatcgtcatgttacaaaactgagggcacacaacacatgttgtaccctttgaatggagggaagggatgtaaaatttatgaactctggacatatctctgtacagttgataggaacaatggtgatatctctgtacagttgataggcagagcttgcgcagtagctcttcatgctacagcttacaaccacacaggg

SEQ ID NO: 107076 - DNA, 465 bp, Zea mays
  Clone ID: MRT4577_29154C.1
cacgcctgcatgtaccgggcccgctattacacggtcgacccactcgttcgaaccaaaccgcaccataatcatctatatcatactcacgtctatgtgaccaacgagctcaagatcccacgaacaaaccacaccacagagcttgctagacatcctgggcattgctgatgcgcgacggagacaacgagcacacgcggtggcaggtcgggatctattttccaaaccaagccgctggggcggacacacacaagcatgattgacgggcacgcaccgaggagcagaatgctgtccaccctgcgtgcgcaggaagcatactcgtgcctgacccccaaagacgctaaggttgcaaacaccattaacaacctgaacacggctgaactcgtacctggcgtcagcataaccatggccagagctgaaacaaacctctgcgtcgaccctgccacttgctcttgctcacaggggtcacat

SEQ ID NO: 107077 - DNA, 359 bp, Zea mays
  Clone ID: MRT4577_29155C.1
caccccataagataaggtagacatcctccgcgcattggacttgcacgtgtgcagccacctggatcccatggacgccatctagacgaaaggggagcacatggacgggcacctggaataggttgcaacaataaccagcggaggcgccctcgtggcggccggtagcggaatgtggtggcgctgaatagtgcgcccttgccaatgacgaggggagtgccttccttactgctgctaccgtagagtttaagtttgtcacccgcgggatatgtactgaaagggaattaggcttacacctagttcctatataattttggtggttgaattgcccaacacaaatctttggactaactagtttgcccaag

SEQ ID NO: 107078 - DNA, 385 bp, Zea mays
  Clone ID: MRT4577_29156C.1
cgcgtaggacacatctctgttgaacctattctcttctgtttaccaggctggaaaagaaatagaaacatggctgcatggcacatagagactaaagctactaatcataaccggttacgaaaactttgcttaaacactcttggcgaccggctaacgggatcccttaaagccatatgcgaaaccctactgcgactttttattgcaacaaggacgctggatgatctggcgatccacactgacttggacgaagcaatagaggaagtacttattagcactctcaatgctgtcgcccatatgaatgtcattattccccatgtcgacaagctagacgtcaccgctatgtgccgggctcaaaaaacaccttgttattggcagcatatatcttcac

SEQ ID NO: 107079 - DNA, 471 bp, Zea mays
  Clone ID: MRT4577_29157C.1
ttctgggtcaccacgcgtccggcattggtccatgaactcttgagctgactgtcgtggatcactttaatatccatgaggacgtggacgaccacggcgaggagattcctcatgcttgctcgcgactgactctgggatgtccccactaatgatgaagctgatgccattgtcaagcttatcgaggacccccactttgaagccgacacgcttatcgtaaaagctgacggaaggggaagctcccgtcacatcacagctataatcggccgctggggagaccgaactaccggtgtaaaatgccgcgaccacagacaggacccaagcgaccaacactattacctgtgtcgtgtaggggaccatcttgccgtgcgctcttgtggatgaataagctgacgcttacaccacaagcttgctgatggtcgatacggaaaataactcccccgaccatcgttcaagcttgtagctggctcgttcgct

SEQ ID NO: 107080 - DNA, 151 bp, Zea mays
  Clone ID: MRT4577_29158C.1
acagggcaaaagggggggattcaaaaaggggaggatttccttatgccttaccctctggagagcccacctttctccgaagcgtccaaaaaaatgtttccagcgcgggacccaatctgagaatcaaatatttggacaagggggcctttcctgg

SEQ ID NO: 107081 - DNA, 371 bp, Zea mays
  Clone ID: MRT4577_29159C.1
ggctggaaatttggtctgatttatgtgcttagaaaaaaaaaaaaaaaaaaaaaaaaaaaaaaaaaaaaaaaaaaaaaaaaaaaagggaaggaaaaaaaaaaaaaaaaaaaaaaaaaaaaaaaaaaaaaaaaaaaaaaaaaaaagggaggttataacaaaggatttaagtaaatgaatgtgcgtaagtaatggaaagatagcaaaacggggtgattaaaaccaaaccaatcggttatgaatcaaaaatgacattgagcgggaaaattagggatggatttaatcaaaaaggtcggaaaaaaaatttttaacggtatatagatcgaatagtaaaaaggtttgtattgactgtttccataaaaagcagtgtaatt

SEQ ID NO: 107082 - DNA, 521 bp, Zea mays
  unsure (1)..(521): unsure at all n locations
  Clone ID: MRT4577_2915C.1
gagatancttatattttctntntntttttaannnatnttcntccataccngttcggaattcccggctgggacccacncntccgcccacncntccgcccacgcgtccncnnnnacgtcnatccacacgtcnctgaacanggggggaatttatgcaagcatgngatgctcaaaaaaaaaaaaaaagntcnnnnnnnnnnnnnnnnnnnnnnnnnnnnnnnnnnnnnnnnnnnnnnnnnnnnnnnnnnnnnnnnnnnnnnnnnnnnnnnnnnnnnnnnnnnnnnnnnnnnnnnnnnnnnnnnnnnnnnnnnnnnnnnnnnnnnnnnnnnnnnnnnnnnnnnnnnnnnnnnnnnnnnnnnnnnnnnnnnnnnnnnnnnnnnnnnnnnnnnnnnnnnnnnnnnnnnnnnnnnnnnnnnnnnnnnnnnatngnactctccntntaanannncattaaactctntaattttntnnnttacacacnanaatgaccattacaantttccatttccatanttcctttttta

SEQ ID NO: 107083 - DNA, 309 bp, Zea mays
  Clone ID: MRT4577_29160C.1
catcatacatagtgaagtactctttcacatcttatcaccaatgggagccggggttttcccttctgccctcctgctctttcagcaagcgctgctacctctactttattccacaatgctcacaacattacctttctcctcatcagccgtgggatatcaatacccaactatacaatccttcatggttcatgatgccattcatgcaagcatcttacagtcattagcatttaccctccaacatccatatgctctattgcaacagccatccttatttgcatttgtatcttcaaagatatttgtgctcatcaacta

SEQ ID NO: 107084 - DNA, 434 bp, Zea mays
  Clone ID: MRT4577_29161C.1
agcccaaaaggccccacccttttgggggggaaccctaaaaatttttaaaaacccaaaaccaaaaacaagtgggaattttttttttgggctttttctcccaaaaaaaaggaaaaaaaaaccggatacacttttaaagggactttttttcaaaattaaaaaacccttttttttggggttttaaaaacccccccaattttgggagggggcaacaaccccaagcctttaagggtggggtgcccccccccccccccggatataaacaccgaccgggggggggttggccccaagaaaattcaaactgcccccccccccctttggggaaacccccccgacaaaaaaaaaaaaagcttttgggtggtggaaaccactcccatttttattgccaaaagggagggttttccccccatccaaaaccaggtgggccccaatgcttt

SEQ ID NO: 107085 - DNA, 871 bp, Zea mays
  unsure (1)..(871): unsure at all n locations
  Clone ID: MRT4577_29162C.1
gccggccgggactatttttactggagacacaggtggcactggctattcctgatgaagacaactgcataaccatctattcctcgacgcaatttgttgagatcacacaagatgtagttgcaaggtgccttggcattccgttgcacaacgtccgtgtgatcacaagaagagtcggcggaggctttggtggaaaggcaatgaaagcaatacacattgcatgtgcatgcgccgttgccgcattcaagctacagcgtcctgttaagatgtaccttgatcgcaagacggacatgataatagcgggtgggcgacaccctatgaagacaaagtattctgttgggttcaaatcagatggcaagatcacagccgtgcacttggaccttggtctcaatgctggaatagcaccggatctgagtgcaatattgccaaatactatcattggtagtttcaaaaagtacaactggggggctcttgcatttgacatcaagctctgcaagacgaatgtctcaccaaagtcaacaatgcgggctcctggagaggtgcagggatcatttattgcagaagccatcgttgagcatgttgcatcggtgctctcagttgataccaacaccattaggaggaagaaccttcatgacttcaagagtcttgcagcgttctacggagagagtgcgggtgaagcacccacatacacgctggccaccatgtttgataagctggccttgtctccagactaccagcacagagctacaatggttgagcacttcaatagcagcaacaagtggaaagaacatggncatttcttgtgtaccatcacatatngagtgagtcttcgggctgctcccagcaaggtgtctatcatgaaatgacgntcattgct

SEQ ID NO: 107086 - DNA, 453 bp, Zea mays
  Clone ID: MRT4577_29163C.1
gttctcctacgtgttcgagaaaaaatagcttgtctagcttacttgttagcttaagctttcgtagcaagtaacactctcaagggcttcatcttgtgaaccatcatagctgtcttccgcttgttttagaaaaattgaggcacttcgaggttgagattattagttatcaccttgcttgtcttgtatccagctttaagtgcctcagaacatgaagcttacccaaaggtcttcataatgattaggaagtcagtcaaggctggatgtttgttcgaatattggatagggattcagagaggtttactcccttcaagttagaaaaacaaagaatggtatgtttttgtggtatttttgggtcagtctaggataaagtatttatgatccttctttaattgtttcagttagcagattgtaacattgagaacactattacttgtttttctaccttctgaaaatact

SEQ ID NO: 107087 - DNA, 598 bp, Zea mays
  Clone ID: MRT4577_29164C.1
ttttttttttttttttgtggggcttaaagggtgagggagctagggcacccggcataaagggtaatcatattttcatggaaggcggttacaactatttagttcatgttgcggacaagtttgttgatgtagtgctcccgtttaccagcatcaccaccctcgacgaatgccgtgaattttctagctcggaacccggaggtggggttgctcaggtgaaatgggtagaggaagttgctgacttgcttgaagttaggtcccacagtgataatctcgtggacgatgtcctcgatcgagatgatcccgtatttaccgaggtgctgctcgatgatggcgttgttgtccagagggattcgttgcttgttgatcttgccgtaaccacgcttgtagatgagctcgcgtacggtcttcaagttgggctcaccgtaggtgacataaggctcaaccatttgaagcatctgggtggttgctcgggtgaccttgatgaagacaccgttgttgatctggagcaatcgaagaagctgaaggatctttcgaggtttgggagcgatttcgttaatacccctcagcctgataacgaaatagacctttggctctgatggga

SEQ ID NO: 107088 - DNA, 403 bp, Zea mays
  Clone ID: MRT4577_29165C.1
gggggggggggattaaatttagggtattcccagggggggggggaaagggttaaaacaacgggtacaaaccccgcccatgtccaatttaaggggacaaaactgggcggggggttaaaaggccccctttgggccggttgggcccaaccaaaaaaacacaaaattttggggggggggaaaaaaaaccaaacataagggggccggccagggctaaaaaaggattttttatgtttaaaacaattttgaaaaactactgggaaaacactattttcccccttaaggggtttggggctaaaaacaaggggggaaacaaaaaatagggatcgcccccaaaaaagaacaacctttgggggaaaggggaagaaacaaaaccctgggtataattggggaaggagcccgggggaaa

SEQ ID NO: 107089 - DNA, 342 bp, Zea mays
  Clone ID: MRT4577_29166C.1
gcttggacatcgatgactctctgtatggggctcgctatttcttccctgccaatagaatagatcacgggctcgtgctcctgggcgaggcatcacgcacggagattcttcacgacgaacacgcgaagaggcagctctgtgccaccacaacagacgacgaccttccgagcattcttcgtccctcccccaaccagagatgattgccttgtccgtatactcttcgagtacctagactactttctagcctcacttcaccaccgtgttcataccttctgcagagacgcccatatactacaagccggacttcaacacgttcatcatggccatctctataatgatctggct

SEQ ID NO: 107090 - DNA, 404 bp, Zea mays
  Clone ID: MRT4577_29167C.1
acggggccatttaagtacgcatatttgatttgagagctggaggagacaagatcacgcatgctttgagatgtatatgctggaggagcaaggacatccaagtagaggctggtaatcaagcactaccggagatagctgagatcctagctaaaatcaagctgacactgcatccatggacgttgagcttaagaggtggtcatcaagaacgcatacgatatggacacttgcccagttaaaaaagctgaagattacagaaatagtctgcatcaagaagcacatgcaaaagctcaagcattacactttgaacatgaattaccttgaagaagaatgcctatcatgcttcacaaaggcgataagatgctgaacttgtgaagatacaagaggcatcttcccagaggaaagaatct

SEQ ID NO: 107091 - DNA, 656 bp, Zea mays
  Clone ID: MRT4577_29168C.1
aaacccatatatgccaacaatcgtgattcgaactgaggcgcgcgcatcatcacgggccaaccaagcaaagccgccactacactagctttgctagcagctagtagtcccatggccatggccaaggcctgctcgactgtgcttccgtgcctcttgctgctagccatcgtgtccctttcccttgccgccgcggacggcggcggcaacaactccaccgaccctgccgggcaggtccgcctgagctgcggctcgtccgcctcggccaccgactccgacggccgtgcgtgggacggtgactccgcgtccatgttcttgccgtcgacgaacgccggcgtcgcggcccgtgcgtcgtatcaagacccgtcgctgccttctaccgtgccttacatgacggcgcgcgtgttcgcgtcgagccacacctacaccttcctcgtccgccccggccgcgtgttcctccgcctctacttctacccggccgactacggcaaccgcagcgcctccggcgccctcttcggcgtcacgggccggcggcgtcacgctgctgcaggacttcaacgcgtcccagaccgcgctcgcgctcgacgccgcctacctcgtccgcgagttctccctcaacgtcaactcgagcgggaggctggaggtaccttcgccccgtcccc

SEQ ID NO: 107092 - DNA, 330 bp, Zea mays
  Clone ID: MRT4577_29169C.1
gacaaccgacttttacgcacatgtgaaaggtacagtgggcctagtgcactctatatcctagcaagaaagaaactcacaggtccccctataataaatatgcgggagatgtctctctaatgctcaataaacctgaagctgtcctaccaagacctttttttgtttcctgatgatgaaagaactgctagtctttcaagaccgacactttgatctctgagacaactactacccactcaaagcaggtggggcgctagacactagtactgcctcacttgcaggaggatcgcaagacccagcacgtcagggtaattcagatccttgaggagcgagcgc

SEQ ID NO: 107093 - DNA, 479 bp, Zea mays
  Clone ID: MRT4577_2916C.1
ccccggaagccccacttctgcggcaccgagactcgggctggggttccgccactcgcgcgccgattcgatccaatccggcataggcccccgccgtgccatggctcgccggttccattgtggcggacttgccctacatgggctgcacgccctctgcttccccaacctcgaataacctcctccgagactgcgtctcgggttacctctacgccgtctccgccgccccggcccccggcgccgccgacctcaccaacttccaccgcgtcttctagcgcgtgctcagcacctactcagacccgccgctcgagggcggctggctcttctccgcgctctccttgcacgaccggcctgtcgacctccgttcactgctccaggtcctctccgacttcgccggttgctcgcccggggccggcaagccgctcgccctcctcccccccggcgtctccgagcttgtgcactcagataagccgcgcagggcgacc

SEQ ID NO: 107094 - DNA, 355 bp, Zea mays
  Clone ID: MRT4577_29170C.1
gcggccgttcttttttttttttgggggcgtttttataaattatggggtacaaaatggcaacaagacacaacatgtacaagttttagcatgattacaatctagcttattggggttggttacacaagaaattgattcatatggattccaatttgaatgggtaaaacatatattagtttcaagatccatgctagcttaagagacaatgcttaataaagatgttaaagatgggatacacctatatacgaaggccgaggctaccggtcgttattagtcttcacaacagaacaatcttgtacttctgggataacactatgtaagggtcgcttaatgaagatcactttggggagctattttt

SEQ ID NO: 107095 - DNA, 2758 bp, Zea mays
  Clone ID: MRT4577_29171C.1
tcaggtctcatgtgccacatactgacccattttctattcattcgcaatcgaaccataccagcagccattctgacccacctactgcgccggaatcctgagaccacttgcaccatgcacacagcatatcccaagaaatttccatgaccactattgagcaacctatagctattgatcaagttgaacctgtcaacctgaatgtagatgaacttgtggttgatgatgatcaacctggttttgctccaaggtgtgaatctgctaggctggataaacctggatgtacttccaaaaaggatgattcaaatgagattgttgaagatagcaaatcactggaaaatcagttagaaatttgcaatgcagctactatgtctgatgagtgttcctccagaaatgcaaatgaagatccctctccaattaatatgtctgctgagtgttcctccagaactgcaaatgaaggtttctctccaattaatggggcttctcatctagctgaggagtcttgcctttcagacaagtcatacaatgctatcagttatgaaaatggaaatgggcctgctaaatcttctgaggagcctgacaagtcatgcaatgctatcatttgtgaaaatgaaaatgagcctgctaaatcttctgatgtggttgaaaccagatgcgtggaagcattagcgccttcatctgttggcacggttgtcacggcagaacagaaggacaatggacaccgtgcttctggtgagtggcatggagataatgtgcaagtcattggacaacaacagaagatctacataattaaagttccaaagtttgccggtgatgatctctggaataagatccaggctgcacaggctcacttagaccacctgacccaggaaagagatgcaattaaccgtcgtaggcaaaagcaaaaggctgtatgtgatcaatacagggagaagcttgaggcagcacgtagagaagagcgggaagctaggactgcacatggagataagaagaatgatttaaataatgtacgttcggtactagggaaattgcaccaagcaaattcagctgaagaacttgatgagctgattgcgaagaaagagaggactatgcaacatgagaccatttctttgaaagaagaaaaactcccacgcgtccggattaatgaattaaaatcccaacggaagcagctgtccgccaccatgggctcaaaggctgaaatcaatgaggcatttgaccaaaaagatcacattcatgagcggcataaggtgttaaagaaggattctgatgttttattgaccaacctgaaattcctagaggaaaacacaagaaagattcaaaaatcttttgaagatgaaagaacagctctcagaaaattaacagaggaacaccgagcagctaatgaaatacgtcaaaaggcctacattgaatggactgagcttagatcagagccctccaagaagaatgaatacttcttcaggtacagggatgaccggaatgcagcagaaattttcagagctaatggcgatataaatggacttaaatcacactgtaatagtcagattgagggagtcatggaaatgtggaacaaaaacgaggaattccgcaagcagtatgttgagtcaaacaaggttagcacactaaagagattagggacccatgatggacggaaacttggccctgatgaggaccctccagtcatatcaagcagaagaccaagcagcatctatccattgtctgcctcaagcccgggagtggccactttagcttcaataccagcacctgtggtagctgctccagctgcagtctctgccaaagaggactcctttcctgttttggaagccccccagaccagcaagcgcaccaagtcaaaagcatctgatatctgtgcccagaccgagaacaactctgttatagtatcggaggcagaggctttggaacagactttgaaagagaaagctcgtctattggaggaacaattggagttagctaggaaggcagaggagttggcacggaaggaggaggaattaagcaaagagagggctgccgctgagaaggagcggcttaggatggagcagaaggctaaggccaaggaggccgaggagaggaagaggcggaaagccgagaaggacaaggagaaagccgagttcaaagcgcgcaaggaagctgaggagagagagaagaagaaagcaaagagagacaaaaagaaaggcgcagcaccagcagattcgagcgccattggtgacagccatgctgctgcttcggctacagcagatactgacagtaatgcatcagacaacccaagggaagctgacgtttctcaaccagcggtggctcccaggaggccggctagaccagcggcggcaatcaagcaactgaacaggttgcagcccatgccagcgcccctgcgtaacaggggcaggaggaaactgcggcagtacatcctgatcgcagcggcggtgctaacggtgctggcgctgttcgtggcaggcaactacattcccaggctgaggtcgcactcctaattttatcgttaggaaaggagtgccagttctgtcgcggtgaacctggtggtggttctacctagaggattcttcttttttcgactgttcgggttggtttgtatttagcttcccttattataggtttgtgataaaagttattaccggatggtggtgaaatattcgttagaacatgataataatgactatagattcttttttgtacataggtctctggtgctaaccttagcgtatatgatatttatttaatcatattctatggc

SEQ ID NO: 107096 - DNA, 2780 bp, Zea mays
  Clone ID: MRT4577_29172C.1
cttctggggagcaagaagccaagcccatgcagatagaaggtgaggccacatgtggtattctcgaatttgaagaagtggataaggatggtgaggatagtttgtgtaatgactgcatggttggtgttgtttcctctaatgaggaaacagagcttcctatgaaggaaagaacagatgaagctgtccccagtgttaatgttggcgagccagagcaagtaactgaggatacaagccaagatatcatgcagggtggattggccaggggagtttttataggcacaatttttgttaagccagtatcagatcctcatgttgaatcaagcctcgtacataaagtcaaggcagaagttcatttagttgatgaaatcacagcagcagatttgaaagctgaaaatatggtcgaagtgaaaagaacagatcgtgaagttgacgaaatagaggtaaaagcgccaggtactcacgaaattgggaattcttcagaagtagaaccgaaggaagagtttgagatggaggttgatgatgctgtttcattgcatgaagctgcagcttctgcatcagaaaatggttctgaagaaaaatctagcaacattgctgttgatcaagttgaacctgtcaacctgaatgtagatgaactcgcggtagatgatgatcaacccagttttaatccaggttatggatctgctaaatcttctgatgtggccgaaacaaaaaatgtggaagcacaagtgacagaacagaagggcaatgcacaccatgcttcaggtgagtggcatggagatcatacgcaagtcattggaccacagaggatctacataattaaagttccaaaatttgccggtgatgatctctgggataagatccaggctgcacaggctcacttagaccaactgacccaggaaagagacgcaattaaccgccgtaggcaaaaacaaaaggctatatgtgatgaatacagggagaagtttgaggcagcacgtcaagaagagcgggaagcaagggctgcccatggagataagaagaatgatttaaacagtgtgcgctcagtattagagaaattgcaccaagcaaattcagttgaagaacttgatgagcttattgcaaagaaagagaggattatgcaacatgagaccatttctttgaaagaagaaaagcttttaattaaagagattaatgaattaaaatcccaacggaagcagctgtccgccaccatgggctcaaaggctgaaatcaatgaggcatttgaccaaaaagatcacattcatgagcggcataaggtgttaaagaaggattctgatgttttattcagcaacctgaaagtcctagaggagaacacaagaaagattcaaaaatcttttgctgatgaaagaacagctctcagaaaattaacagaggaacaccgagcagctaatgaaatacgtcaaaaggcctacagcgattggactgagcttagatcagagcccagcaagaagaatgaatactttttcaagtacagggacgcccgaaatgcagcagaaactttcagagccaatggagatataaatggacttatatcacactgtaatagtcagattgagagagttatggaaatatggaacaaaaacgaggacttccgcaagcagtatgttgaatcgaacaaggttagcacactaaagagattagggacccatgacggacgaaaacttggccctggtgaggatcctccggtcattccaagccgaagaccaagcaacatttgtccattgtctgcctcaagcccggaagtgatcaccttagcttcaacaccagcacctgtattggctgctgcagctgcagtcccttccaaagagaactcctttcctgctttggcagcccctcagaccagtaagcgcgccaaatcaaaagcatctggtagctctgcccagattaagaacaaatctgttatagtatcagaggaagaagatttggaacagactttaaaggagaaggctcatcaattggagttagctaggaaggcagaggagttagataggaaggcagaggagttggcgcggaaggaggaggaactaagaaaagagagggatgcagctgaaaaggagcggcttaggatggagcagaaggctaaggctaaggaggctgaggagaggaagaggcggaaagcagagaaggacaaggaaagagccgagttcaaagcacgcaaggaagctgaggagagagagaagaagaaagcaaagagagacaaaaagaaaggcgcagcaccagcagattcgagcgccattggtgacagccatgctgctgcttcggctacagcagatactgacagtaatgcatcagacaacccaagggaagctgacgtttctcaaccagcggtggctcccaggaggccggctagaccagcggcggcaatcaagcaactgaacaggttgcagcccatgccagcgcccctgcgtaacaggggcaggaggaaactgcggcagtacatcctgatcgcagcggcggtgctaacggtgctggcgctgttcgtggcaggcaactacattcccaggctgaggtcgcactcctaattttatcgttaggaaaggagtgccagttctgtcgcggtgaacctggtggtggttctacctagaggattcttcttttttcgactgttcgggttggtttgtatttagcttcccttattataggtttgtgataaaagttattaccggatggtggtgaaatattcgttagaacatgataataatgactatagattcttttttgtaaaaaaaaaaaaaaaaaaaaaaaaaaaaaaacccacgcgtccg

SEQ ID NO: 107097 - DNA, 642 bp, Zea mays
  Clone ID: MRT4577_29173C.1
acgatacccaccccgaaccggacgactccactactcaagcaccaccttccccgtaggcttcccccgaccttcccactcttgcctcatattctaccgccgcgcctccccagcccctcgacgcgccgccgccgcggatccccaccgcctgcacgcgtcgccgcggcagatccccacagcctccacccactgccgctgcagatccccacagcctccacccaccagccctactcaccgacgccggcctgcccccacaccctagcgaactacacccctctcccggatctgcgagtcccgttgacgtgcgccaccggccaccaccaggatctcgcgctaccacccaccaccaccaggatgccccccctctacgcgtggatccagtcttgccgagggtcccccaagacgaaggaacacagggctgagctgtcggcgcctggaggagaaaacctggggcggagctagccgacaccaggacaagctcgtcgcacctcacccgaccaactcctcccaggctcgctggctatagaggaggagagctcctgctccattcaaggtctagcgtgggtctccgacgccgcccaccatctcaccttcccaggccgacgccatgggctccgatgtggacgaccccctgatgcccctgtc

SEQ ID NO: 107098 - DNA, 319 bp, Zea mays
  Clone ID: MRT4577_29174C.1
ccggccgggggccaaccatgcatgccgtcgacctgcgtgcatcaaattaaagagggatcggattggaactcgatcggaaggaaggtcctgcaggccggctggccggtcgtcgatcgaggaaccaagctgctgctgctgctaccggacgacaccaaccatgatacggaggacgacggtgtgcctaggcctgctgcttctactactgacggcgtccactgcgacagcacatttgtcgatcggggacgaggaccagtacttgaacaggcgcacgcaggagtcccgccacaggaaccagcgcggagcccagatcaatgacctc

SEQ ID NO: 107099 - DNA, 109 bp, Zea mays
  Clone ID: MRT4577_29175C.1
cacgcggccgtcaacttcgggcagtaccgtacgccgggtactcccgaaccgccgccgcaccgaaccgtgcggccggacgacatagggactgacgaaccgagagtgtcgt

SEQ ID NO: 107100 - DNA, 550 bp, Zea mays
  unsure (1)..(550): unsure at all n locations
  Clone ID: MRT4577_29176C.1
aattcggcacgagggtccagcgccccgtccagggcgcgcgcagcgctgctcctggagcgcgtcacggccgccctgccgcccagccggctggcatccctcccggagcaggtgttcagggaggccgtggagctgctccgcgacaggccggtgtccaggcccgcgaccaaggcggcgctgcaggtgctggtgcgcacggcagcgtggggacgcaaccgcgtcaaggcagtggacgccggcgcggtgcccgtgctcgtcgacatgctcttcgacgacggggcggagcgccgcgcgtgcgagctcgtcctggcggctctggaccgcctgtgcgggtgcgcggatgggcgcgccgagctggtggcgcacgccgcgggagtggcggccgtgggcaggaaggcgctgagggtgtcggaggtggccacggacaaggcagtcagggtgctgcggtccgtggcgaggcacgcggngacgtcggcggtggtgcaggagatggcgcangccggcgtggcggcgatgctgtgccgtggtggcccagtcggagcagtacggcaag

SEQ ID NO: 107101 - DNA, 492 bp, Zea mays
  Clone ID: MRT4577_29177C.1
cccacgcgtccgcccacgcgtccgatgcaataaatcaaataaaataagattaagattgacaaaagatgtaaaaaccaagagctaaaatgaatactatttccagttctaggcggcattataaattctatttttttcttataatgatgtgaatcttgatggtttaatattatggttttaggacaattattatggtttcatactatttccagttctttagtcatggattttttttcagaagttgatgaactctaccttcgcaggatctagttccttgtatcttactgtcttttgagtttgagcatatactgatgtggagaggaagtgattggaaatcatctcttcctccattagaaaatagttatgaagtgacaaaggtgcaagaaagttttagtggcaaagaatctaatgaaaaggttacacattcaggaaatggtttgatccagattgagttggtcagtgttgcaacatctcacaagaactggaacttggatg

SEQ ID NO: 107102 - DNA, 457 bp, Zea mays
  Clone ID: MRT4577_29178C.1
tcttcatctcgtcgtctacacgcaagaggatatatggatctgattcatttgctttcctcgcccagcggtgtcgtcgtgacggaagaagacaacaaaggtcgccgtcgagtgaggccgtgatggcccacatctcctattcgtgcttctccaacgaggtttggtgcttcttatgtggaaaacacattttctttctttgaaggccggtatttgaggtcatttcatgcaactaatgattctggtgaagattgtccaaccttaggatataacatgcatcaattagacgtatctatcatgatcctttcatagtttaacgagtattatgtttttctgtaaatcatagaaatgtttattttgttaacgcatagaaaatcaatgactaagatgtagagtttgtatgaaagtcaaaatggagatcgatgatttacgctaaaacttgtactcatttaaaaaaaaaaaa

SEQ ID NO: 107103 - DNA, 525 bp, Zea mays
  Clone ID: MRT4577_29179C.1
agcccccaaaaaaccccccccatgggatattatggggggggatcattaagggctaaaaaactaaaattaaaaaatgggtatgtttttaatttcgggcaaaattttaaaaggtcatctttttttaattacaaagggggaaaaaaaaaaaaaaatttaagggtttaaacggaacccctgggggaggggtttccccatcttccccccgggagttttgcccccagctgggacatcgagggggcaggcgggatcgaaatgaaagggaaaagggatcgggggaacacccttgggggcggggggaagggaaaacccaaacccccccaacaggttggtggcgggagccatggccccctcacctttgaacaccgggaaacggaaacaagggtgggtgggggagtcaattgacaaaaccacccccttccttggggggaggggggggttcttaggaacaacacgggcatcacacccccatccggggccaacccaaaaaaaagagggggagcatcggtcatgagggagcccgggatc

SEQ ID NO: 107104 - DNA, 736 bp, Zea mays
  Clone ID: MRT4577_2917C.1
gcattggaagcacttgccacgttctatttgaaacagtgcctgccggagggccctgccactggttcttaatctgtattcctggaaacaagctaaactacagaatagatcttcaaaatattctggtgactttgcaagtcttccattgcaaagtccttgacaaagtttgcagagaggttcatcatcaatggtccagccctgagtgtactgtctctctttacaggtgccattacgcaacaccacctgtctccattcagcattttctggcaaaggattactgacatcattcaatgatgcagcacgcctcttacttccccctttaagtatcccttctgtgctatgattgatgctatctttcagaaaacacaactcaaggttcaacggaagttgtaatggctttccaagcaatttattttgatcaattggtcttagtgccaaccactctttgatgaatgcattgaacacattgcaaaatgaaggaatctttttcaagagaagagttcttgttttaacatcactgggagaacataaaggtgaattcaattcttctggcagaaaattttcacaaagtggtttgggtcttgaatcatgtccaggaacacaactgtacaagtggattcgtcctgtgtgccggctaacctcaaaacgcagagactccacttgaattggaaaatctggaacagatgcagcttgactcaaggacccagaatttccagaaagcctcttacgagactttatt

SEQ ID NO: 107105 - DNA, 522 bp, Zea mays
  Clone ID: MRT4577_29180C.1
aaaaacgaccgaccagccctcatcgttctttttttaaatacacatgggacatgctggtttggaaccatcctttggctcttctccaaaaccaaaaaaggcagacctgtccccgttttgggttccagcattttggccccccgattaattggcagcgacctgtgggcatgtgggggataaacaataacctccccctccctaatccatagggtatcgtctttataaaaaggagagggctctccaccctcaggcaaattccggaaacccaatcctgtcgttgccgaagccaacccccggggggaaagcccccatgaaaacgcccccaaaaatccaaagaggaccaccgcggggggggcccgtcttcccccatgaccccactgaggcaaacggttggccctccttgctccagcttcacaaggacctgctcgggggttagggaggaaggtcttgtttgcaaggggaaacccagggctggccatttgtgaaaatctccgggcagcggacggtggactctccgtgggggct

SEQ ID NO: 107106 - DNA, 136 bp, Zea mays
  Clone ID: MRT4577_29181C.1
aataactaatcaagatctatctactatggcgtgtcctaagcctactagttcgcctagcctgtgttatctgtccctcgtctgtggccatgtgcggcttctgatgatggccgtgaccgcctcggcgcagagtacgccg

SEQ ID NO: 107107 - DNA, 253 bp, Zea mays
  Clone ID: MRT4577_29182C.1
aaaaaaaaaaaaataaaaaaaaaaaaaaaaaaaaaaaaaaaaaaaaaaaaaaacgaacgggggggggaatacaaattaacggacgctttcatcctccgttctaacttatcctatctttccacctaaatctaattcactgatcgtccttttacagcgtcccctactgttaaatccctggccttacccaaataaatcgccttgtggaaaaaccccttttttccccaacttatatatcctaaaaggcccgcacctt

SEQ ID NO: 107108 - DNA, 212 bp, Zea mays
  Clone ID: MRT4577_29183C.1
gcgtccttcttctggtgcttctcacaggttatgctcccacgcactcctttctcaactaagagggggttgatctgccgctctgtgtgcaatctctctttcttaaggagtggaccacctcgctctcttaccaatagctcctcattttccaaaaactggtagaagagatagagcctctccttcaactatcaatcgactgttctcttcagcacccc

SEQ ID NO: 107109 - DNA, 601 bp, Zea mays
  Clone ID: MRT4577_29184C.1
tcaattaggcttaacaacgcgattagaacaattagaaaactgatcgtctgactaatcatcgattagtcacgactaatcatacaattagatcatggacggtcactttgtgatttgttttgagcttttgatccacttcacttttttacccaggcattcaggcccaatcaaacgagcccacgatgcctcactttcccataacagtctctcccacgggcatcagaacaaagctgacacccttgcacgttgcgccaccgctgcttcccttccccattggcagcaagccaacaactcattcagtcccttggggttctctctcctctgcacacacctcccttcctcgccaacacaactccagcacgcttcccttccacaccagcacaacaccagcacgcctccattcccggccgacacaactctccactggtgcctcccttccacgtggttaaagaaaccgattaatcagatcgttcaattaatcgattagatcggctgatcagccctctggcgaccagcaacgatcaactgataagaaaacattgatcctaaatgacagaattgaaacagtttttgtaagaaacaacaggattgaaacactgtacac

SEQ ID NO: 107110 - DNA, 606 bp, Zea mays
  unsure (1)..(606): unsure at all n locations
  Clone ID: MRT4577_29185C.1
natctttatcggccattctgagatagaactattccattaagtgttattgctgagcggactaagctttcaatcagtgacgtggaatgtcttcttatgaagagcctctcggttcatcttattgagggaataattgatgaagtggacagtacagttcacgtatcatgggtccagcctagagtgcttggaattccacaggttaaggctttgcgcgaccgcctggatgcctgggttggaaaggtgcataccacattgctttcagttgaggcggaaacacctgatcttgttgctgtgtaatttcacagctgttacacttccgcgagaggcttggtcagcaaggtcccatttgcaaaatcgggggacatggatggttagaactgcacgcagtgtcacggagacgggaccaatggattgaaaatttcatactagtagggtgttactagtagaacacgatgcaggagaatcttgctggaacatgagttgtgcctgatgtttgcatgttgcactgcgataagacgtggatcatcattaacaaaaaaaaaaaaaaaaaaaggaaaaaaaaaaaaaaaaaaaaaaaaaaaaaaagtactctgcgttgttaccactgct

SEQ ID NO: 107111 - DNA, 1249 bp, Zea mays
  unsure (1)..(1249): unsure at all n locations
  Clone ID: MRT4577_29186C.1
tcttttatnggctttataatcacaattatattgtactaaaatatcagtggcataattatgaaattatctgtgtcaagtgcgcataacttatgtttctctgcatggttattggctggataataaattcaagcttgaaatgtagtactgatggacttactatagccacttgtaatgtctttgtcatcatagtaatttagttacattttatttggttgacattgacgatggtacagtaaattgtctaaaaataatttggatagactatcctgtttgagtgttcgacatgccttttaatcacatcataactatagtatttttttgtgatttgatacttctttggtctaaaatttagttttatgtacccttagatcaatagtcttattggaactaaggtggagtgggtttatcatatgttacaagcattcaacagcggcaaccttgccctctaccaagaactttgcagggttcacaatgctgctcttactgcacaaccagctttggtgcagaatgagcggaagctgcttgagaaaatcaatattctttgtctgatggagataatctttagtcggccatctgaagatagaactattccattaagtgttattgctgagcggactaagctttcaatcagtgacgtggaatgtcttcttatgaagagcctctcggttcatcttattgagggaataattgatgaagtggacagtacagttcacgtatcatgggtccagcctagagtgcttggaattccacaggttaaggctttgcgcgaccgcctggatgcctgggttggaaaggtgcataccacattgctttcagttgaggcggaaacacctgatcttgttgctgtgtaatttcacagctgttacacttccgcgagaggcttggtcagcaaggtcccatttgcaaaatgtgagatgctttgtgtgacacgtagtcattttctggataatgagatctgctgctgccctgagcgtttgtcttcctgcgcctactgatcaggacatgtaatttcttttttggtgccctcaggacatggatggttagaactgcacgcagtgtcacggagacgggaccaatggattgaaaatttcatactagtagggtgttactagtagaacacgatgcaggagaatcttgctggaacatgagttgtgcctgatgtttgcatgttgcactgcgataagacgtggatcatcattaacatattagctgtttttcagtgcaaaaaaaaaaaaaaaaaaggccccta

SEQ ID NO: 107112 - DNA, 299 bp, Zea mays
  Clone ID: MRT4577_29187C.1
gggctcaacaaaggctggggtcatacgggtctttaatttcagaaaaaaaatggccgagatgtcaggtactcagggtacaaaaaacgggcccacaatttcatttaccggttcgcagctttcatttaagacagggccaaccaccaaggtgcctatgcggtggcatattcacagacgacaaggatcccggcggggatcatttacccccctaccttgggccggacagtttaaccgccctgggggtgtagggggagtccaccaccccatccttggggggcggggggagctccgccttctggcgg

SEQ ID NO: 107113 - DNA, 1503 bp, Zea mays
  Clone ID: MRT4577_29188C.1
gctgatactggctgccgcatgtctagattggtttggtgatgctgatgccggtgccgcatgtctatattgggtaggtgacgctgaggcctcgttccccaatcagacttgttcggcctcttcgacggcgtgcccgtctccccgagctcattcgccatgccttcctcagcctccgcgagaggaggacgagggctcctcttgccggcggctgctgaggcggttgtggtgctaatattgggtgcagtggcgccagcggcgggttgttatccgcgcgtgttcagcttcggggactcgctggccgacacggggaactacccgttcgtctacggcaacgactctgggtctggcggggccgcgctccggccaccctacggcgagaccttcttccaccgcgccaccgggcgcgcctccaatgggcgcctcgtggtcgacttcatcgcggacacgctgggcctcccgttcgtgcgaccgtatctgagcggacggagcgcggaggacttcgcgtgcggggccaacttcgccgtcggcggcgccacggcgctcagcccggactttttccgtgcaaggggtttcgacaccatgggaaacaaagtggacctcgacatggagatgaagtggttccgcggcctgctcgacctactctgtcccggcaatctcgccggttgctcagatatgatgaaccaatctctcttcttggttggagaaatcgggggcaatgactacaacggacctcttctttctggagttcccatggagaaaatccgtgccatcactccgagtgttgttgcaaaaatttcttctacaatcagcgaattgattcggctaggagccaagactcttgtggttccaggaaacctcccaattggatgcatcccagactatctgatgatattcaagagcaataagaaagaggattatgatccacagacaggttgtcttagatggatgaacgagttctcacagtaccacaacaagcttcttgtggagcagctcaagaagcttcgcaggctccatcctggagtaaccatcatctatgctgattactatggagctgctatggaaatattcctttcccctgaacaatatgggatcgaatatcccctagtggcttgctgtggtgcagaaggaccctacggtgtgtccccaactacaagctgtggattgggagaatataagctgtgcgataatccagaaaggtatggatcatgggatggcctccatccaacagaatctgcatacaaggtcatcgctatgggcctgctactaggttcctatacaagaccgccaatcgcttccaccaccacttcatgtccacagcttatggagctcggctcttctgctgaatacaaacgcctctacgacctgtaataatttatgtaattatattttattgtatgtactccctcgcccacttcaataagtcccattttgcgagtaaaaaaagaaaaaaaaaaaaaaaaaagcggccaaaaaaaaaaaaaaagggcggccgccaccgcggtggag

SEQ ID NO: 107114 - DNA, 482 bp, Zea mays
  Clone ID: MRT4577_29189C.1
tcgaagccggccgggagcaaacctagcgccacccatccagccaccaattgcttcaagcgactccgccgcgagaacgatcaggagaagacaggatgccggctggccacggtctgtgctcgcggacgtgcgacctacttcgcgcgccccttccgcaagaaggttacatgccgctcaccacctacctccgcacctacaagatcgactatcacgtcgatgacaaggagaacggcgccgtccacaaggggatgccgcaaaagatctacatgggtcgtgccggccacggcaggaacgacaccaagagcgccatcggggacaaggacaactagcatgacactgggagcatcatctggaagctgatccatgtccgcagcggtgcatgaggagccgtcccgactgcacacagccactcagcctgaggaaggtcaagaatgtcaacctgaactgccatgtcgaaaaacacggcgaggttatcaacatgaaga

SEQ ID NO: 107115 - DNA, 254 bp, Zea mays
  Clone ID: MRT4577_2918C.1
cttattcggagtcttgggcttggggtgtattttttttttccggacccaccagggaaattaaaagtcgttaataaaagcttggacagggccccctcctgacgattatcaatttgctctaggataggagggggcggccggttgttttttccctggaaagagagcttgccaactcgatccaggcccccggctaaatttacatgggaacaattcaacttttcggacaccataggggaatcgcccctttccaaagggga

SEQ ID NO: 107116 - DNA, 808 bp, Zea mays
  unsure (1)..(808): unsure at all n locations
  Clone ID: MRT4577_29190C.1
ccggccggggagactattgttttcgagattgctagcgaaaagcatctcaatccctgaatcgcacacccagccagaacgaacgccagaaggcccagaaccgctacctcctccaatacactttcgtggctccgccgcagcacgaaaccctagcttctgcatctccgccccctccacctcccctccgcgaagcaggcgagatgtcgtcgggcggcggtggggggcagcagttccgctacacgcagaaaaaaaaaaaaaagacttgttcggcctcttcgacggcgtgcccgtctccccgggctcattcgccatgcattcctcagcctccgcgagaggaggacgagggctcctcttgccggcggctgcggcggcggttgtggtgctactgttgggtgcagtggcgccagcggcgggttgctatccgcgcgtgttcaacttcggggactctctggcggacacgggcaactacccgttcgtctatggcaacgactcagccaagctccggccaccctacggcgagaccttcttccaccgcgccaccgggcgcgcctccaacgggcgccctcgtggtcgacttcatcgcggacacgctcggcctcccgttcgtgcgaccgtatctgagcggacggagcgcggaggatttcgcgggcgnggccactttcgncgttgggcggcgccacggcgctcagnccggacttcttccgtgaaagggggttccacaacatgggaaaccgagtggacctcgacaggagatggaagtggttccgcggcctgctcgacctactctgccccggcaccttngccggttgct

SEQ ID NO: 107117 - DNA, 210 bp, Zea mays
  Clone ID: MRT4577_29191C.1
cattctcctgctgtatcctctatttgcaccaactctaatgctcacagttactacgactcttctgtgtaagatcctgatctattttaaagctcaacgcttggtccgtctccctcacaaccatcgcgatacctttcgccaccacttcggccttaccttcagtctctatcaaaggatgaacatgttcgtcggatacttctactcctgatatca

SEQ ID NO: 107118 - DNA, 2072 bp, Zea mays
  Clone ID: MRT4577_29192C.1
attgggtacctcgaggccggccgggctgcgttgaaaaactgattaccagtggattgatttagatggccactgcgtatgagtcaacgccaaactgatcccagctcaaattcgtgcatgtactgtacctttgtattatatatatatcactggtcgagcacgagttgagatatgttctaccttttaaaaaaaaaaaaaaaaaaaaaaaaaaaaaaaaaaaaaaaaaaaaaaaaaaaaaaaaaaaaaaaaaccggggagactattgttttcgagattgctagcgaaaagcatctcaatccctgaatcgcacacccagccagaacgaacgccagaaggcccagaaccgctacctcctccaatacactttcgtggctccgccgcagcacgaaaccctagcttctgcatctccgccccctccacctcccctccgcgaagcaggcgagatgtcgtcgggcggcggtggggggcagcagttccgctacacgcagaaaaaaaaaaaaagcggcctcttcgacggcgtgcccgtctccccgagctcattcgccatgccttcctcagcctccgcgagaggaggacgagggctcctcttgccggcggctgctgaggcggttgtggtgctgatattctcggggccggccggggacgctgaggcctcgtccccgatcagacttgttcggcctcttcgacggcgtgcccgtctccccgggctcattcgccatgcattcctcagcctccgcgagaggaggacgagggctcctcttgccggcggctgcggcggcggttgtggtgctactgttgggtgcagtggcgccagcggcgggttgctatccgcgcgtgttcaacttcggggactctctggcggacacgggcaactacccgttcgtctatggcaacgactcagccaagctccggccaccctacggcgagaccttcttccaccgcgccaccgggcgcgcctccaacgggcgcctcgtggtcgacttcatcgcggacacgctcggcctcccgttcgtgcgaccgtatctgagcggacggagcgcggaggacttcgcgggcggggccaacttcgccgtgggcggcgccacggcgctcagcccggacttcttccgtgcaagggggttccacaacatgggaaaccgagtggacctcgacatggagatgaagtggttccgcggcctgctcgacctactctgccccggcaacctcgccggttgctcggatatgatgaaccaatctctcttcttagttggagaaatcgggggcaatgactacaacggacctcttctttctggagttcccttcgaggaaattcgcgccatcactccgagtgttgttgcgaaaatttcttctacaatcagcgaattgattcagctaggagccaagactcttgtggttccaggaaaccttcctattggatgtgtcccaaaatatctgatgatattcaagagcaataagaaagaggattatgatccacagacaggttgtcttagatggatgaacgagttctcacagtaccacaacaagcttcttgtggagcagctcaagaagcttcgcaggctccatcctggagtaaccatcatctatgctgattactatggagctgctatggaaatattcctttcccctgaacgatatgggatcgaatatcccctagtggcttgctgtggtgcagaaggaccctacggtgtgtccccaactacaagctgtggattgggagaatataagctgtgcgataatccagaaaggtatggatcatgggatggcctccatccaacagaatctgcatacaaggtcatcgctatgggcctgctactaggttcctatacaagaccgccaatcgcttccaccaccacttcatgtccacagcttatggagctcggctcttctgctgaatacaaacgcctctacgacctgtaataatttatgtaattatattttattgtatgtactccctcgcccacttcaataagtcccattttgcgagtacatgtactttgtaacttttaactaataacttatcaaactagctactatataaaaaaaaaaaaaaaaaaaaaaaaaaaaaaaaaaaaaaa

SEQ ID NO: 107119 - DNA, 592 bp, Zea mays
  unsure (1)..(592): unsure at all n locations
  Clone ID: MRT4577_29193C.1
aaatttcacgggatcatgtttgctgacagttggtgagagcaactcctctttctttgaacaatcactattccctgatgatggttctttagatgccagagagtgtgataactcaggtggtgtangagacagnaaccagnaaaacgatgtacaaacttttgcagaacccaaagttgagttaggattctcagcaactgtgtgcctcggattttgtgcttccgatttcagatgttcatgggatactgaaccatattttaaattggatgaatctttttggacgattgaaagaactgcagcatcccctaggccttgcttattgctttcatggtcatcactcactaaatcgacacagtgagctgccttgttttcctgagaactaggctcagttttaatagtctgtggttttggctgaccaataagtaaatctggtacaccagcaacaacctgcagatttgaagcttgatttggttgctttggaaggccctgtatgtcttgcactttgatgggacctgaacttgttatgtcaggccttgagcacacaatgtgatcctcttctggctgttgcttatacattgtaacctctaccccaacaaac

SEQ ID NO: 107120 - DNA, 329 bp, Zea mays
  Clone ID: MRT4577_29194C.1
aagacgacttgcttcattgattcttgaagagatcgagcttcttttgcaccacatggtcgagggtgatttgcaactgaggatcaagctgcgagttcggctcaagctgcaagtgcggtaagaagtaccctgacctggacgagacgatcaccgtcgtgcaggccagcgtcgtactacgcgtgagcccggaaaagaaggccgcgcccgtagtactcgcggactgggcggagaccggtgaagccgaacactgctgtaactgacgtggcaactgcaagttcgacacctgcaactgcttatcacattgatcgacgaccatggatatgattattatc

SEQ ID NO: 107121 - DNA, 811 bp, Zea mays
  Clone ID: MRT4577_29195C.1
ttcgggagataaacagttgcaaccacccatatacatcttccattccaacacaggcttccacaatagagtcagagctcacagctcagacctagagagagagaaagagatttgcaatggaagagttcgcattccccagcttcccactcgagcaatgcaacgccgacttctccgcctccgcgtcgccgtggctgctcgttcccggcggcgttgttggcacggcggcagtgcacgagcacgaccaccggaggagcgtctcggccgtggagcagcaagccgcgggcggcgaccagcagcagctgggtggccgccacggctcggcgaggttcgcggtggaggacaagatggacatgctgtgggaggacttcaacgaggagctcgcacgggccgcgcagccctgcccgctcaccagggggacgccgtcgtgggcggccgcgagggagccctggctcgacggcgccttggagacgcgcaagcacgccgtcgtccgccggcggaggatgggcctcctcatgatgctcaggctgctcaagaagctcttcctggcgcacaagtccggcgccgccccgtcgcggaaggcgccgcccatctgacgcagctgaaaaaaatcgagccttttgatgagtgcatgatgatgtgtcaggtgtatatacggaggtgatcaatacacgcatgcttctctcgtctcggtagcacaggaccaagaacttgctgtttcatgttctatttctcttacaagtttctcttgtgtacctgagtcactgtcgagagtctggttatgcccttgggttttgcttaaaacttgacgagctgc

SEQ ID NO: 107122 - DNA, 536 bp, Zea mays
  unsure (1)..(536): unsure at all n locations
  Clone ID: MRT4577_29196C.1
tgacaccgtgtctagccagccggtgggcttttttagcccacctgcatggcggtgtcagcgccggtcactctctgcccctcggattctcgctccctctcttccgcgctcgtttcttcccgatccaacaagccttcttcacttgatgctgttcggtcacggcggttgaatttgggagattcagctatgccaacgcagatctccacaaggcagtctcttcggtttgctttaccttcgaacaatgcacgtccaatatcgactgcagcaagaatggcatgttttgctaagaagcaacatattgctgccgtgcccttatgtactttggaggccaaaagagtggccaaatcttacggggctgaatcagtgggtgtgtttgtggatgatgatagtagtactatcttgacagcatctgattcatgcaacctcgatcttatccagcttcatggagatagctnccgagaactacttcctctgctttggaagaacaacaggattatatatgtgctaaatgcttgatgaggatggtaaactatcaatgc

SEQ ID NO: 107123 - DNA, 375 bp, Zea mays
  Clone ID: MRT4577_29197C.1
gagacccaaaaccatgggaaacccaataactttaaaaaaaaaaacaacaggcccgggggtttaaaaaaaaaggggtatggaaaaaaacggggcccccccaaaaaaaaacccaaaccaagggggttaaaaaaaacccagctccgaacaaaatttttggaaaagaccagaaggggaaaacggggatcccaacaaaaacttgacaagcggagcccctgccgttgcccaaactaaaaaacggaaccctaaaacttggggaaagccacaaaggcgcaaccctggaccaacccaatggggggcccctggggaaggggggccccaattaaaggggggagggacacaaaaaccgcaacaattggcaaaaagaaaggcaacttt

SEQ ID NO: 107124 - DNA, 151 bp, Zea mays
  Clone ID: MRT4577_29198C.1
ctgatgaaggcatgttcacatttcatcagatgttcagcaccaaagcgctctgcaaatgcgatcaagtaacccaagttgtcaatgtcaaacccagcatatacagagcgctttggtgctgcacgtctgatgaaggtatgttcacatttcatcg

SEQ ID NO: 107125 - DNA, 414 bp, Zea mays
  Clone ID: MRT4577_29199C.1
ttaacgtcttcgaactctacctgcctaactttcgtttctgtccgcgacagctcgcttatagcttggtactttaccactgtgagccatgtcaacccccacgactccaacaaggtctactctgcccatctcaaacactacgtcatgatcgatcttaccaaatctgttcacattgacaacactgccatgttcaacgaactcactccttatgactatgtctgctactacatcatggctgcatctgtatcaaggaagatctacttgacacatgccattcgtgttgatcgcttccagaatactaatggtgcccatcacatgaattgctcacgctcacctcacttctgcaagaacatttgctccatctcacgcaacatccttcatcatctgcaggacatgaacatcattgatgtcgatccc

SEQ ID NO: 107126 - DNA, 597 bp, Zea mays
  Clone ID: MRT4577_2919C.1
agattacaaatccccgaagactgtgactggcgtgggtatgtatctaagaaaccactggcgtttgttctaccggtccagagggcgatccctctatctccatccatctcgtggacgactgagtcaccgttgacgtctgtgcgagtcgcccagacgcttcatgacgacccacagcaggtgttgtcggcgaattcgatggcgacgatgtcccgcccgtactgactaatggacatgatggagttaccaggagaagcatcgcccctgacggccatgatgcaatagccccgcgctactgcacttcctccgcgtcgtatacgaggaattgccagacggtcgatgctaactcatcacctgtatttttagtattacctactgaaggtgattacctcctattgctcttgcgcgtataacctaatgatttgttggtggcctttatagtacctctttcatttctttttatagatgttagcgacgatggattgaatacaacaatgctccccaatacaggactacgaccactatgatctagattataaattgcttcttcttcttcttacgctagctactaaggattagaacaacagtgacaaggacaggatg

SEQ ID NO: 107127 - DNA, 284 bp, Zea mays
  Clone ID: MRT4577_291C.1
atttttatgtcaaaaaagtagttcttaactgcatctgttctgtgctttaactgttgatttcataactattacacaaccctctatctctttctatctgtcaacaaaaaaaaaattcagtaatatttctatatcaatgtctcctttgttactaacaatttctcttcaaaacgatttatgtgtttcatccatagtttacaaataattaccaaaattctatccaaaaagagcctaaatttttattcttgttacgacttaatacttagacaaaatcagcttatttgaga

SEQ ID NO: 107128 - DNA, 421 bp, Zea mays
  Clone ID: MRT4577_29200C.1
gggccaccccatgattgggcctaaaaggaaacccaacaattccggactccaaaaacaacagcccgactggtttccgggctttaagttttatcgcctccccccgattttgggttccaaaaacagatccccatgctggggaggactgcgggccccgcccgggaaaacaatggaatttttccccaccccgggcgggggtaaacataagggtgatcccgggcccgggtgtaaattttagcaaaagcccaaattggggcccaaaaaaaggaggggggcctagccctggaccccagggggggggtttccccgccgatataattgggaaattggcccacctaaataaccccgggatatccaactaaatccgggccaagggtttcacgcccccctaaaaattggggggggattcatttgttaaaaagcc

SEQ ID NO: 107129 - DNA, 543 bp, Zea mays
  Clone ID: MRT4577_29201C.1
tttctttttttttttttttttttacttttttttttttttttttcggcgaaaagcgtcttatgtctctattattactactgtgaaaatcctaccttaacataccactttaattaaagcaattacatgtgcaatttccgatcttcatgggtgcccaaagcttataaatcttaacgcagaaaaaaaggacctttttttcaaggcccatttacaaatgattgaatctcccatgataaaattggcctggtcttggggcctcccccaggaccctttggtttttccaaaaattgcttttcaggttctttaaaaagttccagcccccccaatttaatgaaacttgggatttacccttacagttgatttggcaggcccaaggggttaaaacgttggcaagggaaattcccccggacaatgctagctttttgaaaaacttccattccccaaaaaacgggtagggcaatcccaaggctttaatttttttcgaaaccaaaacccaagtttttagatggaaccccttttgcaaaaaatttgtggggaacccccaaa

SEQ ID NO: 107130 - DNA, 370 bp, Zea mays
  unsure (1)..(370): unsure at all n locations
  Clone ID: MRT4577_29202C.1
nnnnnnnnnttgttggttttttttttttttgtttgcttaanaatannnnnttttttttttttttttttcttttttaagaaaaaaaccccccaaccataatctgggaacctagccaaaacttttattcaaccttcccccccccctggttcccccccgaaattcccacccgcgccctcgaggcgcccccattttccctataagaagccctattaaaacctggcgtaatcatagcccaaaccgttccccgggaaaaaatgttttccccccacaattccacccaacatacaaccccgaaacctaaaatgtaaaccccgggggccccaaagaggggcccacccccccttaatttccgtgccccccccccccccct

SEQ ID NO: 107131 - DNA, 191 bp, Zea mays
  Clone ID: MRT4577_29203C.1
cgtgtggggttttaacggggcgggggggtgtaaaccattcccatctgactttacatggtaatacattatttaacagggcacaattgtcctttaaaggccattcaaaacaagacggggcgggtaaaccccgcaacaccggttgtggggggggacatccaccttttcagccggctattgcgctcccaaaaacc

SEQ ID NO: 107132 - DNA, 187 bp, Zea mays
  Clone ID: MRT4577_29204C.1
atcattcggttctctgtgtggggctactttagccagtgcacgggcctgctggtgcagctggaggactcgcacctgctgcagatgaggtccagcgggtgggcctgtcggagcgtgttttgggagaccaccctggagtcccgccttggcgactaccgcgccgttgacggcgttaaaattgttcacgccg

SEQ ID NO: 107133 - DNA, 753 bp, Zea mays
  Clone ID: MRT4577_29205C.1
ctccgtatgtcccatctcctcagcactgccaagccccagaacccaatctcccccgccccctgttagggttcgtgccgcctccatggcaggcgccggcatccacccgtttcaccagcagtggccgccccaagcggcggtgcccgcgcctcccgccgtcccaccgcctccccccgtaccaggcgcacccgatgccgccgcccgccccggctctgacgaggtccgcaccatcttcatcacggggctccccgtggacgtcaaggagcgggagctgcataacctgctgcgctggcttccgggattcgaggcttcccagatcaacttcaagggcgaccagcccatggggttcgcactcttctcctacgcgcaccacgccatcgccgcaaaggccgcgctgcaggatctggtcttcgatgccgagaccaagtcggcgctgcacatcgagatggccaagaagaacctattcatcaaaagaggtgtgggaactgatgcaaatgctatggaccaaagtaaacgcttgcgaactggtggagactatactcattctgcgtatgctcctcctccattccacccacccccaccagctgtttccatgtggggaactgcaggttatatggcagctcctcctccttataatccttatgctggctatcctgtgccgacggtaccaatgacttcaccttctcctgtgccaggcccaacagcatatgctcctgtgcagaacatgaaagataaccctccctgcaataccctttt

SEQ ID NO: 107134 - DNA, 187 bp, Zea mays
  Clone ID: MRT4577_29206C.1
gtcgactcctgcgtcctagtcgactccgaagaggtgatgagagcacgaatcggcggatgtggactccaccggcttgtctcctttgggccacacgttaggtggccgtatactgttccaggtttgtttgatttattaactctcattttctttatattgttatcatctcactttctatattattttttat

SEQ ID NO: 107135 - DNA, 209 bp, Zea mays
  Clone ID: MRT4577_29207C.1
acatctattctttttttaatagttgttttttttcagggacaactctcattgtgggaggaggacaaaaacaaattttttcgctaataacacacaaacatctcttgttattacaatatatttccctgcctacccaaacttaagccgaagaatattactttttcaacaacagagaggagccggcacgtggggccccctgccgcatacaaagg

SEQ ID NO: 107136 - DNA, 1853 bp, Zea mays
  Clone ID: MRT4577_29208C.1
ggggcccgtatgacgtgtctatctagttagttctcggtagcctctctctccctgcctccccgctgttgtggttgcggtgcttctgctgatctgctccgtcttctcctcccggcaatggcctgcttggaggcgcccccgcgcgtcgagctctgcccggtctcgtgccagccccgcggcctgcagcttccgccatggcggctcagcctgtcgaggtcctcctcttcatgcagatcttgcacccttgtgtctcgccagcttccaatttgcaatgcacagtcatatgctgatgatttatgggtggctgcgcctcatagccctgcatctgttcgctcaaggttgcttgcagcggaaagagaggaagcaaaggctgtcctgtccctgtttctgaggcagaaaggtctgcgaagcacgctggccgcacggatcgtcaacaaatcggatggcttcatcgagcacctggtctcgaagctccagattgcttacagatctcgatatgctgaaggaagggagctgagcacgcctgagatcagagacgctctccttccctatctcgaagctctttccaaagaacatggcgacagtttggtcgaggtggtggagaatttccccgacccttttgctatggaaagggaagccttatcttcatcaatggcgtttacacccacgagctcaaacaagcagaaggcgattgctcgaataagcacggcagcctcaggcgccgccctccctgagctggtcccctacctactagaccttggcatggaccacgaggagataaaggacatcgtgcgcaagttcccagcgttcgcgtactacagcgtggatcgcaagatcaagcccctggtggagctcctgcttgagcttggggtgaaaaattccagcataccaggaatcatcaagaagcggccccagctgtgcgggatcagcatgtcagacaatctcaagccgatgatggcttatctggagagcatcggcgtcgacaaggctcagtggagcaaggtgatcacccgcttcccggcgctcctcacgtacagccggaacaaggtgcagacgaccgtgagcttcctcgccgagctaggtgtctccgagaagagcatcggcaagatcctgacgcggtgcccccacatcatgagctacagcgtggacgacaacctcaggccgaccgccgcctacttccggtcgatcggcgcggacgccgcgtcccttatccagaagagcccgcaggccttcggtctgaacgtcgaggcgaagctgaggccgaccacggacttcttcctggcgagggggttcagcgtcgaggaggtcggcgtcatggcgaacaggttcgggatcgttcacacgctgagcctggaggagaacctgctccccaagtacgagttcttcctggcgatggagtacccgaggtgcgagctcgtcaagttcccgcagtactttgggtacagcctggaccggcggataaagccacggtacgcgaggatgactgggtgtggggtgaggttgattttgaaccagatgctttcggtctcggatgccaggtttgagaagattctagagaagaagacggctaggctttgagaagacagcagtttcagattaggcagtgttgtagttcatttgagaagaactgtcactgataaaaccatcagttttcagagcacgtagcttattatcgtggccttgacggacgtgcaacgtccagaggcgaactgtttgatgtgctagtctgtagttagcttctgcgaggtattgaaatgcaactttggcaatcagaaatgccagttgcagtgggcgagattgcttggtgctcactcggcgacaatctttgttcgaaaaaaaaaaaaaaaaaagcggcc

SEQ ID NO: 107137 - DNA, 830 bp, Zea mays
  Clone ID: MRT4577_29209C.1
ggtcgtcccgatttttcccctgtatcgagcgcttatatctcctgctcactcggcggccagtccatgaccgagctcgtcctgcgcgcgtccctcagcccctgcgcccgtcttctcccttgccgcgtctctctggtgctctgcgctggccgtggatcggatcttcgcgggcatctacctcgctgcttgcccagctctttgctcgccggcgtcctctgttcttccaggttgccgaggcccctcctagtcgcgtgcctggctcgccccagtgtccctgtccctgctcgccgttccgagcttggcccctgggctctttccccagccagcgcgttcctgctctagttccggtgccgcggagctcccgcacacgcgagtacctctagtggccgcgcgcccttccagctcgccctcgctcctctctgctcgctgcgtccggccagaactccctgcgcgcgcggatctctcttccctggcttcttcctgcgctcgccgagcggctctctacgtcacgcagcttccccaagctccctggtgcttgctcctctcgagtgccgagctcctccctgaagctttccccccatggcgcccagccgtccatcttctcggccgtgcttgccctggccgcggcgagccccctcccgcccaagctccatggctggccgcgcccagcttctgctccagctcggttccgagctcctttctgtcttacgcgtccctgtttttccctctccctacgcgtgctacttcggcttcagttcctacgcgcgctgctcctcttcttttgcgcgccctagcttctctcaccgcacccctggtcccggcccagcttgacg

SEQ ID NO: 107138 - DNA, 178 bp, Zea mays
  Clone ID: MRT4577_2920C.1
tcgatctttttacagagacaaaggagaacctgaggaattggcactgaaccccacccctggcacccattcgacaacatggaacccagccacttcatgaggaggatgcgcaaaacaaggacaaggggagacacgcgtcaacaacaggctacgagcacaaaactgcaaaaaccaggagaac

SEQ ID NO: 107139 - DNA, 413 bp, Zea mays
  Clone ID: MRT4577_29210C.1
aatggattcagcacgccgcccgtagggaagggagcttgcaggccgcccgccgcggtgcgtcgggcggtctgactgagccaatggcaccgtcccttggcgcgcgaactccctaacgtgggtcggggcgggcagcaagcacacgcgccggtagctagcttggattctgacttacaggcattcatacataatccgacacacggtatcttcgagccactggctatccaaccaagcgcgacgaccaattgagtgaatgaacggtttctctcgaactaggatgaattactatcgccgcgcagtcatcaggagggtcaaactaacctgactaacgacggactaaacccaactcacgttatctatgggtggacgaacaatccatcactgggtgaattctgactcacattgataggaacagc

SEQ ID NO: 107140 - DNA, 469 bp, Zea mays
  Clone ID: MRT4577_29211C.1
ataacatacccgccgcgcgcgtcctgccgccgccgcaagcagcatcagacggccatggaaatcaatgctgcgtaagcaggatgtcgcagacaagaagaccagcgatcagcgcctgatgcggaagatgtatagatcaatctccatcgccggctctatcgcttccttgggcggaagagattgagcgaattccgcagacgctgctcctagagagactctgagtgagctgcagctatcgtacggcactctgaaggagctggcactcttggaccatgtgggcttttcgtggtaggaacgacgagatggtgatcaccggggacagctgacaggagcatccgaggaaagaagggcactgagggcagtactatcaagaacaccggcatgtccatgattattagcgtctacgatgagccagagagctccagcgttatgccaacatggtggtgcgagaggctcgtggattacctgatcg

SEQ ID NO: 107141 - DNA, 594 bp, Zea mays
  Clone ID: MRT4577_29212C.1
cacacgaccggtacgcgttctcgggcccaacaccctattatgcgtcggacgacctttttttttttttttggagttagaatgctatgaattccaaaccagagaagattcaaataaaacagagactaaaaaggctgttcaaacagtaataattcttgcacatgaacactaaaccagaacgataacaggaaacaaagatacagtcagtactcagtagtttgagggcacctacggaaagcaagtaatactacagagggtagacgttccagtgcttaatgatgaaacatcatcagtacaagcaaacgtgtttttcatcatacaccgtatcactttcacaagtggctgcagtcattccgcagcataaggagattgacttcgagaagcagcatcaactttgcgcagaggagcagggctaccaggagatggggacctctcattgctacgcctttcaggagacatctccttagaaggagaggccttttgcaaagcagggcttcttgggctgaggctgcgacgaggagattgagacctctcattgctacgcttatcaggagaaacttctctagccgagaggtttttgtggggaggaactttagg

SEQ ID NO: 107142 - DNA, 348 bp, Zea mays
  Clone ID: MRT4577_29213C.1
cactgtccgtccggtgtctacgattatactagacatgctcagaactcttctaggaataaggaattctacatgctggccatgggcatgcataactattgcagattcatgtacatcttacacaactacattaaccactcgagctatggatcaaattcatgcgttatctctacccgtgtgaatgctacattaactcaacatttgtgctatgtgtaataatgttgtgacatgtcatattctacggctgtactacaatcaatagatgtgatggctgcccaagtctactgatctggcagtattgtgattttaatagccgcccgtactatgaatccttgattacagacttaacca

SEQ ID NO: 107143 - DNA, 318 bp, Zea mays
  Clone ID: MRT4577_29214C.1
gcgcaccgactgacgaaacgtgcgctgctcatgccacgattgttgaacccggcccactggatctggacgtggtcagcgtatgcattgatattgacagggcgcactgctaacagacctggaggatgcagtacaccagcacggtcactgagattagcaggctaggggcataggagtgacacagtgtgaattcaagggatacactgactggcttcgtagacgaccctgagaacggtgacctggtgacggtgaggtacgacaatgctcggttcgggggaccgagcatggtctagagcaccgaccggacgatggcagaactga

SEQ ID NO: 107144 - DNA, 322 bp, Zea mays
  Clone ID: MRT4577_29215C.1
ctcctgttatgtagtaaagatgtgacattccttccacaaaattattaaaataatatggagatggtataaattatttaataacaaattataataattatcaccataaataaataaacaccttgctctcttttaatattaaaatgctgtcgtgcgtctcttatgtccctaattttcttccccttccttgctccttcttttcttttttttatggaccctttatttcatttcacttgccgtcgttctaaactttccagactgtgaaaccccttacgtttctccccttctttcctttgtcatattttcccctttcgccactttgctt

SEQ ID NO: 107145 - DNA, 503 bp, Zea mays
  unsure (1)..(503): unsure at all n locations
  Clone ID: MRT4577_29216C.1
naaaaaaaaaaaaaaaaaaaaaaaaaaaaaaaaaaaaaaaaaaaaaaaaaaaaaaaaaaaaaaaaaaaaaaaaaaaaaaaaaaaaaaaaaaaaaaaaaaaaaaaaaaaaaaaaaaaaagggggggccccttttaaggaaaccaaagctttacttcccggggcctggccaaggtattatttttttttttggggggccaaaaatcaatttcctgggccgtgttttaaaaagggggggatgggaaaaacccgggggtacccaaattaaatgggttgggaacaaatccccttttcccaagggggggaaaaagaaaaggggcccgccccgttcccctttccaaaaatttacccaccctaaaggggaaagggaccccccccttaaccggcccattaaccggggggggggggggggttccccccagggggccccttacatttgccgcccccctagcccccgttccttgggtttttttccttccttttctgccccgggggcccggttttcc

SEQ ID NO: 107146 - DNA, 356 bp, Zea mays
  Clone ID: MRT4577_29217C.1
cccacgcgtccggtgaacgatatggcctccacgataccgtattctcccaaagtctacgcgtacgacagcttgcgagctgaacttggtgattgaccatataagattggatctctgaccgacaagccactatgatgaattgaacatatcttctaccagacaaaatcctggaaagctgttgattaccatgtttcattacgctgtaactaccttcatgtcatttcctggatcttgcgaatcatggattttccctacaataatgcaaccggttgcactggcaactattcctgaaacaaaaagcttaaagaggattcaaccgaacaaatcttgctggcatgggagtcatccgtttatgctac

SEQ ID NO: 107147 - DNA, 550 bp, Zea mays
  Clone ID: MRT4577_29218C.1
cgaaccccgcgtcgcccttcgctcccaacccccggcgccatgccgcccgcctcccccctcctcttcgtcttcctcgccgccgccatcgtcgcctgcgccaccgcagcgacgtcgacgtcgacgtcgtcccaggcggacgcgctccaggccttcagggccgccctcaccgtcccgcccgaggccgctcccttcttcgccacgtggagcgccaccgcggcatccccctgcggcttcacgggcgtcaactgcaccggcggcaacgtcacggcgctctccctgccggcactcaagctgtccgccgcgacggtcccgttcgccgccctctgcgccgccctgccttccctcgccgcgctgtccctgccggagaactccctcgcgggcgccatcgacggcgtcgtcaagtgcaccgcgctccaggagctcaacctcgcgttcaacggcttcacgggcgccgtgccggacctctcgccgctggccgggctgcgcagtctcaacgtctcgttcaactgcttcgacggcgcgttcccgtggcgctcgctcgatacacgcc

SEQ ID NO: 107148 - DNA, 426 bp, Zea mays
  Clone ID: MRT4577_29219C.1
tcttttaaagtccaaccaacccgtccggggcttttaatcttgtccgagagtacgcgaggtcgcctccagattgatattgaccaggggtttctcccaccaactgaggtttcaatggcatttgcagggaccgtgctacagcttggcctttctggggaaaaggaatctcatgtgctgaatccccgggctccggggagggatcttgacatggactgctacgtatgactcctactaggaggcctcggtcgagggcgactcctactaccatgacgaggactactagtatgcccagagcgactacaacgagaactagctcgagctcctcaagtacggcaggcaccgggtgcgcaaccaggactgcacctaccgctgcgccttctgcctcagcaagaagaagcagggttacaagatcaaggacctgctacagca

SEQ ID NO: 107149 - DNA, 759 bp, Zea mays
  Clone ID: MRT4577_2921C.1
aaccaaaccaaacccttacaccaactcaccagaaacacaaggccaggcaccaacaatggcaagacatggcccccaaatccatgaccaaccactccaggaagaggactacatagacatggagctgagctcacctgcagctgcaaaggtggtcaccaatacagcaagcttgctttgctacaccacagccatggcagcctccccccagcagtcgagggagtttgagttccacatgtcagctcccgttgaccactgggagcccatagcatcgccagcagatgagctcttctacaagggcaagctgctaccgctccaccttccaccacgcatccaaatggttgaaaggctcctcgagatcgcggctgacaagggcctcctctccgcgagcactgccccggcgacaccataccagtcgtgccacgtttcaccagcaaattcatgttatgcaagtggtgagctcaatgcagagcagtacttcagcgagtgcgcatccgccagtattgctgctgctgaggtggaagcagcatgcgaaaagaagccatggtccaagaagctcaagttcatcaagaatctcaaccttggtctcaagctcaaggcatcaaaggcttacctcaagacaatatttgccactaaagcaggggatccagatgacaagggtggtgcaccaagagcaaatgagttctccaccgcccaggttaagagttggaggaagaacccatttggccagatcagaagcaacaggtacacaacctcgcccatcag

SEQ ID NO: 107150 - DNA, 150 bp, Zea mays
  Clone ID: MRT4577_29220C.1
ggccgcttttttttttttttttttggggccgtggcgggggcctttaacaaggtagcagggagcacacttgaaccgaacacggcacacatgactacatcgagcagagggctcaagccagcacgcgcggcagaagggtaatccctacccact

SEQ ID NO: 107151 - DNA, 683 bp, Zea mays
  Clone ID: MRT4577_29221C.1
ccactccaggaagaagccgctcgtgtcggcgaggttcagcaggaaggcgaccaaaccaagccccgaaggtagcagggctctgcgggtggcgcggccgcggaaggaggagacgctggagagcacgtcccacgccttcgcggagggccgggggccgacgctagctcgacgcctcaagaagtccgacacctgggacacccgtcccgggcgccgcccgtccggcggtggcagcagcggggaggtcgatccagcggccgtggcaccggcgggggcgatgcggaaggccgagactttcaacgacggtggcgccggaaggagcaggcctgctcccgctgcgctggtgcggcgggagccgtcgctggggcaggacgagctgaaccgccgcgtggaggcgttcatccacaagttcaacatggagatgcggctgcagcggcaggagtcgctcaagcgctacaacgacatgattggcaggggcaggggcagccgttagtgggaatgggaagtcttgctgcaaatagctgcggctcgcaagaaggattctgctttttttgttccgtgatatttctcgattttggttcttggtctctgtaagatatggttttgtgtaaatggttttatcaagtaacgaggacaagttcgatcgtactaaaaaaaaaaaaaaaaaaaaaaggcggccgctcctaaag

SEQ ID NO: 107152 - DNA, 311 bp, Zea mays
  Clone ID: MRT4577_29222C.1
caacaaattgattttgctaagatccatgctattgatgctacagttagcagttcacaaggtcctgtgattagaaatgacaatcaagttcataaggcatcaactgtacatcggtcaagtgagagacaaggcatgaatggtcggcaaattacacaagtttccaatacagaacgagatgatgaagcaagaagtatttttcctgaatcctctcaggatacacatcataacatggatttgatccggcagcaggcagacaccagtcggatctctgatgacaaaaatatcagcggtttgctcgtggagagcaccaaaaa

SEQ ID NO: 107153 - DNA, 351 bp, Zea mays
  unsure (1)..(351): unsure at all n locations
  Clone ID: MRT4577_29223C.1
nnaattcgccctttaccgaggcggccggccgcgacgggactcttgagcacgcgctgattgggaacggtaaccaaactgtgaatacacgctccttcagataactccggaagacacgctctatgctaatggaactctgatgagcactgcatagcccacgattcatggtcacaacgcctcgtgatgcctgccgccttatcatcacccggatgatctctggccccggatgacacccaccacggacactgattgtggcacatacagtgcttactctggctcattctttagagcattcttcgcgattctctggaaggcggttttcacgttcgttccgttcttagcacactgcttaaa

SEQ ID NO: 107154 - DNA, 486 bp, Zea mays
  Clone ID: MRT4577_29224C.1
atggtgcgcctgctggagccgccgcggacataattggggggaccaacgcgtccggcaagaacacttgttttatacggacggcgggatcatggctctctggcgggccgccataaccgaatgagggatgaagctgatcatctgcaggtagttcaagctgatcctgaccaccgtgagagaaagccttaagaatgcacaaaggcagtttaccaagactcaggacgactagaaatctttgcatagcgtggggcacataatagaagaggttctacgacctcttgataatgaacgctctattgggaacagcagcactggcccaagatatacggacggatggccaactaaagttcacacaaacagactgacatcctgaactagaaccagacttgacatgacaaccttgacgataatgtgcacttttacacgatagatgggatcaccgatctataacacgcttgatggaaatgcagcaaatgttacttactctgc

SEQ ID NO: 107155 - DNA, 433 bp, Zea mays
  Clone ID: MRT4577_29225C.1
cgcctctttgcctgctccaacaagattggacgttttgtgatcgaagaggttcctggtgagctgatgcaggaagacctggcaacggatgacgtcatgcttctggacacctgggaccaggtctttgtctgggttggaaaggattctcaagaagaagataagacagaagccttgacttctgctaagcggtacatcgagacggacccagccaatcgggatcggcggacgcccatcaccgtggtgaagcaaggctttaagcctccctcctttgtgggctggttccttggctgggatgatgattactggtctgtggaccccttggacagggccatggctgagctggctgcctgaggaggggcagggcccacccatgtcaccggtcagtgccttttggaactggccttccctcaaagaggccttagagcgagcagagcag

SEQ ID NO: 107156 - DNA, 326 bp, Zea mays
  unsure (1)..(326): unsure at all n locations
  Clone ID: MRT4577_29226C.1
atcgcctcctatccttcgcccgccaacctcggcgggtcatggcgtgtttcgcgcggtggctgtggcaggaggaggagcagcagcagcgcgccatggacccgtgcccgttcgtgcgggtgctggtgggcaacctcgcgctcagaatgccggtggcgccgcccgcctccggggccggcgcgggcgtccacccgtccacgtcggcgtgctactgcacgattcggctcgggaagatgccggttcagagcgtcncggcgccgctcgtggtcactgacggcggcgagcagacgccggcgtccggggcactcgccgccgcgttccacctgtcg

SEQ ID NO: 107157 - DNA, 253 bp, Zea mays
  Clone ID: MRT4577_29227C.1
tgagcgttcataccaatagcggaatgtactacagaacacaaagaaaaccgacagacaccatggggggggcgtggctctgccatcttctaccgcctctggaatgcagatccacctcccctgatccaagctgcaggtgttgtacgcaactaccgccggcctgacaactatcatcggcgccgcatgtctgatctcctactcagatgacatgacgcatgcatattgcaccccccttgcagcttgcccctactaccac

SEQ ID NO: 107158 - DNA, 592 bp, Zea mays
  Clone ID: MRT4577_29228C.1
tgacgagcaatatacatctggatgcataatattaatctataacatcaagcataaaagaaacattagatgatactacacaagataactattagatcttggcaaccacaacacttagtaccagaactataggagtaaggcaatgcactgcactaccatgacgtgatctactagagaccacatcagcgcaatcacccattattaggggggtagtgtaaacaaagaaatgagtgacacaatttgaccccttgtctacttgatggccaatatgttaggaactttgatttttcgaactaagtctaatgctaaaaatcagggaagtttttccacatttagttgatggccttctgcaatatggagatggcaccattttgtttatggatcatgatgtgctacaagctaaaggccttgttggtcacctgttcaaattccgatagaggaccaaaacatggcaacataattgaagtatttagtcttctttcctttaattcgctctttaatgagagaaagattaaatggagaagattgaaataatcattaataaaaaaaacctcacaagtgaaagacatttgggatagttcattataggaatatc

SEQ ID NO: 107159 - DNA, 302 bp, Zea mays
  Clone ID: MRT4577_29229C.1
ctcatgaccactagaatgtactcagcactcaccacagcgccatccattgacgagcgtctgaggcttaccaatcagggcgcacggtacaagctctcacacagcatcatcaccgacaagctacacacttcagaccatacactacctgtcatcgaacgcttttactattggaactcaaactgaccttctcatacttaagcttcacttattatcacaacctgccaatcacagctggacaccatcactcgacattttacaacccatcctgaatatgatctccctgaagtcaacgctttggcaatcac

SEQ ID NO: 107160 - DNA, 377 bp, Zea mays
  unsure (1)..(377): unsure at all n locations
  Clone ID: MRT4577_2922C.1
cattgggaccctcgaggccggccggggcaactcgcagtcgcagcgaccgtccgctcgctcccgcctttcgtttgccccgccgcctctatcctttcctcgactcctccgcacccaccacctgttcgacccagcaccggagagtccccacccacccaatggcgaccgccaccgcggccgtagcgccgccgtccacctccacctcctcggtcctcctgcgccgccgcctcccttccccggcgcccgcgtccagcgtccgccgcctntcccccgagctccccgagcccgcccccgccgcgcctccccgctcctccagggggcgactcaccaggcgaggtggcctaccgacgacgaaggcggcacgaggaggtcgtgggcca

SEQ ID NO: 107161 - DNA, 336 bp, Zea mays
  Clone ID: MRT4577_29230C.1
cccacgcgtccgccagaacccagcgcatcatcgcagcagcggcggcaactcgtcggagcaagcaaagcaaagcaaagcaaagctagcaccttccttctccttcgcacgacaagctcgatcgaccgacatggccgagaggacgaacgcgatggcggcgccacggccgctcctgcgccggatgctctcgttccgggagccgctcctggtcatcccgtacttgctcagcttcctgggcgccgcggcctcggcgctggcgcgcagccactcgtcgctgctgcactcgctcgccagggcgctgttcccgcccgcgcctgccgacgacaacgccaagtacgc

SEQ ID NO: 107162 - DNA, 1044 bp, Zea mays
  Clone ID: MRT4577_29231C.1
ggtacccccgtggccgggcttacccctctctctctctcttctcctccctctcttccttttctcttttctttttctcattgcgacgcctgcctgggcgaccgtcgccgctctacaccaggtgcccaggtcttcgccggcgccgagcagccaccagccgctgtgcaacaaatcacgtctgtcgagggcatggatccctacatgacaaggctcggcgccggagccactcaccagctttccagggctgaagcaatgcctgaccgaaggtctaggttttggcagacagatgtgcagcttgcgcctcggatagacatcatctgccctctgcctcgccgcccttctcgcctaccggttctcaatagccccaagctcaatggggcactcccactgtatagagcagaccccacttttgatatcgttgacctcatccttagcaagaatgaccctgatgtggatactgattcaagcagccaggcgggctttttctgtggctcgcctcctgcacgcactgacaaccctgttatcaatgacccacagtttggaaagaaaacaccatccttttctcctttatttggtggaagctcttccgggaaaatgacagctggaagagtcgaagtaggttctccgtcgtcttgcggggcgagcagcccgaaagtaaggatcgaaggttttgcttgcgggaacaaagagccccctcactgttttgcctgatgatccggatcattgaccctacctaaccctgttttgctacccccgcaacatgtacatttcccctgctagtttctttggttaaaaaacctggtagtttctttgagtcggagtcgagtaagagcgcttgttgttgccccttgtgatgaccgtgggtggcttttggtgcaagggagcagagcacagctctcggatgtaaatagggtggcgtatgtagtgctagatgtttgtatgtgtctgctaaaatgtagtagtaaggttgggtgggtccatgtgtcggcgtctgtaaatagcgtcatgcatttggatgtaaattgaaatgcgtcttcaattattgcc

SEQ ID NO: 107163 - DNA, 459 bp, Zea mays
  Clone ID: MRT4577_29232C.1
atggcgccgccatggggcatgccgcggggcatggcggatgctcgtcgggtctccccaggtggtttgtgtgagcggtggtgggcggaattgcgcttgattgctcgtcggtcatcatggaacgctgtggtgccgctacgatgcgtgattagggacactgccctctcgattcaagatgaaggggggcatgcacaaaaggactgggccccgacatgtgggcccagggacataaagaatatagagcttggatcctctaatgtcggttgccgaggcaatcttcttgtgccctatcgctcgaggtctgcgtatccttggcgtgcaggggaagcttcctgcggaagagaagacgagtatagggtgccgcctggcacgggcgcactgtttgccagcagacccagcaggcgcgccgcctgctggatgaccttgacgccgcctgccatcggatgggacgggacacattaa

SEQ ID NO: 107164 - DNA, 460 bp, Zea mays
  Clone ID: MRT4577_29233C.1
tatgaggaaagcgcgacgcgcccgcagagcatccgatcctgtatagcgggcgccatccacgcgttcgttcattctctctagaagaggggatcatcagatagcgctgactataacttatgacttcaggcaaggatagacgtcgctctgattcgactagaccatgtgaagctacaaaggtactgacgacatacggtgacgaggagcttggacagctggacgttattgcatgtcccggcggaagctttcgactagtaagccacgaggtgtgaatacctgtggcctcgagtcttcctcgccggtcgacgttacgcagcgtgggcctcaacatgtgcccggacgtctcatagcagatgagacccgatgcagcccgatcccatagtcttcaggccggtagacaactagacacttcgtagcgccagcttggcgccgtccttctcggggatgcagccgactgggaggc

SEQ ID NO: 107165 - DNA, 564 bp, Zea mays
  Clone ID: MRT4577_29234C.1
cccacgctgttcgaaaaccatctccaaaaccctagttattccctagcgccgccggagcccggagcttcgacccacctcatcgcgcctcctctctttctctctctccgccggcttccttgactgcgccgcacccgactctcatttttctccctcgacggtgctcgacccccaccggctcagcggagtcagcgctctatctgtccctctgccgcgccgagagtaatttctccttgggaccgcagaccgaggacggagcgaggagaagccaaaatttgagtttcgtctcttgccgacgccttcatttctttctgtgaaagctgctgtattttgagggaagctagagggtcttcgtcgacccagccaagctctgccttgtttggacggctcggctggtgctcgctgcgtcatccgcggacgcgggcgtggctgcctgggaccttcgcaccggcgtggaggacatacggctccgcccctgcgcctcccgccctcggtcgctcgcctcggttgccgaccgcttcctcgcctccgctcaagctcttcccgtgggcggcaactccgggacca

SEQ ID NO: 107166 - DNA, 997 bp, Zea mays
  Clone ID: MRT4577_29235C.1
gtttatccgtcgcgcaacggctcaacatcgcgacggacgttgctcaggccatcacctacctgcacgagtacaaagagcgtccgatcatccatggcggcatccggtcgtcgggcgtgctactgaccgacgcgctggcggcgaaggtggccggctttgggctggccgggactgcggcctcggggtcgggctcaggctccgacgcaacgccggcgaggagcgccgccgggtacgtggacccggagtacctgagcacgtaccagctgaccgacaaaagcgacgtgtacgccttcggcgtcctcctcgtcgagctagccaccggccggccgcccgtcgagcgcagccgcggcggcgaggcccggctcaccaccaaatgggcgttgcagaagtgcagagcaggggaagccgtggtggccatggaccccaggatgcggcggagcccggcgtcggtggccgcagtggagaggacgctggcgctggcagcgcagagcgtcgcggcggccagggatgagcggccgtccatgcggcggtgcagcgagctgctgtggaccatccggagagactaccaccgccaggaggagccgcgctgcggcgccgtcgctgcggaacgtagcgacgagtgggtcatcaggtagcttaacttgccagctgagggcttgttcggttatacccaatccatatggattgagggggattgtggggggtttcaatccctagtaagtcaaaatccccatcaatccgtatcaatcctcttcaatccatatggattgaaaataaccgaacaatgggatattgattctgctttggattgatcggcacggaactgtaatgtaagtggatgcgaagttctaggaagctgcagattttttagtacgtacaacttctgtgattactatcaaatgatgtagtcattgcagccaatacctgcgaatttctagaaaacagtagacgttgtaacaatcagacgactttggtgaagtagccacttgatccctcaatc

SEQ ID NO: 107167 - DNA, 2222 bp, Zea mays
  Clone ID: MRT4577_29236C.1
ggccttctcgccactgagtcctcccgagtcccgacaaaacgtccagagcagcaagccgccgaggacccaacgtcccaaccgccgccggaggcccggagcgcggagcaaaaccatctccaaaaccctagttattccctagcgccgccggagcccggagcttcgacccacctcatcgcgcctcctctctttctctctctccgccggcttccttggctgcgccgcacccgactctcatttttctccctcgacggtgctcgacccccaccggctcagcggagtcagcgctctatctgtccctctgccgcgccgagagtaatttctccttgggaccgcagaccgaggacggtcgacggagcgaggagaagccaaaatttgagtttcgtctcttgccgacgccttcatttctttctgtgaaagctgctgtattttgagggaagctagagggtcttcgtcgacccagccaagctctgccttgtttggacggctcgggtacgcgtcggtgtcgcggcccccccggaatagtgaaaaaatctactagtaaaaccctaaacccctctccgttgctcatggcgccgccaccacaaccaaagcagctggtgctcgctgcgtcatccgcggacgcgggcgtggctgcctgggacctccgcacaggcgcggaggacatccgcctccgcccctgcgcctcccgccctcggtcgctcgcctcggttgccgaccgcttcctcgcctccgctcaggctcttcccgcgggcggcaactccgggaccatccacttctactactgggacaagccgcaagtggccgtcaagagctttcctgctgagccgatccgcgcactcatcgccgatcaggagggaagctacctcattggcggtggcagcaatggcaacattttcctttgggaggtgtctagtggagagcttctccatacatggcatgcacactatcgtgctgttaggtgcctcgggctgtatgactatttgcttgtctcagggtcagaggatgggactatcaaagtttgggatctcatcacggtgcttgatgagcaatcaaggctggaggtccagacaccatatttgtatagtttcagtcagcatgcactgcctgtaactgatattgcttgttttcttggagcaatcgctatatcttcttctgaggatcgaacctgcaaaatttggagtttatctgagggtaggatgctgagaagcatttcatttcctactagcattgattctatagcactagacccaagaagtcatattttctatgctggtggtagagatggaaaaatatatgttactgctatgggtgttgatctcagttttcatggtagggatgagtcatctattctgggtgcattggatgaccacagcaaggcagtaacaagcttagcatcaagcagagatggacttctacttgtctctggatctgaggatggtaatgttcgggtgtgggataccagatgtcagcaagttacccgaaaattcaaacactcccaaggtccagtaaccaatgttcttattgtaacgccacaacgagtaaatctgccaccgctacaaccattacgcaaagttcggtctgcaaatggggaggctgaacggcaggcagtactttttcatcggcctgaaaatgatgtcccaattcctggaaataagaccttcatttttatggagcgctacttggatgagcttcagaagcatggtggttcatccaggttatttgattttgggccgaatgctcagaatggcactccaaaccaacagggaacagaatggagagatagatacttggagttgcaggatctctttgtacatgaggtcctccatcagatgccatcctcgaggaacccatgatgcacatgctttggatatcgtaggatcatttgtggtgtcgaaacagtgatggttgtcattcgggctacaaacgatgtagatgaattctttggagtaattcaactgatggtgctttcggctgcgaggaacttttcagattctgaactaaaaccactagaatcggtgccagcagtcacttggaactggttctcgtttgtgtactagtctagagaaacgctaaaaatcaggtttctcttgattctagttctaattttaaggatacagtgagcttgctacataaagttattttgatttattagagaaaaaaaaaaaaaaaaaaaaaaaactcaaattacatattttaacaaaaaaaaaaaaaaaaaagcggcc

SEQ ID NO: 107168 - DNA, 851 bp, Zea mays
  Clone ID: MRT4577_29237C.1
aattcggcacgaggggaacccccatctctatgggaaaatccacgtgctgccacgatgtcctggaagccctgtgcagagcgatgcagcaatgagccctcagatgtcccatcagtgaatgaaacctctgggtatatttttatccatgccgagggaggactaaaccagcaacgcatagctatatgtaatgctgttgcgattgctaaaataatgagagcaacacttattctacctgttctgaagcaggaccaaatttggaaagaccagtcaaaattcgaagacatctttgatgttgatcattttataaattatttgaaggatgatgtacggattgtccgagatatccctgactggttcacagagaaggatgagctgtttactagtataaagcgtactgtgaagaacatcccaaagtatgcttcagcacagttttatattgataatgtacttccaaggatcaaagagaaaaggataatgtctatcaagccatttgtggacagattggggtatgataatgtaccaacagagattaaccggctgagatgcagagttaactatcatgcattaaagttcctacctgatattgaggaaatggctgttaagcttgctgcaagaatgaggaacaaaactggcagcataaatccatacatggctcttcacctgagatttgaaaaagggatggtggggctttctttctgtgattttgccggcacacgggaggagaaggcaatgatggcggcttataggcagaaagaatggccaaggcgcttcaaggtgacgcggactggactagatacatctgttacattggactgagaaagaatccctaggagaaatgaagcaccgacactaac

SEQ ID NO: 107169 - DNA, 493 bp, Zea mays
  Clone ID: MRT4577_29238C.1
ggggaacgtctgcatcgcgtcgtttgactggaggtgcagtggggtctgcaatccggtcgagaggatcaagtacgtgcactcgcgatgcggcgaaggggaggatgcgatctggagcgcctccttctgacaagatggtgatggaatcatggaatgattatatatatacagacgcacgcctgcttgtgtgcaggcccaggccatagctgcattagaaggctcgcgttgtgtacacacagtgagttcagagaaggggaggcatgcgtgtctgatacaggaagaaaccactggagcacaatctcttatcttttttgggggggagggttcagaaataggtgatacagccatacagagctcatgtgggtgggtatacatgttttttttcagtcgttagtgcagaaaacacgaatacattcgatttaattcattcgtcccctcttagaagctctgatcaggatcagagaagtttctgcaacactatcttttcgacactcgc

SEQ ID NO: 107170 - DNA, 413 bp, Zea mays
  unsure (1)..(413): unsure at all n locations
  Clone ID: MRT4577_29239C.1
cccggtgtcccaattgtcactttgctnnctccctccaaccaagctaattagaggcgcgggcatgcgcctcttctagccctcgtttcattatgccatgggcggnagggagnnaagcaccacnctaccactctacctnngttccaacctacaagnaaggnnacgaggnnagcagctttcgcctgccgnngcgggtacccggcgaggtcctgcctgtagtacaacggnnaggccnatcggtgactgggagggggtggtggcgacggnngcgagnaaccgagtacccgacgaggtaccaagnaaggggaggagnaagnngagcactaagcactnnnagcagcactctctnnggcgagggcccgtngcgccatttcgccgnnccggcgcccttttcgcacttctttacgagnnaagca

SEQ ID NO: 107171 - DNA, 573 bp, Zea mays
  Clone ID: MRT4577_2923C.1
agcaaacggctcgacaagttgatggcccctgattgcatcatcgaggataccgcatattataagccactggatgctaagtgtacccatatctacttcaaacgactgatggaatccatgggagagaaggtcaaatttgccatcgacgaggtttgtcaaggtgcaggacggaccgctgcagtaatgtggcaccttgaatggaatggatacatcatcccctttagcaggggctgcagcttctacatatgctcagtaaatggagcagtgcttcttatcaggaaaatccacatcttcaatgagtcaccactgaagccaggaaagtgggcattggaaatactcaacattgttaccaacttattcaacgtgttccccaaaccagctgaaggtttcctcaaggatccagaatcagtagctcaaccattcattaacctctacaagttttatgtggagccttttatcctcccctttcttgcatattatacccacttttggacatatgtggctcgaggattgagtatggtgttacacatcttgtataacctatataaacggcttatgtaaagagcttaactgact

SEQ ID NO: 107172 - DNA, 214 bp, Zea mays
  Clone ID: MRT4577_29240C.1
cccacgcctccgaagactattaggtttccttgcccgacgcgtggggatgcagctcctaccacgacgagggtgtatataatggaggttgctccacccgaggccgaggcaaaatgtgacttcagaacgacaatgctcttttttacccgccggcagaactcgagaagctcaagcacaagaaaaagagacttgttcagtcgcccaactccttttttat

SEQ ID NO: 107173 - DNA, 600 bp, Zea mays
  Clone ID: MRT4577_29241C.1
cgattcttggcagatcgcgaaacgttgttcgcgcccgacggatccctacactggagacgcgtggacgagctgcagagacaacattcggaactgcagctccgagcagatggacgtgctgcatgggttcagggcggaactcatcagggagctgaaggttgccgaaggtgagcgggaatgggggctgttcgtcgactcgtgcttcacgcactgtcagacccagtcgagcgactggtggcattcgcccacctccccgaggctcggtaatcagactgttgcagaggctgttggggactggtactttggtagaagacgggtagtgaagcaggtcgactgcgagtacccttgcaaccccacgtgtagcattcagtaggtgtgagctggcttctccttcgtgaccgccattgcaccgagctgaggttcatgggagtccttgtttcctccactcccgtatttgatttgtcgttgttagaaaaccagttacattttaatctagagaacgatacgtgaatgttaccgacaatacgtacaagtgtgtgtaaacttagcatgttgaacaaagcatagggaaacataatgcttgtgttggcgcagatctatgaa

SEQ ID NO: 107174 - DNA, 570 bp, Zea mays
  Clone ID: MRT4577_29242C.1
ggcgaggcctgcgccgcgcacccgcgcctgcggcaggtcccgcgccagcctccaatagggggcctgggctcgaccagcaacagcagcgccgccgacgggggcaacggaaccggactccatgtgccacgaacgggcgcaccgatcgccgagcctaagagggccggatccatgaggacccataagaacggcctgccctaatactgctaggggacgcgggaccaagcacagcacgcgacgcggcggtaacgacgacccatggctgccatccatgatcaggaggagaaccgcgcacggatacatacagtctgtgggaagggctaatgacaataacacgcccggtgagcatgagaccttactggctaagtacgtgctcggccagtgatgtataatgccaactcatccgtgatatagaggccgccaaaggggataattaaacctactgctgtatatactcgcgctgttcacaaccggacattgtgagcgcatagaacatgatgaacatgtggctaccgtgtccacacttgccagatttttgtcaaatataccaatatcacgaggcgggccatcgag

SEQ ID NO: 107175 - DNA, 547 bp, Zea mays
  Clone ID: MRT4577_29243C.1
aaatcgtgcccaccaaaccctagccccctccccagcccatggcgaagttcggcgagggcgacgctcggtggatcgtgcaggagcgcgccgacggtgccaacgtccacaactggcactgggcggagcgcgactgtctcgactggtctcgcgcgcttctctccaagctcctcgcgggcctccccgtcctctccggagagggcggcctcaccctccgcaccaccaccctcgacaagctcgatggcgaggcctacgtcaacatccgcaagggcaaggtcatcccagggtacgagctttccctcacgctcgcctgggaggccgatgccacaaccgagtcgggggtcgtcaaggtcaccggcaccgctgaggtaccctacctcgctgacgagaacgccgacgaggaccccgaactccgcatcactgttcgcggtgacgacggccccctcgcgcgccgggccaaggatgccttcatcgcccatggcaagcctctggttattacgaagatccgggattatgtcgccgccatggcgaatggtggccccgccaagga

SEQ ID NO: 107176 - DNA, 1050 bp, Zea mays
  unsure (1)..(1050): unsure at all n locations
  Clone ID: MRT4577_29244C.1
ctctcttcttctgccttcccgactctacctgacttcgcccgctctgagaaattcactctcaccaccaccgcgccgcctccactccccccacacccccggtctgaaacccaagcttccgcttctctcatggccgacgccaccgccgccctctcagctcggagcaaggtgcaggctttcctggaggctgcgcgcgccggcgacctccaatccctcaagaacctcgtcgcggcgctcgacgaggacggcacgggcgccgcctccgtcgccgccgccgtgcgtgacgccaacaagcgcaccgccctccacttcgcggcgatcggatgtcgcaccgacgtctgtgaattcctcatcggcgagctcggcctccctgtcgacccaaaggacgatgatggcgaaactccgctcatccatgcgacacgccagggccatctggacactgtcaagtatcttctcgaccatggagctgatccttcgctggccaccagcctaggagccacagcgctacaccatgctgcaggcatagggaacacggaactcatgaagcttctcctctccaagggagttgacgtcgagtcagaaagtgatgctggcactccccttgtgtgggctgctggtcatggcaaccaggatgctgtcaaacttctgcttcaacacaatgctaagccaaatactgaaaacgatgatggtgtcacagcattgttatctgctgttgctgcaggttccctcccatgcttggaggtcctaattgaggctggtgcaaacccaaatgtcaaggctggtggagcaaccccattgcatattgctgcagatagtggaaatatagaagtcatcaaatgtttgcttaaagctggagctgacccaaatacctgtgatgatgatgaattgaagccagttcaggttgctgcttggagaaataaccatgaagctgttgaacttcttttaccgttaacatccncaattccaggtgtttcaaactggaacgtagatgggattatagaacacatgctccctaaagagtttgaggaaaagtctcaactgaaggaagcgaca

SEQ ID NO: 107177 - DNA, 471 bp, Zea mays
  Clone ID: MRT4577_29245C.1
cgcgaccatcaccagaacgagcagcacagcctagcaccatacacacatagcgaacgatgatagacgccgcgctggcgcccatatcgccgcactgagcgccgtcgctgacgccgcgcgcacctcgatgggaccccgaggaatgtataagatgatcggttcgcccgaccaggcgcagcaagatatcatcaccaacaacgacgacaccagcctctcccggatggcactcctccagaccgacgcgagcatgcacgaggagctatcccgctcccaagaggccgtcgatggagacggcaccacaacaggaggcagcctcgctggagccctcctccgacgcaccaaatcgctcctctcccccggagcccaccctaccgccgccgtcgacgctctccaccggctcgcgagacgcagtgatgggatcctccgcagcatgtgcgtccccgttgagctatcagaactcggaatcactcacga

SEQ ID NO: 107178 - DNA, 1768 bp, Zea mays
  Clone ID: MRT4577_29246C.1
ttgggaccctcgaggccggccgggccactcttcttctgccttcccgactctacctgacttcgcccgctctgagaaattcactctcaccaccaccgcgccgcctccactccccccaccccccggtctgaaacccaagcttccgcttctctcatggccgacgccaccgccgccctctcagctcggagcaaggtgcaggctttcctggaggctgcgcgcgccggcgacctccaatccctcaagaacctcgtcgcggcgctcgacgaggacggcacgggcgccgcctccgtcgccgccgccgtgcgcgacgccaacaagcgcaccgccctccacttcgcggcgatcggatgtcgcaccgacgtctgtgaattcctcatcggcgagctcggcctccctgtcgacccaaaggacgatgatggcgaaactccgctcatccatgcgacacgccagggccatctggacactgtcaagtatcttctcgaccatggagctgatccttcgctggccaccagcctaggagccacagcgctacaccatgctgcaggcatagggaacacggaactcatgaagcttctcctctccaagggagttgacgtcgagtcagaaagtgatgctggcactccccttgtgtgggctgctggtcatggcaaccaggatgctgtcaaacttctgcttcaacacaatgctaagttggagagctagtcgctggctaccgacatgtttgagtgcttcaagctaactgcatatgtttctctctcatgattgcaaccaaatactgaaaacgatgatggtgtcacagcattgttatctgctgttgctgcaggttccctcccatgcttggaggtcctaattgaggctggtgcaaacccaaatgtcaaggctggtggagcaaccccattgcatattgctgcagatagtggaaatatagaagtcatcaaatgtttgcttaaagctggagctgacccaaatacctgtgatgatgatgaattgaagccagttcaggttgctgcttggagaaataaccgtgaagctgttgaacttcttttaccgttaacatccccaattccaggtgtttcaaactggaacgtagatgggattatagaacacatgctccctaaagagtatgaggaaaagtctcaactgaaggaagcggcatctctgaaatcaggcctaacacaaactattgaggtgtcatctgaagcaaaaaagaggtccttggaagccaaatcaagaggtgatgatgccttcagaagaaaggactaccttgtagcggtggatgcttatacgcaggctacagagttggacccaactgatgcaacagtgctctcaaacagaagcctgtgctggctgcgggcagggcaagctgagcgtgctctggaggacgccaaagcatgccgtgcattgagaccagattgggcgaaagcctgctacagggaaggtgcggcgcatcgtctgttacagaggtttgaggaagccgcaaacgccttctatgagggggtgcagcttgagccggagaacacggagctcgtcaacgcattcagggaggccatcgaagccgggaggaagttccatggcgtcaacacgccaaactcaacacaatgagactttgctgtttggttggataggtagatgatgaagcggatggacatgaacgttgtcttagttggaagttggtgagatgatgaatgagatgataatgaaatttgaaagagcgaatttgcagatttattttgtgttttgtgattgttttcttaaacttgttttcttgcgt

SEQ ID NO: 107179 - DNA, 221 bp, Zea mays
  Clone ID: MRT4577_29247C.1
aaaaattataacccttcctcaaacacatcacctaaaataactacgaaccaaaaatatatatgggcgctcttcacatccatggctacgaactcttccatcctaatcgctcactacactataactatacacaattccaatcccatgctcccaaccttcatcgccacctacacctaaacccctctcataacacacctatcactgcattcaacgaatacatattt

SEQ ID NO: 107180 - DNA, 775 bp, Zea mays
  unsure (1)..(775): unsure at all n locations
  Clone ID: MRT4577_29248C.1
ctttctcaggctcttatcagagatgattcctgcaagcaagctcatgattcccaagacaagggcgtcccatttcatcaatcaaagcttcaatggtccgccgcagctggcgatggctcctatgcgacgacccgggtggatacaagatcaaaatccaaagcagatccgcgtccagtgcaggcagctcttggtgatcctcttcggcagacttcaatgccgcgtatcctggcgtctggaaaggccgaggtgggtgcagatcgcactccggatttccagctctcctgcaagccggaaggggatttgaattcgggcaacgtttggtcacatcggcgtgctgctggtctcgatgccgcgccgcgtttgaatggacagaggccataccctgctgcgtcggatggcattgaaggggactggtcggtggtcagaccgcggtactggtggcgcaagagctggacgtctactgagcgaacacggcaatatcatcaattcgacgtgaagggcactggtcttttcaaattgaagctaaagggcaaatgttacaattgcttctcaccagatcatctagctttttgctgccaggctccttcgcgctgctggctttgccttcaatccggacatcgagcgagatactgcagccggattagctatcaggggacattcactgctgctgggttttttcctaagccagtcgaacaaccatcaaggacccctacctaccatgaggcacgaccatggactgacgatctacataaganccttgagcattgcggtaggacca

SEQ ID NO: 107181 - DNA, 842 bp, Zea mays
  Clone ID: MRT4577_29249C.1
accttctgctctcctctctctccctaccttcccgaggccgccgttcccaagattagttcacgccatagctcgcttccctggagcccgccgatcgccagctcgcgagacaccccactccgctcggatcctggtcgcagcttggagatccggactggcatttttccttgtagggtggtcagtggcgacaaaaaaggttgttttttggctgagtctctgagctccggaggcttccatcttggatgatgtctccctaaaaggcacaattgcaatagtttgacctgcctgccttcgatgcctttgcaggcggtgggctaagataagctggcatactgtctctgtctgttgaatttctcaactaggagtgtgatggggtcgtccggttgcagctctgagatagttgagtccaacgaagacttggataatgcgcctgttagtggctccagcgtgctgcatatcaatgtgaaaactgaggagaaagatggaagacgtcgtggtcatcctgtggaagatgagctcgaccagcttcttaaggcaattgatagcaggacttaccgtcgagcacttagccccggccaggccggggcagattctttgtcgaagcatgctcaaaagacacctaggtcagggtcatctcaaattgcagtcactgggatatgctccaaacctgtcaatatgaagcaggcactgagaaggcattgcatttcccaggcgtcagaaatggctgcaatgaaaaggttgtcgatgtcgcctggggtcatcgagttcatctgaagcagggactatccacaggctttatgccctcttgatggttcaaagtaatgatggaagcgttgtgcatgatg

SEQ ID NO: 107182 - DNA, 615 bp, Zea mays
  Clone ID: MRT4577_2924C.1
gccggccgggtcgggaacccgctgttcgcgagccactccctctcacgagtgacgacgaaaccctaggccatggcttggcgcggcgccgcctcccgctccattatcgccgccgtccgtgctcgcgccgcatccccatcttccaccgccgcctcgcgcctccgctcgacggctccacttcccgccccctcgcgccggtccgtccccgccttcgctttcgcgaccgcgaggccgttggcggcgatgtcggggtccccggcggcggccgtggtgaagctcaccgggcacgcggcgacgagcgtgcgggcgtgctgtgagctctcccagggtaccctcttctgccgcacttgtcaggatcgctagcaagcacttaatgcgcacttttgtccttaaatgcaagggttggattctttggaggttgcatcccttgaaactcgtcgggcttgcgtccttttccatgcattttgcagagtacttagcacctcgtgtgtcggcaaacggacagtatatctgctgtaacttacataaataatcatatgttagcctgctgctactcactgccccacatcgattggaactaagttgatgttttaaaaaaaaaaaaaaaaaggcccccta

SEQ ID NO: 107183 - DNA, 141 bp, Zea mays
  Clone ID: MRT4577_29250C.1
gcgcactcgcattcgaactcgatctacctctctatcggatcctatctaagatacactctcacgcgctctgtcatctcttctagtaggtcacctatattcactcctctatccaactcactatatcttcttttacaacaactc

SEQ ID NO: 107184 - DNA, 194 bp, Zea mays
  Clone ID: MRT4577_29251C.1
aatcctcccagctgctgaggtgaaagacacggtcatcctgtagaaacagcacacagactgacttctgagcgcgctacttgccagaaactctgatgaaccagtttgatctcaaaagggcaattactatgtacaaggtgaaaaacgaaaagctgccaaggaaatagaccgatatgccatcaccatcttataagctt

SEQ ID NO: 107185 - DNA, 378 bp, Zea mays
  Clone ID: MRT4577_29252C.1
caaaagttcacctctgtgagatgaaagcacacatcacaaagcattttctcagaaatattctgtctaatttttatgtgaagatattgcctatttcaccataggctgtaaagggctcaaaaatatccgtttgcatattcaaaaaaaagactgtttccaaactgctcaaacaaaagaaaggttcaaccctgtgagatgaatgcacacatcagaaacaagtttctcggaatgcttctgtctagtttttatgtgaagatatttctttttcaccatcagcctcaaacggctcagaaatacccttttgcagattttacaaaaagactgtttccaaactgctcaagcaaaagaaagattccactctgtgagatgaatgcacacatc

SEQ ID NO: 107186 - DNA, 185 bp, Zea mays
  unsure (1)..(185): unsure at all n locations
  Clone ID: MRT4577_29253C.1
gagaacaccaggcccgcactgaaaaagcctacgagcaaatactaccactaagtatttgaaaacagcggatacagatctattcctctcgcttaagggctntatacaaatgcaagaagctgacagagtactaaacttatacgaggtaaaagaagaataaaagaattaaacatttcttcgaaaaacaa

SEQ ID NO: 107187 - DNA, 509 bp, Zea mays
  Clone ID: MRT4577_29254C.1
ttgggtacctcgaggccggccggggatcagagatctaaatcgtacatgtgacgctgcttggtcggagacggttgtgagatagtgcggcgacgcctctccatagtcgtcgctgtcggtggatcggcgcgaactccggcatccatgctatggccgccatcaaagagcagtcgcctgacctagagacataggacaagactcggcatcttcttctttaagtgttgaaggtcgcctcccccagaatagatgctattgatttgacgagcggcgaggatggcaccgagagacacacagtccgacaagatacgcgactgcacattagccgcatgaaaggtgtcgtcgacgtgggacacccgatgggagctctggtcatccggcctgacgacgagatatacatatcactccatagggagcgtggggaaggaacacatgcggcctgagggcatgtgcacttaacagtccgccgcgtctacgaggtacttcagtgcgccggatcgttaacgggcatctgc

SEQ ID NO: 107188 - DNA, 1197 bp, Zea mays
  Clone ID: MRT4577_29255C.1
ccggccgggacttacctggacggggtcgactggctatcaagaaggcccgtggcctagatcaatggcccacattgcacttggtggatgcgttggcttaccatctccccaagtgggagagtggacgtcataatttgtggtagatggggtacgcgacgcagttcaggtctcggtttgctgcttcttgatcagttcagatctcggtttgctgcttcttgatccagatcagggtttctgatccatatagtctgtactttgttacaaaaatctgtaatttttaaacgctaacctcgcgccggagtcgtcgcccacgatggcctaccgatccgcagtgctcttgcccgccctcctactggccgtcgccgtcgtcgtggcctccgccgccgccggggacgggaggtggcgggaggagcaggcgcgggaccgggtgccgcgggtgccggggcaggccttcaacaccagcttcgcgcagtacgccgggtacgtgaccgtcagcgagcagcgcggcgctgcgctcttctactggttctttgaggccgagaaggacccggggtccaagcccctcgtgctctggctcaacggagggcctggatgctcgtccattgcttttggacttggagaagaagtaggacctttccatgttaacgcagatgggaagggggtccatgtcaatccttattcttggaacaaagttgcaaatttactgttccttgattcacctgttggtgttggttactcatattcaaacacctctgatgatgctttaaaaaatggggatgcaagaactgccacggattcattggcattcttactgaagtggcttgaacgctttcctcaatacaaggaacgcgaattttatttgacaggggagagttatgctggtcactatgttcctcaactggctcaagccataaaaaggcaccatgaggctactggtgacaaatcaattaatctaaagggctatatggtagggaatgctctcactgatgatttccatgaccactatggaatatttcaattcatgtggactactggcctgatctccgatcaaacatacaagctgctgaatgttatctgcaactaacaagtccttcgtgcattcgtctccacagtgtcataagatcatggatattgctagcactgaacctgaaaacattgcttcatataacatcttcacaccctacatgtcatgcatctttt

SEQ ID NO: 107189 - DNA, 1232 bp, Zea mays
  Clone ID: MRT4577_29256C.1
cccacgcgctgtactcaggcaagcagtgagcatcctcttgccaaagctattttggactatgcattgcatttccatttctttggcaagcttccttcatcaaaagatggcattgagcaacgaaaagacaaggtattatcccagtggctgcttgaagctgaagacttctctgcagtacctggcaaaggagttcagtgctcgatcaatgggaagcatgttttggtcggaaaccgttctttgatgactgaaaacggtgtgaccattcccccagaagcagaaactttcttgatagacctggaatcgaatgcaaaaacaggcatacttgtggcatatgatggcgattttgtgggtttgatgggcataaccgaccccctgaaacgggaggctgctgttgtagtggaaggactaaaaaagttgggtgtccatccagtgatgctcacaggagataattggaggaccgcgcaagctgttgctaaggaggttggtattgaggacgtgagagcagaggtgatgccagccggaaaagctgacgttgttcgctccctccagaaggacgggggcaccgtcgccatggttggcgatggcatcaacgactccccagccctggcagcagccgacgtcgggatggccatcggcgggggaacggacattgccatcgaggccgcggactacgtgctggtgcggaacaacctggaagacgtgatcaccgcgatcgacctatccaggaagacgttcagccggatccggtggaactacttcttcgcgatggcctacaacgtcgtggccatccctattgccgcgggcgcgctgttcccgtttaccgggctccagatgccgccgtggctggccggcgcctgcatggccttctcgtccgtaagtgtagtgtgctcgtcgctactgttgaggaggtacagaaaacccaggctgacgactgtgctgcagataactgtagagtgactgtgaatactgaatactatacgtcccttaaccgattttttgcagaaatgaactggaaattgcatcggaaatggcgccttctgtaaattgtacacaactgtcccacattaaaattcgttttacttaattattggattcatacaacacttgatgtatgtgcttcatacatatgtctagacataaaaaacacttagattcattaccatccaattgaatatagacataaaaaacttagagctaaaaaaaaaaaaaagggaataaaaaaaactcgagggggg

SEQ ID NO: 107190 - DNA, 1502 bp, Zea mays
  Clone ID: MRT4577_29257C.1
tctcccgcccccgcccgtgcccgacccgtcgggaccacgtctgggcgcaccacttcaacatgctcaactccgcggctgcggcggccggatgtgctgtcttcagctcaaggacatggtgctcaagttctccggctccagcaagcagtgcaaggggacggccgggacccagtcgttcaggagcagcggggacaggtaccgccgcccctaccccggcttcatcgacgacacaggcttcacgcccgcgagcaaggttctcggcgaggactactacccaaggaccgcattggcgggggcagcaggcgccgccggtggcgcgcgaacggcttcgtcggatacgttggacatgggcaggagcaaccgcaagagccccgggagtagcggctggattccgggcaccgacgaggcagcggcgggcggggacgatgtcctcgctctggaggacgccgccgcgcccagggagtggacggcgcaggtggagcccggcgtccagatcaccttcggtaccatcccgaccggcggcaacgacctcaagcgcatccgattcagtcgggagatgttcaacaagtgggaggcacagcggtggtggggcgagaactacgaccgcatcgtggagttgtacaacgtggtgatgttcagcggccggcagcaagggtgctccactccggtgtcctccgtcgacgacttggcgctgagggactcgtcctactcccgtggcggctcgacaagcaggggcagcccgatcacagcgccgccgccgccgccgccactgccgccggtggcaagcaaagaaccgatcacccggagcgcgtcgtacaaggcaacggcagcagggtcctcctcggcaccgtacgcggccgcgcattccaccagggcggcagcggcatacttcccgtccgcggccgtgcccgacccgtcggaccacgtctgggcgcaccacttcaacatgctcaactccgctgctgcggcggccggcacgtcagcggcgatgggcggcggggccccgtcgtcctacgacccgtcgcgcgccaccacgtcgtccagggacgaggcctccgtgtccctcagcaacgtgagcgacctggaagccacggagtggatcgaggaagacgagccgggcgtgtgcctcaccatccgcgagctcggcgatggcactcgcgaactccgccgcatccggttcagccgggagatattcggcgaggatagggccaaggtgtggtgggagcagaacagggagagaatacaggcggaatatctgtagcaagcgatcagacactgagctgatgcaattttcaggcctgatgggataatcaaatatgtttgtgagaggatagattagggagatgataccgctatatacatggtgaaaacaacgtgaagggggaaactgtgaaagtgaaagaaatggtacctgtccttagttgcctaaactaataataagtttgtacatcgttggtacaatggtaccggtgtctggtttaaagttactttgtactgtgtactgt

SEQ ID NO: 107191 - DNA, 623 bp, Zea mays
  Clone ID: MRT4577_29258C.1
ctaaaatatctgtgtctgtttccacgcgcgtttctctctccctctgatttccttgccgttctctctccgtggaaatatcctctccagccttatcccgccgcccccgggctcagatttttcacgcctcttctttatcttctccctggcctccttcatctgttcgtggctccaacgcccacatggagcactggttccggcgcagcggaagcagcttccatggctgcccaggctttgctcggagctcccctctcctgctgcgctcgcccggccatgctccacctcgccccatcgcgacgctccagctcgcgtcgagctccccatcgaacctccatggcggccgagctcacagcctgcgcgcgctccggctgctttgctccagcgtcgcgcgctccgctcctgcacgccgagcgtcctcttcagctccttggtcgaccttctctcgcgctctgctcctctctcttccttgccgcggagctcctgtgcgcgcgctgttcctgctcgccgagctgttctctgccctgcgcacagccacttttcatctccctgctcagctcaccgcgctgaactgcccagcgccgcgcgcgcttgcccctgatgcctctcgcgtgatatttggatctcgt

SEQ ID NO: 107192 - DNA, 264 bp, Zea mays
  Clone ID: MRT4577_29259C.1
actccccccatacgagcatgatgcgactccgacttgatacccagtcgagcggggcaagggagaaatggggaagggacggtcagcttctgcatagctgccggaacatagacgcacacgctctgcatccgctgcggccgccgcagcttccacctccacgaagagtacctgctcctcctgcggttaccccgacgcccgcatccgcaagtataactggagtgtgaaggccatcagggcgtcagagacagaccgcgaaccggaaggatg

SEQ ID NO: 107193 - DNA, 2385 bp, Zea mays
  unsure (1)..(2385): unsure at all n locations
  Clone ID: MRT4577_2925C.1
atggatcctaagggaaagaggatggtgatcaacgacaaggagaaggagtgcttcatcaatgagccaaaagacgacaagcccactgactcgggctcaagtcacaagaagaaggatgggaagaagaagaggcgcatcaagaagatagtctactacgacagcgacgagtcctcttcttcccaaagagacgacgacgacgagaaaaagaaaacggacaccctcaagatctcacatgaggggaacgacgccaccatgatcaccaagatggagttggtagaatgcgaactaggaagattcgcaatgatcaggggggaggagccaactcaaacgtacaacaggctcaagaccctggtcaacaaaatcaggagctatggaagcacgagatggacggaccacgacgtcgtccggcttatgctaaggtacaccaagatgatgctcgaggaaatactcggaaagtttgtaagcgggcgaatgatgatcaaggagacaagatatgttgatgaggcgttgaatggcccaatgccgatccacgagcctcaaaccgttgctctcaaagaaacaagcagcagggaggggctacctagcaaggcggcgcaagttgaggcggccgggctaaatgaggatgaaatggccctcatcatcaagcgcttcaagacggcgctcaaaggtcgcaaggagcatcccaacaagagcaagacgaagggaaagcgctcctgcttcaagtgtggtaagattggtcactttattgctaactgtctcgataatgatagtgaccaggaacaaggaaagaatgggaagagagagaacaagaaggtttacaagaaggctaagagcgaggcacaccttggaaaagaatgggactcggattgttcttcgtccgactccgacgacgaaggactcgccgccacagccttcaacaaatcgtctctcttccccaacgagcatcacacctgtctcatggcaaaggagaagaaggtaagtactcgacgtactattacgtatgcttcttcaagtgatgatgagcctagtgatgatgaagtagactacgcaagcttattcaaaggtttagatagaactaaaatcgacaagatcaatgaactaattgatgctttgaatgagaaagatagattgttagaaaagcaagaggatcttttatatgaagagcatgataaatttgttagtgcgcaaaattctcttgctttagaagttaaaagaaatgaaatgctttcatgtgaattatctacatgccatgaatctatttctagcttaaagagtattaatgatgatttaaatactaagttagaaataactaataaatcaagctcttgtgtagaacatgttgtgattttcaataggtgtaaggactttaatgttgatgcatgtgttgagcaccttacttctattgcgaaattaaatggtgaagtggctagtcttaatgcccaacttaagactagcaagaatgactttgacaaactaaaatttgcaagggatgcctacactattggtagacacccctcaattaaggatgggcttggcttcaagagggaagccaagaacttaacaagccaaagagctccaattttcaacaaggaaaaggggaaggctcctatggctaatagtagtcaaaagaatcatgcatttatttatgatagaaaattttctagaaatgcttatcataatgggagttgtgatgcttatgattcaaatgccatgattgcttcaagttctttctttgtgcatggtagagatatgcctaggagaaatgttgttcatgtacctagaaaaccaagtaatgaaccttctacaatttaccatgcttgcaatgcttcttttgcaatttgtaggaaaaataagaaagtgatcgctaggaaattaggggcaaaatgcaagggagataaaacttgcatttgggtccctaaggccattgttactaaccttgtaggacccaacaagagttgggtactgtcggggaccataattaggggtaccctcaagacgcctaattctcagctggtaacccccatcagcataaagctgcaaaggcctgatgggtccgattaaaaagatgttcacctcctacgtcaagaataaggattcccaagattccatcatatttggtgatgggatccaaggcatggtcaaaggtttaggcaagattgcaatatcaaatgcccattcaatctctaatgtgttttgtgtttagagttctacatatagttgcctgtgtgctagtcattttatgtaatatggaataattctgtctatttacaaatgtaattgtgtctgtctactactctctctcatggttctctagcttttaaatgtgtatctgagacggcaaactttatttggttatgttttgtgtacttggagttcagtctagngtcg

SEQ ID NO: 107194 - DNA, 153 bp, Zea mays
  Clone ID: MRT4577_29260C.1
ggggcgcgggggcacccggctgattccgcggctgtggaatgcaacgcaactcttcgcttgtgttctgctatgacttcctgtcccctgggaattggcgtttgtctgctctggtgctcttggccctgcttgtcgttggtgctacggtgtgactgg

SEQ ID NO: 107195 - DNA, 946 bp, Zea mays
  Clone ID: MRT4577_29261C.1
ccgggctctacttatatgctagttcgagtcagagcttacgtgcgtcacactagttcattccctctgatccatgacatgactctttgaatggtggtgggtaactaggttctcacgatgcaatgttgtctacagctcaaggacatggtgctcaagttctccggctccagcaagcagtgcagagggacgccggggggccagtcgttcaggagcagcggcgggggcaggtacctccgcccctaccccagcttcatcgacgtcaccggcttcacgccggcgaacaaggttctcggcaacgcattggcaggtgcaggcgccgccggtggtggggcgcgaaccgcgtcgtcggatacgttggacctgaccaggagcaaccgcaaaaccccccagagtagagcggcggcggccggggacgatgtcagggagtggacggcgcaggtggagcctggcgtccagatcaccttcgtcaccatcccgagcggcggcaacgacctcaagcgtatccgcttcaggtgtgtcgtcgttacgctgccactactgcttccctgctcaacgacaacgactcgctgcgacgaccattgattcttgcaactgaactgactcctaagtggtcgtatatgctacgtacgtcgtcgtagtcgggagatgttcaacaagtgggaggcgcagcggtggtggggcgagaactacgaccgcatcgtcgagctgtacaacgtgctgacgttcagcggccggcagcaagggtgctccactccggcgtcctccgtcgacgactccgcatccgcgctgagggactcgtcctactcccgtgtcggctcggcgagcaggggcagcccgatcacagtgccgccgccgccgccgccaccggtgtcaagcaaagaacggatcgcccggagcgcgtcgttcagggcaacggcggcagggtcctcctcggcaccgagagcggcga

SEQ ID NO: 107196 - DNA, 513 bp, Zea mays
  Clone ID: MRT4577_29262C.1
acaactccatagaatctcttgtgatctggagtcgatgaaggatctctttggttgttagtagttgtttaacatgaccaactttcttctaactccatggttgcaagtgctttaaaagtcttttcaacttatctgcaaagcgttgcagggagcagatagctccctctggttaggatcaagatctcaccacctcttctaaaaaacttctaatcttggccaataactttttaaatggaaccacatcttgccttgagaattttctttgcagacctattaaaagaggacagtcgtcaaatatgaaggaggcagagctttgtagcacatagtctgaaaattaatcttcccaatcggctgtatgggaaatctagtctaagtggacaagggtagggggtgtttgctcattaaactaagtacttttttgacccaatagtggcatttagttgtaactcataagaaggcattgaaatcttctcatcatagccctattaagattttgtgtcttgtcctagctcaata

SEQ ID NO: 107197 - DNA, 570 bp, Zea mays
  Clone ID: MRT4577_29263C.1
aaggataatcgttcgagttaatctgatcgcgaggtgtggaccgtccgggaccggacggtccgccacttagttttcaactagtttctccacaaataacttaaattggaacggtgcctttgtctacacattatccactgtgcaatgccaattgccattacaatatcatgacccaacgtgaggttgtgtgcaccaacagacctacagggttacataaacatatcactcttcactatcttcatcgtcgtcgtcatcatcgtccggaatggcagtgtcgtcaccaataccttgcagaagggcatccacatcttcgccgagctctgccagccttgtgctcagcttctcaaccttagtttgttcctgaccgaggcagacaagcagatcgttcagctccgcctcactgtccttctcagcctcttccttggcttgcgcctttattgcctccacgtcaggatacggcacactgcctccctgccgcaaggtttttacctcggcatccaggcggtagttggcctgctctatgctgttgtaagcttctgacaagctcttgagatcggactccagttttactgc

SEQ ID NO: 107198 - DNA, 211 bp, Zea mays
  Clone ID: MRT4577_29264C.1
aatacccgggacgacgagcctactagtttgcggccgcccttccatacaaggggaatggggaaatttaaaaccgctaggggcccagccaccatgaatcggtcccacatcgaaacaaaaaatgcacgcaggtcaaaccggcaataaaccacacaacgcaccacctgtcccaccagacgcgcatgctgaatccacaaacatgaatggttgaacc

SEQ ID NO: 107199 - DNA, 319 bp, Zea mays
  Clone ID: MRT4577_29265C.1
gttcgccaaactgtgtcggtattttcaagccacggtacgctccgggaaagaggcggtttcgtggaccgcgcatccatgaggaaactcttcacaagcagaaaacgggggtagggaacgtggaccagaccaccggagccaagattgcgaagggcttcgtattgttatgtggctaactctactacactcttcgccaacttaaggacgacctctgcaaggtcatgctcccatacactgatctcaatcttaaggagaagaaacgatataacctgaaggattttgacaatgttgacggcccagatggctgtgacacatttgttaa

SEQ ID NO: 107200 - DNA, 289 bp, Zea mays
  Clone ID: MRT4577_29266C.1
accggacgcgacccacgcgtaagcacagatctattaaagctgcaatggtttttttcagcttcactgtaaaaatagtcgggggggtacatacctatatacctatttacaaggtgacatacacaaggaacaagggtaaagtcactgacaggatttgggcaaagcttttgtcgttcaccaaccaaccaagtttcctgaaacaaaaggatatccacgaaacgtgtgacgccgatagacttgcaaacacgccaccattgacaacgggtaccaactctagcgtggagaaatcttt

SEQ ID NO: 107201 - DNA, 2302 bp, Zea mays
  unsure (1)..(2302): unsure at all n locations
  Clone ID: MRT4577_29267C.1
tccgcaataatggnttgtcgtatagtatttatatgtaactgagcaccaanatgttagattcccgcgatgcccattctggggcatctcggttttgtaaaacagnacttgtgcaggatttaaatgccaaaaaaaaaaaaaaaaaaaaaaaaaaaaaaaaaaaaaaaaaaaaaaaaaaaaaaaaagaaaaaaaaaaaaaaaaaaaaaaaaaaaaaaaaaaaaaaaaaaaaaaaaaaaaaaaaaaaaaaaaaaaaaagggggnggggnttaagaaggaaacaagtttaatnncgtttgattgcgaaggtaatggtttttttttgggggcccctaatttaaattaactggccgggtttttacacctttggggctgggaaaaaccctgcctttccccccacgcccgcttcacaagaagatgtttgggtttacaaccaacaggactgtgaagtgcaagtgtatttggagcgacagtccgagcgtgagttctatggggcacccatgctcatgcacaagatccagtccaggcgattgccttggacgatgcctgtcatcttaaagggaagacgtttcgtcctttgtgttcgcctgcgtcaaactgaaaagattatctcaccttgacgctcggggtgcgccggggcctctcaccccctgctagagctagacgcctagacccactctcagatccaccccaactcgcggagaccgagcccagtccagcgatgccgccgccgccgcaggcgaacggggggaaggtgaccccgaacctggcgatggacgccgaggccacgcgcatgctcaacctcacagtcctccagcgcctcgaccccgccgtcgaggacatcctcatcaccgccgcgcacgtcactctctacgacttcaacatcgacctcaaccagtggagccgcaaggacgtggaagggtcgctgttcgtcgtcaagaggaactcccagccgaggttccaattcattgtcatgaacaggcgcaacactgataatttggtggaggatttattaagcgattttgaatatgaacttcagccaccatatttgctgtaccgaaatgcttcccaagaagtaaatggtatttggttttataaccaacatgattgtgaagctgtcgcaagcctttttggaagaatattgaatgcttatgcaaaggtgcctccaaaaccaaaagtgcctaccacaaaaagtgagtttgaagaactggaggctgttccaacatctgctgctatagatggccccctggaacctccgctgtcatccacagctgtagtttctaatgcacctgatgaatcgctggtgaattacttcaacggtgctgctagcattgggagcgtaccaagtgcacaaatggctggcagagcacatccatcgaatgatacggtcacaccttcccatgtgccactgattgttccatctgctactccaacacatcaaatgtctcatcctttagggggttcatctgctccaccacttcctctccatgacacaaatccgcatgccagtcagtctgcaaatcttctaacaccagctttctttgcaccaccaccaccctcttcaacatctgtgacaccacctgcttcatccatgatgcctacagcaccacctcttcatccgacttcaacagctgctcaacatccttcatatggcactcccttactccaaccttttcccgcaccgtctccacctccttccctgacccctgcacacaacgatggacttgttatttcaagggataaagttaaggacaccctccagagacttgttcagaatgacgagttcatcgatttgatatatcgtgagttacaaagtgtgcacatgtagactgctgctcactagtctgtacggagtttgtctaaaccaccgatagtcttatggagctgctcgtcgcgacaaagatcgcctccctgtttttcttcttgtgagttttgtatgatttatttcttataaacctgtgcatagtttgttttaatgtagagtgcttatagcagtgcttggtaagcatttatcctgctggtttccaaataactggattgtcgtatagtatttatatgtaactgagcaccaagaatgttagattcccgcgatgcccattctggggcatctcggttttgtaaaacaggacttgtgcaggatttaaatgccatatttttcgtgtgaattaacgagaaaaatcctggacccttgatacccctgatgaatcattaatcacataactaactaccatttcatcccattttactttcattttgattgaggggaatatccccatttatctgcgttctgtgctcaatgaccatttt

SEQ ID NO: 107202 - DNA, 901 bp, Zea mays
  unsure (1)..(901): unsure at all n locations
  Clone ID: MRT4577_29268C.1
ggtcgacgcacgcgtccaaggacgagtgggcggacgcgtgggcggacgcgtggggcaccccactgctccagccctttctaccgcccactccacctccttcccttaacccctcacacagtgatagacttactgttacaagggatatagtcaaagacgctctacagagacttgttcagagcgacgagttcgttgatctggtgtgccgggaattgcagagatcactcgtgtacggctgcgtgcttagtccttctggagtttctggctcgtgacaagtaccctgttattttttttctttgacctttttgcatgcttcccttcctgtaatcctgtatagtttcgtgttcatgtattgatgtatagtactataggaatggctggttagcatacttatgtaactcaaaagcccaagtaaaaagagttttgttcaagaatgttgaaaaaaaaaaaaaaaaaaaaaaaaaaaaaaaaaggatacatgaagaggaaaatgtgccaattgatatggatggaggacaaatcatctgcaatctgattgctgtccatgctggcctagagaggaccatagatttgaatgagcaacttagagttttaagaactagagacacaagggtgccaaaggttcaaatgcttagtgggaggcaagatgtttgggacacacccaagggtctggccggcaagcagactattattgtaagtggccaccacgggaagctccacatcgacggcctccgatttataatcgacgaaaggtggtggttatgaagacaaacctattgctgcaatagtttttccttcaaagacattgatcagaagtaccgaggaagcgggaaccacatcagagaggtgatctagagttctagacatcatcgcagtgaacacggaaggcacagntttttctctc

SEQ ID NO: 107203 - DNA, 1183 bp, Zea mays
  Clone ID: MRT4577_29269C.1
attgaatgcttatgcaaaagtgcctccaaaaccaaaagtgcctaccacaaaaagtgagtttgaagaactggaggctgttccacatccgctgctatagatggccccctggaacctccgctgtcatccacagctgtagtttctaatgcacctgatgaatcgctggtgaattacttcaacggtgctgctagcattgggagcgtaccaagtgcacaaatggctggcagagcacatccatcgaatgatacggtcacaccttcccatgtgctgctgatcattccatctgctgctccagcacatcagctacccccttcagtagcttcatcagctccaccattgcccatccacgacactaatgcccacactagccggtcaacaaatcttgtaacgccagatttctttgcgcctccaccatcctcttctactccactggctccaccgggcgcatccgtgattcctactgccccgcctcttcaccctacttcggcatctgttcagcgctctcaatatggcgccccactgctccagccttttccaccgcccactccacctccttcccttacccccgcacacagtgagagacctgttgttacaagggatagagtcaaggatgctctacagagacttgttcagagcgacgagttcatcgatttggtgtatcgggaattgcagaaatcacttgtgtaggctgcttattaatccttctggagtttctggctcgtgacaagtaccctgttattttttttctttgacctttttcatgcttcccttcctgtaatcctgtatagtttcgtgttcatgtattgatgtatagtactataggaatggctggttagcatacttatgtaactcaaaagcccaagtaaaaagagttttgttcaagaaaaaaaaaaaaaaaaaaaaaaaaaactactataagaaaaaaaaaaaaaaaaaaaaaaaaaaaaaaaaaaaaaaaaaaaaaaaagggggggcggttttaaaggatcaaagtttacttccccgtgcttgaaagggaataatttttttttagtggcaccaaaataaatttaacgggccgcggtttaaaaacgtggggacgggaaaaaccctggggttcccaaacttaatcgctttgaaaaaaatccccttttggcaagttggggtaataaaaaaaaggaccgaacaaatagccctttccaaaaat

SEQ ID NO: 107204 - DNA, 464 bp, Zea mays
  Clone ID: MRT4577_2926C.1
ttgggaccctcgaggccggccgggacatcccgctgttcgcgagccactccctctcacgagtgacgacgaaaccctaggccatggcttggcgcggcgccgcctcccgctccattatcgccgccgtccgtgctcgcgccgcatccccgtcttccaccgccgcctcgcgcctccgctcgacggctccacttcccgccccctcgcgccggtccgtccccgccttcgctttcgcgaccgcgaggccgttggcggcgatgtcggggtccccggcggcggccgtggtgaagctcaccgggcactcggcgacgagcgtgcgggcgtgctgtgagctctcccagggccaaaatgggaaggatggatgatgaggagatcagacggaatgattcatatcctgatgcacttaatgcgcacttttgtccttaaatgcaaggattgcagtctttggagggtggatcccttggaaactc

SEQ ID NO: 107205 - DNA, 1325 bp, Zea mays
  Clone ID: MRT4577_29270C.1
aggccggccgggccgggactggataattcgctcgctccgctcgatgcccgcttgtttgcggtgaagcctccggcgaacagccgtagcggaaacgccgcccgagatgtctgctccctccgccccaccccgcacggtgatctgtgtgggcgacgtccacggctacatcacgaagctggagagcctctggtccaacctccaggccgcactcccggccgacgccttcgccaccgcgctggtcatcttcctcggcgactacaacgaccgcggcccgcacacccgcagggtcctcgacttcctcctcgcgctcccgacccgccaccccgcgcagcgccacgtcttcctctgcggcaaccacgacctcgccttcgcggcgttcgtcggggcgctgccgccgccgcccgacggctccccgttctcggccacctgggacgagtacatccacaacgaggagcacgaggggtggttccgcgggccgggattcgagggcatgcacgtgcaggggaggcggtggggcggggtcatcaaggagaggtggaaccccaagaaggggctcccgtacaagggctccatctacgacgcgcagcccaccttcgaatcctatggcgtcgcccatggttcccctgatcttgcaaaggctgtgccagaggagcacaagaggtttctgcatgatttggtttggatacatgaagaggaaaatgtgccaattgatatggatggaggacaaatcatctgcaatctgattgctgtccatgctggcctagagaggactatagatttgaatgagcaacttagagttttaagaactagagacacaagggtgccaaaggttcaaatgcttagtgggaggcaagatgtttgggacacacccaagggtctggccggcaagcagactattattgtaagtggccaccacgggaagctccacatcgacggcctccgatttataatcgacgaaggtggtggttatgaagacaaacctattgctgcaatagtttttccttcaaagacattgatcagaagtaccgaggaagcgggaaccacatcagagaggtgatctagagttctagacatcatcgcagtgaacacggaggcacagttttttctctctcttgaagttactgcttgtagtcatgtactcatgtactcatgtcaaacgacaataggaacaacgtccaaaggcaataagttggtgaaccggacctgcgttttctcattttagtcactaatgactatatgtctatatatattgtaccttgatgctgtcaatttagacgagactgtacatcctcttttttagggcaataaactttactccctctgtcctc

SEQ ID NO: 107206 - DNA, 483 bp, Zea mays
  Clone ID: MRT4577_29271C.1
accagcaatcaccccgacttattttcggggagggagaaaactccaagtccccccccgatgtaaataaatgttgccccaccatgaggaaagaagggacccctttaaaatttcagggctgatcaggttttacatttcccttgagggacaacggccaagccaaaataaccatttttttttagtcacagcacccaccaaagtttttttgggcaaatcccccccggattgggggattacacagtttccaccacaatttttttttaaaattaccgggcaaaaaaactcccggggttgaccttgatgcacagcgcatgggttggaattggaactagtttttttgagggacatggggtacccatttttttttcatcatcggggattaaccttgcggcacagggtctgacatgtttcaaatacagatggggaaaactgattcatggtggaccacaggcccccacataaatggtaggtacaggcgggcccctt

SEQ ID NO: 107207 - DNA, 233 bp, Zea mays
  Clone ID: MRT4577_29272C.1
ggttgatgataagaacaacacagttgttgtactccaacaccatcaaaccaacaggtgaccaactttattgattcctgtaaggatgtcgagctgccgcgcgattgtgaccaactggctgcattcagagttagccgctattcaccactgctatgagccgcaaaccttggggaccgggacgcccggctgtgttgtaacccagaacaccttggccaggtctaagctattcctggggt

SEQ ID NO: 107208 - DNA, 175 bp, Zea mays
  Clone ID: MRT4577_29273C.1
ggtatgcgtagggccaggaggaagatcattggtagagctattaatggtgtcgaaatggactttgtgaacaaagaagatgagggtatgacgatagtactgtttgtggaggataatctggtgtagattgagaacgattagaaccatgtaataggaaatgattatatgtaagagatcg

SEQ ID NO: 107209 - DNA, 368 bp, Zea mays
  Clone ID: MRT4577_29274C.1
ttcttttttataataatttatatatttttcttgggggtttttcatttaattttttttttcaaacctatattctttctctttcatccccatgtgtcgagggaggctccctggagacaacccaacctaaaaatagaacacggcgagaacaaccacgggggggggggggccccacacttcagcgacctctagtggccacacaaaaaagggcccccccaacctgggggggcccccccacaaaaaaagagggtcggtaggagtaccgtgcaaatcccgaccggttccccatgggggaaccactttccctttaaggaggagcaataaaaatcgggggaactagacggaaataaaccgtctcccgggggaaataa

SEQ ID NO: 107210 - DNA, 318 bp, Zea mays
  Clone ID: MRT4577_29275C.1
attcggctcgagggtctctcctaaagacattttttgagatccgcctcggaagagctggaatggggcaactttcaactcgagcgaggctacgccgacttctgcgcctacgaattcacgagattgttcagtcccggcagcggagacggaacggcgtcagtgcaggatcacaaccactgtaggagagcctcggccgcacgacagcaagacaagggcgccgaccaataccagctgggaggccgtcacggatcagctaggctaggggaggaggacaagatagacatgctgagcgaggactctaacgaggagctagcacgggcc

SEQ ID NO: 107211 - DNA, 162 bp, Zea mays
  Clone ID: MRT4577_29276C.1
aaaaaggacccctgctggaaaaaggggttttttttaaaagggggctctttgaacaaaaactgtgttgtaaattataaagccacaggccgttagggggggggcaaaatctcaaaaggccccgcccccctaaagggctcgcaccaaattcagaggttccccacc

SEQ ID NO: 107212 - DNA, 320 bp, Zea mays
  Clone ID: MRT4577_29277C.1
agcaacacatctatttcttttgccctccggccgcccaaatgtcacgcctacaaatccagggtcaatccactgcgaaagccctgacctcaaattttcgcgcctcctgaaaccattaatctagtacttcgcccaccataaggaaggtgcgcacatgactggcaaccatagatgcccaaatctaggccatatataactcatcttttaactaaagaaatcatgcggaggtgatccctcttcttactgaccatatgatcacacatcttgccaggcgagagctaatacgtcctaatcttatttatttaccaactggccgacagaat

SEQ ID NO: 107213 - DNA, 401 bp, Zea mays
  Clone ID: MRT4577_29278C.1
cttttcagtaagaaacaattaaaacaatctatcctaggtgatatacattatcctggggggtatacggggctttctctgatagcgagtctaaatactaaaaataacctacaaaaagaccaaactaaataatacattatgggttattgctataggtaagaatgaacgagaagtgacatacattatcctgggtgatctactactaattatggtagtactgtaggcgtccacacccccggtgcacgttctgtcgcgcgcaccccgccttgcagggaggccgcatacgaccgcggccgaacccttccccgtatcccgcagccgcgctccttccatcatccgcggcatccccgcatcccgcaaccgtgctccttctaaggagtagagtccacatgtgcacgttatgc

SEQ ID NO: 107214 - DNA, 423 bp, Zea mays
  Clone ID: MRT4577_29279C.1
ggacaagatagctgcctggttgcttcatcagcaaaatcctgtcgacgatgtctccaacaataatgccttacccgtaaaaaaagaagaaaaagaagggcccctggtcccatctttccttggtgaaccgggttcttaccgggaaacacatgttcccccccccccttgtaccttaattaattcaaaatctttaacttaaaatattggccgacccaggcccggcccccgccgtttcccaaacgtttctttccacaacttaaaacgcttccttttggcgggacaaattcttaaaaccccccccacccccagcagaggcggcccccaaccccaacttccggggggccgcttgaacctccaccctttccttgatttgcccaaccccttccgtattggaaggccgttccttgaaggcctccccccggcagc

SEQ ID NO: 107215 - DNA, 3891 bp, Zea mays
  Clone ID: MRT4577_2927C.1
atggatcctaagggaaaggggatggtggtcaacgacaaggagaaggaggccctcttcaatgagccaagggacgacaagcccactgactcaggatcgagtcacaagaagagggacgacaataagaaaaggcgcatcaagaagatcatttactacgacagcgatgcctcctcttcttcaccaagagacgacgacgactcttcgtcgaaaaagagaacggttaatcaaaactactcttttgactattctcgcatgccgtacaattcaaatgcacatctactttcaattcctcttggaaaacttccacactttgatggagaggactattcgttttggagtcataaaatacgtagtcatttattctctctccatcctagcatttgggaaattgtagagaatgggatgcacttagatagtacggataaccttgtgataattaatgaacagattcataaaaatgcccaaactactactgtcttgctagcttcactttgcagggatgaatataataaggtgagcggcttggacaacgtcaagcaaatctgggacaccattaagatatctcatgagggaaacgacgccaccatgatcaccaaaatggagctagtggaaggcgagctagggagattcgcgatgatcaggggagaggagccaactcagacttacaacaggctcaagaccctggtcaacaagatcggaagctatggaagcacaagatggacggaccatgatgtcgtccgactcatgctaaggtcatttactgtaattgacccccatcttgtcaatcttattcgtgagaatcccaggtacaccaagatgacgcccgaggagattcttggaaaatttgtgagcgggcgcatgatggtgaaggaggctcgatacgtggacgatgctctaaacggtccgctacccgtctacaagcctcaacttgttgctcttaaggcaaccaatagcagggaggcgcttccaagcaaggtggcacaagtggaggctgatggcctcaacgaggacgagatggcgcttatcatcaagcgcttcaagaccgcgcttaaaggacacaaggagtaccccaacaagaacaaaacaagcggaaagcgctcctgctttaaatacggtaagatgggacaagaaaagagcggaaagaaggagaaaaagaagaactacaggaaggcaaagggcgaggcgcaccttggaaaggaatgggactcagactgctcctcttccgactctgacgatgaaggacttgctgcctcagccttcaacaaatcctcactcttccccaatgaaccgcatacatgtcttatggccaaggagaaaaaggatagattgctagataagcaagaagatattttgtatgaagagcatgacaaatttattagtgtgcaaaaatcccttgctttagaaactaagagaaatgaaatgctttcttttgagttatctgcttgccatgaatctatctctagtttaaagagtttaaatgatgaattaaatgctaagctagagaaagcgaatgaaactagttcatgtgtagagcatgttgttatttgtaatagatgcaaggattttgatgttgatgtctgtgatgaacatcttattgctattactaaattgaatgatgaggtggcaagtcttaatgcccaacttaagacttgcaaaagtaattttgataaattaaagtttgctagggatgcctacactattggtagacatccctcaattaaggatggacttggttttcgaaaggaaaccaagaacttaacaagccaaaaggctcccgttctcaacaaggagaaagggaaggcccctatggctagtagtcctcaaacgaatcatgcttttatttatgataggaaaattgctaatcataataagagttatgttcatactgcctacaatgatgcacatgctatgtttgcctctagctctacttttgtgcatggtagaagtaggcctaggaaaaatcatgttgtgcatcatgtgcctaggaaaatgtgtaatatacctactactgttttccatgcttgcaacacttcgtttgtactttcatgtaagaatgaaaaagtggttgctaggaagttgggattcaaatgcaagggagacaagacttgtatttgggttccaaaaattattgtgactaaccttgtaggacccaacaagagttgggtttatgcattcgggggctcaagctggattatcgacagcggatgcacaaaccacatgacgggggagaagaagatgttcacctcctacgtcaagaacaaggattcccaggatacgatcatctttggagatgggaaccaaggcaaggtcaaaggcttgggcaagatagccatcaccaacgagcactccatatcgaatgtatttctagtagagtcgcttggttacaaccttctgtctgataaatcagaaacccaaggaaccctaaagcgctttctaaggagggctcaaaatgaatttgagctaaagggtagaagaggccttgcaggatccagattgggtgttggccatgcaggaagagctcaacacttcaagagaaatgaagtttggagcctggtgccacatccaaagcaaaatgttgtgggaaccaagtgggtgttccgcaacaagcaagacgaacacggggtgctgacaagaaacaaggctcgacttgtggcaaaaggttatgcccaagtcgcaggtttggatttcgaggagacttttgctcctgtggctaggctagagtctattcaaattttattagcctatgccgctcaccactctttcaggttatttcaaatggatgtgaagagcgctttcctcaatgggccaataaaggaggaggtatacgtggaacaaccttctggctttgaggatgacaggtaccccgaccatgtgttcaagctctctaaggcgctctatggacttaagcaagccccaagagcatggtatgaatgccttagagatttcttaattgctaatgccttcaaggttgagaaagccgatcccactctttttacaaagacttgtgatggtgatctttttgtgtgccaaatttatgtcgatgacataatatttggttctactaatcaaaagtcttgtgaggagtttagcagggtgatgacacaaaagttcgagatgtcaatgatgggcgagttgacctacttccttgggttccaagtgaagcaactcaaggacgacaccttcctctcccaaacgaagtacacacaagatcttctcaagaggtttgggatgaaggacgccaagcccgcgaagacaccgatgggaaccgatgggcatgtcgacctcaacaaaggagataagtctgttgatgaaaaggcataccggtctatgataggttccttgctttatttatgtgctagtagaccagacattatgctaagtgtatgcatgtgtgctatatatcaatccgaccccagggaatgtcaccttgtgaccgttaagcgaattcttagatatttggttgccacgccttgcttcgggatctggtatcctaaggggtctacctttgacttaattggatacgcagactctgactatgccgggtgcaaggtagataggaagagcacatcagggaagtgccaattcctaggaaggtccctggtgtgttggagttccaagaaacagacattcgtttccctatccaccattgaggccaagtacgttgccgcagcacagtgttgcgcacaactactttggatgaggcaaaccctccgggacttcggctataatctgagcaaagtcccactcctatgtgacaatgagagtgcaatctgcatggcagataatcttgttgaacacagccgcactaagcacatagacatccgacatcacttcctgagggatcaccagcaaaagggagatatcgagatttttcatattagcaccgagaactag

SEQ ID NO: 107216 - DNA, 308 bp, Zea mays
  Clone ID: MRT4577_29280C.1
tgggacgccggcggtaccggtcgggtagacccacgcggacgatgtctgcggaaccgtgcccgtagcgctagccgacgccgacgtcaacaatggagagcctactggtcgctaggacccaccgaccgattctaccttttaggacctggtatagtcacatgcgtcgctgacgtttgcacctgcacatacactcttaccccaatcccctctacctctcaccccccatcgcctcccacctctcacctatacctcgccgacacctgaccgcggtactcgcctgcgtattgggctgtgaagcgagctctaagccg

SEQ ID NO: 107217 - DNA, 196 bp, Zea mays
  Clone ID: MRT4577_29281C.1
tcatccgagagactcgagaacggctggatgcagccagagcgctccacagatgtcgtccgctgatttgccattggaactggacgagctgcggctgttggacggcctcgccaagcgcccccgcgtgtagacgctcttcggggatctagatgcgcacgattgagtctaagatggctaaggctacttaaccgtcatcgga

SEQ ID NO: 107218 - DNA, 167 bp, Zea mays
  Clone ID: MRT4577_29282C.1
cacacataaccgtcgcctgcggagcattctttcgccaatgctacggtctgagggaaggagcggcaaccatggtgcacgtgggcggtctaccccaactattgtaagacgttcaataaaccaacgcgttcttatgagaaagagcgtctttatgctgaactgaagctggt

SEQ ID NO: 107219 - DNA, 738 bp, Zea mays
  Clone ID: MRT4577_29283C.1
cctcgacacacaaccacccccaacacaaacacaatgggtcacgcagccggtcttcgcgcgggtacgcgctatgcattctcgagggacttcaagaagaagggtatgatccctctctcgacctacctcaagcagtacaaggtcggtgatatcgtcgatgtcgtagccaacggtgcggtccagaagggtatgccctacaaggtctatcacggcaagactggtatcgtctacaacgtcaccaagtcagcggtcggtgtcatcctccagaagcaggtcggcaaccgatacatggagaagcgcatcaacgtccgcatcgagcacgtccgccactcgcgctcacgagaggacttccttaagcgcgtcaagctcaacttcgccaagcaacagaaggccaaggagactggcgagccccagcagatgaagcgccagcccgccatgccccgcggcgagcgcgtcgtcagcctcaaggacaacaagccagagaacatcacacccgtaccttacgagacctacatctaaacgttgcagaggtggttcggatttgtgggctggcaacatgggacacggattgtcaacggcgtggtttctcggacttttcgattattctctcttctgcactttcatacgcatggaaagcgacgatatcacgatgcagatatagtggtgtgccaacatggctttgagtgacccctcacgccaatagacatcatcctccaaaaaaaaaaaaaaaaaaagccccta

SEQ ID NO: 107220 - DNA, 446 bp, Zea mays
  Clone ID: MRT4577_29284C.1
ggggccaaagccccccatgccgaaaataaccgggttttttcatttttaggggcccaaccccggggcttttttggtcaaacgggccccggggcttttttttaaattcgggccccccacagtttatggccccccgaaccccacgaattaaaaaagggaaaggggtttcctagctttgctttaactggcagccccggaacctggggcaattttaaaccccttggttttggttccggttggtctatgaaaagaaaccaccggggggggttacctcccctaaaaaagctggttttccagttcctaaatgaatctgacaaaagtgaggatgatttttttgccttcaggggggaagatgctctccggggggaattgggcaccccggggggggttggcctttttggggggagccgccctgataaggccattttcaagccatgccggagccccaa

SEQ ID NO: 107221 - DNA, 496 bp, Zea mays
  Clone ID: MRT4577_29285C.1
tccggtacagtggggcatatcgatatgctgccagcggttgttccatacaaaggatctctgagagagatagatgcaggaccaatgacaagctactaccgagagaaacgagaggggcactggccgagtatggcagcgggcgtggccatggacggcgccgaggcgaccgggcggactgggatgaggaatggcggcgataggcaaaggaaaatgcagcggcgcactcgacaagaacaagaacgctcctatgacgagcaaaccaaatcgatggagtccatgttcacaacacatgccaagctggatccccgccagaagctgcaactggctcgggagctctgcctgcatccgcaccaggtggccatctggttccagaacaagcgctcacgctagaagtacaagcgtctggagcgcgagtacttagctctgcgcgacgactaccacgcgcctactctgtaactactagtccctcaaagacgagtaagcgcacgcctcctcaagc

SEQ ID NO: 107222 - DNA, 427 bp, Zea mays
  Clone ID: MRT4577_29286C.1
cgcagatcgagtcataaatctagctagcccttatcacgcctagacacgccagcaacaatgggggctcagctggccgacgcgtgtatcgccttgttgtcctcctatgccttcttggccgtgtctggccagaagttcaacgccatcttcagcttctgcgacttcatgtccgacaccggcatcctgtgcatgaacggtccctccgccgtcctgacactcacccagccgacctactgcgagaccttctttgtccgcgccacctgtcgctggtcccacagccgcctcgtcgtctacttcctggccgagaagttcaggctaccgctgctgaagccctctaagcaaggcggttcatacttcaagcacgtcgccaacatttcgatcattggcgcgaccaccatggactctggcttgttccaatttttgggcattg

SEQ ID NO: 107223 - DNA, 262 bp, Zea mays
  Clone ID: MRT4577_29287C.1
aaactatctgtttgcaggtaatgtgtgaaacaggtgaaggaccaacttccccatggatatcattcagagctctgtttgcagctattcaagacaatatatcatctgtggcaagggagttaatcttccatcattatgaagagctgaaggaaagcataattacccgtgaagaaatggtgaagaaaatgataattgtagttggagagaaagtacttttggaggccttgaagaagcttcattactgtgttgataggaaaatatcaat

SEQ ID NO: 107224 - DNA, 329 bp, Zea mays
  Clone ID: MRT4577_29289C.1
ctatattggatttaagggctggtttccaccaaattcttttgcaacagggtgaagaatacaagacggcattccaaacatatctgggccactatgagttccgagttatggctttcggccttacgggtgctcctggcacatttcaaaaggccatgaatcatacattagctccaatgctccgtaaatgcgctcttgtgttctttgatgacatattagtgtacaatgtatccttggagagtaaccttcaccatttgcagcaggtgtttgagctgttagccagagaacaatggacaattaagctatccaagtcgtcctttgctcaggatcagttt

SEQ ID NO: 107225 - DNA, 939 bp, Zea mays
  unsure (1)..(939): unsure at all n locations
  Clone ID: MRT4577_2928C.1
cattgggacctcgagccggggccgggatcccgctgttcgcgagccactccctctcacgagtgacgacgaaaccctaggccatggcttggcgcggcgccgcctcccgctccattatcgccgccgtccgtgctcgcgccgcatccccgtcttccaccgccgcctcgcgcctccgctcgacggctccacttcccgccccctcgcgccggtccgtccccgccttcgctttcgcgaccgcgaggccgttggcggcgatgtcggggtccccggcggcggccgtggtgaagctcaccgggcactcggcgacgagcgtgcgggcgtgctgtgagctctcccagggcacttaatgcgcacttttgtccttaaatgcaaggattggattctttggaggttgcatcccttggaaattcgtcgggcttgcatccttttccatgcattttgcagagtacttagcacctcgtgtgtcggcaatcggacagtatatctgctgtaacttacataaataatcatatgttagcctgctgctactcactgccccgcatcgattggaactaagttgatgtttggttataacgttaaatcatgtttgtttaagtctaaccttaatcggattccacactaaaaactgatatcgacctattcaaatttattactgctgttatttgactgtcaatcattactattatttatattttgtgaacaaaacggcgctgcgcaaatttatcctttgtatgagctcatgaaagaggaagatttttgtcctgcccgtatttgtattgtggttgatgttatctaatatattctaacaaatataaattgaggcgacttaggccttgttcgtttgtgtcggattggtgggtcggaacgattcctaaccggattgtttctcttatttatataaactntgatgaactggaacgattccgggtgcaatccgataaa

SEQ ID NO: 107226 - DNA, 418 bp, Zea mays
  Clone ID: MRT4577_29290C.1
aaaaaaccatttttgattggcaaatgggggaaaaaccaagatgctccttaaccagataaacggccccccaatagtaaagctaaacagttcacagggtaaacagcacccacagaatacaaaatttatgtaaaaagggaccatctcacttccgtttggaaaaagcaaaccctgcataaacaacgggtcgaatattttttttttggaagaagccttggccactttggcaccgggggggtcctttttttccacatttttgaggactccaacagcacccgtttgtttcttgtcccggccagaaaacctacccaggggaggatcctggaaaaatgtcccccccaccatgggctggggggaaataattttcaccataccagaataaccgtttttaaaaaactggggctttttttaaagctccttg

SEQ ID NO: 107227 - DNA, 645 bp, Zea mays
  Clone ID: MRT4577_29291C.1
cccctcctcgagtttttttttttttcttttttcttacaacggataaagtaaattccttttatttaatatctgtccactacaacttcacttggcgaagccttttggagggtttctgctgtatgccttgcttgtttgtactgccttactagaacctgggagacgttcttgcttgtgcttgttgtttactcagcatggatctgtccactttgagctagcatttctgagacatctctcatgggtgctttttctggttgagaacattgtcaacagcttctttgctatagatatcatcctaacctttttcctggcatacctataggaaacatgacaaatctggttgtccagggaagttgccgtaccaaaattcgtagttctcttccaaatacccgcagctaatgtttgtacagctctttgttcagagaattatgtgatctttcctttcttgcatgatgcagagggacacaatccatgcagcttcccagtttgccgcaagaaatcaattacctgaatacataagggatgaaatgctaactcatattcgcctaacgtgcaagaacagagagtctgaaacagaaggaaactttggacagtctccccaagggaatccgatcaggcatagcataccacttattctttcatgtcatg

SEQ ID NO: 107228 - DNA, 389 bp, Zea mays
  Clone ID: MRT4577_29292C.1
gcaaactaaactgtaccggtcataccatgcgtacatacaagacctgagcaggcgatggaggacgcacaaggcaggggagggcatccaccatcgttaccacatcaggtgtgagtgaaagatgcctgctgtttgacaccgatagatgacaagcatgggaggacggccaccacctggggcgttttcaggtctttgcgctcgactggccccgaacgtggcccacaggaccaatagagatgtttcttgctgttggactaagaaacgaggttgtcctacggaggtttctttggactgaccttgtcttccgattaatgttacaactgacttatttggatgttagtggaactccgctggtatcacttgatcacgtggtgggtgccaatgtgaacctg

SEQ ID NO: 107229 - DNA, 120 bp, Zea mays
  Clone ID: MRT4577_29293C.1
ctgtgtcgtcgcgtcgcgttggtgtcgtcctcgtctcggcatctatacggcgtgttggtaagtgatttgactgtgagcgactatcttcatcggtctatacatgtcgagactcatcttctg

SEQ ID NO: 107230 - DNA, 1917 bp, Zea mays
  Clone ID: MRT4577_29294C.1
gtacaatgataggggttaggttgcatatgtaccatgcttaaagaaaatgcaggctgcgacaaaataggtggtatactgcatgcgcgcgtagaccgggttttctaacggcactgcatgctacacttttttttacttttctagatatgtttttacctatatatgaacgtataataaaaactgtgtatctaaaaggccaaaacaatccataatttaggtagtggccttttagatacactgggtacctcgaggcccgcgagggtcagtcccactgctgctaaagctgagcccccagacccccagcagctagcagccgcctcctcgtcaggcccttcctccttcaccctcgccaaacccgcctcctccggtccgaactccgtctgcttcatctgagcgtccgggaggacaaaacacgcggcgaggaccaggatggcgattgtgcgggaggaggcagtggacacgtccatcagcccaagggtgagcgcgctgcggccgtccaaaaccatggccatcaccgatcaggccatggcgctgcggcaggccggcgtgccggttatcggtctagccgcgggggagccagacttcgacacgccgcccgcgatcgcggaggccgggatggatgcaattaggaatggttatacaagatacactcctaatgctgggactttggagctgaggaaggctatttgtactaaactccaggaggagaacggggtatcctacctcccagatgaggtgctggtgagcaatggagctaagcaatgcatcacacaagctgtgcttgcagtttgctcacctggtgatgaggttttgattccagccccatattgggtcagttatcctgagatggctagactggctgatgcgactccagtgattcttcctacaaacatatcagagaatttcttgttaaggccagagttgcttaccgacaagatcaatgagaaatcgaggctcttaattctctgctctccatctaatccaacagggtcagtatatccaaaggagttgcttgagaaaatagctgatatagtcaagaagcatccgaggcttttggttttatctgatgaaatttatgagcatattatctatcagcctgcaaaacacacaagctttgcttcactacctggaatgtgggaaagaacattaactgtaaatggtttttctaaggcttttgcaatgacgggttggcgtcttggttaccttgcagcccctaaacattttgttgcagcatgtggaaagatccaaagccagttcacctcaggtgccagcagcatatcacagaaggcaggggttgccgctctgaatcttggctatgctggtggtgaagcagtatcaactatggtcaaagcattccaggaacgccgtgactatcttgtgaaaaatttcaaggaactgcctggtgtgaaaatatcagaacctcagggtgccttttatttgttcattgacttcagcgcctactatgggtctgaagtagaggggtttggcactatcaagaattccgagtccctttgcatcttcctattagagaaagcacaggttgcccttgtccctggtgacgcatttggggatgacaagtgcattcgtatttcatatgctgcatccctaactacacttcagactgcgatgtcaaaattaaaggaagctgttgctctgctcaagccctgtgttgctgcgtagcaagatcactaaattgcaataaggagtgaccaaggcacctttaactaacctttcacattattttaaacacaatgttcgaattgttgggcagacttggtctgttgtttttatatgtaacattatggatttatgatgtgtacatgcaaataaaaatgttttgtttagaaaaaaaaaaaaaaaaaaaaaaaaaaaaaagggggggggcggtacctaccaagatagacgggcgaataataaaat

SEQ ID NO: 107231 - DNA, 1471 bp, Zea mays
  Clone ID: MRT4577_29295C.1
gagatctctgactgctctgttgcgtcatcgaggtggaagttagagatctgattccgcccgggcccggtctccgttcccctgccgacgagtgggcgcacagcatacctctcacggtctccgttcccctgccgacgagtgggcggccgctgccgccggcttacggaaggtatttctttggcgcactcatgatttagcaccagccaaattgacctttaactctggtgacataagctgttgctagggtagcaaatcaagagctaagaatggcagattcaatggtagcaagcttctgggggcctgtgacatcaacgactgagttgtgcgaggagaattatgcacactcgtcatatatcgcagaattctacaataccatctctaatgtcccatgcgttcttttggcacttattggattagtgaatgctttctgccaaggttttgagaaacgatttagtgtcctgcacatatccaatatgatacttgctattgggagtatgattttccatgccaccttgcaacttctcctacaacagagtgatgagactcctatggtttgggagatccttctctacatgtatgtcctctattcaccggactggcactacaggagcacaatgccaactttcctgttcctgtatggtgctgcctttgccgtagtacatttctttgcccggttccaagtcgtattcaagctgcattacgttggcctctgcttgctctgcatcccccggatgtacaagtactacatacagacgaaagacgtgggtgcgaagcggctcgcaaaactgtgggtccttacactgacccttgggaccctctgctggctggttgatcgcgtcttctgcaagaagctttcgcattggtacgtcaacccgcaggggcacgcgtggtggcacgtgcttatgggcctcaactcgtactatgcaaacacgttcctgatgttctgccgggctcagcagcgcgggtgggagccgcggatcacgcacctccttggattcttgccgtatgtcaaggtccagaaaccagagaagagggaatgatttctgtctctgcttgaaaactgatgatattcagtcggccaccagtaagctaatgcccccaatgtgtgctcagacaagtccgtggcactcttgtatatgggcgcccaaatgattacggacttcaaatgttctgatgtcgcattagattttgtatcatacttaaatcatcgaacagagattgtcctagttttggccacctttcttttggtttcttcgcaattgccgtttggtggtaaattaggactgagttatttatttatttgtttgtcgttgaatggagtccagttgtactagttaccactgcacaagaagatacattcatccacatgatgacatgttaattaattggcttgtgttgctgcccttctttaaaaaaaaaaaaaaaaaaaaaaaggccggcgctcgcgatctagaacctaagttctagatcgcga

SEQ ID NO: 107232 - DNA, 622 bp, Zea mays
  unsure (1)..(622): unsure at all n locations
  Clone ID: MRT4577_29296C.1
ccggccgggccgggcacttcttgcatccgtaagtacatgaatgccatgtcttctgatcttgtttgctatctttgaagtatttcagctttggtatatgtagtcagctattgaattcgggtgtggagcagtaatactacatatttgccattttgaaactactatgctatgatgctaaggtgaatctgataatggctaaattctttgttgtatttgaagttttttttctccttgtgcatgcactttttttttgctaatgataagtgcacaatggccattgctagtgataagtccagagttatgttttggaagatgagaataattaatgctaggattgtttttttctttagtcacaaattgtgaaatataattggtgttgattcattactatctggttacatgttctttcactgtcaataataacgtattgtttcagattttctcatggtgcccacatgttagctcatcctttgtacatcagattgcaacctttgtatacagcgaccttagacatcaacaagaagtctagcgtattgttgtcattatacttgttttgatatcgccatctaaggcatgtgcntccggtggatgcatagggggcacattgtgttgctatatccctgca

SEQ ID NO: 107233 - DNA, 260 bp, Zea mays
  Clone ID: MRT4577_29297C.1
ccgacgctttgtccgacacgtgatttctgttctacacgagatcatattaagacaactgcgagggttattaacaattctgccgcactatacaaacttcccacctcacagaatctcccgaccagataatgcaatcaagcccgatcaatccagccaagacgatattactgtccaaaattacgaacctcgctatacatataatcacctacatacttgaattaactcactagatcccgaaagttcactcgtactctacagctaat

SEQ ID NO: 107234 - DNA, 454 bp, Zea mays
  Clone ID: MRT4577_29298C.1
aagatatcatctccagttatccctgtcctggtaacatgggccctcggctatatagtcgcgaagcttttctttgcggtggttgagatgtcgatcgacaccataatcctctcgttctgccaggacgccgaagagcaccaggggaatgcacagtatgcgccccctgctttgatggaaactctggatgaacagggcgaactgcagagactaactcaagggccttgactgttgtttcctcctgggcatcccttcttggtatggtagcatggaaacttagcagcaggctaatcttttgttaccccgttcccttggcgtgtgaagaggtttgccattttgcttgctaccctaccaaagtttcttctacaagtctgaatctgacatgttttcctggcccaattggcatgtgtaggcagcttatctaatatatatatatatatatgtgtgtgctattgctgat

SEQ ID NO: 107235 - DNA, 350 bp, Zea mays
  unsure (1)..(350): unsure at all n locations
  Clone ID: MRT4577_29299C.1
cacatttggcagttgtttttatcataatagtgcatgaatttggcaatgatgttataatatcacatgatgacaanaatctgtacacgatataagcatggatagagtagttgtcgctcgtgttgttgcctgaatttgcatttgtgcatttggtgaactggtaagctcagtactctgtaaaaccttttttctgaacaaatataaaagcagggatcctacctggtttacaaaatattataaatatacctgtttgaattgactgtacttcctgttattgacaaccaatgcaacaggtaatgccgtccctcagtttgctaattttcctgntggggttcactgatttgctccttcta

SEQ ID NO: 107236 - DNA, 1045 bp, Zea mays
  Clone ID: MRT4577_2929C.1
atgacgggggagaagaagatgttctcctcctacgtaaagagcaaagattcccaagattcgatcatctttggagatgggaaccaaggcaaggttaaaggtaaacaggtgggaagtactcatcacaacaagaacgtgatgaccacggcaagacctctagagctacttcatatggacctcttcggacccgtcgcctaccttagcatcgggggaagataaatcagaaacccaagggaccctaaagcgctttctaaggagggctcaaaacgagtttgagctcaaggtgaaaaagataagaagcgacaacgggtccgagttcaagaatctgcaagtggaggagtaccttgaggaggaaggcatcaagcacgagttctccgctccctacacaccacaacaaaatggtgtagtagagaggaagaacatgacacttatcgacatggcaaggacgatgcttggagagttcaagacgcctgagcggttttggtcggaagctgtgaacacaacctgccacgccataaaccggctctaccttcatcgcctcctcaagaagacctcggtagaagaggccttgcaagatccggactgggtgttggccatgcaggagaagctcaacaacttcaagcgaaatgaagtttggagcctggtgccacgtccaaagcaaaacgttgtgggaaccaagtgggtgttccacaacaagcaagacgagcacggggtggtgacaagaaacaaggctcgacttgtggcaaaaggttatgcccaagtcgcaggtttggattttgaggagacttttgctcctgtggctaggctagagtcaattcgcattttgttagcctatgccgctcaccattcttttagcttgtttcaaatggatgtgaagagcgttttcctcaacgggccaatcaaggaggaggtgtacgtggaacaaccccctggctttgaggatgacaggtatcccgaccacgtttttaagctctctaaggcgctccatggacttaagcaagccccaagagcatggtatgaatgccttagagattttgagagcacctag

SEQ ID NO: 107237 - DNA, 479 bp, Zea mays
  Clone ID: MRT4577_292C.1
ggaggcaacaacgtaaacagccataattattctaaaaaacccgggagcaaggcgggggaataaacaactcttacaacatggggggggggaaaccacacaatacttcaaaacagacacacataacacgagggcgggggcaactctcgggaaatcacgggaaaaggggagcacactggcctgaggctgggtaatcagcaaacttttttaggactcggaaccctcggggccatcctcgccctaatggaactcagcaccgacctccttgaagtccttttcgagcgccgccaggtcctcacgggcctaaaaaaactaaccttcctccataccctaaccgacgtaccagtgcacaaaggcacccttggggtacatgagggcaaacttgggggcgatgcgggaaaacacctccacaacactgggggagttggagatcatgcacacgggacgctgcaccttggccagggcgccaccaggcacaacgc

SEQ ID NO: 107238 - DNA, 510 bp, Zea mays
  Clone ID: MRT4577_29300C.1
gccggccgggtcgcgtcaactctcatcatccaccataggctcgcccataccagatttacccccaatctaccgcaacaccacaaggacgcatccgcgtccccgaccagaacgttctcatgcgaagaaactgctcgagtctgctagtctctgcttcaaggtggcccccatctacgactaggaaaactacagcttacctgacataacgtatttgcttgcacgaaagaactactaacgtgatacccgtatatagtgataatcaactcttactatatctaaattacgaacgacaactacgtgatggcaaacaaacaagtctccgctaggtatatctcacttctcatcaccgatcacaacgtcaagaaacgagataccgtgggtgaattgccaaaacccccgaacactgagccattgaactctcgctgctcctgaacctgctggatgagcatcgtctgactgagcgcctcgcccctaccccatccgactcgaccaggggaccctatggtcgccgtg

SEQ ID NO: 107239 - DNA, 119 bp, Zea mays
  Clone ID: MRT4577_29301C.1
gtacgagatttaagcctacccaggcggagattctggtgtgtctataatacgaaacactgcacacattaagtacaaaatacaatgttcgtgtctagttatcttagacagtcagccttctg

SEQ ID NO: 107240 - DNA, 192 bp, Zea mays
  Clone ID: MRT4577_29302C.1
cagggaataataaaatcttttaattattatcttccacgcttcgggggttgtttgaacatttccccccagaaaacccaaataagtccctttattcacacccagaggggggcctttaaacaacatttttaaaggaggttttttttttcttcaacccaacatgttttaaccttgtataaaggatccggctctttt

SEQ ID NO: 107241 - DNA, 513 bp, Zea mays
  Clone ID: MRT4577_29303C.1
aaaaaccccccatcaaaaaggggaatcacgaaaacatatatcacccttaggttggcaaaagggggttaaacttttttcctaccgaaaaaaaggatcttttttaaaacaaggggcaaatttttttttggaaacccaccggccaataaaaagcaaatttggggaaacgggataaccccaggggggacccacccttttcaaaaaaaaacattacaattggggggggccttaaagagggaaaagtttcccattagttgggggactaacaaaaatagggcctaacggaacaaaaaacgaggatcctgttacaacaggacagggcaacttcggactccagaaaccatggggggggaaaaaatagtaggcccgaactttcgcaaattttctttcccctttttttttttgggcttcagggaccggggttattggggccggctttcataaaataaataaaaacagaattccgcgggctccaagggaaaaccaaccgctgaaggcaaaaggaccaaaattccc

SEQ ID NO: 107242 - DNA, 543 bp, Zea mays
  unsure (1)..(543): unsure at all n locations
  Clone ID: MRT4577_29304C.1
tcgcngaaaaaaaaaaaaaaaaaaaaaaaaaaaaaaaaaaaaaaaaaaaaaaaaaaaaaaaaaaaaaaaaaaaaaaaaaaaaaaaaaaaaaaaaccggccccttgggtcaaacccggaaaattccgacaccggtccctgggggccttcccagcttttccttttaaggggagcctttttagaaccttgcctttacccttggcaataagctgtttcctgggggaaaattgttatcgcgctaaaatttccacacaaaatacaacccgaaaccttaaagtgtaaaccctggggtccctaaggagggacctaactaacattattgggtttgccttaattgccctttttcaattaggaaaacctgtcttcccacctgttttaataaatcgaccaacccccgggaaaaggcgttttgctttttggcccccaggggggttttttttttccccattaaaacggccaacagttttttgcctttaaccgcttggccctaaaaaatttgaaccaatcgcccccccttgttttgcccaagaaggcaaaaaccctgt

SEQ ID NO: 107243 - DNA, 430 bp, Zea mays
  Clone ID: MRT4577_29305C.1
cttaacgtcacaccgggtctgctgggagccaaacagctgcggcctgatctgggagcgatagaatctcatcacttagggtcactaccggaaatggaggaagccggactgggagaccttgagagttgggagcgagagggaatcgtaggacgcagctgagaattgggaaagattttcttaggcttgttcttcctgtccatctcagttaaataataatcataactcatgtaagtctagaatttgtctcaaagttatgcctacctggctcgtaggatgccaacgttaggagtgaaaatagtcaacgctctcccgagagagcacatgacactacatgagcttcatcaagaccctcggaggcccagaatgcgcaccaaagagccatcgacgataattcttctacccaacttttatttagtattattaaatattcagt

SEQ ID NO: 107244 - DNA, 498 bp, Zea mays
  Clone ID: MRT4577_29306C.1
ttttttttttttttttttttttttttttttttttttttttttttttttttttttttttttttttttttttttttttttggggaaaaaccgcccccatagaaagaatcaaatactggggggatacaaaaattttgtttacagctcagggggagaataattacaaatatttccccctgccagccacattttcccaaaaaccacattgacgggggatataccttaccttttatacaaaaacaaggggggggggggaagcaaaccccaagcttttgacccaacatgttttccaggggtaggcccccccccctgcccctttaaaagggggtggagcgccttgacaacaaagcttattttcggcccgaagtcccctttttattgaaaacacaagggggggacaggcgcaaaatttgaaacaactttaggggggtaggcccccccaagttttgagtaaaaacactttttaacccttggtttgttaaagtttgggggaacccaagt

SEQ ID NO: 107245 - DNA, 109 bp, Zea mays
  Clone ID: MRT4577_29307C.1
aattcggcacgaggtcctagtgtactcttgccttgacacgaatactcagagagctcactctctccagcccatccccaaacctaagccgccacgcccaaagcacccttcc

SEQ ID NO: 107246 - DNA, 438 bp, Zea mays
  Clone ID: MRT4577_29308C.1
ccggccgggaaggccaatactcttgttaccatcgacgtatgcacgagagaggacggacatatcctccaagaggggtggcggtcattcccttctggccattcgtccttctcattcgcaggcttgggatttctcagcctttttcttgctggacaactccatgttttccgctacgcagccggtggccgtgacctgagccgggcattggtctgccttctaccgctcatcggagctggcatggtcgccatctcccgatgtgaggattaccgccacgacgtttatgacgtctgcgtcggctcggctctgggcatgagtattgcatattggagctacagacgccactggcctcgactgtctagccaaaagtgtgacgagccgtatccgcgaccaggagtcgatacccagcccggctgccaacgcttcaccgatgatgaggaggcc

SEQ ID NO: 107247 - DNA, 334 bp, Zea mays
  Clone ID: MRT4577_29309C.1
tcttccactcactgaatgctttttgtttcccatcaaaaaatgattcacgtatggttgaatcatttccttatctagggttgcaatatcaagtcaattccagttctaaccttaactcaactctacaacgtcatgtaaattctaccttgtaattattcgtgccttggttgtttccgttgtttttttttctcccattgctttcaaaaacatggtttacaccttttaatcaaagaagattgtaatatactaatcactacttccttgcccttcaaaaaaataatatatttataattttatttatttttattattttattatatatttaattatataaaaa

SEQ ID NO: 107248 - DNA, 3930 bp, Zea mays
  Clone ID: MRT4577_2930C.1
atggatcctaagggaaaggggatggtggtcaacgataagacaaaggagtctatcgtcaacgagccaagagatgataagccctcggactctggctcgagtcataagaaaagagacgggaagaaggagaggcgcattaagaagatcgtctactacgacagcgacgagtcttcttcttccccaaaagacaacgacgaggagaaaaagaaggcctacaagaaggcgaagggcgaggcgcaccttggcaaagagtgggactcggattgttcttcgtccgactccgacgacgaaggactcgccgcctcggccttcaacaaatcgtcgctcttccccaacgagcgccacacttgcctaatggcaaaggagaagaaggtaaacgctcgagaaactcccaagtactctacttctagtgatgaggactctagtgatgatgaagtagattacactagcttgttcaaaggattagatagatctaaagtagaaaagacaaatgagttgattgatgccttgaatgaaaaagatagactgctagagaggcaagaggacatattgtatgaggaacatgaaaattttgttagtgttcaacattctcttgccttagagattaaaatgaatgaattactatcttctgagttatctatttgcaatgaatctatttctagcttgaagattttgaatgatgatttaaatgctaagctagaagtagttaataaatttagttcttgtgtagagcacgttgtgatttgtaataggtcaagtcttaatgcccaacttaagacttgcaaatgtgactttgataaattaaaatttgctaaggatgcctacactgttggtagacacccctcaattaaggatgggcttggctttcgaagggaagccaagaacttaacaagtcaaagggctccaattctcaacaaggagaaagggaaggctcctatgactagaagtagtcaaaagaatcatgcatttatttatgatagaaaattttctaggaatgttcattataataggagttataatgcatatgattcacatgccatgattgtttcaagttcttcctttgtgcatagtagaaatatgcctagaaacaatgttgttcatcatgtgcctaggaaaatgcaaaataaatctgctactgtttttcatgcctgcaacactgattttgtactctcatgtaaaaataagaaagtggttgctaggaaatctggggccaaatgcaagggagacaagacttgcatttgggtccctaaggctattgttactaaccttgtaggacccaacaagagttgggtttatgcatccaggggctcaagctggattatcgacagcggatgcacaaaccacatgacgggggagaagaagatgttcacctcctacgtcaataacaaagattcccaagattcgatcatctctggagacgggaatcaaggcatggttaaaggactaggaaaaatagctatttcatccaagcattccatatctaatgtgttcttagttgaatcgctcgggtataacttgttgtctggtagtcaactatgtaatatgggttacaattgcttatttaccaatgtagatgtgtctgtctttagaaggagtgatggttcattagcttttaagggtgtactagacgacaaactctatttagttgatttttcgaaggaggaggctgttctagatgcatgcttaatcgctaagactagcatgcgctggctgtggcatcgccgtctagcacatgttgggatgaagaaccttcataaacttctaaagggagaacatgtgttaggtctaaccaatgtaactttcgaaaaagataaaccttgtgcagcttgtcaagcaggtaaacaggtgggaagttctcatcatagcaagaatgtgatgaccacatcaagacctttggagctacttcacatggacctcttcggacccgtcgcctacctcagcatcgggggaagagagctcaaaatgaatattgagctcaaggtgaaaaagataaggagcgacaacgggtccgagttcaagaatcttcaagtggaggagtaccttgaggaggaaggaatcaagcacgagttctccgccccatacacaccacaacaaaacggtatggtagagaggaagaataggacgcttatagacatggcgaggacgatgcttggtgaattcaagacgcccgaacggttttggtcggaagctgtgaacacagcttgccacgccataaaccgggtctaccttcatcgcctcctcaagaagacgtcgtacgaacttctaattggtaacaaacccaacgtttcatattttcgtgtatttgggagtaaatgttacattctagtgaagaaaggtaggaattccaaatttgcttccaaagctgtagaagggtttttgttaggttatgactcaaatacaaaggcgtatagggtcttcaacaaatcatcgggtttggttgaagtctctagcgacattgtatttgatgagactaatggctctccaagagagcaagttgatcttgatgatgtagatgaagatgatgttctaacggccgcaatacgcaccatggcgattggagatgtgcgaccacaggaacaaaaggagcaagatcaaccttcttcctcaataatggtgcattccccaactcaaattgatgaacaggttcatatagaggaggtgtgggatcaagggggagcacaagatgatcatgttatggaggaagaagcaccacaggcccctccaactcaagtccgagcgacgattcaaaggaatcatcccgtagaccagatattgggtgatataagcaagggagtaactactcgctctagattagcaaatttttgtgagcattactcttttgtctcttctattgagcctttcagtgtagaagaggccttgctagacccggactgggtgttggccatgcaggaagagctaaataacttcaagcgaaatgaagtttggacactggtgccttgtcccaacaaaacgttgtgggaaccaagtgggtgttccgcaacaagcaagacgaacacggggtggttgttccaaatggatgtgaagagcgctttcctcaacgggccaatcaaggaggatgtgtacgtagagcaaccccctggctttgaggatgaacgagactttctaattgctaatgagttcaaggttgggaaagctgatccaactcttttcactaagacatgtgatggtgacttatttgtgtgccaaatttatgtcgatgacataatatttggttctactaaccaaaagtcttgtgaagagtttagcagggtgatgactcagaaatttgagatgtcgatgatgggagagttgaattacttccttgggttccaagtgaagcaactcaaggacggcaccttcatttcccaaacgaagtacacgcaagacttgctcaagtggttcggaatgaaggatgccaagcccgcaaagactccaatgggaaccgacggacacatcgacctcaacaaaggagactccgattatgccgggtgcaaggtcgataggatgagtacatcagggacgtgtcaatttctaggaaggtccctggtgtcgtggagttctaagaaacaaacttctgttgccctatccaccgctgaggccgagtacgttgtcgcaggacagtgttgcgcgcaactactttgcatgaggcaaaccctctgggactttggctacaatctgagcaaagtcccactcctatgtgacaatgagagtgcaatccacatggcggataatcctgttgaacacagccgcactaagcacatagacatccggcatcactttttgagagatcaccatcaaaggggagatatcgaagtgttttatgttagcaccgagaaccagcaagccgatacctttaccaagcctttagatgagaagaccttttgcaggctgcgtagtgagctaaatgtcttagattcgtgtaacttggattga

SEQ ID NO: 107249 - DNA, 259 bp, Zea mays
  Clone ID: MRT4577_29310C.1
gttcaaatacttatattaaaatcatcgagagttttatttttaataaaagaagaaaaactgccctaagatggaactagacgattaccatttcaagcttaagattgttcttattggtgacaagagtgttggtaaaacaaccttccttgatgctattacaagcaactttggaaagattgctgaatctgaacaatcaaatgaacttaatactagagttgtcggatatgtcgatgataatacactatttcagatccattattgg

SEQ ID NO: 107250 - DNA, 357 bp, Zea mays
  Clone ID: MRT4577_29311C.1
ttaatttccgtgtcgaggcacgcgtgcactcagtttcaaaagcaagttgagtagcaatatctctcatatgtgtagaggcaatttgaaaggagccatgttgcttaaaacggtcggaaggttaactttctttttatacatacactaaatctactaataactttacacctacagctctactacattttccattacctaactctagaatttattttatatactcttacaattactatcaataacatatatattatcacactcttatgctgatcatctttacaacaatcattacattttctactacacttgtatatttctttctttttacttattgtataattttccatacttaacattttt

SEQ ID NO: 107251 - DNA, 1000 bp, Zea mays
  Clone ID: MRT4577_29312C.1
gccaatgaaattattgtacccttgttcaggatgcgaggtggcggctagcttggtctcttgaccgagtctggcgttagattgatctcttctccatgagtttatcgagaaatagttcgtagcattcaagctaataagcacccagttaactagtactaactagagttctctaatgacagtctgacacctgtcatattctgcgggtgacactgacgtttcaagctaagcaaccagctattaaatctcgtatcctcctgcctgcagtttccgtagaagaaaagtgcccctacactgctacagacagagagaactcacattgcggttgcggacctcagcttgcccactacagagctaaccaaaagagatgaaagggagcctttcccacgagctcgagacggggctcccagccgccgacgtatgggaggtctacggaggcctccttgttggggacttgattccccagctgcttcctcaagttttctcaaaggttgaactcgtagagggagacggtggagttggaacggttctgctcgtcactctcccgccagggactcctggatcagaggctttcaaagagaagttcgtcaaggtcgatgacaaaaaccgcgtcaaggagtgcctggtaaccgagggaagcttcctcgaccgtggcttcaagaaatacctggtgcgaatcgagatcataggagaagatcgggaggcatccaccataagatcaactatcgagtacgaagttgaccaggagcatgcaggcaacccccctgttgccagtaccagtggcttggctatcgctaagcgctaaggccatcgtagaatatatcaagcagaagaagaaagggtcctgctgagtaattaagctcacatcacatgtaatcaactccgggaagaaaggatattatattatatcgtgtatatgtttgatcagtgaacaactgaagttaatttgtgtctaccaatgaacaaatagaatacggtaacgagcgaatggttgccatttgaaccc

SEQ ID NO: 107252 - DNA, 187 bp, Zea mays
  Clone ID: MRT4577_29313C.1
agatgctccaatttcaataaccttggatgacaccaagccagatgggtcactgtctggcatcattgggctgtaattcttgccccgtaaagcttatcgacttgctaagctacataaggaaataaggaagaagaaaatctgtgagctctatgccaaagtgctgggatcccaagaagctttacatccagtg

SEQ ID NO: 107253 - DNA, 355 bp, Zea mays
  Clone ID: MRT4577_29314C.1
gcgatttagttgtgtgttgcttgaatccaacctattggagttgtttatatggtgcggtgtcggaggttccgtgcgacatttttgtttcttcaacaaggcaactggttgcttgaactccaaagtgtacaaccacatcttggtggacgatatgtggtagatggatgtccaaagatggatgaactccaaactgtagaaccatttttgcttcttcaacaaggcattcattcatcgttttgatggcttgcagcgatctacagtggccaaccctacttggcgggtgttggctcggtgtagggcaacttcgtaaagaggtgcaagcaaaatcgaacactatatgagaatggctagcttggtg

SEQ ID NO: 107254 - DNA, 344 bp, Zea mays
  Clone ID: MRT4577_29315C.1
gaaatggccccggggggggggttccccccaatttttttttttttaaaatttgaaggggccggtttcctttgggggggggcaaaaagttttggcgggggggggggaaaagggttttttttgggaaagttgcctttcatagttaaacaaattggcccagaaattttttttgggtttggggggttctgggtttttgggacccccaagttgggccttaatttttcaaggtttttagaccttgttggggggttgggttttatttctgggggcaaatccctttcaaccctttcaaaggtgcccgccgccttattgcaagaaaggttcaaactgttcctctaggatggggg

SEQ ID NO: 107255 - DNA, 343 bp, Zea mays
  Clone ID: MRT4577_29316C.1
gccggccgggccgggattgcaccgtacctctggcatcgagagctcgccagcgtccagttgtcactcgtctcgatcgagctctgccaagcaactgccatggcggcggcgtccggacgggctccgtctgcttgcgcgctcctcttgtcttgtgtaccgcgcgctagcagtatactaccccatgtagtcgtttgtactcagccgtgtacgtacgtgtctccggtgcgcgtacgtacggtacgtcacacatgatatatgcgactgcaactgcaatgcatgcctgacccgaccgtctttgcctggattgtgtcgtgttcttcaaaaaaaaaaaaaaaaaaggccccta

SEQ ID NO: 107256 - DNA, 216 bp, Zea mays
  Clone ID: MRT4577_29317C.1
cacatcttgaacagccaaagttttccagcttgagggcgttttctcgtagccgggtctaaaaatacaggaggggtcacccaatgccagggattttcttaaaaaaggctatatactaatcctgggggtaacaagctctggtgatgctttttgactccaaagacagtcttctgctttgttaagcttgttctctcctacaaagggccaattattacaacc

SEQ ID NO: 107257 - DNA, 589 bp, Zea mays
  Clone ID: MRT4577_29318C.1
ctgacaacgcagagaaggcggcttcgtactcggctatctccgggagtcaaagctttccccaattgccccccttctccgatttctcaccaccggcggcgctccccccgtgcaacaacaccatgagggagtgcatctcgatccacatcgcgcaggctggtatccagggcgcaaacgcgtgctggcagctgcactgcctccagcatgcgattcaggctgatggccacatgcccggggacaagaccattgggggaggcgatgatgctttcaacaccttcttcagtgagactggcgctgggaagcacgtgccccgtgctgtttttgttgaccttgagcccactgtcatcgatgaggtgaggactgcgacctaccgccaggtcttccgtcctgagcagctcatcaccgccaaggaggatgcaggcaacaacttctctcgtgggcactacaccattggcaaggagattggtgacctgggccttggccgcatcacgaacgttgcagatgattgcactgctctccaggggttcctcggcttcaacgctgttggtgcaggaacggcgtctgggcttgggtctctcctcgtggaggggct

SEQ ID NO: 107258 - DNA, 494 bp, Zea mays
  Clone ID: MRT4577_29319C.1
gtaagctcggatcctgtatagcgggcgccacccactcgttcgtggacgcgtgggcgcgaccgttttctctgctactctacctacttttgtctcccatccaaagctgccccaatctgctaagctttgcatatgaccaccgaagtgcgccctacctgggcgccggtcaatggcggaaacgagcaaggtggcgcccccctcttgtgtccctcccaaaaacaatactgacgcgatctctcacgcgcacaccttgactaaagacaagaggctacaggctacaatacccaacagagaggaaccgaacaggaatgctcctggaggaaacttgaagcagcgtgaacgcactccctactgttccaaggataaaccctatgccggagaaagacaccgccggagaagctctatccatctactcttagaaggcccaccttgtgttacaaatgatgggacacggcctcgagaaatcaatgctgaggactcccctgtggagcctaaac

SEQ ID NO: 107259 - DNA, 455 bp, Zea mays
  unsure (1)..(455): unsure at all n locations
  Clone ID: MRT4577_2931C.1
ggaagttgaaaacaacttttcaaattacgaagagtccccttcaatttggaatcaacactagggggggccatatgctgacatgctcctagttcttttttttgtctttttccctgggcgattgggtcgaacggtcataattccctgggcgattgggatccggatccggttcggctttgagaacatttgcattttctgtcaagtcatctggggcctgaacatcggctttggtcaaaggcccttttttggggaaaaaaggggtaacacggggggggggggnnnntaaaaaaaaaaatatttttttttttttccccccccccccccccacaatacaaaaaaacgcggggggggggggggggggggggggggcggttttaaacccccccccaaaaaaaaaaaaaaaaaaaaatttttttttttggttgggggggggggggggggccccacccccccccccc

SEQ ID NO: 107260 - DNA, 270 bp, Zea mays
  Clone ID: MRT4577_29320C.1
gggaccctcgaggccggccgggggttcatgctacaacaagacccagaaccacaatctttcttgtgcacagaaagagaagaactatggcacagtcgtcgtccgcctccgtcaagctgctggttctggttgtcctccctgcgctcctcctgctcctcgtccaagcgcaaggtatataacacagcttctatgctgctgcgacgacgagtccctgctcccctcccctagtcccctcttgattcttccggccgcatggcggtggcggtgtcggtt

SEQ ID NO: 107261 - DNA, 730 bp, Zea mays
  Clone ID: MRT4577_29322C.1
tgcatttatggtgtccatatgtggagcagtgctgtttatgatgtcaatacaggtggtttcagtaacaatttgcactgcctagcaaggtgtgttagtgctgtggttggaggaagtgaatacactaggatggcgaaggaacagcgaataaattctctttcaaatgggcatacagatgagcttcaagagactgaattgctgagccgtgcctcagctgaatcaaatattaaatctgctatgcaactgtatgtgaaattatctgctgggattgtcctggattcatggaatgacagtagcagaccacacatcgttccaaagctaatattccttgatcaactctgtgagttgtccccctacctcccaaggagcaccttagaagctcacataccttacaccatcctgcgttcgatctatcaccagctgtacggagcttcacaaatgggttcagaaccaacggagctatccccaaggcagtcgcctctgatttctctggcgcacgcttccccatcaatgaggccgaaccgatcggacacaacacccaggtcgcacacttacgagtcgggctaccacagctcatctggctcccagcacgacgacggctatgaagtggaccgaagaaccggagagaggcagctacgaagtatgaggcgttctgggccactcgactacggtgcgagcaggaaagcgaagttcgtcgagggttcaagctctggaagccatggtgcgggctcac

SEQ ID NO: 107262 - DNA, 312 bp, Zea mays
  Clone ID: MRT4577_29323C.1
aataaatcttttttttaaatttagacttttaatcttaaatttaataattagaaaagaaaacaaaaaacataatagaaaaagaaaaaaagccgagatggcccaaaaccgtaggaaacagcccactccactataacgaacgccagggcccattcctagaaccggcccatctaccaacaacaaacgagccacccaactgcacccacgccggaaccaattacagacacggcccaatggacagccccaaaaaccatctcttgtcaacacacctgaagccactaacgctcggccccgcaaaggcacatacatactacc

SEQ ID NO: 107263 - DNA, 483 bp, Zea mays
  Clone ID: MRT4577_29324C.1
gatgacggctgtgtgtcgtactcggactatgtgacgagactgagagctcttttccattctctgccgacgcagctggagctaacaacgtattactgttgataccatgagggagtgcatcgggtttcacgtgagtcaagtccgtctgaccgccggaaacgcgtgctgagagctgtactggctcgaggatggcatattaggttgatggctagatgcctggggacaagagcatcgctggcgaggtttgtgatcagaacacatatttcagtgatagtggtggtgctgaggacgaccctgacagtgaggttgctggccagacctgaactgagatcaacgaggtgaggacttgtgcctagagcaagatctaggaccctgagcagttcatcaagagtgaggaggatacctgccacaacattggccgtgggtactacgatgttgggattgacattgacgacctgagggtggttcggatcattgagcttgacg

SEQ ID NO: 107264 - DNA, 1050 bp, Zea mays
  Clone ID: MRT4577_29325C.1
gctgcggcatcatcgttccaccttactctccaggctccagctccgaccccggcgagccgctagagcaacgagaacgaatcagctagtagccgcccgcgtatctccatcatggccgtgctggtcgcgaggcaggggcgcgagctgcagcggtacagccagagcaccggcgggcgcatcgtggtgggctgcatcccgtaccgcgtgcggtgcgacggcgagctggaggtgctggcgatcacgtcccagaaggggcacggcatgatgttccccaagggcgggtgggaggtggacgagtccatggacgaggccgcccggcgcgaggccctggaggaggccggcgtcctcggcgacaccgagccggtcctcggcctctggcactacaagagccgccgctacgtggaccagacctacgaggggttcatgttcccgctccgcgtcgccgacgagctccaccagtggcccgagatggcgtcccgcaagcgcacctgggcaacggtgcagcaggtgatggacggatgcccgcactggtggatgcgcgaggcgctggagcggctcgtcgcgcgccacgccgtgcccgtgctgcagtctgctctctgaacgattgggcggagaggaggtcgccgcgagccaccacggtagcgcgtgctctccctctctcggtgcagcggcaggccggccggcccggcgttcgcgggctcggatttgggtcgccctcaccggaaagtcgacgtcgccccgcgcggcttgtgctctggcggtgctgctttcttcttgaccccctctcgaggcgcggagtcgtcgttggcaaataaaatcaaactgtgtgtttttagcgggcaagtgattggacgaaatgtaaaaaagaacgaaaccagaacagcagcgcgaaaaaaaaaaacaattcacgattctttcgagtaactgcaaaaagaaaattgtaaattggtagcaactcgtttcttgcccttggtggcaggattgaataaactgatcgatacggggagctgttcaattgaagaataaaataaaaaaggttgcccctttagtccc

SEQ ID NO: 107265 - DNA, 736 bp, Zea mays
  unsure (1)..(736): unsure at all n locations
  Clone ID: MRT4577_29326C.1
gccgcccggcgcaaggcctgaagnaggccggcgtcctcggcgacaccgagccggtctcgggcctctggcactacaagagccgccgctacgtggaccagacctacgaggggttcatgttcccgctccgcgtcgccgacgagctccaccagtggcccgagatggcgtcccgcaagcgcacctgggcaacggtgcagcaggtgatggacgggtgcccgcactggtggatgcgcgaggcgctggagcggctcgtcgcgcgccacgccgtgcccgtgctgcagtctgctctctgaacgattgggcggagaggaggtcgcgcgcggcggctccggcaagaaaggaccggcggcagcgcgagccaccacggtagcgcgtgctctccctctctcggtgcagcggcaggccggccggcccggcgttcgcgggctcggatttgggtcgccctcaccggagagtcgacgtcgcaccgcgcggcttgtgctctggcggtgctgctttcttcttgaccacctctcgaggcgcggagtcgtcgttggcaaataaaatcaaactgtgtgtttttagcgggcaagtgattggacgaaatgtaaaaaagaacgaaaccagaacagcagcgcgaaaaaaaaacaattcacgattctttcgagtaactgcaaaaagaaaaattgtaattggtagcaactcgtttcttgcccttggtggcaggattgaataaactgatcgatacggggagctgntc

SEQ ID NO: 107266 - DNA, 1395 bp, Zea mays
  Clone ID: MRT4577_29327C.1
ggtactagagctaaatccaaccgagatagagcagtaacaggggttctaatctagcagcgattataaaattatgtagtggggaattagatgggtggtgtcgaagacaacgttagaagttgaaaaacgacgagacataattaaattcaggcccacgcatgttactctcagttttattaatcactcggcacctacaccaccaacagcattccattgacttgacacgctataaaatcccagctccatggccgcaaaccagcagctgcagcatcagcatcgttccatccatccatcctactctccagctccagcccgggccagccgctccagcaggaagcaagcaagcaaggctgagaacgaacgaagcagcccgcatccgcatccatggccgccgtgctggtggcgaggcaggggcgcgagctgcagcggtacagccagagcacgggcgggcgcatcgtggtgggctgcatcccgtaccgcgtgcggcgcgacggcgagctggaggtgctggtgatcacgtcccagaaggggcacggcatgatgttccccaagggcgggtgggaggtggacgagtccatggacgaggccgcccggcgcgaggccctcgaggaggccggcgtgctcggcgacaccggaccggttctcggcctctggcactacaagagccgccgctacgtggaccagacctacgagggcttcatgttcccgctccgcgtcgccgacgagctccaccagtggcccgagatggcgtcccgcaagcgcacctgggcaacggtgcagcaggcgatggacgggtgcccgcactggtggatgcgcgaggcgctggagcggctcgtcgcgcggcaagccgtgctgcagtctgccctctgatcgtcgtcatcgactggggtaacaaaagaggcgggaggcgcgagccaccatgtgcgcacgccgccacggctctctctctctctcggtgcagcggcaggccggccggcccggcgttccgggtctggaatttggtcgccctcaccggagagtcgaacggcgcgccgcgcggctcgtgtgctctggcgatgctttcttgtgaccccccctgaccccgaggcgcggagtcgtcgttggcaaataaaatcatcagctcgtttttagagggcggatggtttagacgaaatggaaaacaaaatctgaactggacgcctagtggaaggaaaagtaatagaacagcagcgcgaaacaattcggcgattctttcgagtaactgcacagattgtaaaattttagtggtgactcgtttcttgcccttgggtggcaccgtggcagaattgttacgagctgttcaattcaaaaaagaagaagaagaaaaagtttcaggcataaaaaaaaaaaaaaaaaaagggcggccgccaccgcggtgga

SEQ ID NO: 107267 - DNA, 1080 bp, Zea mays
  Clone ID: MRT4577_29328C.1
catggggccgctcgaggccggccgggcccacacacctccttatcgcaacgcgagcagcagttgcattggaggcgaggaggagccacgccggggctcaaggaatggccgctctccgccacctcgctgccggccccacctgccaccaccaccaccaccaggcgtcgcggcagccaccgcctccctccggctccatcgcctccccctccccttccgcccccttcgctcccgctcccgctcccgctcccgctccttcaccagggtttatgcgatctccagcaatgacatcagggtcggcaccaacgtcgaggtcgacggcgcgccatggaaagttctagagttcctccacgtcaagcctggaaaaggcgctgctttcgtcaggacaaaactgcgtaactatgtaactggcaacacggtcgagaaaaccttccgtgctggaagtacgctacaggaaccatccctttcaaaggagaccaagcaatttacatacaaggatggctcccagttcgtgttcatggatctgacaacatttgaagaaagtcggttaaatgaagcagatgtcggtgacaaacaaaaatggctgaaagaggggatggactgcaatttgttgtactggaatgggaagatcattgatttcgacctcccaatcactgtgaggctgactgtaactgatactgacccaggggcaagtgatagtgcgcaaggaggaacaaagcctgcaaccctggaaactggagctgttgtcactgtgccctcttttgtgaacgtaggcgatgatattctggtggattcaagaactgggcagtatatgaatcgagcataacgaattgaagaggatttcggatttgaggagagtactgcttttttgtttgaccattttagtcccattcacttgtacaaacgccctgggtctttggccccaggaaatttacatttctgctgcatgtgaatcctcactctgattataaccatgtacatctttggtttccagatataaggaaaattgtgttcagatttttaaaaaaaaaaaaaaaaaaaaaaaaaaaaaaaaaaaaaaaaaaaaaaaaaaaaaaaagggcggcc

SEQ ID NO: 107268 - DNA, 1198 bp, Zea mays
  Clone ID: MRT4577_29329C.1
gaaattggtgatgttctacaatattatgacccaccgaagcgtttccccgcttggggctttggagcaagacctattgacggtcctgtttctcattgttttaatttgaatggcagcacttatcaacctgaggttgacggaatacaaggaattatgtcagcttatatcagcgctcttcgtaatgtatcattagctggtcctaccctctttggtcagttgataagcaccgccatggcgatagctagccaatctcttgctgagaatcaacataaatacttcattttgttaatagtcactgatggcgtggtaactgattttcaagagactattgatgcgatcataaaggcatcagattttcctatatccataattgttgttggagttggaggggctgatttcaaggaaatggagtttctagatccaaacaaaggagagaaactggaaagctcaaccgggagagttgcatcaagggatatgatacagtttgccccgatgaaggatatgcacggcactgggatatccacacttcaatcacttcttgctgaggtaccagggcaattcatgacatacatgaggacaagagaaacccaaacagacagttagtacatgcatgctgccttcaatcagtacaagatgcaccttggaatattctttgttaatatcattttcgtccttcccgttacatagtggtgcaagtttcaagtcatgggtgtgagatagatagtatggacgtgtcaagtgtaggtgagacatcgatctcctggagacgccaacatcaaattggttagctgagcttgtttaaaatcgtcgccgttaaaaaaaaatgctgcttgttaagagaaatgaggacctccaccagcccaccttaattccatggcatctttttttttattattattctgtgtcaagttggattcctaggctgtaccgcccatctttctctacctgtttgtaagatatgactttaggggtttcggcctttattatccctagtaggcccattggaataggaacttttttggcattgcacattagaattttcaagtgttggcatggctgtttagttctatggtggtgactcgtgacctgtataatataatttagacaatggaatatacagcatttgtggtacagccatgtgacaatgtcagattaagatttgaggcatctggttgcaatacgtttatgtatcgtttttctc

SEQ ID NO: 107269 - DNA, 4362 bp, Zea mays
  Clone ID: MRT4577_2932C.1
atggatcctaagggcaaggggatggtggtcaatgataaggagaaggagtccttcgtcaatgatccaaaggatgacaagcctactgactcaggctcgggccacaaaagaaaagacgggaggaagaagaaaacaaggcacatcaaggagatagtctactacgacagcgacgaatcttcctcctcccaaaaggacgacgacaacgactacgagaaaaagaaaacggtcaattcaaacttttattttgattattctcgtattccgcaaagtacaaatgctcatttactctccattccacttggtaaacctcctcactttgatggagaggactacggattttggagtcacaaaatgcgtagtcacttgttctctctccatccaagcatatgggagatagtagagagtggaatgcaatttgatagtactgatagtcctatgtttatcaatgagcaaattcacaaaaatgcacaagctactactgttcttctagcttcattgtgcagggatgaataccataaggggcgaggagccaacccaaaaatacaaccggctaaagaccctcgtcaaaaaataaggagctatggaagcacgcgatggacggaccacgacgtcgtccgcctaatgctaaggtcttttactgtccttgatccacatcttgtaaacaatattcgtgagaatcctaggtacaccaagatgacgcccgaggagatacttggaaagttcgtaagcgggcagatgatgatcaaggaggctagatacgttgatgatgcgttgaatggcccaatccatgagcctcaaaccgtggctctcaaggcaatgaggagcaaggaggcgctacctagcaaggttgcacaagttgaggcgacggggctcaacgaggaagagatggccctcatcatcaagcgtttcaagacggcgctaaggggtcgtaaggagcatcccaacaagacaaaaacgaaggggaagcgctcatgcttcaaatgtggtaagattggtcattttatcgctaattgtcccgataatgatagtgaccaggaacaagggaacaagagggaaaagaagaaggcttacaagaaggctaagggcgaggcacaccttggaaaggagctggactcggattgttcattgtccgactccgacaacgaaggactcgccgccaccgccttcaacaagtcggccctcttccccaatgagcatcacacctgcctcatggcaagggaaaagaaggtaagcactcgtgatactagtacttacgcttcctcaagtgatgaagaatctagcgatgatgaaatagactattcatgtttattcaagggcctagatagaactaaggttgataaaattaatgaattaattgatgccttgaatgataaaaataagttattagaaaagcaagaggatattttgtatgaagaacatgataagtttgtagaggcacaaaaatcccttgctttagaaattaaaaggaatgaaatgctttcttgtgaattgtctacatgtcatgactctatttctagcttaaagagcataaatgatgatttaagtgctaagttagaaataactaataaatcaacaccttgtgtagaacatgttgtagtttgcaataggtgtaaagattttaatgttgatgcttgtagtgaacacctagtttcaatttcaaaattgaatgatgaagtggctagtcttaatgcccaacttaagactagcaagagtgaatttgacaaactaaaattcacaagggatgcctacacgattggtagacacccctcaattaaggatggtcttggcttcaagagggaagtcaagaacttaacaagccataaggcttccatctccgccaaggagaaagggaaggcccctgtggctagtagtgctcaaaagaaccatgctttcatgtatcatgataggagacattctaggaatgtttatagaagttatgatgcttttgattctcatgccatgattgcttctagttcttctattatgcatgatagaaatttggctaggaaaaatgttgttcatcatatgcctagaagaaatattgttcatgctcctaggaaagtaatgaatgaaccttttacaatttattatgcttgcaatacttcctttgctatttgtagaaaggataagaaggtttatgcatctggaggctcaagctggattgtcgacagcggatgcacaaaccacatgacgggggaaaagaagatgttctcttcctacgtcaagaacaaggatccccaagattcaatcatattcggtgatgggaaccaaggcaaggtgaaagggttaggaaaaatttctatttcatccgagcactctatttctaatgtgttcttagttgagtcgcttggatataacttgttgtctatagaccttgtgcagcttgtcaagcaggataaatctgaaacccaagggaccctcaagcgcttcctaaggagagctcaaaatgagtttgagctcaaggtgaagaagataaggagcaacaacaggtccgaattcaagaatcttcaagtggaggagtatcttgaggaggaaggaatcaagcacgagttctccgctccctacacaccacagcaaaatggtgtggtagagaggaagaacaggacgctactagacatggcgaggacgatgcttggtgaattcaagacgcccgaacggttttggatggaagccgtgagcacggcttgccacgccataaaccgggtctaccttcatcgcctcctcaagaagacttcatatgagcttctaaccggtaacaaacccaatgtgccttactttcgtgtatttgggagcaaatgttacattctagtgaagaaagcaaaacgttgtgggaaccaagtgggtgttccgcaacaaacaagacaagcacggggtggtgacaaggaacaaggcgtgacttgtggcaaaaggttatgcccaagtcgcagtttggactttgaggagacttttgctcctgtggctaggctagagtcaattcgcatattgttagcctatgctactcaccattctttcagtttgttccaaatggatgtgaagagcgctttcctcaacgggccaatcaaggaggaggtgtacgtggagcaaccccctggctttgaggatgaacggtaccccgaccacgtgtgtaagctctctaaggcgctctatggacttaagcaagccccaagagcatggtatgaatgccttagagactttttaattactaatgatttcaaggttgggaaagccgatccaactctttttactaagacttgtgatggtgatctttttgtgtgccaaatttatgtcgatgacataatctttggttctactaaccaaaagtcttgtgaggagtttagcagggtgatgactcaaaagtttgagatgtcgatgatgggcgagttaagctatttccttgggttccaagtgaagcaactcaaggatgggaccttcatctcccaaacaaagtacacgcaagacttgatcaagcggtttgggatgaaggacgccaagcccgcaaagactccaatgggaaccgacggacacaccgacctcaacaaaggaggtaagtccgttgatcaaaaggcataccggtctatgatagggtctttactttatttatgtgctagtagaccggatattatgcttagcgtatgcatgtgtgctagatttcaatccgatccaagggagtgtcacttagtggccgtgaagcgaattcttagatatttagtcgctacgccttgcttcgggatctggtatccaatggggtctacctttgacttaattggatattcagactccgactatgctggatgtaaggtcgataggaagagtacatcggggacgtgccaattcttaggaaggtccctggtgtcatggagttctaagaaacaaacttctgttgccctatccaccgctgaggccgagtatgttgccgcaggacagtgttgcgcgcaactactttggatgaggcaaacccttagggactttggctacaatctaagcaaagtcccactcctatgtgataatgagagtgctatccgcatggcggataatcctgttgaacacagccgcacaaagcacattgacatccgacatcactttttgagagaccaccagcaaaagggagatatcgaagtgtttcatgttagcaccgagaaccagctagccgatatatttaccaagcctctagatgagtcgaccttttgcaagctgcgtaagacaaccgatcaagccaaggatggaggcaagaagagctttgaggtaccgagtgcacgggagaaggtcaaggagaccaggaacccaaagccaggggtgaagaagaagacttgcaaagtcaaggttgatcgagttaagagttatggtgcatcaaggatcactacataa

SEQ ID NO: 107270 - DNA, 221 bp, Zea mays
  Clone ID: MRT4577_29330C.1
cggacgctggtgttttttttttttgctgtttggtacgatatcaccgtaccagagaggaacaatttattgagacagcgactgtcaaaatcgccaagaccatcatcttctttggtctcagacggacatacaggccggacatcgcaccggcaagtagcagctggcggcaccgtcagctagccgaggttgaagttgttacaattggtctttctgaacagaagcgg

SEQ ID NO: 107271 - DNA, 329 bp, Zea mays
  Clone ID: MRT4577_29331C.1
gggggggggtaatttttttgagctgaaacctcaatcctataaaacccctggacgaaaaaaacccttggggcaaaaacccggggggctaaaggcccgggggggaaaagggaaaaaggtcccccctgaaggggcttccttttgactaggagggcggaaaaaaaaggggaccaaaacacccgggtcccatagggctcgagccccctttgccccgagcccgcccgcccagataaagggccccccaaataaaaatccccccaaaacgctgtcaaaagaaataggggctccaacaaagtagagcaagcaccctggagagccttcccgagggagac

SEQ ID NO: 107272 - DNA, 532 bp, Zea mays
  Clone ID: MRT4577_29332C.1
gggacaaaacagggatgcaatattattacaagctgatgggattatgattttgtacttgacaaacaataggtatattttctaatggaacgtgttgatgccataataaacacaacatatgcaaccgtaataaacacaacatacagagtgaacggaaggcaaaagttgtgtgtggggagggagtgtttatcttgatgttgcactcaatgtatcatgtatggggggtatcttgaccctagtcataactggggctagccatcggctgcagaaaaaggttgcggagtttgttacactttaccaaacttttttggtcgaagtaacactcatattataccaaggcaaagtactttttcaaatgacacacatcgatatacaaagtaacaaatcctgaagccaccgacaaggaattgagtgagaaatcatataatctgatcaaaataaacatgacatatattttccctaaaaagacatagtatactgacactatagcatcataatttagaaagatggaaaagtaatcatggttatttaacta

SEQ ID NO: 107273 - DNA, 252 bp, Zea mays
  Clone ID: MRT4577_29333C.1
agggaaaaaacgggtttaaaaaaaaacaacaatggcccgaacattacacctgggtgaaagttattttggaaaaattggggggaaaatttataatcccaaattttttaaaaccccaagaccctctggtccaaaagggggggcggggtttttttacacaaaacccattttaaacaggggaaccatggcggcaaaccgtaattcttttacacagaaacgccacaaggaaggaaagggctgttttaaagacgggta

SEQ ID NO: 107274 - DNA, 142 bp, Zea mays
  unsure (1)..(142): unsure at all n locations
  Clone ID: MRT4577_29334C.1
ggacaactgaaggcgaaactagcagagttgaggacacgactattagagtgtccanaaggttccagcggatgtggagatggttctcacgtcacaaagtctgggcatggtcgtgctgcactttattggatttcccagtgttgga

SEQ ID NO: 107275 - DNA, 436 bp, Zea mays
  unsure (1)..(436): unsure at all n locations
  Clone ID: MRT4577_29335C.1
ggacctttgggctgatttatgtgcttgggaggaggttggtgatggtgatagtacctagagttctgtgtccggggtgtccgataatagtcctccagctggtggtgttgggacataggcggctaagaatccttgttatggtccgtatgggaagggtgtgctggcgaagactctgggaggttgcggtggtagcgggagtgtccacctgatgttgaagaaggtatcgtcgacgtgtggtgagatcaatacgtcatcgacgagtttaggagaggtctcgtaccttaacggcgcctattacgccgatgccgagatcgggaaggccgctgtagaacggtggcccgagaaggacggagtcgacactataacgtgagataccgttaacgatagtaagggagtgtagccggaatttcntgggctgatacctccgggttcggacgat

SEQ ID NO: 107276 - DNA, 353 bp, Zea mays
  Clone ID: MRT4577_29336C.1
aaaaaggaaagagtttctaagggaatttcacttacaacacaagagtaatatcctcaagcttatgacaaactttttattccctcactgccaccccacccatcccttgcaaaacccctgcatctaaaaaaaggacagggattgcttgagaaccccaaccatgatgaacaggaggaggttgctcccaagccccttcatccttcacaagaaggcgaatttctacctttatcattaccccgaaccttcaagtcccggatctggggtccttgcccgtggtcgcctcaaggccctttaaccctcattccacctttgccctagtctgttttcttttgaatttaattattcaacccttacca

SEQ ID NO: 107277 - DNA, 313 bp, Zea mays
  Clone ID: MRT4577_29337C.1
gcggaggaactcgaggcgcaaccggttgcaccacgtgaacctcaacgattcaagctctctcttggtgcagcggcacagcaaagagcacaggctgccacaacccgccgcactgtcgctgaagttgaaggccttctggaagacgaagaagaaggagctgccacaactaaacgcacgctggttccgatcaaatttgataatgccgcagaggcttctggtctgactgacgaagagagagctccagctgttagacagctggctgcagaaattccttcggacaaggaaggcctatggaagtggaacgtcaggtgggagt

SEQ ID NO: 107278 - DNA, 124 bp, Zea mays
  unsure (1)..(124): unsure at all n locations
  Clone ID: MRT4577_29338C.1
ncgtcaggtcccgggtcccgccgcctgaacagacacttcccctgtccggtgccccggttgctttatctcctctctggcggctccgtccccgggtcaatcgaatcgagcccatccatctccattt

SEQ ID NO: 107279 - DNA, 983 bp, Zea mays
  Clone ID: MRT4577_29339C.1
aattcggcacgagggactcgcgcacgctctctcagtcccagactcccactctcccagtcccagccctctctccctgctgcaccgtgtcctacactcctacttactcctagcgagctcgtcagccgcagtaccttgctccgcctccgaccccggcgcgagcgggaatctacacccacgtgctcgcggccgtccatgggctggccgccgagcagcggctggggcgaccggcgacggaacgtgtccgtccacgtcgccatccagcccggccgcagcttcccgctcgagtactacccggaggcctggcgctgcaagtgcggcaacaagctcttcatgccctgaccggtccaacggcaacgacaacggcgacggcgacggcggcgccacctctccctgctgcgcacacgctggtaccggtgcactggtgcatctctcactcactggatctatctagccaaggtagctagctcgtcaggctaatgcagcagcgggctgcgtcgccgtggctggtgcctgcacgtaccgcactgcacgcatacatgggatcgaggctagctctgtctaccagtgctactgctggtgtacagtcccacagagagacatggagaacccggcaaggaacaagtaaggtccttggtgagaataggtcccgagacgaaaagatctgcccaaggcatggaacagaaaggcctcgattccgtcatttaatgactggaagagcatttgccgagtttttggagaggtgatgatacgagctagtctgggactccctgctctatgttgtaagtaaccccctgtgtgctgtgtgtcccaaaaaaagagcgaaaaaaaaaaagacgtcgatgtccccctttttgtttttcttttttttttaccttcgctacggttcttgacatgcatgttagtgactgaaatccccatccctgtgattatgatctgtgacgtgattccatcgaaaaaaaaaaaaaaaaaaggcccctagggcc

SEQ ID NO: 107280 - DNA, 2913 bp, Zea mays
  Clone ID: MRT4577_2933C.1
atggagtgggtatttcttaggaagaaaatacttggagatatatcagtggaatatttgggtagtatttctgaaaagaacttgaaggggattactcgagaaatatctgggcgagcaagtttgagaaaatttcaagatttgaatttttgggatgctacatggacggatcacgacgtcgtccgcctaatgctaaggtccttcgctgtccttgatccacatcttataaacaatattcgtgaaaatcctaggtacaccaagatgtcggccgaagaaatacttggaaagttccgattcaagacagcactaaagggtcgcaaggagcatcccaacaagaacaagacgaaggggaagcactcatgcttcaaatgtggtaagattggtcattttatcgctaattgtcccgataatgatagtgaccaggaacaagagaagaagagggaaaataagaagtcttacaagaaggctaagggcgaggcacaccttggcaaggagtgggactcggattgttcgtcgtccgactccgacaacgaaggactcgccgcctcggccttcaacaagtcgtccctcttccccaacgagcatcacacatgcctaatggcaaaagagaagaaggtaaacactcgaaagtctacttatgcttctagtgacgatgaatctagcgatgatgaaatagactacgctagtttgttcaagggcttagatagaactaagattgataagatcaatgagttgattgatgccttgaatgataagaatagattattagaaaatcaagaggatcttttgtatgaagaacatgataagtttgtagaagcacaaaattctcttgctttagaagttaaaagaaatgaaatgctttcatgtgaattgtctacatgccatgaatctatctctagcctaaaaggtgttaatgatgatttgaatgctaagttagaaatagctagtaaatcaacctctcgtgaagaacttgttacgatttgcaataggtgtaaagattttaatgttgatgcttgtagtgaacacctagtttgcatttctaaactaaatgatgaagtggctagtattaatgctcaacttaagactagcaaaaatgattttgataaactaaaatttgcaagggatgcctacacggttggtagacacccctcaattagggatgggcttggcttcaagagggaagccaagaacttgacaagtcataaggctcccattaccgccaaggagaaagggaaggcccctatggctaatagttctcaaaagaatcatgcatttatttatgataagaaattttctagaaatgttcatcatgataggagttgtaatgcttatgattcaaatgcaatgtttgcttcaagttcttcctatgtgcatggtagagatatgcctaggagaaatgtttatgcatccgggggctcaagctggattatcgacagcggatgcacaaaccacatgactggggagaagaagatgttctcttcctacgtcaagaacaaagactcccaagactcaatcatattcggtgacgggaatcaaggcaaggacaagcacggggtggtgacaaggaacaaggcgagacttgtggcaaaaggttatgcccaagtcgcaggtttggactttgaggagatttttgctcctgtggctaggctagagtctattcgtattttgttagcctatgtcgctcaccattccttcaggttgttccaaatggatgtgaagagcgctttcctcaacgggccaatcaaggaggaggtgtacgtggagcaaccccctggcttcgaggatgaacgataccccgaccacgtgtgtaagctctctaaggcgctctatggacttaagcaagccccaagagcatggtatgaatgccttagagactttttactttctaatgctttcaaggttgggaaagtcgatccaactttattcactaagacttgtgatggtgatctttttgtgtgccaaatttatgtcgatgacataatatttggttctactaaccaaaagtcttgtgaagagtttagcaaggtgatgactcagaaattcgagatgtcaatgatgggcgagttgaactacttccttgggttccaagtgaagcaactcaaagatggcaccttcatctcacaaacaaagtatacacaagacttgctcaagaggtttgggatgaaggacgccaagcccgcaaagactccaatgggaactaacggacacaccaacctcaacaaaggaggtaagtccgttgatcaaaaggcataccagtctatgatagggtctttactttatttatgtgctagtagaccgaatattatgcttggtgtatgcatgtgtgctagatttcaatccgatccaaaggagtgtcacttagtggctgtgaagcgaattcttagatatttagtcgctacgccttgcttcgggatctggtatccaaagaggtctacctttgacttgattggatattcagactccgactatgctggatgtaaggtcgataggaagagtacatcggggacgtgccaattcttaggaaggtccctggtgtcgtggagttctaagaaacaaacttccattgccctatccaccgatgaggccgagtatgttgccgcaggacagtgttgtgtgcaactactttggatgaggcaaaccctcagggactttggctacaatctgagcaaagtcccactcctatgtgataatgagagtgccatccgcatgacggataatcctgttgaacacagccgcactaagcacatagacatctggcatcactttttgagagatcaccagcaaaagggagatatcgaagtgtttcatgttagcaccgagaaccagctagccgatatctttaccaagcctctagatgagaagaccttttgcaggctgcgtagtgagctaaatgtcttagattcgcggaacttggattga

SEQ ID NO: 107281 - DNA, 396 bp, Zea mays
  Clone ID: MRT4577_29340C.1
catcctacttgtccagaaggtaaatttacacagccagaaagaaaaggcatcggctgagctgtcagatcaggacaggctgtggatctgtggcggtactctgaaagctggagctgcagcacaccccttttgtattgctcaccctcggtaaagagagagagggctgggaggaaaagtagttcatctaggaaactgtcctgggaaccaaacttctgatttcttttgcaaccctctgcattccatctctatgagccaccattggattacacaatgacatggagaatgggaccccgtttcactatgctgctggccatgtggctagtgtgtggatcagaaccccacccccatgccactattataggcagccacggaggacggacagtgcctttggtttttccg

SEQ ID NO: 107282 - DNA, 258 bp, Zea mays
  Clone ID: MRT4577_29341C.1
tgaacatctgttttctttttcatatgttttgctgtgggagaaatactgtcgatgcaattctgcaaaagttctaggctaagaatttgtaaaatgctctgggtttttgtcaaatgcttagtttcttctgcctcattttacttttcgtggcgtgaatgcagatatcttcatagggttttgagctgtcttaattcttttctgcaggcattttctcaaatgcgcctgtctgaagcttcaccacatctggcttctttttggggt

SEQ ID NO: 107283 - DNA, 692 bp, Zea mays
  Clone ID: MRT4577_29342C.1
gtcagcaggtccagcacccatgtttatccttttcctctgtgtttttgtttgaactgtttttttttctgcccgcgccatatcgccggtttgcggccccggggctacccgccgtcgaaaggcagcggcggagaagaatgtggtcatggctgtaatgggttagcaggtacatcatccacacttatcatttcctttgttttttgtttgatcaatttttaaaatttctttatcagtttgattggtatccacttgcatccgctcacagtttgattcgtgttcgttggatggcgacgtctcaggtttcgtacagttcactaaatttattttgctcaattgtaagggaattgtgtcctatataagctcgcgctcgtgtcgcacccggatcaccccttcttcctgcaagtctggttcaattaaattttttttgttttgtcatgttgcaaagtacttggcgagctatgatatgtcattaccttagtgaaaaaacggtttctaatatatcagtattttttagctgtgcagatcatgtcatcatatagatgttgcaaacattataaaatagaggatccatttgaactcttgagaaaaaggagtgcatgcctagcctaaatataaaacttagcgttggcattagtaatttcaagtgttatctgaataaattgtttcatacttgaattgttttccctgtgttattt

SEQ ID NO: 107284 - DNA, 311 bp, Zea mays
  unsure (1)..(311): unsure at all n locations
  Clone ID: MRT4577_29343C.1
tccgggggggggggggggggggccccccnncnngagggcgcggggggagcgagggagatcgctgccctatcaggcacctcgagattgtgtgccgacggtctcgcgggggatccagacacctgtgggcactgcggttgttgaatttgtcactgcgatggggggggggaggactgttcctattcttagagcgggggttgcacttgcagatctcgcacctctgttgtgccttggctacaactttgcctttcgggctggcccgggccgcgacttcgctgttggccggtgtttactcaagtaagctacctggtaga

SEQ ID NO: 107285 - DNA, 997 bp, Zea mays
  Clone ID: MRT4577_29344C.1
cactcctaagggcgaatgggaccctcgaggccggccgggagcaagcagcgatccgaagctcaatcaattcactcaaacctcttccccaaatcttcgattagattctcgttgacaagaagactagaaccgaacctgaccatgtcgctgatccgccgcagcaacgtgttcgatcccttctccctcgacctctgggacccctttgagggcttccccttcggctccggcaacagcagcagtctcttcccctcgttcccgcggaccagctcggagaccgcggccttcgctggcgcgcggatcgactggaaggagactccagaggcgcacgtgttcaaggccgacgtaccggggctgaagaaggaggaggtcaaggtggaggtcgaggacggcaacgtccttcagatcagcggcgagcgcaacaaggagcaggaggagaagacggacacctggcaccgcgtggagcggagcagcgggaggttcctgcgcaggttccgactgcccgagaacgccaagacggagcagatcacggccgccatggagaacggcgtgcttacagtcactgtgccgaaggaggacgccaagaagcctgaagtgaagtccattcagatctccggctagacctcggtctgcggtcgtcgtacctgcgtggtttgaggaacggcagttcgcctcggtcgttctgtgaaataaaattgggttacaagaattatggcgtttgtcaatatgatcgtaatgtcgtaggatggtggaatgtggtcacaaactttgcgtatgttgggtctactggtggtgtctactctgaatctatgtatggatgtcatgagttccagttcctgtggtgttcgtatgatgtatatcatgagttaactctatctaaaatttcttcattatggtatttttaagaaaaaaaaaaaaaaaaaaaaaaaaaaaaaaaaaaaggaaaaaaaaaaaaaaaaaaaaaaaaaaaaaaaagcttgtacctgcccgggcggccgttcaa

SEQ ID NO: 107286 - DNA, 503 bp, Zea mays
  Clone ID: MRT4577_29345C.1
cccctcgagtttttttttttttttttttttttttttttttttttttttttttttttttttttttttggcaaaaaaacacaaaccattggcaatttattgttactgttattttcgggaaagggaaagcctgcaaaaggggggattccatcctagcccctaaatagggacttgttctgggagggacccaggaattttgggaaatttcaaagggctattgctcccttgaaataccaaaaaagctaacgcttagtttcggcccatcggggttttgtcctgctgcctaagcctttcgccttcggggcacaaataaccattgaatttttccttgccgcccaaaaggaaaataccggcgaggccggggggggcaacccccccccaaatgacaactggggacaaaagcaacaaccagttgcggaaaatcattttcgccttcctggggttcctttcccgtcccttgtttggaaaatcgctacgggggtcctcgtcgatcctcgggccgaatt

SEQ ID NO: 107287 - DNA, 431 bp, Zea mays
  unsure (1)..(431): unsure at all n locations
  Clone ID: MRT4577_29346C.1
cctcaggtacctntccttaattcccttttggacggacgcgntccctccattctcctctccactcctcntccttcttctactatctcattgccacatatcctacgggggggactatctctggcggaggggcctcctctctcatactgactacatcattttatcactgtgcatccttaaatgaggatggtccagtcagacaaggatcttacatttgaaatggaaccataataaaatgctaccccaccaacctacaaatccgatctcagaccaatatacagaacaattctctcttgcatgaggctcaatctaatctaatttgaaaggtcttttcaccaaatatctcccaatcacagcaccaatcgtctccatgctgcatatcacccatgcactctacaagatcaatactaaatgggcatttaagcaaccctatt

SEQ ID NO: 107288 - DNA, 302 bp, Zea mays
  Clone ID: MRT4577_29347C.1
attcggctcgaggcgacgctggaatgtatcacagaattttgactgtgtctctggtttcattttgaaagcactcgaagttgtctcctttaccctttttttccttatatacgacggcaattggttaaagttacataaaaaaaaaaaaaaaaaaaaaaaaaaaaaaaaaaaaaaaaaaaaaaaaaaaaaaaagaaaaaaaaaaaaaaactataaaaaaataaaaatatatgaaaaccaataattaaacagaaccaaaaataaataaaaaaaaataaagatggtgcgttctgtggttaaacattat

SEQ ID NO: 107289 - DNA, 1666 bp, Zea mays
  unsure (1)..(1666): unsure at all n locations
  Clone ID: MRT4577_29348C.1
gcacgagccggactcctgttttatttcggatcgcgacgccacaatcccaccggccacagcacagaccaggccgccgccgccgccgccgctctgccttgttcgcagctctgttggccgctcgctttcgcaacattattatacccacccaatcgaccgacgcaatcgaaaccgcctcccatctcatccgtctctctcgaatcccaccgtgcgctcactgcgatggacggctcatccaagcggatcggcggtggcggcgacgacatgcccagccccgaccacgaccagaacgccagccccaacgtcccgccgtccgccgctggtgacggcggcgcatcagccactgcggcggcagcgcccgccgccgggaggcggccgttcaccagcctcagccaggaggaggccgacctcgcccttgcccgcgtcctccaggagcaggagcgggcgtacatgatgctgaccggcggcgagtacgcgatctcggacgccgagagctacgactacgacgaggaggaagacggcgatgggagcgactacgaggaggaaggcgaggcgctcgacgaggacgagcaggttggggacgcggaagcggagggggctgagggggacctggacctggacccttctcagtacgaggacgacggggagggcgacgtctccgacaggctcatggcgctcgtcgggatcggtgattggcgagcaatggagcaggatgatgctggggacgaggaggacgacgaagatgctgaggttcatacacagggtgcatgggaagatgttgacccagacgaatactcttacgaggagctaattgcgctgggtgaagttgtcggtacggaaagcaaaggccttgctgctgacactattgcctcattaccttgggtgacttaccaggcacaagacaagcaagatggcaacatggaacagtgtgttatttgtcgtgtggagtttgacgagggcgagtcattagttgcactcccttgcaaacatccgtaccattctgagtgcataaaccagtggctgcagctaaacaaggtatgcccgatgtgcagtgctgaagttcccacttctgtgaacaagcaggcatgactactcaacctgaagaagatagcggtggcttggtatttatctgccattgatggaatgaaagaagcgccaactgttaaattgttcagggaagcaagggaattggctgggttctgattccctgttttcttcagttcttatcccccctcccctgtacgcatgctaattctatggccataccgctggttatttatgcattccattagatgcggaggattcattgcttgtagatgtaaatcaacaatcataccaccatagtcaatagcagttgttttaatgccaatagcaacgttcatgtttaaaatggtagcatttttgttccttgttttctagaccggacattttatgttcctgaagaaaatgattgtgttacaaaaaaaaaaaaaaaanaaaaanaaaanaaaaanaaaaaaaaanaaaaaaaaanaaaaaaaaaaaaaaaaaccttgggggggggcgcggggcccaaattccccttatggggaggggattaacccgccgccctggcgcggggtttaaaacgggggggaggggaaaaaccggggggtcccccaattaaatgcctttggaaaaaacccccttt

SEQ ID NO: 107290 - DNA, 1115 bp, Zea mays
  unsure (1)..(1115): unsure at all n locations
  Clone ID: MRT4577_29349C.1
ttcatacacagggtgcatgggaagatgttgacccagacgaatactcttacgaggagctaattgcgctgggtgaagttgtcggtacggaaagcaaaggccttgctgctgataccattgcctcattaccttgggtgacttaccaggcccaagacaagcaagatggcaacatggaacagtgtgctatttgtcgtgtcgagtttgacgagggcgagtcattagttgcactcccttgcaaacatccataccattttgagtgcataaaccagtggctgcagctaaacaaggtatgcccgatgtgcagtgctgaagttcccacttttgtgaacaagcaggcatgactactgaacctgaagaagatagcggtggcttggtatttatctgccattgatggaagaagcgccaactgttaaattgttcagggaagcaagggaattggctgggttctgattcccgttttcttcagttcgacagacttagtnnnnncccccccccncccccccccccccccgggcctgtacgcatgctaatttctatggccataccgctggttatttatgcattccattagatgccgatgattcattgcttgtagatgtaaatcaacaatcataccaccatagtcaatagcagttgttttaatgccaatagcaacgttcatgtttaaaatggtagcatttttgttccttgttttctagaccggacattttatgttcctgaagatggtgattgtgttacaaaaaaaaaaaaaaaaaaaaaaaaaaaaaaaaaaaaaaaaaaaaaaaaaaaaaaaaaaaaaaaaaaaaaaaaaaaaaaaaaaaaaaaaaaaaaaagggggggccgttttaaaggatcaaagtttacttccgcgggcttgcaacgtaatattttttttttaggggcccctaaataaaattcattggccgactttttaaaacgtcaggaattggaaaaaccctggggttacccaatttaatggcttggaagaaaatccccttttccccagttggggtaataccaaaaaggcccgaaccgatcgcctttccaaaaagttgaccaccctaaatggcaaatgggaccccccctgtaggggcccattaagcggggggggtgggggg

SEQ ID NO: 107291 - DNA, 205 bp, Zea mays
  Clone ID: MRT4577_2934C.1
atgtttataccacacattatttatacttatcttttatcgattcataatttttcttctatatctttcacaggaaaaaaccacaatttgtgccaaaaacttttacatgacggtgaaacacttactttttttttacaacaccggttagtttcaacaaaattaagccctaaaccttttccttaaccttaaccttgaggacctcaatctt

SEQ ID NO: 107292 - DNA, 271 bp, Zea mays
  Clone ID: MRT4577_29350C.1
acgcgttgcaatgctggtactctcatggttctaaatttggccgtcactccaactgaactaagcgagatcgtccctttgttgcgtctggatgaagaccaaactggcaccgaacgcttcccctcgacatccaacacattgagcaatgcgatgaccgaacatgctttaaaggatgacctaatgagccttatccatgccatgctaggctaggctattgctgcgccaatagtactagtctaactgtacaccgcttcgttacctagaataaaggtac

SEQ ID NO: 107293 - DNA, 445 bp, Zea mays
  Clone ID: MRT4577_29351C.1
gatggggggacgagtacaaacgctagctagctagcctcgagcctctccgtcttggccatcagcgccagcttccagcgtcatgttctgcgtcgactcatggaagacgttagcgcagacgacgaggtagacgagggcgggggggtctataaccgcgagcagcgcgtagtaggagtcgtaccgggcctggtccaggtcgtccgagatccacggcgcaccacccccgccgcccttgccgctggtcaccacgttcacgagcttgacgatcaccgtcgacatgatgctggcgacgccgctcccgaagaacagcagcgccagcacgaagctgcccatggacttggggagcacggcgtagtagaactcgatctgcgcgatggcgccgaacgcgcccgacagccccatgagcacgtactggggcgccagccacagcgcggacatgaggggaggg

SEQ ID NO: 107294 - DNA, 136 bp, Zea mays
  Clone ID: MRT4577_29352C.1
gacgcgtgggtgccatgttgtttcctgaataaatagtgtggctagctgccctgtgagccacgtatgtttccatttctcttttacttgagaaatttccatgtttcaaagtttgccaacgagatgtactgtgaatcca

SEQ ID NO: 107295 - DNA, 306 bp, Zea mays
  unsure (1)..(306): unsure at all n locations
  Clone ID: MRT4577_29353C.1
cccacatctttttgtaaactacntcatcccctccctggcggattacatggttgagatggccaccactcgccccagcgccgacactgccgctcctaacgactcctggcctgaggttgtgggcatgtcatcataatatgccaagaacaaaatcaacgagaacacacgatgcgccgacgtgcatcacagtcccagcctactccttgacaactactgactacaccacacgccccctaaccggctccgacggctccaactacaaggtctacaaagacttccggcaccagtagttcatctaggaagggacaa

SEQ ID NO: 107296 - DNA, 436 bp, Zea mays
  unsure (1)..(436): unsure at all n locations
  Clone ID: MRT4577_29354C.1
cgcaccccgcccggcgcccgcaatcagcgcctccgccgccgcagcccttccagaaatcgtcatcccgaaacctccgcgcccccgcccgaccccgcgcatcccgcagcccccgccccctcgcgcagccttggtgccgtgaccgccgcctctgctcgctcctccatcccgcgcaacaacgacgaccgccggggcctcgcctggcagatcaagtggggaatccacccgccaggcgtctccctgacagcggttccagcattggtgctcgcatccccgccgtccaaagcatggcgctcttcgtcttcctcctcgctgccgggcctctccacctntncctcccatcgacctccacccccaagcctcacccggcctcgctcctgcgcctatgctccacctaccgccgcgttgttagcctcgcgctccatacagaggagctaga

SEQ ID NO: 107297 - DNA, 652 bp, Zea mays
  unsure (1)..(652): unsure at all n locations
  Clone ID: MRT4577_29355C.1
gcttatcccaattagttagtagatgagctcctgggctatataagggctgcaatatgtacctaagagatcaacaaagaagtaaactctccccagttggctgggactgccccagtctgtccagcattcagtctggctttggtgacagcagcagtaccactgccagtcgagtcccataccaactccgttccatccctcaaatctcatttgttgctacactctcctctgcgcacaccatgacagcaacgctgtatcaacatgtctgtatccctatgcttttcctattgacactgttagatattctgtactggctcttaatatgtttttaaattagtgctagttagtcagggaacccaagcaaagctcttaactcaattcattggctgtgtttgttttagtttgaacttgagagctctagtgatagtaccactgccagtcgagtcccataccaactccgttccatccctcaaatctcatttgttgctacactctcctctacgcacaccatgacagcaacgctgtatcaacatgtctgtatccctatgctttttctattgacactgttagatattctgtactggctcttaatatgttnntaaattagtgctagntagtcagggaacccaagcanagctcttaactcaattgattggct

SEQ ID NO: 107298 - DNA, 244 bp, Zea mays
  unsure (1)..(244): unsure at all n locations
  Clone ID: MRT4577_29356C.1
aatntattcattggtgggatcagaggaagacagggacagtttcataccatgtatatcttactacacatctatactgttaagaacaagaaccgaacattgcatatatgggcctattcggttagaggaaccgacgcgtgcaccttgagattcaacaccatgtgtgcattggaccaaggcttgaccgtactacacatgacgtacccgtaggtcttgcataataccctgctgtcccgacaaccttaag

SEQ ID NO: 107299 - DNA, 384 bp, Zea mays
  Clone ID: MRT4577_29357C.1
attcggctcgagggatgaacctgggatttttcgaccctgatcggatggtcattcctgaaggcctgcctgtcaaggcggtggacatcacagggatcaccgtgagccgctatgacaggagcgcgctcggtcaggtaggtgctaccataaagaagtgtaggccacctgaaccatacccggtaaagggtgtaatatatatggatgaagttgaccgaaggaaggaagtaataccccgacagaagacatagatggtggtttttggccctgtccttacttcatttaattgtggccactgacctgatctatggttgctaagggtgaacctaccaaatatttcgtgctgatctggtcatgcctacacaaagaaagatgggaggccgccgtcta

SEQ ID NO: 107300 - DNA, 1658 bp, Zea mays
  Clone ID: MRT4577_29358C.1
tgagcgacatgaggctcagctctgtccggcctgttgacccagatgcatggtgtatttaacaagcacacaatcccgccacccactgcacccatggcctctcactcacgttggacatggatcatgctgcatgcatgcatctcttcttaaccacctgactaatactgcctctttgtgctttatttctccacatactactaccgcacaaacgctgtcatggcagcgcttgtggcgatactaatgcacctcctggtcccggcgctgctgctgatgagagtcgtggcagtggtggcggccggggcaccgccgttctcgtgcggcggcggcggcccgtcgctggggttgccgttctgcaacacgaagctccccgctgctcagcgcgcggcggacctagtgtcgcggatgacacccgcggagaaggcgtcgcagctcggggatgtcgccaacggggtgccgcggctgggcgtcccctcgtacaagtggtggagcgaggccctgcacggggtggccatctcgggcaaggggatccacatggaccggggcgccgtccgctccgccaccagcttcccgcaggtgctgctcaccgccgcgtccttcaacgacaacctctggttccgcatcggccaggccacaggcaatgaggctcgcgcattctacaacatcgggcaggcggaggggctgaccatgtggtccccgaatgtgaacatcttccgggacccgcggtggggccgcggccaggagacgcccggcgaggaccccgcggtggccagccggtacgccgccgcctttgtccgcggtctgcagggcagcagcagcaacacaaaatcagtgccgacggtgctgctgacatcggcgtgctgcaagcacgccacggcgtacgacctggaggactggaagggcgtgacgcggtacagcttcagggccaccgtgacggttcaggacctggcggacaccttcaacccgccgttccggagctgcgtggtcgatggaaaggccagctgcgtcatgtgtgcctacacgtccgtcaatggcgtgccgtcctgcgccaacgccgacctgctcaccaagaccttcaggggaagctggggactcgacgggtatgtcgccgcggactgcgacgcggtgtccatcatgcgcaattcacagttctatcgcccgacggcggaggacaccgtcgcgaccacgctcaaagccggattggacatagattgcggtccctacgtccagcaacacgccatggccgccatccagaaggggaagctgacgcagcaggacgttgacaaggccgtcaagaacctcttcactacccgcatgcggctgggccacttcgatggcgaccccaaggcccacgtgtacggcaacctcggagccgcccacatctgcacgcaggagcacaagaacctagcgctcgaggcggcgttggacggcattgtcttactcaagaacagcgccggcgtcctcccgctcaagcgagggtcggtcgcctctgccgccgtcatcggccacaacgccaacgacgttctcgccctcctcggcaactactggggcccaccgtgcgcgccgaccacgcctctccaagggatccaggggtacatcaagaacgtcaggttcctggccggctgccacaaggcggcctgcaacgtcgccgcgacgccccaggc

SEQ ID NO: 107301 - DNA, 1472 bp, Zea mays
  Clone ID: MRT4577_29359C.1
aggccggccgggccgggcttttcccgtcctcctgcgtcctgcgtcgccagagcggagcagcgagcggcgcgcgcgatggcaggcggcggtctccagggagccaagaagcgcaagcgcgagcacgcggaagggaagacaaagcctcggaagcaagtcaagggaggcggggacggagcgaagcggaagagccactcggccgccggcggctacactgcccatggcggcgccggcgaagttgtggcgaggaagaagaccccggttacccccaaggagaagcgcctcgcggccaaggaaatgtcggaggccaggaagatgaagaggaggcagcattacagccttgagaaggaactaacgaaattgtgggaaaagatgagatgtcacgatgtgagcaaagaggagaggtccaaggcagtaagtcaggctatccataaaatggatgggaaatatttggacattgccacatcacatgttactgcacgtgttcttcaaacatgtgtaaagtggtgctcggagtcagagagggatgctatctttgatgttctacagccacatttgcttactctttcttgcaagaaatatgccgtttttcttgtaaagaagcttatagaactcgcctctaaaaaacagtttgccagtttcatatcttcccttcatggtcgtgttgccaacctccttcatcatactattggagctgcagtcgttgattatgcatttcagcgaggaacacaacgtcagaaaaggcaattgttattggaactgtactcccctgaacttcagctattcaaggatctgactgtgcaaagttcctcctgtttgatagatacaatttccaagcttgggttgcagatatcatctgtcctgcttcatatgactattgtgattgataaaatcttggagaaaggtactgttgagtacttaatagtgcacacggccatattggagtactttacaattgcagataagacctcagcctcggatgctatttgtcaacttatcccccttcttactcaaggggcattaatcatagatggagatgaacctacaaacgctccagaactaccaaagaaagcaaaagctaagaagaaaaggtcgaaagagccacttattgttcggatcatgcagacaagggaaggattaaaactaggaattagttgcctcaagtatggcagtgcaaaggacaggaagaagattattaaaagtttgaagggccacattatgaagcttgctctaagtgattttggatgtctttttcttatctgcattatttctattgttgatgacacaaagcttgtttctaagattgtcattcaagagctggtaaaacatttaaagcagctcatttttgacaagaatgggagacggccattgctgcaactacttcaccctttttgctcacgctatctttctccggatgatctagcttgtctgaactacaatgtgccttctcttagttcaacagaggttgagacatc

SEQ ID NO: 107302 - DNA, 1056 bp, Zea mays
  Clone ID: MRT4577_2935C.1
ccccgcgtccgccaatttatagatcgtttgatttttggacaccaagtttgatttactcgtcttattaaaaaatcataattggtatttatttttattgtggtttaattttttcatactttcatagttttttaatcggacaagttagtcaaatttggtgtgaaaaaagtcaaacaacctataaattgagatcgggagagtatttttattggttccagtatttggaaagaaaaactagcgcaactacgtaaaaatttagtagtattttctatgtttctgcctttcctagtttccgtaccatttggggatgacaattttacacacgggtttggatatccgtcggatatctgatccatcgatttttgatttgggtacaatatttgacccgcgggtatcgcccatacccaacccatgattaaatcaggtcgagttcggattttatattttatccatgggtctcagcggatatccaaaaaacacaggcttttatctcatcctaatagccaatagcccatcaacaattccacggcaagctggcccagcccaccatcgctccatgcctccatctcgctaagcctctaaccctaggctccatcgcccaccactggcttatattgagtgatcctatccggtctcctcaagaaggtctacagcaatagggaggaggcaccaaataggagcggaggggaaggcaggcggtatgattgatgagtcgctactcaaaatcttgagctcatgtacaactatttgaaggagctattgaaggagctgaagtgcaaaactgctctacaggttgtggaaaaatctctagtgtgttgtcatcccggccttcgccttcgccggttcatttccaaaaggtgggagtcgtatgctaatactggcgtcctcgcgaagcaagtaacaacgactcttgcctcctggcgtgttttcccgtggagaacttggctgctgttgtaccgtatactgctgatttgtgccattacatatgtatatttctcttggtttgggattaggattcatattcaattaatctatgcatttcttagtaggtgcttggac

SEQ ID NO: 107303 - DNA, 676 bp, Zea mays
  unsure (1)..(676): unsure at all n locations
  Clone ID: MRT4577_29360C.1
gccgcctctctgatttgcgtgcctggagcgtgcccgctatatccgacgcgcgctcatagtgttggtttatgcaggactcctatgtggcgacgagctcctgtcgggttcgattcacctacaggggctcgggnaacggcgtcctgtgggagggtcgagggatgtgggtcacccaggtcctgttgatgtagacattggtgccaatccatccgccgtgggtggtgtggtccgtagcgttgttgtcacttccgtgttggtggttgttcttgttgtctctttccgttttctggtgcttcctttttttgccttgcttttttttgttttttttttttctttttttttttttttttcttttttgtttttttttctttttttcctttttttttttttttttccttctgtttttttttttttcttttttttttttttttttttctctttttttcttttttttttctttttttttcctctttttttgccttttttcttttttttttctttccctttttttcttttgttccttgcgtggttttgtttctttttttttttttttgttttttttttttctttttctcgtcggcttgtttttttttttttttttgttttttttttgtctttttttgttttttctttgttttttttttctgcttcttgtttgttttttttctttttgttgttt

SEQ ID NO: 107304 - DNA, 592 bp, Zea mays
  Clone ID: MRT4577_29361C.1
ttcaggctcaattttgaatagggggcttaaatggatttttcggacctaagtggcggtagaggataagctgttggtggtgcttaatactcttctggtcaaagataaaattaaaattatggtactaattacagctacggtggatctggcagtggagaccaagaagcatattaccctccctcaaacaatgctataaataatcaaccttcttctggcaacaacaacaataacaataacaacaacactactagtagttccaatactggattcttctagggaaaaggtgtccgtattggttgatagataaattgaatctgggaacagtctttttcaaagaattaatcaaacaaaaaaaatagctgaaaaacttattcctttaaaatcatcgtttctaaaggtcgttttttgaaagtgatcaaattatgatactttgaaatatataaattccttactgtaaattaacagatagataaccagatagttacttgcttaatgaactggttactcctattatattcattcattcttatttatgttaattgcatattcttctgctaagtattaaattgatgattctttcaaatactttcctaac

SEQ ID NO: 107305 - DNA, 600 bp, Zea mays
  Clone ID: MRT4577_29362C.1
cgggactcacactctcacaccaaagggatcgagtctagccggcgctacaacaacatagagaacatctctcatctcctgctagtttgaccctcttcaccaaactctcgcatggtgtctgcctgtctgactaactggaaaaaagaaatagttatggaatataaacgcattctccaggagtttaatgactcttcataaagacccgctgacatcatgtcgtgcaagtatctgctggagagaacatgtttcattggcgaagaacaattatgtgagcaactgacagtgcctatgctggtgctgttttaataatgaacattgatttatggccatatgactgattcgatgctccaaaggtcacttttgagagacaggtcttccatcactaatatcaacaacgagtgcaactagtataccttgactttatcacacagaaaagcagccctgctttgacactattactacctgtctctccatctgatcactgctgaccaattccatcgcggaccagcatcttgtctactactttgtcaacatgtacaagacggaatgtccgaactactacttcacggcttgcatgtggaggatcaactacgtcatgctata

SEQ ID NO: 107306 - DNA, 593 bp, Zea mays
  Clone ID: MRT4577_29363C.1
cgaattgcgctcaatctcctctgccgcatccgatattccgatctcgatcccgtgacgcttcgtctccgaccagcgccgacgccttctccctcgtcggctcgacatctgcatcgcacgcaagcaccatgaattatatcattggagcattccacacaccttgtgagatctctgttccagtctctgacgccatgactacgaactccacctgggtgaagatggataatgtgaacacgacgatggtccctgtcttccagagcctcgactctactatctggagaagatcaatagacactcatgtcctgtattgggattgaactctcatgtgtctgacttgaggtgctacgacaaatagaggtctattttgaccgacggaacttctatgacgtcacttcggtaggacggtgcgttacatattcctggtgacatctatgatacgacgacgtgtccatttgaattttcagctgttgtcatgccatatgaatcttacaatgggacgaatgtcacactcaagctcattttgaacgatgacagtgccagaaactatgatgcggatattagtggatatcgtcatgttctgtgtgagagactactca

SEQ ID NO: 107307 - DNA, 324 bp, Zea mays
  Clone ID: MRT4577_29364C.1
tttttttttttttttttttttttttttttttttttgtttttttttttttttttaaccccccgggcaacttttttatatggtttattacaggggacaaacatacaggtggaataacggatacatgaacaccctttggctcgctcctgtttatttatgcaactgggggcatgcatgcaaaaaaccccttgggagaaaaaacccctgttattttggtaatccgttagaacgcatgggccccaaggaagggcccaaggggcaaaagatcatttgttccattggtagggttgaatgtttaaattttggaggggggttttggcccctttc

SEQ ID NO: 107308 - DNA, 390 bp, Zea mays
  Clone ID: MRT4577_29365C.1
caatgacttgctgctggacgagcgcaataccgtctacgtcatgtcgggccggcggccggaggagcttgatcgtgtattccgacgcgtgccgaacctaggcttgattgctgaaaacggctgcttcctcaaggactgtggtagcgacaagtgggttgagatggctgatgcttctcaaattataaactggaagcaatcagtcaagcccatcatgcagtactatctcgagagaacgcccggctcacagatcgaagagcggcgctgcagtctcctcttccactacaacaacgccgaagactttgatacagcctcgcggcaggcttctgattgtgccagccacgtcaacgatgcctgtgaagcgcagcgggtgcatgctttggcagtagacggcgc

SEQ ID NO: 107309 - DNA, 325 bp, Zea mays
  unsure (1)..(325): unsure at all n locations
  Clone ID: MRT4577_29366C.1
tcgagcggccgcccgggcaggtaaaaaaaaaaaaaaaaaaaaaaaaaaaaaaaaaaaaaaaaaaaaaaaaaaaaaaaaaaaaaaatttaaacataaaaagtttttaccttttaaggggaccattcttaggggtctacttttgactgtgtgcctcctccctggtggcctttttggggggtggtttntaggggtgtccttttggcccctttaccacttttggggcacattttttatgagcctcctttttacgggggggcgtcttgggaaaccccttgggggccccactttaatttttctttgggggattttcccttttttggggggg

SEQ ID NO: 107310 - DNA, 413 bp, Zea mays
  Clone ID: MRT4577_29367C.1
ttatttttttttttttttttttttttttttttttttttttttttttttttttttttttttttttttttttttttttttttttgggcccaaaggggaacatttttattccttcgccccgggcaattttccccacatgttaaagggaccgggctgaaaagggcccaaagtataaacccccccaatttgccttattggaagaaaattccgggggccccattttgcccccccaaacaaaatcccccagatccccccgggggaaaaccccccctttatggaggctttggaaacccccccccaaaaacgggaaagggggggccttcccccccctggaaacccacccggagcccctgttttggttgggggggttttaggcccccaacgggggggacaatgttccccccccctttaagggg

SEQ ID NO: 107311 - DNA, 1719 bp, Zea mays
  unsure (1)..(1719): unsure at all n locations
  Clone ID: MRT4577_29368C.1
ctcgagccgcaattcgcttcgaacagggcagaggtgagacttgagagaaggaagaaggccatgtcgtcggcggcgcagcagcagcagaaggcggcggcagcggagcaggaggaggtggagcacgggccattccccatcgagcagctccaggcttctggaatagctgcattggatgtgaagaagctgaaagattctggtctccacactgtggaggctgtggcttacactccaaggaaagatcttctgcagatcaaagggataagtgaagctaaagctgacaagataattgaagcagcatccaagatagttccactgggatttacaagtgccagtcaacttcatgcgcagcgactggagataattcaagttacaactggatcaagagagcttgataagatattggagggtgggatagaaacaggatctatcactgagatatatggtgagttccgctctggaaagactcagttgtgtcacaccctttgtgttacatgtcagcttccactggaccagggtggtggtgaaggaaaggctctatatattgacgcagagggtacattcagaccacaaaggctcttgcagattgctgacaggtttggactgaatggtgctgatgtgttagagaatgtggcttatgccagagcttataatacggatcatcaatctagacttctgctggaagcagcttccatgatgatagagaccaggtttgctcttatggttgtagacagtgccacagctctgtacagaactgatttctcaggaagaggggaactatcagcgaggcaaatgcacatggctaagttcctgaggagccttcagaagttagctgatgagtttggagtagctgtggttatcaccaatcaagtagtggcccaagtggatggatctgctatgtttgctggaccgcagttcaagcccattggtggaaacatcatggctcatgcttcaaccacaaggcttgctcttcgcaaggggcgaggggaggaacggatctgtaaagtaataagctctccctgccttgctgaagccgaagcaaggtttcagttagcttctgaaggtattgcagatgtcaaggattgagaccatacctgctttacaggcatcttcagatccattggtctgctatttgctttgtcattccttgggccaactttcgtgttgcctcaccttgatgtacaaaacggtttcgttcacatatgtgaatgcacgcctgtgactgatttaggcgtcctgttgtaaataaaacgatgcctgttgccctgttgtgtgttgcatgtaatcgacaactctacatatcacaattatgatgtattttaggttttattgttcgcttagcacagccattgctggatgtgcaatgtgggattatagacaagaatccacacaacaacaatggccaatcctgataaagtagttagtgacttgggcaaatagcattgtggtgatctttgagttcacttgtgataagaacagggctggtggctggtggtgaaaactaacttgtgatcggaacaggtttaatagggaaactaaggattctataaaaaaaaaaataaaaaaaaaaaaggggngnccgcnnttngggtnnngcttcgtcgcgtncttggcggnattncnttnttttgngnnccatactttntttccnggcggntggttttnncgctgnnccntgggacccctgggnttccnccttttttnnttagggnnntccttttt

SEQ ID NO: 107312 - DNA, 377 bp, Zea mays
  Clone ID: MRT4577_29369C.1
aaaaaaaaggaaatacccgccacaaatgccagggggggcatatcaagccgggcaggggaacaaagtcttgggggggggggggggcatgctccccccgaaagtcccactacctaccggataactggggcgaatccaacaggcaaaccataggcaagccccggaatgaaaggaaacaaggggccaaaggggggggggcccaaaccacccttactcggctgggggggcccccccggccccggattccgccccctcaacagcaggggcatcctgggactggggggacccggacaccaaaacggtcatggtgctctcagcttcggggaaccccatcttttgcattggcaccctggggagggcatggatgaaatggagttcac

SEQ ID NO: 107313 - DNA, 1905 bp, Zea mays
  Clone ID: MRT4577_2936C.1
atggatcctaaagggaagggaatcgtgatcaacgacaaggagaaggagtccttcgtcaacgagccaaggggtgacaagtccaacgactcgggctcgggccacagacgcaaagatgggaagaagaagaagacaagacgcatcaaggagatcgtctactacgacagcgatgagtctacttcctcccaaaaggacgacgaccacaacgaatacgagagaaagaaaccggtcaattcgaacttttcttttgattactctcgtattcctcaaagtactcatgctcatttattatctattccacttggtaaacctcctcattttgatggagaggactacggattttggagtcacaaaatgcgtagtcacttgttctctctccatcctagcatatgggagattgtagaaagtggaatgcactttgatagtgcggatagtcccatgtttattaatgaacagattcataaaaatgcacaagctactactgtgttgctagcctctttgtgcagggacgagtaccataaggtgagcggcttggacaatgccaagcagatctgggacaccctcaagatctctcatgaggggaatgatgtcaccttgctcaccaagatggagttggtggagggcgagcttggacggttcgcaatgataaggggcgaggagccaactcaaacatacaaccggctcaagacccttatcaacaaaataaggagctacggaagcacgcgatggacggatcacgacgtcgtccgcctaatgctaaggtcctttaccgttcttgatcctcatttggtgaacaatattcgtgaaaatcctaggtacaccaagatgtcgcccgaagaagtactggggaagttcgtaagcgggcgaatgatgatcaaggaggcaagatacgtggacgacgccttgaacggtccgatccacgagccgcaaccccttgctctcaaggcaacgaggagcaaggaggcgctaccgagcaaggtggcgcaagttgaggcggccgggctaaataatgaggagatggccctcatcattaagcgcttcaagacggcgcttaaaggacgcaagggacagccaagcaagaccaaggccaaggggaagcgctcgtgcttcaaatgcggtaagattggtcatttcattgctaactgtcccgacaatgaaagtgaccaggaacaggggagcaagagggagaagaagaagcattacaggaaggccaagggcgaggcacatatcggaaaggagtgggattcggattgctcctcctccgactccgacaatgaaggactcgccgccaccgccttcaacaagtcatccctcttccccaacgagcgtcacacatgcctcatggcaagggagaagaaggtaagtaatcaaaacaatgtcacttatgattcttctagtgatgatgagtctagtgatgaagaaatagattactctagtttgttcaagggaatggatagaactaaagtagataagattaatgaattgattgatgccttgaatgaaaaggatagactcttagaaaaacaagaggatcttttatatgaagagcatgacaaatttgcagaggcacaaaaatcttatgctttagaagttaaaagaaatgaagtgctttctagtgaactatcttcttgtcatgaaactattgctaagttaaagagttttaatgatgatttaaatgctagactagaagtagctagtaaatctaattcttgtgtagaaattgttggaacttgtaataggtgtaaagattttgacattgatgcttgtagtgaacacctagtttcaatttccaaacttaatgatgaattggctagtcttaatgctcaacttaagactagcaagagtaattttgataagctaaaatttgcaagggatgcctacacaattggtagacaccccctcaattaa

SEQ ID NO: 107314 - DNA, 188 bp, Zea mays
  Clone ID: MRT4577_29370C.1
ccctaacctgtgacctctatgcagcccccccttttttttttttttaaccaacataatcatcgcttattcttttctttcactttgcctagcatatatgcatgacttcgcttataccatgagtgtgtgtataatgcatgaacctgtactagcgaattatatggggagggcatcgggcaatggcacctgca

SEQ ID NO: 107315 - DNA, 485 bp, Zea mays
  Clone ID: MRT4577_29371C.1
gctgaagcaaggtttcagttagcttctgaaggtgttgcagatgtcaaggactgagaccatatctgcttacaggcatcttcagatccattgctggtctgctgtctgctttgtcattccttgggtcaacttctgtgttgccgcaccttgatgtacaaaacagttgccttcacagatgtgaatgcgcgcctgtgactgatctaggtgtcctattgtaaataaaacgatgcctgttgccctgttgtgtgttgcatgtaatctgacaagtccaacaaatattgatacaattgtagttatgacgccgaggcagccacactgaggtgctcacgcgcccgacaacttcaagcgcagcgactggagataattcaagttacaactggatcaagagagctcgataagatattggaggggggggatagaaacaggaatctatcactgagatatatggttgagttcccgctctggaaagactcaatttgtgtcacacc

SEQ ID NO: 107316 - DNA, 527 bp, Zea mays
  unsure (1)..(527): unsure at all n locations
  Clone ID: MRT4577_29372C.1
tgaataggtgatgggccaataaactgccatatgcgatttaaatcccataccaaagggatttaatcgaggaagcagtcgcagcttcgcttgatgcatcgtttgttcggtgccccccccccccctggcaagaaagttctgacagctgaattgcttgttagagcatactgtatgatctgagcaacttaaatactgtgaatccatcatcccataacaacattcttctgtagcatccccttnaaaaaaaaaaaaaaaaaaaaaaaaaaaaaaaaaaaaaaaaaaaaaaaaaaaaaaaaaaaaaaaaaaaaaaaaaaaaaaaaaaaaaaaaaaaaaaaaaaaaaaaaaaaaaaaaaaaaaaaaaaaagggggggccctttttagggttccaatttttcttccccggggttggaaggtttaagtttttttttggggcccccaaaataaaattaatgggccggggttttccaccccggggcttggaaaaacccggggtttcccaactttattgctttggggaaattccccttttt

SEQ ID NO: 107317 - DNA, 4537 bp, Zea mays
  Clone ID: MRT4577_29373C.1
atgtccctacgctcgaccacttcgagtgcgcagcgccagcaggaggccgaggtcgccgcggcacaggaacgcgagcgagcagcagcagcggctgcagcgacagcggcgagggcagcacggttggcggcggcggaactgacagcggcgagagcggaagtagaagcagcggaggcgacggatgctgcacgtgcggcggcagcagagctcgaggttctgcgcggcagtagagcaggcagctatgcttctgtcgacgacaacaccgacgaagagcttaggctggcgagggaagcagcgcgagagcaggcggcacagtgggcagccgcgcacccccatgggggcgcgcgtggcggcagcccagataggcgccgacacgctgacagcgccccgcgggagggcgcacgcggcggcagcccagacgggcgtagacgcgccggcggtgctcccggcggcggcgaccgggtcgacggagatcgcggcctctacaggcggcgcgactctccctccccggatcggtaccatggtcgccgcatggcccaggcctttgtcagggacatcggtcccggcggtgggtggcctaccctcaccaagaccaactacattgagtgggccgcggtgatgagggtacggctccaggttcgccaaatgtgggaagcagttcggtacggcgacgtcgactaccacgaggatcggcgagcgctggatgccctcattgctgcagtcccgctcgagatgcagttttcgctttcccagaagcggactgccaaggaggcctgggacgccatcgctgcgacccgcatcggcagcgaccgtgcccgcaagaccacactgcagacacttcgcaaggagtgggagaacctggccttcaagccaggtgaggatgttgatgactttgctctccgcctcaacactctgttgcagaagatggtgcagttcggcgacgaaacctacgatgaggagagagctgttgagaagctcttctgttgcatccccgagaagtacaagcagattgctcgctcgatcgagtctctgctagacctctccacgatgacgatcgaagaggcgataggtcgtctcaaggtggtcgacggcgacgaaccacaggctccctctgggcctatcactatcggcgggaagctacatctcactcgggaacagtgggaggcctgccagggtgacaagaagaaggagtcctcctcgacacgaggccgcaaacgcggcaagcagcgcaaggcacgtggaggcacccaggccggggcgcgaggacatgttgagggtggtgcacgtggaggtgcccaaggcggcgtcgtcggcaacaagaagccggcacgagacgacggctgtcacaactgcggcaagcttggccactgggccagggactgtcggcagccacgacgtggtcaggccaacgtcgcacaggcggaggcggaggaggccctgctcctggcacatgcaagcatcgagccatctccagcggcaccggccgcagcggcactcctccaccttgatgagtcgaaagcacgcgctttcctcggcgacggctccaacaaggacatgatcgaaggatggtgcctcgacaccggcgccactcatcacatgaccggccgacgggagttcttcaccgagcttgactctagcgtccgaggctccgtcaagtttggggacgcctccggtgtagagatcaagggcgtcggctcagtcgtcttcaccgtcacgtctggtgagcacaggctgctcaccggagtctactacatccccgcattgagaaactctatcatcagcttgggacagctggatgagaacgcaagggaggtcgctgcggaggcggtgtgcggtcgcaagctgcgcgtgttgcgcaccgacaacggcagcgaattcacggcggctgagttcgcgtcgtactgcgcggatgagggcgttcagcgccactactccgcgtcgtacaacctgcagcagaacggcgtcgtcgagcggcgcaaccagacggttgtgggaatggctcgggctctcctcaaacagaggggaatgtcggctgccttctggggagaggcggtggtgacagcggtctacatcctcaaccgctcgcccaccaaggcactcaacgggatgacaccgtacgaggcttggcatgggcgcaagccggcggtctctcacctacgggtcttcggctgcctcgcgttcaccaaggagcttggccacatcggcaagctcgacgacaggagcaccccgggggtgttcattggctacgcggagggctcgaaggcctaccgcatccttgacccaagaacacagcgtgtgcgcacggcgcgagacgtagtgttcgacgaagggcgaggatgggcgtgggacaaggcggtggacgatggcgcgactccgacgtacgacttcaccatcgagtacgtccactttgagggagctgggggagtaggcaactcttctccgagcaggtctaccccagccctcaagtctccaccgactccagcgccacactctccagctcttgctacaacgagctcttcaccaccacgcactccagccacgactccggctacagcgagctcttcgccaccacctcgtgtcgagcacgacccagtggagctcgtgaccccgctctcccgcgacgaggagcgcgtcgacgcgtgctacgacggcgagtcattgaggtatcgaagggtggagggccttctcatcgactcgtcgatgccaggccctgcatctcgcattctggcaggagagttgcatcttgcatgcgacgatggtgagcctcggtctttcgcggaggccgagaaacatgcggcttggcgtgccgcgatgcagtcgaagatggacgcgcaggaggggatcgacttcgacgatgctttcgcccccgtggcacggatggaatctgtgcgactccttgcgctgtcagcccagcagggctggcacgttcatcacatggacgtcaagtcggcgtttcttaacggcgacttaaaggaggaggagggcaaggtgttgcgcctgcgcaaggctctctatagcctgcgacaggcaccgagggcgtggaatgccaagctggattccacgctcaaaggaatgggtttcacgccaagcccgcacgaggcgaccatctatcggcggggcaatggaggaagtgccctgctggtgggtgtctacgtcgacgacttggtgatcaccggcgccaaggatgcagaggtggcaacgttcaaggaagagatgaaggccaccttccaaatgagtgacctggggcatctctccttctacctggggattgaggtgcaccagggagactccgggatcacacttcgccagaccgcctacgccaagcgcattgttgagctggctgggctcaccgactgcaacccagctctcactccgatggaggagaggctgaagctgagtcgcgacagcacgacggaggaggtggatgctacacagtaccggcgtcttgtggggagccttcgctacctcgtccacacacggcctgacttggcatactccgtcggctatgttagtcggttcttgcagcgaccgacgacggagcatgagcaggctgtgaagaggatcatccgctatgttgcggggactctcgaccacggtctctactacccgaggtgccctggggaggcacaccttgtcgggtacagcgacagcgaccacgccggtgacatcgacactagcaagagcacaagcgggatcctcttcttcctcggcaagtgcctcattagctggcagtcggtcaagcagcaggtggtggccatgtccagctgcgaggccgagtacatacggcgtccactgcttcgactcaggcgctcttgctggctcgactgctcggtgatctcctcgggagagacactggagcggtggaactcagggtggacagccagtccgctctggcattggccaagaaccccgtgttccatgaacggagcaagcacatccggctaagataccacttcatccgagactgcttggcagaagggagcatcaaggcgcgctacatcaacaccaaggatcagcttgcagacctgctcaccaagccccttgggaagatcaagtttgttgagctttgctccaggtccgggatgacccaactttctcacaagacgacacccaagacttagggggagaatgatggaataagtcttgagcatctagaggacaacagtcgcttttgactgtcctctgtagtcctttagcatctagaggacagcttgactgtcctctgtagtctctttagcatctagaggacaacagtcgctttttgactgtcctctgtagtctctttagcatctagaggacaacagtcgcttttgactatcctctgtagtttctttagcatctagaggacaatcctgttgtatagtgtgtgtgagaaggtgtggtagtgcagcctctagggctataaatatgggtctccaacccttagatgagtatgtcattgtgtagtgtttgaggaaataaacagaaaattgccccaactcatagtgtcatcctcttgatgagagttagagtccctctacttacagtttatagcatgtag

SEQ ID NO: 107318 - DNA, 1047 bp, Zea mays
  Clone ID: MRT4577_29374C.1
atgagcgcgagtgagggcttcctctctgcgtttcctccctgcgcggggctttatacccaggactgggcaggcgcgatccggttacgccgccgcggaccctgtggatacgcggattctgttgcatggcttagcgagggagacggagccggcgcaagggacccacaaggcagtgaaaccctactgtcgattacagagaaaacggtaatgacacgcgggccctgggtgtcggcgctcgttttccctgagttgggccgcgcggatggtaagagcgacgtgggccagggagttggctgggccagtttcgccccacaacacaggattttgggatgttacacggcgtttcttaacggcgacttaaaggaggaggtctatgtacaccagccgccaggttttgcgatccctggcaaggagggcaaggtgttgtgcctgctcaaggtcctctacggcttgcgacaggcaccaagggcgtggaatgccaagctggattccacgctcaagaggatgggcttcatgccaagcccgcacgaggcgcccatctatcggcggggcaatggagaaaatgccctgctggtgggtgtctacgtcgacgacttggtgatcactggcgccaaggatgtagaggtggcaacgttcaaggaagagatgagggccaccttccaaatgagtgacctggggcatctctccttctacctggggattgagcgaacgacgacggagcacgaccaggctatgaagaggatcgtccgctatgttgtgggaactcttgatcacggtctctactacccgaggtgccctggggaggcacaccttgtcgagtacagcgatagtgaccacgccggcgacatcgacaccagcaagagcacaagcggggtcctcttcttcctcggcaagtgccccatcaactggcagtcggtcaagcagcaggtggtggccatgtccagctgcgaggccgagtacatagcgacctccaccgcttcaactcaggcgctctggcttgctcgcctgctcagtgatcttagtgaagaaaagagtacttgcaagatgtag

SEQ ID NO: 107319 - DNA, 1649 bp, Zea mays
  Clone ID: MRT4577_29375C.1
atgggggcgcgcgtggcggcagcccagataggcgccgacacgctgacggcgctccgggcgagggcgcacgcggcggcagcccagacgggcgtagacgcgccggcggtgctcccggcggcggcgaccgggtcgacggagatcgcggcctctacaggcggcgcgactctccctccccggatcggtaccatggtcgccgcatggcccaggcctttgtcagggacatcggtcccggcgaagatggtgcagttcggcgacgaaacctacgatgaggagagagctgttgagaagctcttctgttgcatccccgagaagtacaagcagattgctcgctcgatcgagtctctgctagacctctccacgatgacgatcgaagaggcgataggtcgtctcaaggtgccccaaggcggcgtcgtcggcaacaagaagccggcacgagacgacggctgtcacaactgcggcaagcttggccactgggccagggactgtcggcagccacgacgtggtcaggccaacgtcgcacaggcggaggcggaggaggccctgctcctggcacatgcaagcatcgagccatctccagcggcaccggccgcagcggcactcctccaccttgatgagtcgaaagcacgcgctttcctcagcgacggctccaacaaggacatgatcgaaggatggtgcctcgacaccggcgccactcatcacatgaccggccgacgggagttcttcaccgagcttgactctagcgtccgaggctccgtcaagtttggggacgcctccggtgtagagatcaagggcgtcggctcagtcgtcttcaccgtcacgtctgcaagggaggtcgctgcggaggcggtgtgcggtcgcaagctgcgcgtgctgcgcaccgacaacggcggcgaattcacggcggctgagttcgcgtcgtactgcgcggatgagggcgttcagcgccactactccgcgccatacagcccgcagcagaacggcgtcgtcgagcggcgcaaccagacggttgtggggatggctcgggctctcctcaagcagagaggaattccagctgtcttctggggagaggcggtggtgacagcggtttacatcctcaaccgctcgcccaccaaggctctcaacgggatgacaccgtacgaggcttggcatgggcgcaagccggcggtctctcacctacgggtcttcggctgcctcgcattcaccaaggagcttggccacatcagcaagctcgacgataggagcaccccgggggtgttcattggctacgcggagggctcaaaggcctaccgcatccttgacccaagaacacagcgtgtgcgcacggcgcgagacgtagtgttcgacgaagggcgaggatgggcgtgggacaaggcggtggacgatggcgcgactccgacgtacgacttcaccatcgagtacgtccactttgagggagctgggggagtaggcaactcttctccgagcagctcttgctacaatgagctcttcaccaccacgcactccagccacgactccggctacagcgagctcttcgccaccacgtactccagcaccgacgctcatgtcgagcacgacccagtggagctcgtgaccccgctctcccgcgacgaggagcgcgtcgacgcgtgctacgacggcgagtcattgag

SEQ ID NO: 107320 - DNA, 1872 bp, Zea mays
  Clone ID: MRT4577_29376C.1
atggcggctgagttggtgtcgtactgcgcggatgagggtgttcagcgccattactccgtgccgtacagcccgcagcagaacggcgtcgtcgagcggcgcaaccagacagttgtggggatggctcaggctctcctcaaacagaggggaatgccgactgtcttctggggagaggtggtggtgacaacggtttacatcctcaaccgctcgcccactaaggctctaaacgggatgacaccgtacgaggcttggcatgggcgcaagccagcggtctctcacctacgggtcttcggctgcctcacgttcaccaaggagcttggccacatcagcaagctcgacgataggagcaccccgggggtctaccccagcccccatgtctccaccgactccagcgccacgctctccagcttcggctacaacgagctcttcaccaccacgcactccagccacgactccggctacagcaagctcttcgccaccacgtactccagcaccgacgctcgtgtcgagcacgacccagtggagctcgtgaccccgctctcccacgacaaggaccgcgtcgacgcgtgctacaatgcaggaggggatcgacttcgacgatgccttcgcccctatggcacagatggaatccgtgcgactcctcctcgcgttggcagcccaggaggctggcatgttcatcacatggatgtcaagtcggcgtttcttaacgacgacttaaaggaggaggtctatgtacaccaaccgctaggttttgcgatccctggcaaggaaggcaaggtgttgcgcctgcgcaaggccctctacggcttgcgacaggcaccaagggcgtggaatgccaagctggattccacgctcaagaggatgggcttcatgccaagcccgcacgaggcggccatctattggcggggcaatggagaaaatgccctgctggtgggtgtctacatcgacgacttggtgatcaccggcgccaaggatgcagaggtggcagcgttcaaggaagagatgaaggtcaccttccaaatgagtgacctggggcacctctcctacctggggattgaggtgcaccagggggactccgagatcacacttcgccagaccgcctacgccaagcgcattgttgagctggctgggctcaccgactgcaacccagctctcactccgatggaggagaggctgaagttgagccgcgacagcacgacggaggaggtggacgctacacagtaccggtgtcttgtggggagccttcgctacctcgtccacacacgacctgacttggcatactccgtcagctacgttagtcggtttatgcagcgaccgacgacggagcatgagcaggctgtgaagaggatcatccgctatgttgcggggactctcgaccacggtctctactacccgagcgacagcgaccacgccggcgacatcgacactagcaagagcacaagcgggatcctcttcttcctcggcaagtgccccatcagctggcagtcggtcaagcagcaggtggtggccatgtctagctgcgagaccgagtacatagcggcctccaccgcttcaactcaggcgctctggcttgctcgcctgctcggtgatctcctcgggagagacgttggagcagtggaactccgggtggacagccagtccgccctggcgttggccaagaaccccgtgttccatgaacggagcaagcacatccgggtgaggtaccacttcatccgtgactgtttgacagaaggaagcatcaagacgcgctacatcaacaccaaggatcaacttgcggatctgctcaccaagccccttgggaggatcaagttccttgagctttgttctaggtctggaatgactcaactttcccacaaggcgacacacaagacttag

SEQ ID NO: 107321 - DNA, 2582 bp, Zea mays
  Clone ID: MRT4577_29377C.1
aagctgcgcgtgctgcgcaccgacaacggcggcgaattcacggcggctgagttcgcgtcgtactgcgcggatgagggcgttcagcgccactactccgcgccgtacagcccgcagcagaacggcgtcgtcgagcggcgcaaccagacggttgtggggatggctcgggctctcctcaagcagagaggaatgccagctgtcttctggggagaggcggtggtgacagcggtttacatcctcaaccgctcgcccaccaaggctctcaatgggatgacaccgtacgaggcttggcatgggcgcaagccggcggtctctcacctacgggtcttcggctgcctcgcgttcaccaaggagcttggccacatcagcaagctcgacgataggagcaccccgggggtgttcattggctacgcggagggctcgaaggcctaccgcatccttgacccaagaacacagcgtgtgcgcacggcgcgcgacgtagtgttcgacgaagggcgaggatgggcgtgggacaaggcggtggacgacggcacgactccgacgtacgacttcaccatcgagtacgtccactttgagggagctgggggagtaggcaactcttctccgagccggtctaccccagcccccaagtctccaccgactccagcgccacactctccagctcctgctacaacaagctcttcaccaccacgcactccagccacgactccggctacagcgagctcttcgccaccacgtactccagcaccgacggtaccctctccgggaacgtcctctccgacaccagctcgtgtcgagcacgacccagtggagctcgtgaccccgctctcccgcgacgaggagcgcgtcgacgcgtgctacgacggcgagccgttgcggtatcgaacggtggagggccttctcatcgacccctcggtgccgggcccggcgtctcgcattctggcaggagagttgcatcttgcatgcgacgatggtgagcctcggtctttcgcggaggccgagaaacatgcggcttggcgtgccgcgatgcagtcggagatggacgcggttgagacgaaccgcacctgggagctcgctgatctccctcatggtcatcgcgcgatcacccttaagtgggtgttcaaactgaagagggatgaagccggcgccgtcgtcaagcataaggctcgcttggtggcacgcggtttcttgcagcaggaggggatcgacttcgacgatgccttcgcccctgtagcacggatggaatccgtgcgactcctccgcgctggcagccctggagggctggcatgttcatcacatggatgtcaagtcggcgtttcttaacggcgacttaaaggaggaggtctacgtacaccagccgccaggttttgcgatccctggcaaggagggcaaggtgttgcgcctgcgcaaggctctctacggcctgcgacaggcaccgagggcgtggaatgccaagctggattccacgctcaaggggatgggcttcacgccaagcccgcacgaggcggccatctatcggcggggcaatggaggaagtgccctgctggtgggtgtctacgtcgacgacttggtgatcaccggcgccaaggatgcagaggtggcagcgttcaaggaagagatgaaggccaccttccaaatgagtgacctggggcatctctccttctacctggggattgaggtgcaccagggagactccgggatcacacttcgccagaccgcctatgcccggcgcattgttgagctggctgggctcaccgactgcaacccagctctcactccgatggaggagaggctgaagctgagtcgcgacagcacgacggaggaggtggatgctactcagtaccggcgtcttgtggggagccttcgctacctcgtccacacacggcctgacttggcatactccgtcggctacgttagtcggttcttgcagcgaccgacgacggagcatgagcaggctgtgaagaggatcatccgctatgttgcggggactctcgaccacggtctctactacccgaggtgccctggggaggcacaccttgtcgggtacagcgacagcgaccacgccggcgacatcgacactagcaagagcacaagcgggatcctcttcttcctcggcaagtgcctcattagctggcagtcggtcaagcagcaggtggtggccatgtccagctgcgaggccgagtacatagcggcgtccactgcttcgactcaggctctctggctggctcgactgctcggtgatctcctcgggagagacactggagcggtggaactcagggtggacagccagtccgctctggcattggccaagaaccccgtgttccatgaacggagcaagcacatccggctgagataccacttcatccgagactgcttggcaggagggagcatcaaggcgcgctacatcaacaccaaggatcagcttgcagacctgctcaccaagccccttgggaagatcaagtttgttgagctttgctccaggtccgggatggcccaactttcccacaagacgacgcccaagacttagggggagaatgatggaataagtcttgagcatctagaggacaacctgcttttgactgtcc

SEQ ID NO: 107322 - DNA, 770 bp, Zea mays
  unsure (1)..(770): unsure at all n locations
  Clone ID: MRT4577_29378C.1
actcctaagggcgattgggtttctcaaggccggccggggcccattctttctttctatggcttcatgagattagcagaaacaaaagattcggtaccattcagtgttacatcaggcctcattcatcaataaaattcagaggagaacaacaatgtaaattcagtaattttccctgctaaagctggccactttcataggcaaaattcagaggagaacaacaacataaattcagtaatattccctgctaaagctggatacgatcataggcaaaattcagaggtgaaaagtaatattaattcagtaaagtgttgtgctaaacctgacctcattcattgggaaattcactgatggacaacacattaacaatcaactagtttatcaaaataatcagggcagagtagtggaacctgcaactcggttatacaggcatacaagcagaatacaaaggattttacctgtaatcatcagcagtccccaagggatcttgctggtatatagccggtgccctggatgatgaatggagattgacattagttgccatcgttcgatgacgaagtgcctgtgcttggatcgactgaggagccgcagcacctggtagcattgcagaccttcgcggatccgggcgagaggcaggaggcgatctcccgatcgcatctagggccgtctccatggaagttcgtcgagccttggacgtcgggcgtgaatgaggaagagaccgtggncttccatccatgancgcgaggatgaggatgatcgagagaagatgggaacga

SEQ ID NO: 107323 - DNA, 503 bp, Zea mays
  Clone ID: MRT4577_29379C.1
acaggggaaaccgaaccttttttaaaaaccccgggggaaccttttccggaaaccgcccaaaaaaacaaaacctaccaccttttaatttatttaggcccggggggcttttgggggggcagtccccccccctttggggggggaccggggttgaatttttaaaccaaacctttaacccgggaggggaaaattaaaattttggatcccccggggggaaaaaccaatgggggaacccccagccgggcgaaaaaaaaccaatgccgggggagaaacaactttttttgtcccccattaaaaccgggcccaccggaaggaaagaccccccccggaaccaaagggaggtaaaattaacccccctgacaaaaaaaaaggccccaatccccgcgggaaaccaaaaccaaaaaaaaacaaaccttttttttgaaaatttggacccccctttgggggaatttggcccccttttttgggtgtccttttccaaattggtccccacccacctccctgtt

SEQ ID NO: 107324 - DNA, 336 bp, Zea mays
  Clone ID: MRT4577_2937C.1
atgcagccgggctgcggtctcccaccagtggtcatctacaaggatgaccaccagccttgcggtggagagaagcgagtcgggctgtggcctccccctgccctcaacttcaaggatgttcatcatcctcactggggtggaaggcgagccgagttggggtcctgccttccacatgggctggtgacctacttcttcctccaacatttggaggagaaggatgttcaccagccttgcgaaggaggcgaacttcggctacgtggtgccagccggcccgcaagtgccaccagccgccgggcttcctgccccttggcttggatggtcttgtcctcactcccgtag

SEQ ID NO: 107325 - DNA, 361 bp, Zea mays
  Clone ID: MRT4577_29380C.1
gcacgcctgcagggagccgggccggagtaactgtgcggggtcggcgatctttttagtcggcggccggcctcgccttcagccgttgtttgagatcttcgtcgttgccgtcactcgaacctgcaaggttgcatgtcactgatcctgttgggctgggatgttcgcccttccttcccggcggaacagagaacggacgcgcgggcacaaacctgggttttggaggcctgatcgcagctgaggagggccataaagctcgcagcaggggcaagtggaaccagcgaggagggacgcggcccggatgggcctgtagctgttgcagctggtggaagctgggccgggcgcgctttgaaagaagctggtagct

SEQ ID NO: 107326 - DNA, 224 bp, Zea mays
  Clone ID: MRT4577_29381C.1
gcgctatgataagctcctggaggcagtggtgggttgggtggtttcctcgcccgttccgtgcgcagtggaagccgatggaatgatgctcaccgcatccaagcctgccgccatcagcgtctcccagctgcatgcgatccccatctccacgtgcagctccagccggaatcatgccaggaagatccgccgtagcgcatggatggtcgcagttgcgagctgctacgcag

SEQ ID NO: 107327 - DNA, 458 bp, Zea mays
  Clone ID: MRT4577_29382C.1
gaaatgggtgttcgggaccaagaaagaaggcacgcatctcatacaggttaggctgttcccgttctcgcgccatttggccaacgcgctggcctgatcaggccggcttgccgacgagccaaaaaaaaagacatggggtgcaaatgttggtatccacactgctctgcttgcttaaacattgataaaatatcaaaaaaaagaaaaagaaaaagaatgcgtcaaagactgtgttcgttgaaaaaaaaaacaaagggagaagaaaaaagacgataagtagtagaactgaaaaatacatgcatgtaacaattatacattgcacgacatgtccatgtcctgtatatatatcatgattactggtattaggactgttcacctgtaacggtgtgcaagcgtgcaactgtttgtgtcgctgatcttctggtaatgtttaagaacatatatatgtggttcaagttactttg

SEQ ID NO: 107328 - DNA, 682 bp, Zea mays
  unsure (1)..(682): unsure at all n locations
  Clone ID: MRT4577_29383C.1
atgtaggagtatatatatattatttagcttgaacaaggtttctacacgcaagctaacaacacacttatctgcacctcaacctgaatgacatccatgagatcagatcaaatcaaatcaaatatacagagggctacacaaatgacgacgagctcttcgttttcgccaggttcttttggannnnnnnnnnnnnnnnnnnnnnnnnnnnnnnnnnnnnnnnnnnnnnnnnnnnnnnnnnnnnnnnnagggatccagacacttgactnnnnnnaatctaaatccagcatggtcaccgcctcaccaacacaaccatccgattgnnnnnnnnnnntcttgtttcgaacccatcctcggatgcatactactcnnnnnncgatctccaaaaccttcgactctccctctccgccgcggagtcatggtagcacagcaccatgcagtagcaacagtaaatgatgacagatggatataaatacgcctctaggannnnnnnnnnnnnnnnnnnnnnnnnnnnnnnnnnnnnnnnnnnnnnctcaatgnnnnncggcctgtccggcatcaggagagacgacgggctgatactgcggtggcaacgttggaggtggtgcagccgcctgcgagtagtagacctgtgggcgcgtaggatcagcgtactcgtaaccaaagttgccagccatcatgtttgcct

SEQ ID NO: 107329 - DNA, 113 bp, Zea mays
  Clone ID: MRT4577_29384C.1
atctgtgtatggaggctgcttgaattacatgtaacacccaccgttggctaactatgcggtgtattttggatccatgcataagaatctcaaaatctatgccgacgcgttttttt

SEQ ID NO: 107330 - DNA, 800 bp, Zea mays
  Clone ID: MRT4577_29385C.1
accacatcagaattgtaaagcgcgagtgaaaccgatgattcaggatcaggattacattacattactttacaaatttaagcatttagtccaccaatctccattctagtagttggtctaccaggggtcaagtagcaaggcacaacaccccattctccagtcttgagcacgctgtcaagcttttgcagaaatgagaaactaatggtggacggtggtggtagtagcgtacttatgtagttagctatcactagatctcaacttgatggagaacccacccggatgagctcaccagtgttagtgtggagaatagttgcaggagtagttcatgggcacgtgcagacgaatagctcctcttgcgagggctcgctgcgttggggcttaacctgagggagtctcaggttatctcctccaagaccaagaagagagcagtatgtacaggggattcctccgggatctgaagttgccattccctaccactctccccactcttcattgcctcacccttcaaatcgatcgcgtccgcgaagagcacgatcgagccgagtgggccagagatcgcgaggcgcggcggaaccgaaccgaggcgcggagcggtaggggcgcgctcggatcgatcgcggacgacgacgcgcagagccccgaccgggcgagcgcgtccctagaagctggtcgaggcgagcacgaaaccctaacccggacccccgcgcccgcgcccgcgggggagggggggaatgggagagcaagggaagaggcagagcagtgtctgtcccggccgtttttttttttgccggccggcctcgagg

SEQ ID NO: 107331 - DNA, 649 bp, Zea mays
  Clone ID: MRT4577_29386C.1
gcaccaggcgtcgttcgcgttccgcgcgcgatcgccaccgccccccgccgagccggacgtctcgtgggtcaactctcttgtcaaggacggtcacgcggccgctctcttgtcaaggacggccacgccggcgacatatttgcgcagtggccggagctggagcagatggtggcctgatccaccggccctcactggctcatagcatctagctgaccaaagttatttccttgaatcatttttgcccctcctttctttgcttaattccattcgtacaagatggttttttttactagtacatagatagggctgtttcacaataacatttggtcatcaacaagaagcatagatacccaaagggagctttatagtatactgatgaggaggaacagccatcggtttataaatagttgtacacacgaattccctacatcacaaaggagtttatatttattttacttgatgtataagatatcggcagacacggtaagatttgattcatgtgctttccgcatggcgacaattgagacgaacagtaagatttgattcatgtgctttccgcatggcgacaattgagacgaacactaaggtctcgtttgtttccttttattttgaggaattataatcttactaatggaatagactatttttttag

SEQ ID NO: 107332 - DNA, 336 bp, Zea mays
  Clone ID: MRT4577_29387C.1
ctcgagccgccgggcctcccgactccagagctctctctctctctctctctctctctctttctctctctctctctctctctctcgctctcatcgtgctctctcccgtgtacaaaatctcagctgaacagggagaactacggcgaaagagcatctctgcgcaccggcgactggcctccgcccctaatagtgcagctgaggcggcaggtcgaaatgcccgcgcctcatggcgtagacgcgtccgagattcggccccgtcctaagcctcttcgccggaagctacggatcatcgcggcgtctactccacactgacgcagtccgagagccgcacagtccgtc

SEQ ID NO: 107333 - DNA, 221 bp, Zea mays
  Clone ID: MRT4577_29388C.1
gttgacatccccatcaattctctatacagcgtccagatccctttcatgcaagtaattgcatacaggattaacgtacacggggggacttgcatccgaataatcatcaacatatgctagggcgagctcacgaacgtagacactgcttctggcatggatcacgatgccccgtctactttcacctttactggtccgcttaccagagagcattacaaaataaatga

SEQ ID NO: 107334 - DNA, 317 bp, Zea mays
  unsure (1)..(317): unsure at all n locations
  Clone ID: MRT4577_29389C.1
agaattcccggngggcgatatcattaaaaggtgaataaaaaaaatcaaaaaggaaaaaaaaagaccaaattttttatcctatcaaaaatgcatttgacaaataaaaaaaaacggacccacttattctacaaaatacccaaggtggtgccctataggacttaccactttatgggtttttcacatataatttcttaaacaaagatcccaaacaattttatcctccttgctttttcaatttataagcgcgtttttttttggtgaaattttgaaaacataaacccatttaacacagttcaaactcacatgaacactatttt

SEQ ID NO: 107335 - DNA, 2251 bp, Zea mays
  Clone ID: MRT4577_2938C.1
aaaaatttaaagcacaataaattgtagaaggttcatttgcaattttcctaggagcatgaataacattcctcctaggcacatgatgaatagcatttcttttaggaacaacatttatcctagtagcatttctatcatacacataagaggaactaggagcaaacatggcatgagaatcataaacatatgaatcaaaagcatcatgacttacatttctagtttgtcttctatcatgatacaaaaatgcatggttccttttagcactagtatccataggggccttccctttctccttggcgggaatgggatccttatggcttattaagttcttggcttccctcttgaagccaagcccatccttaattgagggatgtcttcctattgtgtaggcatcccttgcaaattttaacttatcaaattcacttttgctagtcttaagttggacattaagactagccacttcattatttagctttgcaatagaggctatgtgttcactacaagcatcaatatcaaattctttacatctattgcaaatagcaacattttctacacaagttgttgatttgctagctatttctatcttaacattcaactcatcgttaatgctctttaattttgaaattgtttcatggcatgaggataattcacaagtaagcatctcatttcttttaacttctagagcatgagatttttgagcttctaaaaatttatcatgctcttcatacaataaatcctcttgtttctctaagagtttatccttctcattcaatgcatcaattaattcattaattttgccaattgtaattctatctagacctttaaatacactagaatagtctatttcatcatcgtcactagaatcattatcactagaagaagcataagtagagtttcgagtacttactttcttctccttagccatgagacacgtgtgacgctcgttggggaagagggccgatttgttgaaggcggtggcggcgagtccctcattgtcggagtcggaggaggagcaatccgaatcccactccttgcctagatgcgcctcgcccttggctttcttgtagtgcttcttcttctcccttttgttccccttttcctggtcactttcattatcaggacagttagcaataaaatgaccaagcttaccgcatttgaagcatgatcgcttccccttggtcttagtcttgctcggctgtccattgcgaccctttagcaccgtcttgaatctcttgatgatgagggccatttcttcatcattaagaccggctgcctcaatttgcgccaccttgctgggtagcgtctccttgctccttgtggctttgagagcaaaaggttgcggctcgttgatcggtccattcaaggcgtcgtccacataccttgcctccttgatcatcattcgcccgctgacgaattttcctaggacttcttcgggcgacattttggtgtacctgggattctcacgaatattattcaccaaatgaggatcaagaacggtaaaggacctgagcattagtcggacgacgtcgtggtccgtccatcgcgtgcttccgtagctccttattttgttgataagggtcttgagccggttgtatgtctgagttggctcctcgccccttatcatcgcgaatcgtccaagctcgccttccaccaactccattttggtgagcaaggtaacgtcattcccctcatgagaaatcttgagggtgtcccagatctgcttggcgttatccaagccgctcactttgttatattcatccctgcacaatgaagctagaagaacagtggtagcttgtgcattcttatggatttgctcattaatgaatgaagggctatccgagctatcaaatttcattccactttccacaatctcccaaatgcttggatggagagaaaataggtgagtacgcattttgtgactccaaaatccgtagtcctctccatcaaagtgaggaggcttgccaagtggaatggggagcaaatgagcatttgagctatatggaatgcgcgaataatcaaaagaaaagtttgagttaaccgtcttttgtttgtcgtggtcgtcgtccttttgggaagaagaggactcatcgctgtcgtagtagacgatctccttgatgcgccttgtcttcttcttcttcccatcttttcgcttgtggcccgagcccgagtcattggacttgtcatcccttggctcgttgacgaaggactccttctccttgtcgttgatcacaattcccttccccttaggatccat

SEQ ID NO: 107336 - DNA, 311 bp, Zea mays
  Clone ID: MRT4577_29390C.1
aacctatctgaaagcatgtggctctccagtgaggttattcccatgattcactaagggtcgattatgggaacaaacccctctgctcccctagacctcattgtaccagagaatgccttctgctatcttacataaattgggccttgctgataccatctggcataatttcgcaccttacgtgcaatgaaattatcaacttgtagtatcagacccttctacagacactctttctccccatcctagacttattaatgacgttccttttacccagaagggcaaaccttttcatgatactgatctgaaccactggtctt

SEQ ID NO: 107337 - DNA, 258 bp, Zea mays
  Clone ID: MRT4577_29391C.1
tagggcgtgagcgcgtcggtgctcggagcagttcggagggtcgtcggcggaggaggggatctctggccacgttcgtgacctccactatcttgtcaaggagccgggccttctcaaagccggagcggcagggctggtcgcgcagagcgcagctcctcggcgcttttttcgagggcttcgtcactggcccccggtcacggaggcgcctctctcgccctccttggctccctcggaaggccccccggcccccccagacacctc

SEQ ID NO: 107338 - DNA, 773 bp, Zea mays
  Clone ID: MRT4577_29392C.1
ccggccgggggccgttcgcacttcgcacgcaaacccctcctctcctctgctgacccctcctctcctggtctggattccaccaagccgtgtccaccaaccggccaccacccccgctgccggctcgcacctctctgcgccgtgctcagatttgcccccctctgcctgcctgcttctactacctgctgacacggcggtgcgggtcgtgctcggtggacgccagggggctacccctacccgggatccaggatcgtgctgtctgctcgccctctcctgctccttcaatcccatcggagatccgtgctggcgtttcctcccgtaagcccgaccacggtcaacatccaatttctcgtccgattcatgcaaaaaccattatgggccccgcgtaccgtgcgttgtttagccatcttgaatttccatttttttccaggatcgatgaattagccttgtttaggtttggcggaacacgtaccgtgcgttgccaaattcgagcattttgctatcattatatttgtcatgaattttaggacccgttgatggattttatttttctttgggggagaatggagatggggattttgaagttaaattcatggtcctgcttgagaatttttggggttagagtcctacataggggtacaaatagtcgataaaatgaaatatatgtggtattgatattttttcgtatttcaatgttgccgaagccaatattcctagggccacatgccatgatactagtagcatatctgtgaacgcacattgtgtggtagtgatgt

SEQ ID NO: 107339 - DNA, 299 bp, Zea mays
  Clone ID: MRT4577_29393C.1
gggggaaacctttatatcagtccctcccttacctttcttacccgctgggaaaaatagcctttgggaaaaaaattttttattcttttacaaaccaaatgggcctttctcccttttttcctgggggggcgggcccaatttaactttcttctttacaatgggcaaattaaaacggggggggcccccctggtacaaggaccctttttcccaaaaccaggtttttattttggggggtcctttcttttaaaacccttggggccgttttaaaaaaccccaagggcccgcaaaccttgggcttttta

SEQ ID NO: 107340 - DNA, 1551 bp, Zea mays
  Clone ID: MRT4577_29394C.1
ccggccgggaatgagataccggtatcacacatcacactgctggcctgcttggggcgtgtggtcgaggaggtggggagcggtgaactggtttatgctaccgccatctctagcgttagcttctgcgtgtggccgtgggtgcccgcgcgcggcatgacgaccgccaccgccatcgtcgccgggcatggcctcgcgctgcgtcggagcctccccctccccaacccgccagggcgagccaccacgtcggtctccctctccgcgcgccccgtcactccagcccgccgcatgattgtcccggctagcccgtcgccgcggtcgccgcgccggtgccggtccatctcctccgagagctccaccgaggcatccgctgcggctgacatcgccgacgaagaagtggaggccgagaacaaggtggacccgcaggcggaggtgtgctacctggaccctgacgtggaccctgagtcgatccgggagtgggagctggacttctgctcgcggcccatcctggacgcgcggggcaagaaggtgtgggagctcgtggtgtgcgacgccacgctgtcgctccagttcacgcgctacttccccaacaacgccatcaacagcgtgacgctccgcgacgctctggcctccgtgtccgaggcgctgggcgtgcccatgcccgaccgagtccgcttcttccggtcccagatgcagaccatcatcacccgcgcctgcggcgatctgggcgtgaaggccgtgccgagccggcggtgcgtgtcgctgctgctgtggctggaggagcggtacgaggtggtgtacagccgccacccggggttccaggccggcaccaggccgctgctcgcgctcgacaacccgttccccaccacgctccccgagaacctcttcggcgacaagtgggcgttcgtgcagctcccgttctccgctgttagagaggaggtggagtcactggagaggaggtacgcattcggtgcggggctggatttggaactgctggggttcgagcttgatgacagcacgctagtccctggtgtcgccgtggaatcatctcgcgccaagcctctggccgcgtggatgaacggtctggagatctgcgcgatggaggcggacaccggcagggcgagcctgatcctgtcggcgggggtgtcgacgcggtacgtctactctgggtaccagaaaaccgccgcgtcgacgcaggaggccgaggcctgggaggcggcgaagaaggcctgcggcgggctccacttcctggccatccaggagaacctcaactccgacggctgcgtcggcttctggctcctgctggacctgcccccgccgcctgtatgatggatggtctattctacccggacgctacttcttctctgtcgtgcatttcgtcttgatagccactgtagcatcatcgacgtctagtgctagtaaattatttttgggaatcagtatacggggattcgtcagagaggaaagtgtaaaagaatgtttggagtttggacaaccttgcagttgcaggtttgcattgctgtttctgtcgaaaaaaaaaaaaaaaaaaggccccta

SEQ ID NO: 107341 - DNA, 2816 bp, Zea mays
  Clone ID: MRT4577_29395C.1
gtctacctccgcagcttatatgccaactgcataatgtgactatgcatgctgatgctgagacagatgaggtgtatgcacagatgacactgcagccactcagtccacaagagctcaaggacccatttttgctcgctgagttaggcactgccagcaaccagccaacaaattatttttgtaaaacactaactgcaagtgatacgagtacacatggtgggttctctgttccacgccgagcagctgagaaggtgtttcctccactggatttcaatcagcaacctcccgcacaggagttgattgcaaaagatcttcatggcaacgactggaaatttcgccatattttccgaggtcagccaaagcggcatcttctgacaacaggttggagtgtctttgttagtgcaaagagactggttgctggcgactctgtcctttttatctggaatgacaacaaccagctgcttctgggaattcgacgggcaaacagaccacaaaccgtcatgccatcatcagtactttctagtgatagcatgcatattggcctgctcgctgctgcagctcatgctgcatcaacaaatagtcggtttactatcttctataatccaagagcaagcccttgtgaatttgtcatacccatggctaagtatgtgaaagctgtgtaccatacccgtatatctgtgggcatgcgtttccggatgctttttgagacggaggaatctagtgtaaggcgttatatggggacaattacaggaataagtgatcttgatcctgttcgctggccaaactcgcactggcgctcagtaaaggttggatgggacgagtcaactgctggagagaagcagccaagggtatctctttgggagattgaaccgttgacaacttttccaatgtatccatctccttttgctcttggattaaagcgcccatggcctgcaggcctgccttctttatacggtggaaggggtgatggcttgacctcttctcttatgtggcttcgagacagggcaaacccgggtttccagtcactgaatttcagcgggcttggtatgagtccctggatgcagcctaggctggataattccttacttggtctccaatctgacatgtaccagaccatagcagcagcagcagcattacaaagcactacgaagcaagttccaccttcagcaatgcagttccaacagcctcagaacattgctgatagatctgctcttctatcaagtcagattctgcagcaagtacaacctcggtttcagcaaatttaccctcaaaatctcaacgaaaacaaaattcaaggtcatacacaacctgagtacctccaacagcagcttcaacgctgccaatcatttaatgagcagaagcctccgatgcatccacagcaacaacagcaggaaccacagcagcagcaatgcgtccaaacaccacaggatcaacaaatgcaagaacagaagcatctgcacaacttccactccttgccagatgcattatcggccttttctcagctttccccagccactcactccccaccttccgcattgcagacagttccagcattctcgcatcaacaaaacttcccagatacaaacattagctctctctcaccatctactggcccttcaatgcatggcatgttggggagattaccttccgaagcagcttcgagcctcccatgtgtggcaataaacgcccatgtatcggtatctgacccatggtcatccaagagagttgcagtggagtctgttaacccttgtcgacctcatgtttcaccacagatagaacatttggatatggcaacgtgtaacatgccgcagagctctgcactagcaccattacctggacgagaatgcctagtggatgaagatgggtgctctgatcctcaaaatcacctcttgtttggtgttcacatagactcacattcacttctgatgcaagggggcattccagcccttcagaatgataacagttcaggcactattccatactcaacctccaatttcctgagcccttctgataacgatttccccttgaatcaaccgctacgcagcgctggctgcttagatgagtcggattatcttccatgtgcagagaatgccgaacaggcaaatcaacagtttgcaacctttgtgaaggtttacaaatccgggaccgtcggaaggttgctcgacatcactagattcagcagctacgacgagctccgtagcgaggtggggcgtctgtttggcctcgagggccagctggaagaccctttgagatcaggctggcagcttgtatttgttgacagggaggacgatgtccttctggttggcgatgacccatggcaggaattcgtgaacagtgtgtcctgtataaagatactttcaccggaggaggtccagcggatgggcaagccgggcatccagctcctgagctcggctccttcaagaaggctgggcaatggctgcgacagctacgcgagcatgcaggagccgagaggcctggacgctgggatggcgccggtgggttcggtcgagttctgaagacggcggaggggagcccatggccctcggctcgaggattactctccctcctgtatgtttctgcagcacttgctagctctgcgacttggaacaaagcacgtagatcaaatggagctctgtgctgctccccgtctgatgatgtcttatggtatagactcgtagcagtaactactacatgttgtatacatgccgggcacttcagttcttatcgagtagcaataccgctagtttagtccatccaatcaactacgttcttgttcctatgatcctgttgttgcgatgcagtaaaactttttttttcatcat

SEQ ID NO: 107342 - DNA, 4211 bp, Zea mays
  Clone ID: MRT4577_29396C.1
ccacgcgtccgctcacgcacaggagatcaatgcaaaagatcttcatgtgaccattgaaaaagacagcatatatgtagagggcagagaaaacggtatattctgatctcagggtggagtgtatttgttagagcaaagagactggttgctggcgactctgtcctttttatctggaatgacaacaaccagctgattgtggtaattcgactggcaaacagaccacataccgtcatgccatcatcagtactttctagtgatagcatgcatattggtctgctcgatgctgtagctcatgctgcatcaacaaatagtcggtttactatcttctataatccaagagcaagcccttgtgaatttgtcatacccatggctaagtatgtgaaagctgtgtaccatacccgtctatatatgtccatcaagtttcaatctaaattgcttaagtgcccttgcagttatatggggacaattacaggaataagtgatcttgatcctgttcgctggccaaactcgcactggcgctcagtaaaggtaggtctcgaaacaaacacagctttgtttttcttaatgccattctacatgccttcacacttctttaactgcgtcatgagtgaattccgagttagatggtggtctctactttcatacatatagtagtaagcatgcaaccaattttcgcctgaatcatgcaggttggatgggacgagtcaactgctggagagaagcagccaagggtatctctttgggagattgaaccgttgacaacttttccaatgtatccatctccttttgctcttggattaaagcgcccatggcctgcaggcctgccttctttatacggtacaagtgacagttacacacttagcaactcttccagtatacagcattgaacaatggattatattgatactgcttatgtgctaatgtcactagtcttgtttctgattgttttggtaggtggaacaagtgatggcttgacctcttctctaatgtggcttcgagacagggcaaacccgggtttccagtcactgaatttcagcgggcttggtatgagtccctggatgcagcctaggctggataattccttacttggtctccaatctgacatgtaccagaccatagcagcagcagcagcatttcaaagcactacgaagcaagttccaccttcagcaatgcagttccaacagcctcagaacattgctgatagatctgctcttctatcaagtcagattctgcagcaagtacaacctcggtttcagcaaatttaccctcaaaatctcaacgaaaacaaaattcaaggccatacacaacctgagtacctccaagtccaacagcagcttcaacgctgccaatcatttaatgagcagaagcctccgatgcatccacagcaacaacagcaggaaccacagaagcagcaatgcgtccaaacaccacaggatcaacaaatgcaagaacagaagcatctgcacaacttccactccttgccagatgcattatcggccttttctcagctttccccagccactcactccccaccttccgcattgcagacagttccagcattctcgcatcaacaaaacttcccagatacaaacattagctctctctcaccatctactggcccttcaatgcatggcatgttggggagattaccttccgaagcagcttcgagcctcccatgtgtggcaatgaacgcccctgtatcggtatctgacccatggtcatccaagagagttgcagtggagtctgttaacccttgtcgaccccgttgcttccacagcatcaacgacggggactccgtaagcgaggatggggcgatctgctttggcctcgagggccgagctggaagacccttctgagatcaggctggcagcttgtatttgttgaacagggaggacgatgtcctttctggttggcgatgacccatggcaggaattcgtgaacagtgtgtcctgtataaagatactttcaccggaggaggtccagcggatgggaaagccgggcatccagctcctgagctcggctccttcaagaaggctgggcaatggctgcgacagctacgcgagcatgcaggagccgagaggcctggacgctgggatggcgccggtgggttcggtcgagttctgaagacggcggagggaagcccaccatggccctcgggtcgaggattactctccctcctgtatgtttctgcagcacttgctagctctgcgacttggaacaaagcacgtagatcaaatggagctctgtgctgctccccgtctgatgatgtcttatggtatagactcgtagcagtaactactacatgttgtatacatgccggcacttcagttcttatcgagtagcaataccgctagtttagtccatccaatcaactacgttcttgttcctatgatcctgttgttgcgatgcagtaaaactttttttttggtcatataaatcgcaccaacaagacaaaaaagttactaaccgccttctgttttcgctgtccgtctcctgtttctcatacgtttgttgggctcggtggtttacaaatccgggaccgtcagtgtgtcctgtataaagatactttcaccggaggaggtccagcggatgggcaagccgggcatccagctcctgagctcggctccttcaagaaggctgggcaatggctgcgacagctacgcgagcatgcaggagccgagaggcctggacgctgggatggcgccggtgggttcggtcgagttctgaagacggcggaggggagcccatggccctcggctcgaggattactctccctcctgtatgtttctgcagcacttgctagctctgcgacttggaacaaagcacgtagatcaaatggagctctgtgctgctccccgtctgatgatgtcttatggtatagactcgtagcagtaactactacatgttgtatacatgccgggcacttcagttcttatcgagtagcaataccgctagtttagtccatccaatcaactacgttcttgttcctatgatcctgttgttgcgatgcagtaaaactttttttttcataataacctgtatattgaaactgttcttggctcccacggtatgctgctgacgacgactgacgaggaaaactggaatttggggggatttcacagaattgaaactactgataattccaacttaccgatgcaattccaattccaacttggtcagaccaacattgccgttgctgtcaatgtcacgataattgctaaagctaccttcagtaaaagcaaaaggcagtttgttatgatcctggaaaagttgagagatagatatatagatatgatctctgagggaattcattcaggtgcacctttatgcttgcataatttggcaccacttggtgcagacaacgacgccatggaccggtcctcttcctctcatagtctcatgtgctccctgggtccctatctgactgaaacccctgagtgcggccctcccctggcgaagaagaaaaggatggcctcccgttccctgaggtcagtggtgcatcggtgagctgaatgcgacgccgctctcgccatcacagttcacggatccactatccctgctccgatccacctcacctggggccgccgccgccgcgccgggccttctgggatcgaccggtttggtggctgcctgctccgcctccgcgcggtggatcgtgacaagattctgagtgggagcacgtggagtgcgacggcaatggcggcgtgacacgcgggcgagcacagctcgcccgttcttgtcgacgctctgcgactctgggcaggtcgtccgtaggagcgaaccccggtagcttctctggtgatctctccatcgctttcatcatatcttcggctgggcccccgggtttggatcccggacgggtattgccatccccgccaatcttggccggcttttcgcggtggggaaggtagaaatctctgttgcctcccaaaaatctgtgccctttttggatgtctatcgacaacagtaacacgagcagagaccgtcagctcacacatatctatcgacgacagctcgagatgcacgaggctttgacttgttgcagccttgcaggtacatcaggtaaagtaccagccgtatctggaaaattgttggtcacctgctggcgatgggtgatcatggtcatggaaccctgagaagagattcaactgagaacacaaggaaaacgacggctctggacacgctcctgtccagctctggaaccgtgcggccgc

SEQ ID NO: 107343 - DNA, 3458 bp, Zea mays
  Clone ID: MRT4577_29397C.1
aattcggcacgaggctctctcctcctcccctccgctccctcccagtcccagatcccgattcgccgccgcctccggcagatccagccagcagctcccgccgcagaaccgccgcgggcgccatggagaagccatgctctctcctggtccacttcgacaagggctcggcatcgatggcgaacgagatcaaggcggatctggagggcagcgatggccccgccaaggctgacgccatgcgccgcgccatctcgctcctcctcaacggagagaccctccctcagctcttcataaccatcgtccgctacgtgctcccctccgaggaccacaccgtgcagaagcttctcctcctctacctcgagatcatagaccgccgggatccggccggccgcgccctgccggagatgatcctcatctgccagaacctccgcaacaacctccagagccccaacgagtacatccgcggcgtcactctgcggttcctctgcaggctctccgagcccgaggtgctcgagccgctcgtgccgtccgtgctcgcgaacctggagcacaggcaccaattcatccggagacacgctgtctccgcggtttccgcgatctaccgcctcccgcatggtgaccagctcatccccgacgcgccggagctcgtcgagcggttcctcgcatctgagcaggacgcgtccgcgcggaggaacgcattccttatgctctgtgcctgcgcacaggaccgcgccgtcgcctacctgctctccaacgccgatcgagtcgctgagtggcccgatctgctgcagatggccgttgtggatcttatccgcaaggtctgccgatcacaaaaccgtgccaacaagggaaggtatatcaccatcattacgtcgctgctctccgcaaccagcactgcggttgtttatgaatgtgctggtgccctggtatcactctcttcggcacccacggctgtgcgggccgctgccaacacctactgccagttgctctcgtcgcagagtgacaacaatgtgaagctcattcttctggatcgcctcaacgagctgcgcaccctgcaccgggatgtcatggtgggtgtggtgatggacgtgcttcgtgcactggccagccccaatttagatgtcaagagaaaggttctcgatttagttctcgatttgctcaccccgcgtaatgttgaggaggtggtgctttatctcaagaaggaggtggtcaagacgcaggctggagacctcgagaagggtggcgagtaccgccagatgctggtgcaggctatccatgcttgcgctgttgagtacccagaggtggctggatctgtagtgcacctcctcatggactttcttggtgataccaatgttgctgcagctgttgatgttgtgctgtttgtacgtgagatcattgagaccaatccgaagctgcgtgtttccatgatccagaggcttattgatacattctatcagattcgggcatcccgtgtctgctcatgtgctctctggatccttggggagtactccctctctctatcagaggttgaaagcaccattgctaccattaaacaatgtcttggtgatctgccattctacactgtctctgatgaaggggaggtaactgattccaccaattcagcccaggcggtggtgaacactgtcactgtatcttccaggaggcctgttgttcttgcggatggcacttatgccacacagagcgccgctaccgagaccatttcagccccatcagttgctcatgggtcattagcatctaccctgaacctcagatcactcattttgtcaggtgatttcttcctggctgctgttgttgcatgtaccctgaccaagcttgtgttgaggctggaagaagtgcagccatccaaggttgaatcaaacaaagcttgcactggagcattgctgatcatgacatcgattctgcagctgggccagtcttcttaccttccccacccgattgataatgattcatatgacagaattgtgctgtgtttgagattgctttgcaatactggtgatgatgtcaggaagatttggttgcattcatgcagacagagctttgcgaaaatgcttgctgagaagcagttcagggagacagaggagatgaaggcaaaggcacagatctctcatgcccagccagatgatcttattgatttttaccacctgaagagcaggaagggcatgagccagcttgagttggaagatgaggtgcacgatgatttgaaggctgcaactggtgggtttactaaggatgcagatgatgcaaacaagctcaaccgcattcttcagttgactgggttcagcgatcctgtgtatgctgaagcatttgtaacagttcaccattatgacattgtacttgatgttactgtcattaaccgcacaaaggagacacttcagaacttgtgcttggaattggctacgatgggagacctcaaacttgttgatcgccctcagaactacaccttggctcctgagtctagcaaacagatccgtgctaatatcaaggtttcatcaacagagacgggggttatatttggcaacatagtttacgagacttcaaatgtgatggaacgatcagtggttgtcctaaatgatattcacatcgacatcatggattacatctcacctgctacgtgtgcagatgttactttccggaacatgtgggcagaatttgaatgggaaaataaggtggctgtgaatactgtgattcaggatgagaaggaattcttgaatcacattatcaagtcaacgaacatgaaatgtctgacaccaccgtctgcactggatggggaatgtggtttccttgctgctaacctttatgcaaagagtgtgtttggcgaggacgctttggtgaacatcagcattgagaagcaacatgacggcaagctcagcggctacattcgaataaggagcaagacccagggaattgcactcagcttaggggacaagatcactctcaagcagaaaggtggcagttaactgtgacaagtaatcgcagttgtatcatcatttttcgcatttaggaaatccacgtgccagagagagaccagtgccgtggcattgaactgagtataaatgctttttgtacaaaaggatcgatcaaagagagagagagagataagaggacagttatgaggaggaagtcacggtgttctcggtcgaagatccatgttgctgtagtaacggtgctgttccaaacttccttgaaatagttgtgaagtttatgttgatttctcgacaggtagttcaattgtgatcttgtactactattaggaatccctcttgttttaatgttttatttgcctttttattttagttgtctggacttggaaacagaagcttggaggcggtgttgtcacgttatttttgtagagatgaactggagctcattttctgttacgtatagatttgccaattgtgttagggtacttttatggtgtttatttaagaaatgaggtagtccat

SEQ ID NO: 107344 - DNA, 193 bp, Zea mays
  Clone ID: MRT4577_29398C.1
gtctaccaccctattaagcgcaaggtctcagtctcaccgacacctattcaatcccaatcggacacactagtttctcctcgatcctcatctcctccctctctcgagtcaagagcagatcatctaccaaacaagctcttctttcgcttgcaatccatggagctcgacgccgacaaactgatcgccaccgatcttc

SEQ ID NO: 107345 - DNA, 429 bp, Zea mays
  Clone ID: MRT4577_29399C.1
gaaattttattttttttcgattcagccttccatcctgacacttttgcatcatgacctgtgtttcccacgagcagcagagagaataaaactctattggcacacgacgtcagataacgcaaagcataaaaataagagactattactgtttttactacccttaactgttggcattcaaatgcattatcagacgcgttctatccatactaaagctgcagacatcatttgtggccactgtttattcacaataacaagaagcgaaggtgattggaaccctgtcattactgacacgggctgttctgcctgcactgccggtaagaaaccacaacttctccctcagttactggctcgtgaacgactgctatctttttttcccccccatgaactatgaatatggtttgtatgtgggcattcatgagatatcctttgagg

SEQ ID NO: 107346 - DNA, 6126 bp, Zea mays
  Clone ID: MRT4577_2939C.1
atcccgggggtcggccaaaaccaacgcttgcctactccacgttggggcgtcccaacggacgagggttgcaatcaacccctctcaagtggtccaaagacccacttgaataccacggggttttgcttgctttttctcaatcccgtttgcgaggaatctccacaacttggagcctctcgcccttacacttgaagttcacaaagaagcacggagcaagggggaatgagcaacgcacacaagacttcaaaagatcagagcaacaacacgcacacaagtcgcaacaagagctcgcaacacaactcaatgagttcacaactccactagagctctatatgctatcacaatgaaacaaatgcgctgaatcgaggtcttggtgcttaggaatgttgtaagaatgcttgatctcctcctccatgcgcctaggggtcccttttatagccccaaggcagctaggagtcgttgagaacattcctggaaggcaattcttgccttctgtccgttggcgcaccggacagtccggtgcaccaccggacactgtccggtgcacgatttctttccttctttggcgcatccgaccgttgccgaccctcggtccacttggcataccgaacactgtcaggtgcacaccggacagtccggtgctgtctagtgaccgttggttctggccacacgtcgcccgttgattacgcgaacgcgctgccgaccgttggcgtgagcgctgttggctcaccggacagtccggtgcacatcggacagtctggtgaattttagccacaacgacctcgatgattcccgagagcagcgagttcgtcgctgagccagcctggtccaccggacactgtccggtgcaccaccggacactgtccggtgcaccaccggacagtccggtgccccagacaaaaacagccccttggctgtacacagccaagtcttctcttctcttcttctttctgtttctaacacttagacaaatatattagtacacaaaaccaatgtactaagacttagaaacatacctttgctcttgatttgcactttgttcatccatgggcattgatttacatttaagcacttgagttggcactcaatcaccaaaatacttagaaatggcccaagggcacatttccctttcaatctccccctttttggtgatttatgccaacacaacataaagcaactagaacaagtgcaaaatcacttcaaataaaactcaaattgattttgattcaattttggcatatacggatcatcctttgccaccacttggtttgtttttgcaaatcaaactcaaaatcctatctctaagtcaaacacacatgttgaagcataaagagaggttttccaaagaaaattgattcaagatttcaaaaactcccccttttccccttaatcaacacttctccccacaagaggccaacttttgacaaaagagacaatgcaagagttttgacaaaccaaaagctctatcctactgttttcaaagtttctcaagtggtagttgatccatttattgctttggcctttattttctccccctttggcatcaagcaccaaaacgggatcaatcttggccctataaccccattgcctcaccaaagtcttcaattaagatcaaatggcaataagagttcatgagatgaacttggaataagttaccctctcatcggagtgcagtggaagtctttcatggtccaagtccaccttttccctttcaatcctccttcgagactaaatcatcaaactcaagcacatggttagtctcaaagggtcaagttgtaacacatctccccctaaacatgtgcatcactttgcaacggacttgtgaggtccagggagtgtttgtacaacttgagcaccataataagcaacaaaatgcaaaaaggaacatgatcaaaagcataagtacatgtatgctacaattcaatccaagttccgcgaatctatgacatttagctcactacgcaacctgcaaaaggtcttctcatctagaggcttagtgaagatatcggctagctggttctcggtgctaacatgaaacacttcgatatctcccttttgctggtggtctctcaaaaagtgatgccggatgtcaatgtgctttgtgcggctgtgttcaacaggattttccgccatgcggatagcactctcattgtcacataggagtgggactttgctcagattgtagccaaagtccctgagggtttgcctcatccaaagtagttgcgcgcaacactgtcctgcggcaacgtactcggcctcagcggtggatagggcaacggaggtttgtttcttagagttccacgacaccagggaccttcctaagaattggcacgtccctgatgtactcttcctatcgaccttacatccagcatagtcggaatctcctttgttgaggtcggtgtgtccgtcggtccccatcggagtctttgcgggcttggtgtccttcatcccaaaccgctttagctgatcttgcgtgtacttcgtttgggagatgaaggtgccatctttgagttgcttcacttggaacccaaggaagtagttcaactcgcccatcatcgacatctcgaatttctgcgtcatcaccctgctaaactcttcacaagacttttggttagtagaaccaaatattatgtcatcgacataaatttggcacacaaacaaatcaccatcgcatgtcttagtaaaaagagttggatcggctttcccaaccttgaaagcattaacaattagaaagtctctaaggcattcataccatgctcttggggcttgcttaagtccatagagcgccttagagagcttacacacgtggtcggggtaccgttcatcctcgaagccagggggttgctccacgtacacctcctccttgattggcccgttgaggaaagcgctcttcacatccatttggaacaacctgaaagaatggtgagtggcatatgctagcaagatacgaattgattctagcctagccacaggagcaaacgtctcctcaaagtccaaacctgcgacttgggcataaccttttgccacaagtcgagccttgttcctcgtcaccaccccgtgctcgtcctgtttgttgcggaatacccacttggttcccacaacgttttgcttgggatgaggcaccagtgtccaaacttcattgcgcttgaagttgttgagttcctcctgcatggctaacacccagtccggatctagcaaggcttcttctaccctgaaaggttcaatagaagagacaaaggagtaatgctcacaaaaattaactaatcgagatcgagtagttactcccttgctaatatcacccagaatttggtcgacgggatgatccctttgaatcatcgctcgaacttgggttggaggtgccggttgtgcttcttcctccatcacatgatcatcttgtgctcccccttgatcacactcctcttgatgaacctgttcatcgttttgagttgggggatgcaccattgttgaggaagaaggttgatctcgttcatcttgttcctgtggccgcacttctccaatcgccatggttcgtatagcggctgtcggaacatcttcttcatctacatcatcacaatcaacaacttgctctcttggagagccattagtctcatcaaatacaacgtcgctagagacttcaaccaaacccgatgatttgttgaagactctatacgcctttgtatttgagtcataacctaacaaaaacccttctacagctttgggagcaaacttagaatttctacccttctttactagaatgtagcacttgctcccaaatacacgaaagtaagatacattgggtttgttaccggttagtagctcatacgaagtcttcctgaggagtcgatgaaggtagaccctgttgatggcgtggcaagccgtgttcacggcttccgaccagaaacactcgggggtcttgaattctccaagcatcgtcctcgccatatcgattagcgtcctgttcttcctctctaccacaccattttgctgtggtgtgtagggagcggagaactcgtgcttgattccttcctcctcaaggaactcctccacttgaaggttcttgaactcggacccattgtcgctccttatcttcttcaccttgagctcaaactcattttgagctctcctgaggaagcgcttgagggtcccttgggtttcagacttatcctgcaaaaagaacacccaagtgaagcgggaaaagtcatcaacgataactagaccatacttacttcctcctatgctcagataggcgacgggtccgaagaggtccatatgtagcagctccaggggtcttgatgttgtcatcacatttttggtgtgatgagagcctcccacctgtttccctgcttgacaagctgcacaaggtctatctttttcgaaatgaacattggttagacctatcacgtgttctccctttagaagcttgtggaggttcttcatccccacatgtgctaagcggcgatgccacaaccagcccatgcaagtcttagccattaagcatgcatctagaccggcctcttcttttgcaaaatcaactaagtaaagtttgccgtctagtacacccttaaaagctagtgaaccatcacatcttctaaagacagacacatctagcccctttaccttgccttgattcccatcaccgaatattattgaatcttgggaatctttgtttttgacgtaggaggtgaacatcttcttctctcccgtcatatggtttgtgcatccgctgtcaataatccagcttgaacccctggatgcataaactttcctaggaacattaacaacatttctcctaggcatattatgaacaacatttctcctaccatgcacataagaggaactagaagcaaacatggcatgagaatcaaaggcattatatgcattacaactcctataagcatttctagattgtctcctatcatggtacataaaggcatggttcttttgcacactactagccataggggccttccctttctccttggcggagatgggagccttatggcttgtcaagttcttggcttccctcttgtagccaagtccatccttaattgaggggtgtctaccaatcgtgtaggcatcccttgcaaattttagcttgtcaaattcattcttgctagtcttaagttggacattaagactagctaattcctcatttaatttggaaattgaaactaaatgatcactacaagcatcaatgtcaaaatctttacacctattacaagtttcaacaatttctacacaagaattagatttactagctacttctagtttagcatttaaatcatcattaaaactttttaacgtagcaatagtttcatgacaagaagataattcactagagagcatttcattccttttaatttctagagcaagagacttttgtgcttctacaaatttatcatgttcttcatacaacaaatcctcttgcttttctaaaagcatattcttatcattcaaggcatcaatcaactcattaatcttatcaattttagatctatctaatcctttgaataagcatgagtaatctatctcatcatcatcactagactcatcctcacttgaagaagcataagtactagtatcatgagtgcttactttcttctcccttgccatgaggcaagtgtgacgctcgttggggaagagggatgacttgttgaaggcggtggcggcgagtccctcattgtcggagtcggaggaggagcaatccgaatcccactccttgccgagatgtgcctcgcccttggccttcttgtagtgcttcttcttctccctcttgtccccttgttcctggtcactttcattgtcgggacagttagcaatgaaatgaccaagcttaccgcatttgaagcacgagcgcttccccttggccttggtcttgcttggctgtcccttgcgacctttaagcgccgtcttgaagcgcttgatgatgagggccatctcttcatcatttagcccggccgcctcgacttgcgccaccttgcttggtagcgcctccttgctccttgttgccttgagagcaaggggttgcggctcgtggatcggaccgttcaacgcgtcgtccacgtacctcgcctccttgatcatcattcgcccgctcacgaacttcccaaggacttcttcgggcgacat

SEQ ID NO: 107347 - DNA, 736 bp, Zea mays
  Clone ID: MRT4577_293C.1
tgggacctcgaggcggcgggttttttttctgtagagtgaagtttttgttaatctatctatgagtacatcaaattgataacccccttacaccattacaacactcataacctaacaacgaacaaaaaaacaaaaaaatgcccagcaccgcagaggcgcagagacaggcgccttcgtactcgcctatctccgcgactcaaagcttcttccatttcctaccgccgccgctgcaggtccaccccattccggcgacaccatgagggagtgcatctcgatccacatcggccaagccggtatccaggtcggaaacgcgtgctgggagttctactgcctcgagcatggcattcaggccgatggtcagatgcccggcgacaagaccattgggggtggtgatgatgctttcaacaccttcttcagagagactggcgctgggaagcacgaccctcgcgctgtttttgttgaccttgaaccaactgtcatcaatgaggtgaggactgggacctaccgccagatcttccaccctgagcagcttatcagtggcaaggaggatgcagccaacaacttcgcccgtggtcactacaccattggcaaggagattgttgacctgcgccttgatcccatcaggaagcttgccgacaactgcactggtctccagggcttcctcgtctccacgctgttggcggaggaacagcctctggccttggttccctcctcctgaagcgtttgtctgttgactacg

SEQ ID NO: 107348 - DNA, 277 bp, Zea mays
  Clone ID: MRT4577_29400C.1
cccacgcgtccgcccacgcgtccgcacacgcgtccgcgggggcgggtttcgcaacaccatcggcatgaacgtggttctagaggcctgcgtgcgctgcggcgacgtcgaccgcgcgctccggctcttcgaggaaatccgtgggcccagggggtgtggtgtcgacggtgacctacggcatcctgctcaaggtatgcgattgtggtatctgttcatgcacgcaaccttgacacatgcaattgccaaaactcatttggtcaattgtttgttctaactgttt

SEQ ID NO: 107349 - DNA, 567 bp, Zea mays
  Clone ID: MRT4577_29401C.1
ctcgagtttttttttttttttttttttttttttttttttttttttttttttttttttttttgttttttttgggcccccaaaaccctccccttgttttaacggaagggtttttattcaagcataaagctcccttttttacacccactggggacaacagctaggggtcctttccgataccctgtcaaaaacaaaaggcaaactgaggagtcacccttttgtttctgaaccacaagttttttgggtttttaaacccataggataaaacccctttccaggtttttttcctgggttggggacaacttagtccgtcattccagggttttgggttgggcgatgcaacaggggaagcgacccttacggacaggggccaaaacctccacctccacctggtccaacttcctcacatttttagggaatgggggacggcctttagggtttgggccccaccccatggtcataatctccccaagggcagggaagcacccggggggtatggctggccccacccccttgttaaccccagaaaatgccttttgccctgggctcatgtttgcaaaggggactttc

SEQ ID NO: 107350 - DNA, 305 bp, Zea mays
  unsure (1)..(305): unsure at all n locations
  Clone ID: MRT4577_29402C.1
gnnnaagatgcnncncaagnaccggccngaagacaaggcngccaagaaggagaggcnncngaagagggcccaagcngagaaagaaggaaaaacngnngagncgaagaaaccaanngnngngaagnanggccnnaaccangngacnnaccncanngagcagaacaaggcncagcggggggggggggcncacgacgngganccgancgaacnngnngngnggcnnccagcccngngcaggaaganggaggnncccnacngcanngnnaaaggaaaggcncgccnnggancganggggcacaagaaga

SEQ ID NO: 107351 - DNA, 238 bp, Zea mays
  Clone ID: MRT4577_29403C.1
accacgcgtgcggttaattgtggaggggagtgtcatgtatctatacagcgtactctagaacgggttgcatgtaagcgccatgtgagaccgtgagttctctatcacgcctgatcatggagtaacagcgtttctaaaatgcatgttgacattggccagctgacttggtgtgatctagcacaactatgaagagagtcatgaatggcttgcatgatggcctcaaagatgtccatttaatcct

SEQ ID NO: 107352 - DNA, 570 bp, Zea mays
  Clone ID: MRT4577_29404C.1
atagcggtcgaccgttcgttttttttttagccttctggcccatcaatttacaattgaccatattcataggcaggaatacatgaggcggactacacaagtgtgcaccgcgcactgcagtgcccaacatactttattgtccagacaacatggaaaacaaaggctcgttgggcacggcaacaattgcacaagacgagttaccgcgctttacaattctttctgatacccaacctacagggaaccccccctatatattggcgagcttggatgacttcaccaccggattagccttgtcgatggcgatcatggcgccagcacggtcgtcaaacttgcaggcacgcttgtgggaataacgctcgactgcgcagtacaagttcccacaccggcggttgaatcccgaaagtgcaaccctcttcctgcatgccctgcagcgattcggccctaccttcccctctttggagattgccttcgccccctcgctgggtccggcaacatgagcgggctgctgcacgttcattgtttgcaactcaacttgggcaacagctactaccgtgttgctgacagcaacaaccg

SEQ ID NO: 107353 - DNA, 244 bp, Zea mays
  Clone ID: MRT4577_29405C.1
ggccttgttcttcaaccacttatactacacaggcattcttgaggggaagtgggggagcataccaacatcccttccatgctctgaaatatgaagcatctttattatgtgttcaaccacaatttattaatataccatcttcacaacataacacactagctacacactccatattaggacctacatctcttaatggcggctcaattaagcctcttactggcatcacggaacaatatccaagcaattt

SEQ ID NO: 107354 - DNA, 749 bp, Zea mays
  Clone ID: MRT4577_29406C.1
cattgggtacctcgaggccggccggggcatccctagctcccagcaccacttgcttctgcctcctgctgcttcttcccgagttcccgtgccgccgcgagcgctcccaaccaagcaacgagacaacaacaacaaccctgcaccgccgcagcacttgcgccgtccggtcctgtcctcccgcggtctcgacgccgccccctaccgtcctaccttatcgcgcaccgctccatggccgccaagtgggcccagaagaccgtcgttatcccggcgcatcggcggggctgccacctcatcacccccaagcacacaagcgcatcgctgaccatcaacgagaactatgactctgatgtgcaggctgacactgagacttttcttaacagaattgttccagagggccacaatgctccttggaaacacactatggaaggacctgatgacatgccagcacatattaaatcttctatgtttggttgttccctaacgattcctataactgatggacgtctcaatacgggcacttggcagggcatatggctgtgcgaacatcgagaccatgccagccctcgcaaaattgtgattactctcaacggtgtgtaacttgaagatcttatatgctgccaggaaatagggccaatgcattttggacctgaatgtgtttcagttaccatgtactatgttgagttgtaatgtatgctataaattccaataaattcatcgttactatttcataagtgactaaaaaaaaagcggcc

SEQ ID NO: 107355 - DNA, 2013 bp, Zea mays
  Clone ID: MRT4577_29407C.1
atggcgccaaaacagaagaggcagagcaccgctgctgcgctcatcccgcccatcgaccccaacagccagcttcccttcgctggtaatcacatgtctgttgtttctgaatctgaccttcttcatctcgttgaagttggggttttgcttccaaaagagctctgctcttggcggatttgctgcggtatcactgttccgacagaggatactcatgaatctatcgtgatggccgagggacagcaccaacttgttggcggcacgagtttggagcttcaccgggggaggaaaacagagtacctcgacattcctctcaaggacagcatcaaagggtggcgccttgagtggttcattgtggagaaccactacaagtccctccccctcgacatcgaagccttgatcactccacttcagagccttcccaaagatgagaggcagactcacttcgagatgccagccagcactgatgacgatgagatagatgctatgctaagcctgctggctaggaaatcatccgactctacccgcaccaagccaatggccatcacgaccgggcaggaatttggtgaagaagtggaaactcataaacctgaaggtgcccacccaaagcgttcacgccgagtgaaacacccaactgcacctgtcgaggagattaagaagaagagacggcttcagcgactgtcgtgcttgggtcaggatgtcggtccttctgtgccagttcctgatgatgtcccaatagagaccattcctgaggttgatgccgagggttgtgatcgtgcacagtctgttggatgcttgcttgacgatgatgaagaggaagaagaagaggaagtcccgctgatccgcaagaacagccgacactatagaggaagtgaggggagtagcgacatccctactctagctctatcggtgcttgaggttattcctaaagatatgctatcagagcctcctaaggatgatatcctagtcgtctattcagaggtcctagacgatgggctttcgttgtttaactctactgggcaagaaataacccgagtggtgtctcatgcatcgtcgactttggagggcagtcttccatatagagatgctgatctgagtcgcctgacccccatggaggtggaagaggggccttcagccttagaggtggctactgcaaaagacctagcccccgagggtggtgctggcagctacccagcccctgagggtgttgctggtagagatctagctctggtgggtagtgcaaactgcaacccagttcccgagggtgttcaagtgtgctccctttccaatgcctccatggatgtccacattgggtcgtcctcacctcagtccgatggagcgacggcagcccgcgcttctgcagctttaactggacaagtcgtcttagaggttggcgagctagacatgagaagcctgctgtctgctagcagggttgaggtcactccagataatgctcttcaaattgttcctgctgatcttccttcgccaagctatgccacagctcctcctgccctgggtctaccgctattcctttccaatcttcagcttgactctgagaaaatggcgcatgaggaggagaaacgagcactcgcagcctcccgtgacaatctggacaggctgtatcgtgacgctagtaactccttgaccatattggagaggagtcactgcttcactatgtctgacctggatcatcaccgccgtgagctacaactgctagcgactaaggattccaccatcaaggatctgcgtgcttccaagaagcttatcacgcaggagctagaggccgctcgactagctgttaaagctttagaggacaattgcaccattttgaaggctcagcgcgacaaggctatggacaaagtcgttcgcgctggactgatcctgatgaggaggcccagcgtcgtggtgcctgacgatattgtcgccgatgtcaaggctgcgcccgatgcttcaagtcgtccttcttcttccatcgctcctgtgaaagacattgctagcaaagatgtttcgatgcagtga

SEQ ID NO: 107356 - DNA, 996 bp, Zea mays
  Clone ID: MRT4577_29408C.1
cctcgacgccggccggggccatccctagctccacagcaccacttgctcctgcctcctgctgcttcttcccgagttcccgtgccgccgcgagcgctcccaaccaagcaacgagacaacaacaacaaccctgcaccgccgcagcacttgcgccgtccggtcctgtcctcccgcggtctcgacgccgtcccctaccgtcctaccttatcgcgcaccgctccatggccgccaagtgggcccagaagaccgtcgttatcccggcgcatcggcggggctgccacctcatcacccccaagattctgagggagatcgagggcgacctggccgggttcaagtgcggtctcgcgcatttcttccttcagcacacaagcgcatcgctgaccatcaacgagaactatgactctgatgtgcaggctgacactgagacttttcttaacagaattgttccagagggccacaatgctccttggaaacacactatggaaggacctgatgacatgccagcacatattaaatcttctatgtttggttgttccctaacgattcctataactgatggacgtctcaatacgggcacttggcagggcatatggctgtgcgaacatcgagaccatgccagccctcgcaaaattgtgattactctcaacggtgtgtaacttgaagatcttatatgctgccaggaaatagggccaatgcattttggacctgaatgtgtttcagttaccatgtactatgttgagttgtaatgtatgctataaattccaataaattcatcgttactatttcgtatgtgattattggcttagccccttaggtgaccgttgaacttatcttttgaacactacgctttgcagtatttcatagaaattggtgaatgtacaaacaggaaaattgtcatatgctttctataataagagggcagttataaaataagtcttaacaaaaaaaaaaaaaaaaaagccacctaaggcctccaaccttcaaacaggactcaatggg

SEQ ID NO: 107357 - DNA, 121 bp, Zea mays
  unsure (1)..(121): unsure at all n locations
  Clone ID: MRT4577_29409C.1
acgagcttagttgtcggagccgagaaaggcccggatatatcacttctaacatgcccgtcttgctctggtgcgaggacnaggtcatggtgcacagagctaggtacaacgacggcgatgacat

SEQ ID NO: 107358 - DNA, 298 bp, Zea mays
  Clone ID: MRT4577_2940C.1
aactacctgcctaggtgaagcgcaggaccacatccattacatcaacagggggcgggaggtgcagttgtacctggacaagtccaccggtacgggcttacatacgcagggctcctacctgttcggccacttcagcatgcacatgaatctcgctggcggcgactaccctggcaccgtcacggtcttttacctggtgacacagaactcggggcacgacgagattcacttcgagttcctggccaatcggacggggcatccctacatcctgcagaccaacgggttaaccgggggcaatggcgaa

SEQ ID NO: 107359 - DNA, 2161 bp, Zea mays
  Clone ID: MRT4577_29411C.1
tcgcgatctagaactaggccatctcctcaaccgtcgcgggatccccgcccttcccccgaaaccccgcccctcgcccctccctgagctctgtcgcgtcatccctgccctgtccccttcctcccactccgacgcacacgaggaagctgttaaccagcgcggccgctggcaccgagtccctcgtggcgcttgaggcccgctgtctctccccccgctgtcgaggctcgcgccggctagaggtccacgctcgcaccccccagagattgctccctccccgaggagctgaaggcagtggcatcgcgggggttgcggtcggaactcgaaacccagtgggggtctgcggagatggcagccagatccgactcgaccctgttcgccttattcccactccgagcacacgaggaagctgttaaccagcgccgccacttccaccgagtccctcgtggcgcttgaggcccgctgtctctccccccgctgtcgaggctcgcgccggctagagtccacgctcccccccccccccaattgttcacctcccggcggtcctaaatgtggtcggttaccggggcgggggggcgacctcgcgtccgcccacgcgttacgcgccccctttcgactcgtggggcccgcagattaaggggctgaccgggtcgctggagcccgccgacgacgatgccctgcggccggacgaggaggccgccggcggcgacggcgacggcatcgaggtctgctgcttcgacaaccgcggcgccggccacagctccgtgccccccaacaaatcctactactcgacggcaatcatggcgacggatgccttggccttgatggatcatttggggtggaagaaagctcacgtctttggccactccatgggtgccatgattgcttgcaagcttgcggcgacgcctcacaggctatgttcgctggcattgctcattgggggtggccctcggctcctgccgacggcaactccgcggctgctttctcttgcattccgtttcttaagggcgaaaacaccagaggatagagcccttgtggacttggaatcgcattatacgacggaataccttgacgagactgtgggtcgtgtaccagaagaatggtcctctatcaagaatatgtgaagggcatatcgtcgacagggatgcaatctaattgtggttttgaagggcaaatcaatgcatgttggactcagaacatgactactaaggagctagatacaatacgatctgccggattcttagttgcaagtaagcattgaggagactgtcgggtcatgtactagaagaatggtcctctatcaagaatatgtgaagggcatatcgtcaacagggatgcaatccaattgtggttttgaagggcaagttaatgcatgctggactcacaaaatgactactaaggaactagatacaatacggtttgccggttttctagtttcagttattcatggaaggtacgatatcattgcacaattgtgccatgcaaaacgtctagcagaaaggcttcttcctgttgcaagaatggtagtacctcatggtgcacatctagtaagccatgaaagaccagacgaggtgaacaatgcacttatggatttgataaaggccaccaaatctgcgataaaacctgaagagtggtcagcccagcccgagaacacgtcggaaaccggggcgctcatttctgcgagacccatcaccgtcacggtgcgaacagatgcaggcgtagacgccaccgcagcggtctataacttgcttgggaagctgcaactgagcttcctttatctcataggcatgatagtcatggggtttgaactcatgaggaacattgtaagggtgatgaagccagtaagggttgcagcaattgagtcgtaagtcataagaaccaaatacatgtacgttgttcttgagaccttgtggtagtcgagatgatactttcacttctccccaatgcctggagatgatgattttagagtagcatctgttaacacatgtgaaactcggcctgctcctagtagcagaataatacgaaacactgagaaaacagtgcgcgcctggacagaaatgtctatggcaaggttgcccgttggcgtatgtacctgtaagagtatctgtaccataccgagatttggaatcgatgctttgctgcttaaaaaaaaaaaaaaaaagcggcc

SEQ ID NO: 107360 - DNA, 521 bp, Zea mays
  Clone ID: MRT4577_29412C.1
aagctcggaattcggctcgaggtgtcttctttcaggaatttgtgaagggcatatcgtcgacagggatgcaatctaattgtggttttgaagggcaaatcaatgcatgttggactcacaacatgactactaaggagctagatacaatacgatctgccggctttctagtttcagttattcatggaaggttagttttgttaacagtggataatcttgttcagagaatggtgcacatgcatttcatgtggcttacattacaaaattcaggtacgatatcattgcgcaattgtgccatgcaaaacgtctagcagaaagccttcttcctgttgcaagaatggtagaacttcatggtgcacatctagtgagccatgaaagaccagacgaggtaaagtgagaactctcataaaacagcaacatgtgccactgaaacattaagggcattgatgtgattggttgttctgcttatttgcttaaataaactgaaacttctcaaaattgctaagcaatgaaggtaacatcccaag

SEQ ID NO: 107361 - DNA, 303 bp, Zea mays
  Clone ID: MRT4577_29413C.1
ggaaattctttttttgagcccaattaaggcccatgtggaattacgttaggacatttttcccctaccacaacgggggacgtgggtccctaattttaaaaatatccggggcctgcgcattcttttaaaggactgaaaggggggtcactttccttagagtgtgtttcacaggcaaaaaaaggggcccggtccattccaaaagggccgggttcatgttgttttttctcattccaaagggtcggatttttggccttgttttaggtgtttaaagaatttggggggctttttttgggggcttcccaaatt

SEQ ID NO: 107362 - DNA, 973 bp, Zea mays
  Clone ID: MRT4577_29414C.1
ttgggaccctcgaggccggccgggccccgttcctttccctctttttcaagcggtcaaagccaaatcagtcgcgagcggcggcggtaacgagacgcgcgcgctagctgaatcaggagcagggcccagggaggagagtggagagccgccggcgagcagcaatgccttactgcgaggtgggcaggtacgcggacggcgacaagtgggagggcgtccgcctcttctaccgccgctacggcagcggcgccaccaaggtgctgctcgtcatcggtacgcacgccgccgatctctccctgacctccaacgcgaagagagagagagagagagaggaagaggaatcatgttccttcttctcgtgttgtagcaagtaaaagattactctcttgtttcctcttttcgcttttcgctgagacgggaaacggtttggtgtttggtttgggtcggaaataatcaaaggattggcggggacgcacgactcgtggggcccgcagataaaggggctgaccgggtcgctggagccctccgacgacgaggccctgcggccggacgaggaggccggcgtcggcgcggcggaggccgcgccggcggaagcggacgacggcatcgaggtctgctgcttcgacaaccgcggtgtcggccgcagctccgtgctccccaacaaatcctactactcgacggcaatcatggcgacggatgccttggccttgatcgatcatttggggtggaagaaggctcacgtcttcggccactccatgggtgccatgattgcttgcaagctagatgtgatggcacctcacaggctatgttcgctggcattgcttaatgtcaccagaggtggctttcagtgcttcccaaaggtactgtgattttggtatctgcacaagtgtttgcagaactaaatacgctcaatgttgtgaaatgctacaagaggcgctaattataatttttaatggtttgaggcaagaattaagttttc

SEQ ID NO: 107363 - DNA, 613 bp, Zea mays
  Clone ID: MRT4577_29415C.1
cattgggtacctcgaggccggccgggaacaccgacctactaccaacaacatggcgcacaaatgagatgaacctagcgcaactgagatggcacaagcaatggcgtcaatgacaggcttctcgcaaggcgtgctgaacattattgtgccgacatcagaatgatgacatccgccatggatccgcaagctatcctcgggaggtcaatcgccactggaaggggcgccgccgcgcccggagcgggcttgagaaccctgactgccgcggctagttgctgtactctgcggatcacgacgatctcaggcggattgaagatcggctcccccgacgtcatcatcaggaggacggagaaggagaacttcctgtggacggacatgacgatggacgtgttgcattgggaggcgtacgttgcgaccgatacagtccaagagcggaacctcgtgtaccgtgactaatatctaagttcgatttctgcgtacgacaaccggtctctatcatggatgcgtgaccgataggctagacctgccacagtgtctgtcgctaatagggacataactgacgctacatcgatctcagaggccagccaaaatatccgaggcaactgcctgaatgtcattg

SEQ ID NO: 107364 - DNA, 168 bp, Zea mays
  Clone ID: MRT4577_29416C.1
ctcaacgaaggactcccggatcagcaattcgtcttgtcaagagacacccgctgaattcaccattccggaattattgatcaagcggtaaccgccaacgccgatcaagatgcctaccgaagctggtcacagattatacgtcaagggtcgccactcagataccagcgtaca

SEQ ID NO: 107365 - DNA, 1228 bp, Zea mays
  Clone ID: MRT4577_29417C.1
cattgggtacctcgaggccggccgggttttccgaatcccgcggatataactacaaccagccgcccccttcctccgcagctccgctccccttcccccctcgtttttcctctgcgcattttttctcgtttccagccttccaggcagccacgcctcgcccgttctcggatcccctccaaaacggtcaaagccaaaccagccaaatcgcgcgcggcggcggcgacgagaacgagacggacgcgcgcgcgcgctagctgaatcaggtcaggaaggaggagagccgccggcgagcacagcagcaatgccttactgcgaggtgggcaggtacgcggacggcgacaagtgggagggcgtccgcgtctactaccgccgctacggccgcggtgccaccaaggtgctcctcatcatcgggttggcggggacgcacgactcatggggcccgcagattaaggggctgacggggtcgctggagccggtcgacgacgaggccctgcggccggacgaggaggccgccggcggcgacggcgacggcatcgaggtctgctgcttcgacaaccgcggcgccggccgcagctccgtgcccccgaacaaatcctactactcgacggcaatcatggcgacggatgccttggccttgatggatcatttggggtggaagaaagctcacgtctttggccactccatgggtgccatgattgcttgcaagcttgcggcgattgcgcctcacaggctatgttcgctggcattgcttaatgtcactggaggtggctttcagtgcttcccaaaggtagatgggcagatgctttctcttgcattccgtttcttaagggcaaaaacaccagaggaaagagcccttgtggacttggaaacgcattatacgaaggaataccttgaggagactgttgggtcgtgtaccagaagaacggtcctctatcaagaatatgtgaagggcatatcgtcgacagggatgcaatctaattgtggttttgaagggcaaatcaatgcatgctggactcacaacatgactactaaggagctagatacaatacgatctgccggctttctagtttcagttattcatggaaggtacgatatcattgcgcaattgtgccatgcaaaacgtctagcagaaagccttcttcctgttgcaagaatggtagaacttcatggtgcacatctagtgagccatgaaagaccagacgaggtgaacaatgcacttatgggatctgat

SEQ ID NO: 107366 - DNA, 368 bp, Zea mays
  Clone ID: MRT4577_29418C.1
cccctttcaaccggccgcccggccaggtacaaccttttttttttttttttttttttttttttggaaattggtttttttttttttaatatcatcttgcatagtcacttgtttttccttattttctccctttgttttaccaaaactaacataattatggtgcctagaggtttttttttaaaaacactcacaattctgcacaaatacaccacccaaataacagaattcaaatggctcattgattgccgcaacctcaatttcaaacgggtttgttcaactccaaaaacatccttctaaaaaaaacaacaacaagaacctcctcatcaaaaacaacagcatcgatcccaccaccaccaaaatttttattttca

SEQ ID NO: 107367 - DNA, 298 bp, Zea mays
  unsure (1)..(298): unsure at all n locations
  Clone ID: MRT4577_29419C.1
cgacatgtcttggattaaggtgctgtcccacngcttgtatgcttaccaatgtagacatgaattgggacnaggtgctnttcgagcatttcgccgaggagttcaaggacaggtataggattgatgtcgtgaggaatgtgaattcctttatgaggttgagggcagcctgtgagaaggccaagaaggttctgagcgcgaatgcagagaccgtgatgaacatcgagtgcctgatggaagagaaagatgtgaggggggtgatccgaaaggaggactttgagaagctatgtgccaaactgctgga

SEQ ID NO: 107368 - DNA, 5166 bp, Zea mays
  Clone ID: MRT4577_2941C.1
atggatcctaaaggcaaggggatggtgatcaacgacaaggagaaggagtccttcgtcaacgagcccaatgatgacaagctcaccgactcaggctcgggccacaaaagaaaagacgggaggaagaagaagacaaggcgcatcaaggaaattgtctactacgacagcgacgaatcttcctcctcccaaaaggacgacgacgactacgataaacgaaagacggttaactcaaacttttctttcgattattcgcgcatcccgcatagttcaaatgctcaattgctccccattccacttggcaagccccctcactttgatggagaggattacggattttggagccacaaaatgcgtactcacctgttttctctccatccaagcatttgggagattgtggaaagtggaatgaaatttgatagctcggatagccctgtgtttattaatgaacagattcataaaaatgcacaagctactactgtgttgctagcctctttgtgcagggacgagtatcacaaggtgagcggcttggacaatgccaagcagatctgggacaccctcaagatctctcatgagggaaacgacgtcaccttgctcaccaaaatggagttggtggagggcgagcttggacggttcgcgatgataaggggcgaggagccgacacaaacatacaaccggctcaagacccttatcaacaaaataaggagctacgggagcacgcgatggacggaccacgacgtcgtccgcctaatgctaaggtcatttaccgttcttgatcctcatttggtgaacaatattcgtgaaaatcccaggtacaccaagatgtcgcccgaagaagttcttgggaaattcgttagcgggcgaatgatgatcaaggaggcgaggtacgtggacgacgccttgaatggtccgatcaacgagccgcaaccccttgctctcaaggcaacacgaagcaaggaggcgctacctagcaaggtggcacagtttgaggcggccggacttaatgatgaagagatggctctcatcatcaaaagattcaagacggtgcttaaaggtcgcaagggacagccaagcaagaccaaagccaaggggaagcgctcatgcttcaaatgcggtaagcttggtcattttattgctaactgtcccgacaatgatagtgatcaggatcaagggaacaagagggagaaaaagaagaactataagaaggcaaagggcgaggctcatcttggcaaggagtgggattcggactgctcttcgtccgactccgacaatgaaggactcgccgccaccgccttcaacaagtcatccctcttccccaacgagcgtcacacttgcctcatggcaagggagaagaaagtaagcactcataatactagtacttatgcttcttcaagtgaggatgagtctagtgatgatgatgagatagattactcatgcttattcaagggattagatagaaccaaggtagacaaaattaatgaattaattgatgccttgaatgataggaatatacttttagaaaagcaagaggatttgttgtatgaagagcatgataaatttgtagaagctcagaaatctcttgctctagaaattaagaggaatgaaatgctctctagtgaattatcttcttgtcatgaaactattgctaagttaaaaagttttaatgatgatttaaatgctaaactagaagtagctagtaaatctaattcttgtgtagaaattgttgaaacttgtaataggtgtaaagattttgacattgatgcttgtagtgatcatttagtttcaatttccaaattaaatgatgaattagctagtcttaatgcccaacttaagactagcaagaatgaatttgacaagctaaaatttgcaagggatgcttacacgattggtagacacccctcaattaaggatggacttggctacaagagggaagccaagaacttgacaagccataaggctcccatctccgccaaggaaaaagggaaggcccctatggctagtagtgtgcaaaagaaccatgcctttatgtaccatgatagaagacaacctagaaatgcttataggagttgtaatgcatataatgtctttgattctcatgccatgtttgcttctagttcttcttatgtgcatgatagaaatgttggtaggagaaatgttattcataatatgcctaggaaaaatgttgttaatgttcctaggaaagtaaatgaaccttctacaatttatcatgctttaaatgcttcctttgctatttgtagaaaggataggaagatagttgctagaaaattaggggcaagatgcaagggagacaaaacttgcatttgggtccctaaggatatttgtgctaaccttgtaggacccaacatgagttgggtttatgcatccgggggttcaagctggattattgacagcggatgcacaaaccatatgacgggggagaagaagatgttcacctcctacgtcaaaaacaaagattcccaagattcaataatattcagtgatgggaatcaaggcaaggtaaaagggctaggtaaaattgcaatctccaatgagcactctatctctaatgtgtttttagtagagtctcttggatataatttactatctgttagtcaattgtgcaatatgggatataactgtctatttacaaatgtagatgtgtctgtctttagaagatgtgatggttcactagcttttaagggtgtactagacggcaagctttacttagttaattttgcaaaagaagaggctggtctagatgcatgcttaatggctaagacttgcatgggctggctgtggcatcgccgcttagcacatgtggggatgaagaacctccacaagcttctaaagggagaacacgtgataggtctaaccaatgttcatttcgaaaaagatagaccttgtgcagcttgtcaagcagggaaacaggtgggaagctctcatcacaccaaaaatgtgatgacaacatcaagacccctggagctgctacatatggacctcttcggacccgtcgcctatctgagcataggaggaagtaagtatggtctagttatcgttgatgacttttcccgcttcacttgggtgttctttttgcaggataagtctgaaacccaagggaccctcaagcgcttcctaaggagagctcaaaatgagtttgagctcaaggtgaagaagataaggagcgacaacgggtccgaattcaagaaccttcaagtggaggagtttcttgaggaggaggggatcaagcacgagttctccgctccctacacacctcagcaaaacggtgtggtagagaggaagaacaggacgctcatagatatggcgaggactatgcttggagaattcaagacccccaagtgcttttggtcggaagccgtgaacacggcttgccacgccatcaacagggtctaccttcaccgcctcctcaagaagacgtcgtatgagctactaaccggtaacaaacctaatgtatcatattttcgtgtttttgggagtaaatgctacattctagtgaagaagggtaggaattccaaatttgctcccaaagccgtagaagggtttttattaggttatgattcaaatacaaaggcgtatagggtcttcaacaaatcatcgggtttggttgaagtctctagcgacgttgtatttgatgagactaatggctctccaagagagcaagttgttgatcttgatgatgtagatgaagaagacgttccaacggccgcgatacgcaccatggcgattggagatgtacgacctcaagaacatttggagcaagatcaaccgtcttcctcaactatgcctttcagggtagaagaggccttgctagatccggactgggtgttggccatgcaggaggaactcaacaacttcaagcgcaatgaagtttggacactggtgcctcgtcccaagcaaaatgttgtgggaaccaagtgggtgttccacaacaaacaggacgagcacggggtggtgacgaggaacaaggcccggcttgtggcaaaaggttatgcccaagtcgcaggtttgaactttgaggagacttttgctcctgtggctaggctagagtcaattcgcatcttgctagcatatgccgctcaccattctttcaggttgtaccaaatggatgtgaagagcgctttcctcaacgggccgatcaaggaggaggtgtacgtggagcaaccccctggcttcgaggatgaacggtaccccgaccacgtgtgtaagctctctaaggcgctctatggacttaagcaagccccaagagcatggtatgaatgccttagagactttttaattgctaatgctttcaaggttgggaaagccgatccaactctttttactaagacttgcgacagtgatctttttgtgtgccaaatttatgtcgacgacataatatttggttctactaaccaaaagtcttgtgaagagtttagcagggtgatgacgcagaaattcgagatgtcaatgatgggcgagttgacctacttccttgggttccaagtgaagcaactcaaggacggcaccttcatctcccaaacgaagtacacacaagatctgctaaagaggtttgggatgaaggacgccaagcccgcaaagacgccgatgggaaccaacggacacaccaacctcaacaaaggaggttctttgctttatttatgtgctagtagaccggatattatgcttagcgtatgcatgtgtgctagatttcaatctgatcctaaggagtgtcacttagtggctgtgaagcgaattcttcgatatttagtcgctacgccttgcttcgggatctggtatccaaaggggtctaactttgacttgattgggtactcagattccgactatgctggatgtaaggtcgataggaagagtacatcggggacgtgccaattcttaggaaggtccctggtgtcatggaactctaagaaacaaacctccgttgccctatccaccgctgaggccgagtacgttgccgcaggacagtgttgcgcgcaactactttggatgaggcaaaccctcagggactttggctacaatctgagcaaagtcccactcctatgtgataatgagagtgctatccgaatagcggaaaatcctgttgagcacagccgcacaaagcacattgacatccggcatcactttttgagagaccaccagcaaaagggggatatctaa

SEQ ID NO: 107369 - DNA, 229 bp, Zea mays
  Clone ID: MRT4577_29420C.1
gttattttttttttttttttttttttttttaataaatagtaaaaacacgaagcttattgctatgacaggatggaaaccagtcgatctcccagaaaggtactagccgagaggaaagcctaatgataaaccaagctcctgctaagatagcagtataaatgtgctaaacaagcctatctcaatccgaaatagattattatctcgcctggcctaactggtaaaagcataaata

SEQ ID NO: 107370 - DNA, 409 bp, Zea mays
  Clone ID: MRT4577_29421C.1
tggacgcgtgggaatggcaggagattcctcttctgggaagatcaagagtggaagcaaggtatctaaagttggtggcagaaaagacattgtggaaagcataagtggtgatagagaaggatcgtcatcaaacaacaaggacttcccacagaagaaacggttgatagagaggaactccacaaacgagaagggtacatttgttcctgaaaaaccagtgggtaaacttaagaagcaggttcaacctaatgttgttatggatgagcacattaagtggaacaaggaaagtaaagatactacagatgttgtgtcatttactttcacctcacccttggtcaaaccgtcggcaggactgtccagactggtgggtaagtgggatacaagaagcaaccttgatatggatgcaggatgtgat

SEQ ID NO: 107371 - DNA, 216 bp, Zea mays
  Clone ID: MRT4577_29422C.1
atggggagtagcgctccttgggcagaaagggaatcacggctcatgggtaaagtgtgcaacctctatagagggttagaaactgttatatcagttgtgctcacggttaagagcagcatttggatcctcgttggttgtccacattgcaaccattgctcaggagaagatgaaggcaacacggaggactttcaggaatttcaggacttcgaggagttctag

SEQ ID NO: 107372 - DNA, 1699 bp, Zea mays
  Clone ID: MRT4577_29423C.1
aaatattaatcttacctaggagcacttgttgtgctgcaggtatgctgtgagtgatataaagatcttaatctcatgtccacttgccgagcttcagtttctttatcaaaaaatacggcagcaactctacatggcctaataactgaaagcaaattcagttaaactaccccattattatagtacaagaaaagaaaatttcccttcagttctttttccgtcaaaatatttgttcttttctagggttcacaagattactacagttagttgattacaaaacgatatttgccttgttactaccctaccgtcatctgaaaactaaccatgcaagcaaagagcaatcacttttctgatgtcatcttcagagcgtgccagagaagttcgcaaagaacttcaaggggcagatcaccgaagagtttcacctgaaatcacctagcagcgctgagacatggcacgtcggtgtagagaagcatggcgacaaactattcctcgtgtcagggtgggagaatttcgccaaggctcatgagctggaggagaacgatctcctgctcttcgcttgctctggaaactcttcctttgaggtcctagtcttcggagcaagtggctgtgagaaagtgtcatccctgtttggcagtggacttgggtccggacatgtgcaaacaattcaatgatgtggtgcgtcgacatggtgtgcatcactctgtgactgtgagtgattctgaggataccgttgcgccgtcccagctggttcgatcccctcgtaacgccttgcctttgaaggaacccagtgggaaggctagaccaagtaaatatgaatcaccaaatgccagcaacttcatcgtcaggcatgtggcaactggcaaagagggcaacaatgatgagtatgctaactcaaactactactattcgttgtctgccaatcgactaggagacgaggaaaaggaagaaataataggtttggctcccatccgaccgaacaatcctgtatttgtgacccttctgaggaaaaaccatgttcagcgcagaaacaactgtctgatcatcccaagcaagtttgctgctgatcatcttggggaaagagcgcacaacatcatacttcgtaggccgaacaggaaggagaaatggcatgtcagctactatcactcacgccacacccggtgtttccagaacttagcgctgttcaagttcacgcgcgagaacaagcttcacgagggcgacatctgcgtcttcgaactgatgaaaggcgagaggagagtgacgatgaccgtccatgtcgtcagaaaggccaatggccggttcattctggtagtctgatctgacgcagtgcacctgtactgttgtagtttatgcagtgtgtagtgtgtaggggtactatgcaggggtagcattgcaaactggaagtgcctagtgatgcttgcaaggaatgcaactgcggttttgtgtcatgtaaggtagcttcctgatcagcagcatggcaagtagaacaaggtgtggcttgtgtgtaatatagaagtttctaggaaaatgttaccctggcttatgcttttgtgcctgcttcagatctcccatctggtacagcagtgcttttgaacttcagaagtattatttcaaggaggaaaaagggattgttggttggtctccctgagttggatattaaataaattaaatgtaattaatcccccgatcatgcaattaagtagccctt

SEQ ID NO: 107373 - DNA, 289 bp, Zea mays
  Clone ID: MRT4577_29424C.1
gttcatttcccacagagggcactggagcggcgactttctcgaggagcagtacgtggaccagatgatcgaggagcttctagactccaacttctctgtggagatctactagtttcacccgactcctctgctccgtctcatctctctgtttggtttcgtcagctcagctcagctagcggatgtagtgagttagtggtgagttagtacagtagtatcattagccatgccaggaggaacttgaggtttctttggttagactcttgagctctgatgtgtatacggtagcgtcgtc

SEQ ID NO: 107374 - DNA, 621 bp, Zea mays
  Clone ID: MRT4577_29425C.1
gggtgccaggaataaccaaggttttagtaaaacccagggcagttttactacggttaaattaaactttaggggatttttttatttgctacacgtggttacataccctaactactacggtttttttaacccaggggacaagccaaaaaatgggggggaagctacaataaataacataaatcgtggtttgagggatccacccttttaggcaacgtaaaacccatagttttaaccttaacggtttaaaagttatgctgaagaaccctaaataagggggccaggcccagggggaacctaaggccttttttttttttcccccaacagggaaactgtgaacattcggttttttttaagggcaaaacggccggcccgggggcaaaggcggaggcccagaaccctttgtttttacttttccggcccggaaagaagtggcattatttgatttgaatgcatgaccccaaactcccccctctttgttgggttttttaaacatttaaaaaccttggtcatttttaacgtggaaagcaaatgtttttttcaaggacaggtaaaaaaaacttgacttttgttttctatccattggaagtcccacccttttttttgcaaacttaaggtttttaagct

SEQ ID NO: 107375 - DNA, 716 bp, Zea mays
  Clone ID: MRT4577_29426C.1
ctatgatgatgaggatgaccagatgttgctttctgatgatgacggtgatgattatgatgacgatgagttgcatgatgatctggaggtcagtgctgaggaccatggccctcacagtcacagagttcatgccaccaagaaactgaagcatggccatgaggagggacattgtgggtctcacctttcagaagttgcagctattgacatgaacagtatgttctttgaaggatctggtggtccatctgctgagaagaatttaagttatatgcgtgctcaaatcgagacacaacgtttgaatataaaatctcagaagctgagaactgagcagaggcatttcaaatggctgaagttcagcagggagaaggacagggagttgcagaaaatgaagctggagaatgaaaagatggagctggagaatgagcgattggagctggagctgaagcttaaggaaattgagatgggcatcaaaccaaaaaggatttagtgattgaaggatgtaagctgtagagctagagaactcttagagtttctggtaatccttttgtctattgcagtagcttacaaattaggatatattacacagtttcatctttgctaactgcatgccggttaagttaataagtacagtttgacatatgaatatggtgcttaaagataccattgcatatttaaaaaaaaaaaaaaaaaaaaaaaaaaaaaaaaaaaaactcgagggaggg

SEQ ID NO: 107376 - DNA, 514 bp, Zea mays
  Clone ID: MRT4577_29427C.1
cctcgaggttttttttttttttttttttttttttttttttttttttttttttttttttttttttttttttaaaggggaaattttttttgttttcggcggcaatttaaagccattccatggacgggaggatggttgatccagagaacccatcccccccacttggccggaataacaaatcttttgggcttggagggtggcggaaaaaaggttaaaagcccccggggttccttactttttatttaccccaaggggtttttcctcgttaagttaaccgaacaaaaataagggcgggttcaaaaaaaccttcgttaataaagaagaagaacaccgggggggcagggcagctttaaagaaagttgggttctttttggggggggggcccggattattgggggggccccatcacggggggcccttgaaccggccctggaaaaaacccttgcccagggaaggggaagcctacctgggggaaattaatctttggccttgggcgggctactttttccggcgggga

SEQ ID NO: 107377 - DNA, 413 bp, Zea mays
  unsure (1)..(413): unsure at all n locations
  Clone ID: MRT4577_29428C.1
agtcaggctcgcggccgagcncaccgaggagcaaagcaaagctctcgttggtcgtggcggcagcggcggcggtggcggtgtcgagctgcggtgctgaaggcaagagagccgcgcgccgtgaagagtcgtcgtcgatccggccgagctccgtcgcttcattgatgaatgccgaagctatagcggtccttgctcgttccaaggttcgatgccccggtcgccgcccggatgacactgccaaccccggtggtagccnggcgttgcggctggcgccgccgcgctgctactggccgccgccctcgccgtggcgtggtggtggctcgtgatcgtgaggcggcgccggcgccgtgaccggagctccgacaccggatcctcgtcggaggctcctcctcccacgtgggcggagtggggccggt

SEQ ID NO: 107378 - DNA, 148 bp, Zea mays
  Clone ID: MRT4577_29429C.1
tacccatacaattcactctcacactacaatccaactctctataattcacctaaataaattactccctttttttacaacttctaactaaaaaacccttccttacccaattaacttcttaaaacatcccccttcccaacttcttaatacc

SEQ ID NO: 107379 - DNA, 517 bp, Zea mays
  Clone ID: MRT4577_2942C.1
ccaacgacgaagcgcgagcaacaagcggacgacggagactggacgcacgacgagtgcgcacgaggcgcatgcagcgtgccgctcagcgaccacggaggtcaccacggcgctgacgcggccgaccagccctcgtacaagacctacgggaagacggacaaggacatgtacaagaatgtgtaggtataatggatgccatgagcgaggccagagttgcggttttacttgcgtatttacggacaaaatgaatgataagagcgatcctggatgaacgcctgcaattgcgtaaccgactgggtaatgggggacggaatggcacgcgcacgtacacgtgctggaataaaaatggtataaaagatgctatagtggttaataggagggtaaattttagtgtacgggcactgtcacggtctctgtagcacgctatgtagtgtgtttaattgtgttagtaatcgaccaagtgctcgacctagatcgggtagttggtctgtaagttcgacaaaaaaaaaaaaaggcggcc

SEQ ID NO: 107380 - DNA, 753 bp, Zea mays
  unsure (1)..(753): unsure at all n locations
  Clone ID: MRT4577_29430C.1
gcctgcaggccagtccgttcacgttcctgcttttcccctgtcctgcggttttggcctttttgcccccggcttcctggcggcaacgaaacaaccagtcggttcggtcgatgcttcgcgagttggaattggacgccggccgacccgctgctcaatccgtcgagttcgacatggagtctgacactgcatgcctttgttaatcgacaggctactcccttggttgctgggttgtcagtggctgccgctgcattaagcggaagatacatgattagagcatggcaagccttccggacccaggcggcaatgccgcgggtgcgccgcttctaccctggtggattccagggggaaatgaatcgaagggaagctgcattgatcctcggcgtcagagaacgtgctacagtggacaagatcaaggaggctcacaggagggtcatggtagctaaccaccctgatgctggtggcagccattacgtcgcttccaagatcaacgaggcaaaggacatgctgatgggaaaagggaagtccgggtcttcgatcttttagctgacacaaagctcattctgctgtggcgtgatcaggctgtagctttttcaagggactgacagttgcacgtttcaaatttcttaacaatgctctgctgcttgtaccatatatcataaaggatacagatacagatacagaattgaatcaacttattatctgggtcttaaaaaaaaaaaaaaaaaaaaaaaaaaagggcggcgatnctagaactag

SEQ ID NO: 107381 - DNA, 821 bp, Zea mays
  Clone ID: MRT4577_29431C.1
gccggccggttctggaatagacccgtgaccgccttggtcgggccgctctttcttgccgcgcaagaacgagcgccggttttatctaccgcggccgccgcctgcaggccagtccgttcacgttcctgcttttcccctgtcctgcggttttggcctttttgcccccggcttcctggcggcaacgaaacaaccagtcggttcggtcgatgcttcgcgagttggaattggacgccggccgacccgctgctcaatccgtcgagttcgacatggctactcccttggttgctgggttgtcagtggctgccgctgcattaagcggaagatacatgattagagcatggcaagccttccggacccaggcggcaatgccgcgggtgcgccgcttctaccctggtggattccagggggaaatgaatcgaagggaagctgcattgatcctcggcgtcagagaacgtgctacagtggacaagatcaaggaggctcacaggagggtcatggtagctaaccaccctgatgctggtggcagccattacgtcgcttccaagatcaacgaggcaaaggacatgctgatgggaaaagggaagtccgggtcttcgatcttttagctgacacaaagctcattctgctgtggcgtgatcaggctgtagctttttcaagggactgacagttgcacgtttcaaatttcttaacaatgctctgctgcttgtaccatatatcataaaggatacagatacagatacagaattgaatcaacttattatctgggtcttaagttattgtttggcctgattggaaatagtaaccatgtatatctcagagccccc

SEQ ID NO: 107382 - DNA, 1090 bp, Zea mays
  Clone ID: MRT4577_29432C.1
ggacgaaggatggccaccacggcggtggagccgacgaatgccggaggaggtgccggcgaagcgggcagctgcagcttggccgcgccacgcgcccgcacgcgcacgccagcgccgccatatcgtccacccgccggaagccccgctgcagcgccgcgcgccacgcgcgctcctcctccgcccgctccgaccaggcggcgctgcccgacgccgccgactcctgccgccgccgcaggaaggtggctccctccctggccagctcctccgccaccacctcgtgcatccggtcccggcataacgcggacacatgggagccgccgtggccgtcaaagacgccgaagaagtgcatgggcgagccgtcggcggcccaggtgcacaagtccggatggagcgagacggcgtcctccatcatccgcatccgcccccgccatggacagggagccgaaggccacgggccacacctgcggggcgacggcgacggcctcggcttcaggttcaccttcagcctcgccgggctcgagctgcggccccgccggcgcgagctccacctccacctcatggtcgagctcttcctgctcctcgtcgttgggcctgtccgcagagctctgggacgacgacggcgacagcgatggcgacggcgacggcgagaaccgggaggccgcaggacggagacggcgcacccagctcgggcccggcgccgcagcggcggcggcgtcgccggatccttggggctcgaggcggtggcgcctgcgcatccggcattctggggtggacgcggacgcagcggtcgggttccgtacctcgtcgccgccgggcacgttgacgccggcgctggccatcaccatcaggcggcggaggaagaggaagaggaagagcggcggcacgagtggtccaggagcagcgacgacgcagccgcgggtgaatccatgcgaagctagcctgcctagctagagcatcggatgagatcgaggtggctgacggaggggctgggagatcgagtggaggggccggccggggtggtcgaagacgatgtcttattcttcccgcgtcatcccccttctccggagcgcgtgcggcgatcccggacctgcac

SEQ ID NO: 107383 - DNA, 454 bp, Zea mays
  Clone ID: MRT4577_29433C.1
cgcgcggagagcgagagccaggaagaaacagcggtcggcgcttaaatggggcagaggctcacctaccggtagcgccacagctacgccacataatccaatcatacccgagtggtcagagacccctggagggaggcttgcgtaccagtacaccaagacgagcgcgagcggaccggtttgcccggccacccctaagaagatccaaggacttccacacctgagacctgctgagacaagaggtctaaggagtcaaggaaccctaggactgagaacagtccattgggtggtgttatgtctggtaccgcaggtagagagaggatcatccgtgcctttctggtagctgagcatgatagatctcgaacaatgtttataagatccatatgaccaaggatcaacgcctccaagaactgctgcgatataggcatccttacacagtgttcaacatcccttagatgat

SEQ ID NO: 107384 - DNA, 422 bp, Zea mays
  Clone ID: MRT4577_29434C.1
ctccatggccatggcgctccctgcctcgcccatagccctgcagcaagctcggctctggtgctgcgcgcgcgagggagatccctccatggccgcgtccaaggtagacggccagccaaactccctcctgcgcgatctcggccagagcgccgctcgctggcctctctgttcgtgagaaggctgtgaacgtgaggtagaagaagaccccatgagcctatgacaggaccgagagatgacgctcatgcaagtggcgtggtgccaaccacaagatgcagttggtggacgacctgaagaatggtggaattaaccagtggatgctcgccaagcgagtatctcccccagcaaacactacctaagtgttaaattaaaggaccgagagatgacactcatgcaagtggcgtggtgccaaccacaagatgcagttg

SEQ ID NO: 107385 - DNA, 445 bp, Zea mays
  Clone ID: MRT4577_29435C.1
cgtcactgagctccactcggttcggcttctacacatgtatatgtcgctagtgtggcaaaacaaagaggcaggaaccatggctgctgcggtggcgatgatggtctgcggaggacgggcggagctggcgagcgcgggcgtgctctgcgcggcggcagccatggcggcagctcaacatgcgtccaacgtgctgtcgacgaaccagccgtacaacacctagcaagaaccggtgagacccgaaccgcgtgagcgcatcctgagccacgacctactccaacgagccgctatcgagacgacaacagcacacatggactgccagtggcgcgcccgctggtcaaaatgaccaagccgcccggatacagctgataaagatgaataagcgtgcgactgtcccgttcatggagggcaggatcgaggccccatgtataaacgggggactggtcctgga

SEQ ID NO: 107386 - DNA, 278 bp, Zea mays
  Clone ID: MRT4577_29436C.1
gccggccgggtcccgactcaccaaagctaagttccctgctatatgcaagctggacgcccgtccctctcacgtggtgccgaagcgttgattgcacacaagcagatgaacggcaacgtccatggcccgcatatcggtatggatctactgacgacgtactcgtggagggactggtggtatcacaacggattgaagatgaatgccagacgcacaagatttagccgaaccacgccatggtgacctgcgcttaacgggatccagagcgaatcatgcggagatgt

SEQ ID NO: 107387 - DNA, 332 bp, Zea mays
  Clone ID: MRT4577_29437C.1
aacagaactagctagccagccagccagcaggccagcttgctcgccgcgcccgtccttcgtccgcgcctccgttccgttccgttctgtctcgcgcgccgccgccgccgcattcagggatggagatggacaacatcaccggcaccgtcatcgtcgcagcctcggtagacaacatggagctcgcagcggaggctcccgcaccaggacctaggacgcgctcatccacgatcacgcctggcgtagtgtccgccatccgagcagcgatcatcgccatcgtctgataatagaatgagtgagtcgggtgtcgtcgattaccccgtcgactcggaagaaac

SEQ ID NO: 107388 - DNA, 611 bp, Zea mays
  Clone ID: MRT4577_29438C.1
attttttttttttttttttgcatgtaattgttgtgcagtaacattatcgaataatttacacactgtcgtaacgcacgggcactcacctaatattcattagaaaagcattattcttgacaatgaaatcttgggtagttttcgcgggctcttacgcatgagggcctggaccgcttttcccgttcgcttctcggcttcgaacgcgatgatcctatgtacttgttcgaaggccggcaaagcaattgatgacgatgacgatgaaccggccgaccaacagaggagagaatccaggggacctcctcgacgtacggtacggctcggccacggcagggctattgatggctctctgacagtgatctgcaaactgcgtgtgtgagggaaatggttgtaaatactccagcgatgatctgcaataaaaaaatcacatataggatttgggctgcgtagtgcgtgcgtgcagagtagctagaaatcatcacatacacaggatttgggatgcagttgcaggctacgtgcagagtagctagaaatcacatacaggcataaaaacgggtgttttcgcccggcggccggaccctatgtcttggttggttcctggcgcaggataacgatcc

SEQ ID NO: 107389 - DNA, 732 bp, Zea mays
  Clone ID: MRT4577_29439C.1
cggacgcgtgggggccctcgaggccggccgggccgggacaacacgtccgcatactcccaaatctccctccaacgcccgcatctagcccgagaagccgacgaggaggaaaccgaccgccgacgccgagcaccctcggttccttgcttgcccagcgcccaatctagacagctctttctcgttcgtctgtatccatggccgcctcgagcaagaccgtcgctgtcctcctcgccgcgctgctcctcgcgctggtcgcgtccgcggtggccagcaggaagctggaggaggacgctttcctgggaagcctttcgccggcgcctgcccccgccgagggcggagccgcggggctcgctagcggcaagccgggggcgtgggccgtcgccgctctggtctctctcatcgccttcctcgcgaactgaggggggtcctgcgatctggattgctgcgggcggaggggaacatttatgctcgccctgtttgttctaggctatcggttccagtgctgctgtcctcacttttggctgtataagagaggattacgcaccgtttcattttatactactacttatctgttactagtgtattgcgcgcgcctatgcgcgcgtgctgaatagcaacttgaaatgttttatgaggaaaaaaaaaaaaaaaaagcagtgcgaacccggcaaaaaaaacccccgccccaaaaactaggccttgagatattcttttaccatatgtgttctttgccat

SEQ ID NO: 107390 - DNA, 663 bp, Zea mays
  Clone ID: MRT4577_2943C.1
gggcgattgggatcctcgaggccggccgggattctcgctcttccccctccttgtgataactattcttcttcttggatcatcatcaggagactaataccatcatagttcgtattttatacggaaatcaatcgcaatgactgcgacaggaacgagcgtttcgctcctcaagtttgtgggcactgtctcacttggcttgctgacgggtgtctcatactccatctcatctctcgccctccctgcccttctccgacttccttcctcagcttccgcctctcacggcctctctaccctcagcgcagccctcaagacacctgttctggccctcacgtctctcgcttctgcgccgttccttattagcttcttcctcgctccccgctcatctcgccatccttaccttctctacacagccatcctcgccactctatcttccgtcgccatccttattcctacacctacacctgctcctagacgtaccgcttcatcggcgcctcgaaagtcttcgcgtgctaagatggaggccagctacgaagttctaggcgatgctcacagtgagcccgccagcgacgaagatatcgaagacatcaatggcgaggaagttcgagctgaggtcgagggtcttacgcgaagctacctcgccaggacagctatttctgccctgggctt

SEQ ID NO: 107391 - DNA, 478 bp, Zea mays
  unsure (1)..(478): unsure at all n locations
  Clone ID: MRT4577_29440C.1
cggggncggccgggtctccgcccccctcgctagcctcgcggagccgccgcacccagcgaccctcccgaagtctaaccctagatccggaccggccatggcgtcccgccgggtcgtctcctcgctccttcgctccgcctcccgcctccgtgccgcctcgcccgccgcgccgcgcccgcgcggggcgccgcaccggccgggccaggatcgggacctgggggggggggggctccgatactgagagcacagtacatgaatttgaacttcagcaccgcttgggcgacccacgacaagtacaagagcttcatcggttntgggcgtgctggcttggcgagcaaagcggggggcaacagcagcgggagccccgggctgggcgacgaagactatccgttcgggctcgagccggggataaacagcactagggtgaacaaggcagggtgccccgtaagcttgaagatggatgtgttcagagccctatttt

SEQ ID NO: 107392 - DNA, 764 bp, Zea mays
  unsure (1)..(764): unsure at all n locations
  Clone ID: MRT4577_29441C.1
ttgggtacctcgaggccggccgggactcggttacatcctccccaagacgccactgcaacctctgctccttggccagtgctctccttcaccaggcggccatggcgccctcctcctccatctccttccccaacacccgcctcctgcagctccctggttgagggccccattagctcgccggcgtgctcccctgcgcacgccctgccctgctcacagtcacgaggcacggcagatcgggcagccgacgtcaagcacccagatagcctccctgttctgtacgtcaagaggtagaagtagtctggtctcaatgacacgcgggtccgtgtggcatgttcttgtgctgaaaatttcaggtttttgcgcgtgttccaaaatccatatctctagtttggaagctcctaaaaatcatggaacttgcttggtcggtttccttatgaaattctctacctattagatgtataatatgtcatgttttataagaaaatttctgcggtagaaatttatatttaaaactggtttagtaaataaacaaacttacttctccccatattttgagttttatgtgtccaaaaggaatgtgacttgttttgctagttagacggtatcatactctaggtaataaaaatattaaacccatatgttgntaactgtcttcttgtgtattagttaaatcttgttaataggaaaaaagatggattgaaatgtttacacttgactctttgtgtgatgattggatactgatcagattttcataatttatggtgcat

SEQ ID NO: 107393 - DNA, 267 bp, Zea mays
  Clone ID: MRT4577_29442C.1
cgcattacagcagagcgccccttccttttttttttttttttgtatataacaccgaaaaaaacccacatgcgcgcggttatatttatatatctcacataatacccaccacccataatatttaccgcaccactttacttcctcaaattagtacaaaaataccgacccactcctataaaacctagctagaattacaagatggcatcctccttgctcctctcaataaccacttttacacaaaatatacacaacccaactcaccacccaacc

SEQ ID NO: 107394 - DNA, 937 bp, Zea mays
  Clone ID: MRT4577_29443C.1
gatattgaaaatgttgctatttgctaagctacacctgaagcaaattagaatacaaattgcacaatttaggcaataatgattctcttcgattacagaactcagaattagtaatcccaaatgcaggaccatatcaagtttgttacgactaaaagcacacaagaattggcacacccaaaacgcaggaacgcatcaagcttcgtccaaggcagccatgagcgcgacccagatgtgggtgcgggcgccggtccaggcgttcctgcaggggactggagagccggcggcaaccggaccggcccctgtgtctgcctgaggccggtatcgttcttcaaattcgacgaaatctcgttcttcatccaggcatccaatgcacttcttgagacggcgaggttggcgtcgtcgtagttcaccggccataggaagtagccgaggagcccacgctgcgctgcgaaggcgagcttctcggccacgaccgccgcaccgtcgaaggcgacccagacgtcaccaatggataggtaggacgctacggacgcgttgtcgaatgtcgtggtgaccgcgcgccggccgcccccgccggcagcggcgattttctggacctcggcgtaggacataactccggtggcgttgctcccgcgctgcttcggccccgcggcgaccaccggcgccccgacgccgctgttggccttgttgcgtaggaaccacgagcgggcgtagagcgggaggcccatgacaaccttgctcgcgggcacgccggcgtcgatccaagacacgacgccgtagctcgccgagaagtgggacgccctgtcatagagcggcgcgtcgaaggccgtggcgttggccgcacccgcggcaagcgggtggagtccgaacgccaccacattgacccagtcgaggcacctcgccacggcctcggacgggtagtccacgcccgggcgcggcg

SEQ ID NO: 107395 - DNA, 106 bp, Zea mays
  Clone ID: MRT4577_29444C.1
atacagaacaacaaagactagtactaaatcgtatgaatgcacagtgaatagcaagtcggccaaagcgaacgagacgacttcgatctcaagagcagacacaccattc

SEQ ID NO: 107396 - DNA, 1629 bp, Zea mays
  Clone ID: MRT4577_29445C.1
ccggccgggtgctgatcggcagggccagtttgctgaaaacttgataaagggaaacgcatacagactggcttctaaataaagttggtatgggtggcaagggacccagtgtgttagatgatgaagggcagggcgtgcttcacttagcagctgcacttggatatgattgggctataaggccaacacttgctgctggcgtgaatattaatttcagagatattcatggctggactgcactccattgggctgccttttgtggccgagagagtactgtagttgcgcttattgcactgggagcagctcctggagctttgacagacccaactcccgatttccctggaagtacaccagcagatcttgcatcttctaatggtcaaaagggaatatctggtttcttggcagagtgttctctgaccagtcatcttcaggtccttaatctgaaggaagctaatatggctcaaatatctggtctacctggtattggagatgttaccgagagagattcactgcagcctccaagtggagattcattgggtcctgttcgaaatgctactcaagctgctgcgcggatatatcaagttttcagggtgcaatccttccagagaaagcaagcggctcaatatgaggataaaggtggcatgtctgatgagcgtgctctctcactcctttctgtcaagccacccaagtcagggcagcttgatcctctgcactctgctgcaactcgcatacaaaataagttcagaggatggaaggggagaaaggaatttcttcttattaggcagcgaattgtgaagatccaggctcatgtgcgaggtcaccaagtgaggaagcattatcggaaaatagtttggtctgttgggatcgtggagaaagttatattgcgttggaggcgtagaggggctgggttacgtgggtttcggtctcaagaaggatcagtggagagcagtagtggcggaacaagtagcagttcgatccaaaataagtcttctggagatgattacgattttctgcaagaaggacgaaaacagactgaagaacggctccagaaagctcttgcaagagtgaagtccatggctcagtacccggaagcaagagatcagtaccagaggattttcactgtcgtgtcaaaaatgcaggagtctcaggctatgcaagaaaagatgccggaggagtcagcagagatggacatgagtgaattcaaggaactgtgggatgacgatgcacctatcccgggttatttttagtgtggaaacctgttttgttggatttatttctctgtagattgctccgtttgtcttgagtgctactgaattgatggcacaaatggctgataacccaaagtagcgttgctggtgcatgatctgacatgtttggatttggacttaggtgtggtatttcttttgccttatgtacagtagaatattatctacatttgaaggagccttgtatttactgtgtgaaatcggtgtaaagagtttgatatcagagatcttacccagacttaacggttgcatgttactgcagtgcagcagttaggagtttgaggctttttgcacggaaaaaaaaaaaaaaaaaaaaaaaaaaaaaaaaaaaaaaaaaaaaagggcgccgcttaaggatcagctacgacgc

SEQ ID NO: 107397 - DNA, 370 bp, Zea mays
  unsure (1)..(370): unsure at all n locations
  Clone ID: MRT4577_29446C.1
taccatatcttggagccgtaggcgccattaagaggaagggagggagagagaaacgcgcggtcacccgtgagagagaaagaggagctcgtgccctagccgctgcagtaccgcccaggggagttccgtcgtagagagagaaccagggtgttggccgccgtcgtcgtgcacctgcggcgttccccggactcgtacggtccgtgtgcggtgcccgccatggagcgctgagcatgctcgttgcgtcatcgtgcgactggaactcgactcgttgccgaggacaatccgtcaattcgtcgtggggatcgagcttagaagcctcgccgcgccccgaggacattnacctggttctctctgtgaaaggttggccgatcga

SEQ ID NO: 107398 - DNA, 330 bp, Zea mays
  Clone ID: MRT4577_29447C.1
aaaaaaaaaaaaaaaaaaaaaaaaaaaaaaggaaaaaaaaaataaaaaaaaacaaaataaagaacacgtaaaatgaaaaaaaataactataatataaaagaaaactaaatataatgggggtggccgttttttaacaaccatatttactggccctaccttgccactacttatcttttttttggtggcaccaaattcaattttattgggctgggtttaaaaagatgaggccgggaaaaaccttgcttttccccaatttattagcctggatggcaatccccttttgccctgttggggtaatttaaaagaggccggcgcggttggtccttccaa

SEQ ID NO: 107399 - DNA, 366 bp, Zea mays
  Clone ID: MRT4577_29448C.1
ggggagaagagctagagggatgggtggcggcacggtggtgtgtgtcaccggcggcagcggctacctcgggagctggctcgtccacgccaccctgcggagcctcgcggacgagaagaagacggggctgctccgggcgctccccggcgcggcggagcggctgcggctgttcgaggcggacatgtacgacgccgacaccttcgagcccgccatcgccggctgccacttcgtcttcctcgtcgccacgcccctgacgcacgaccccaccagcaccaagtacaaaaacacgacggaggcggcggtggacgcggcgcgcatcaatcctccgcagtgcgcgctgtccggcacggtgaagcgcgtcatccacac

SEQ ID NO: 107400 - DNA, 133 bp, Zea mays
  Clone ID: MRT4577_29449C.1
actatacacaatattcacatagaagaaaatggtgttacaagcatgaatatataaaggatacataggagcaatgcaaatattctaagttacaataacacattttggtataagaggggcagactaattttatttt

SEQ ID NO: 107401 - DNA, 173 bp, Zea mays
  Clone ID: MRT4577_2944C.1
tcgtgttctggttttatttagcacacctgactagttgatgcgtgcaattaggtgctttttcgtcatggactgttctggataggaacaatgggccccaaagtccatgagtacgccagttgtacagacagcaactctttttggtaatccagttctctaagcgcagctgactgctt

SEQ ID NO: 107402 - DNA, 1858 bp, Zea mays
  Clone ID: MRT4577_29450C.1
aggtacaaaacaaaggcctgctcggcgctttaaaaatgtgtggcagttttgctacagcggggagacggctagttcaataaaaacgaagtttttgtaaaaaaggaaggggagaagagctagagagatgggtggcggcacggtggtgtgtgtcaccggcggcagcggctacctcgggagctggctcgtcaggaagctcctcggcagaggctgcgtcgtccacgccaccctgcggagcctcggtatatcttattcctatcatccacgccgcacctccgagaagcccatgcatatcgtctgacgatcgaccttcatgggcctgcttcgtttcgttgacgtacgtgcagcggacgagaagaagacggggctgctccgggcgctccccggcgcggcggagcggctgcggctgttcgaggcggacatgtacgacgccgacaccttcgagcccgccatcgccggctgccacttcgtcttcctcgtcgccacgcccctgacgcacgaccccaccagcaccaagtacaagaacatgacggaggcgacagtggacgcggtgcgcatcatcctccggcagtgcgagcggtccggcacggtgaagcgcgtcatctacacggcctcggtcacggccgcgtcgccgctcaaggaggacggcagcgggtacaaggacttcgtcaacgagtccaactggacaccgctcaatctctcctacgaattcagcaacactcacctggacgattacgtgcggtccaaatcgctatcggagaaggagctactgagctactcctctttctcatcctcctcctcctcctcctcctcctccaaggaagacgaccggccccaggcgttggaggtggtcaccctagcgtgcgggctcgtcggcggcgacagcatccagacgtacctgtggggcagctacgccgcgatcgtcgcgccgctgacggggcaggcggtcagtcacaacgccctcctcttcttgcaggcgctgctgggctccgtgccgctggtgcacgtggaggacgtctgcgaggcacacgtcttctgcatggagcaggagtccatgaccggccgcttcctctgcgccgccgggtaccccaacatggcgtgacatggtcgaccactttgccgcaaagcaccccgacctcaagatacagctgactcaggtgaccggagaaggggtcaggattcagcccaacaccagcaagctggaggacttggggttcagattcaagtatggagtggaggagacgctggactgcagcgtcgagtgcgccaagaggctgggagagctctagatgcatgctacacatgcatgcgcagcattggaatccagcgaagtgttatgtcagagaagtgttatgtctgaatataccgtatttgagcttcgattgttgtcagagaagtgttatgtctgaatataccgtatttgagctgtaggagctagtgatagttcgtcactttactacatcgaacggtggtaataatggaggatgacgaggtcgtcatgtcttgttgatgccggcgctacacagagggtgttgtgaggtcatgatccaatgcaccatcacagagactagggctggaaacgagccgagccgagctcggctcgcccatttcacgagctggggagataggctcggcttggctcgaaggtggctcgcgagccacaccctgatatatataattgcattatttagtgaaatattagtatataaatataaatatataggtatcattcattattacgtgtgtatattgggtcgattcatcccaccagagtttgaactgttccatattcccatctgtttcccgtgatcataaaataaaaacagtaaaatgcaaaaaaaaaaaaaaaaaacccgcggcc

SEQ ID NO: 107403 - DNA, 373 bp, Zea mays
  Clone ID: MRT4577_29451C.1
acggaaaaatatcctcaaaccctagcttttgatcttgatggcgaaccctcgagtgttcttcgacatgactcgtcggcggctgctccggcgcggcaggatcgtgatggagcgtgtacgccaacgaagagcctaagaccgcggagaacttgcgcgcgctgtgcacgggcaagaagggcgtgggcaagtacagtaagccggtgcactacaagggcttcatcttacaccgagtcatccgcgagttcatgtgccatggcggagacttcacccgcgcgaacggcaccggcggcgagttcatctacggcgagaagtttcctcacgagaagttcgagcgcaagcacaccgtcccccgtgtgctcttcatggtcaacgacgg

SEQ ID NO: 107404 - DNA, 421 bp, Zea mays
  Clone ID: MRT4577_29452C.1
attccaattcacactgctagctacacagcacacgaaccgatccatccatccagaaaaaaaagaaagagtgcccgtcgaaaatgccggtgagcaggatcgccatcggcgccccgggggagctgtcccacccggacaccttccgcgccggcgtcgccgagttcatctccatgctcatcttcgtcttcgccggctcaggctccggcatggccttcggcaagctgactgacggcggcgcgacgacgccggcggggcttatcgcggcggcgctggcgcacgcgttcgcgctcttcgtggccgtctccgtgggcgccaacatctccggcgggcacgtgaacccggccgtcacattcggcgccttcgtgggcggcaacatcagcctgctcaaggccgtggtgtactgggtggcgcagctgctcggctc

SEQ ID NO: 107405 - DNA, 294 bp, Zea mays
  Clone ID: MRT4577_29453C.1
cgtccctcacacactcactatacactgctctgctgcagcaagacggaagacgctagcgcctccctagctctcgttgtcagcactggccaccaccgccgcgtccagcctcctcaagtcgtccttcgcgcggctcccggctcgcttcggccacgcgcaccaccaccccgtcgtccgtggccgtggccactccgcgcgctggcgcgtcgcccatccgcgcgtccatctcctcctcttccaccccgtcctacgacatgacgtccttgcggttcagccccatcaacgagtcgatcgtgt

SEQ ID NO: 107406 - DNA, 101 bp, Zea mays
  Clone ID: MRT4577_29454C.1
tccagttttaaaacaactgagaaattgttgttttctccaaactgacaaatgcttacgggcgggtaattattgaaaggtcagagaacttctacagtgccttt

SEQ ID NO: 107407 - DNA, 396 bp, Zea mays
  Clone ID: MRT4577_29455C.1
agagctatgacgaggtgtgcacccgtccgtaaccgggcagtaagtattgggcggttaacctgggttaataatagagggcggcccttttttattattttgtgggaggaaggccccctaaatcattgatcggttggcggactacgactcatgcagaagggtagcgtgggcgcatcatgttaggcgtgacttctgcttgtcagcgtgctgatagccatagcaaccaccgtccacgcggaggactgatttgtcgaacgcgaccgcaaggaagacctgtggaggtgccagcatgtattcgcacggctgtccagaaaggacaccccgcactagagggaatgctacatcgagagccgagagcggcaccagcaaggtcacgcacgcgaggacggagacatgcac

SEQ ID NO: 107408 - DNA, 308 bp, Zea mays
  unsure (1)..(308): unsure at all n locations
  Clone ID: MRT4577_29456C.1
gagaattcaagatgggtanagaaaaggttcacatgaatattgtcgntattggtcacgtagattctggtaaatctaccaccactggtcatcttatctacaaatgcggaggtatcgataaaagaaccatcgaaaaattcgaaaaggaagctcaagaaatgggtaaaggttctttcaaatacgcttgggtcttagacaaattgaaggctgaacgtgaaagaggtattaccattgatattgctctttggaagttcgaaaccgaaaagagacattacactattatcgatgctcctggtcacagagattttatt

SEQ ID NO: 107409 - DNA, 1147 bp, Zea mays
  Clone ID: MRT4577_29457C.1
gcacgaggctaaactggagaaggctgacaggtttcagcgtgtaaaattggagatcaatgagatgattaaagagcgtatggctacacggtccaaggtcaatgaacaggatggttcagctgatgattttcaggttgctaatgatgaaagaagagctttaaaaacaaagtatacaatggatactgcattggaggacaagatgtgtgatctgtatgatatgtatgttgagggtatggatgaagacaagggccctcaaagcaggaagttatatgtagagcttgccgagttatggcctcatggttgcatggacaatgtcgggatcaaagatgccatttatagatcaaaggagcgaagaagattattgtacagccagcaaaaggttcgcagtgaagagagaatgaagaggaagaggctggctgcaacagcaaagctgccagatggcctcgcagttgcaatgcaaagtggagttgccccacaagttgcacagccacccataacaaatcccatcacataccatacggctgattatggacagaacccggggttaaaatattttgatagggctcgtgaaacgagctccagtgcaatccctgatgacggcaacagaattgctggtgaggtcaagaagaagaaaagaaaacctgaatatgaccctgtagatacacaagctaacctaccaagggctcccatgccgcacgggagcgagaagcaaaagccttctaagcctgctgacgaggccagtgctggtagcctgccctccatggcgacaactcaaactgtgcttggcctaccgtcggtgcttggtcataaccaacaacctagctgattctttcggcgtagtgttggacatttggttctccttataggcctttttcagctgctgtaacaaattatggcctttccatgtgttcagcatcgattgttgagactaacatgttcccgagtagagaggatatttgatcactctttacttttccagcattgcatggttggtacccttgcccagattatctgtgcagcgctgatagatatgatctgcaaccccttcaaataccagttgtaattatgaatattttctcgagacatgtactgctcatattgtgcgaagcgatgtgcagattttcttttaaaataaaaaaaaaaaaaaaaa

SEQ ID NO: 107410 - DNA, 394 bp, Zea mays
  Clone ID: MRT4577_29458C.1
ttctttttttactttttttttttttttttttttttttttttttttacacaatcaaccaaatgggctgggatacatttattatgctagttcgacgtttattaggagtacaacatcttttgacccccctttttttcccaaaactggaaggcttttttttggtgcagccccctgttatttacatggagatgccacacaacaaaaatttgccaagttttttatgctgcccaagttttagttttttaccgaagaaccccggaaggtgtggctcctttaaccattcaggggttttcaccatttatccaaggcccctttgggaaaaatcaccagcagtttgtttttccgggggaataactcaaggataaatctttggacaaaatcagtaaacgagccgggg

SEQ ID NO: 107411 - DNA, 318 bp, Zea mays
  Clone ID: MRT4577_29459C.1
gggacccgggcaaaacccattattttttacctcgggtttaacaaaaaaaacttcccagaatacaccctttagggggttaaaagctgggctttgaagggggggaaaccattttttttttttttccaggggggggatttttttccccgacgggacaaattttcccccccctttgaaattaacaaaaagggggcaattccttatggaagctggccccaggtccaaaaacgggggggccggatctttttacaaaaaattttaaaaaaaaaaaaactttttttttggttgggggcctttttcccggcacaaacgggttttttt

SEQ ID NO: 107412 - DNA, 405 bp, Zea mays
  Clone ID: MRT4577_2945C.1
gttggttgttttttaaacatatgttttgttttgacagcttatctagggagtaattgtactgtttttgaatcataggaaaccacataatagcaccccaacaagggggaaagggctcaaaagaccctctccagcaaaaaaagcgcaaaagaccgggtcaaaattctccccctttcctgcctaaacaggacaccgggggtactgttcataccggaccccttccaggcagcacccctaacccaaggacaacggcgcccaaaccccggggtccaaagcctcgcccttttaaccaaaaaaacggtgttagaagacccccccccaacaaaaaccccgaaggaaaaaggggggacaaacaggaccccaagggaacttaaaaaccacccccgcaaaaacactcttaaattgtgg

SEQ ID NO: 107413 - DNA, 267 bp, Zea mays
  Clone ID: MRT4577_29460C.1
tcgcaaaaacgagggctcgatttcgtttctgggtgccgctgatgctcatgggccgggtcgccagcatacccgtgtgccaactctcggtgcataccgaccgtgacggcacgtaccactacaacctcggtaaggcgctggctcccttgcgggtggaaggcatcctcatttcttggttccggtagagccacacacaacctgcgcaagattagaccgtgcaactgcgcccgtgccgcatagggttttcaagtttgacacctggattaagga

SEQ ID NO: 107414 - DNA, 525 bp, Zea mays
  Clone ID: MRT4577_29461C.1
tccgcggcacgccccagggcatgcgccgccgcgccacgcgcgcgcgcggccctttcgggagcaggagcgggacctcgccgcttcctacgcgcgcgagattggctcctgcgtccgcgtgcggcgctggggcgcagcgtgcgaggcgtttgcgtcaatgctcaccgcgggagccgccccagacaggttcctcctcccgcaggtgctccgcgcttgcgccggccttggtgcgccccgccttgcatccgccgcgcatgcgctcgccgtcaagggcggggcctagctagcgggggaccccgttgtcgggaacgcgatcgacagcatgtatgcggagctgggggacgtgggcttcgcccgcgccgggttcgcgtcgctgcccgaccgccacgtcgggggcgtggaccgcgctcatcagggcgcacgccggacgctggggagctggaaaaggccttcggacctgtttcgaaggagagccagagagagcggggattcggcccggacctgatctcatgggaacacgctggtggt

SEQ ID NO: 107415 - DNA, 621 bp, Zea mays
  Clone ID: MRT4577_29462C.1
gtaccctcgaagggccggccggggaaaactttcattcatctactagcctggcgctgacgcagggagaaattccacagccggggggcaaggctttaattggctcctctccctcactcgcctacttcatcatgccgccgaggtttgaaacagctaggaccatgggcaagttgagctgcaggcagcaacaccacgagtcggcgtccaacctcctgggggtgactcctcaccggggtcctcggcctgctcctcgctcatgcagagcacgacgccccggctccggcgctgctacgactactacccccacatactgctaggacaggacggtacaccgagcgcgcacgctacaccgctccaaagcatccggcttcttcaaagtacggaggaaaggatccatctatctgctccggtctgcgatgccacgccgaggtacgcatcagacgtgcgagctcaagtacaactccgacttgtggagcatacaataaatcatgctgccacggttggttgaatatcaaatgggtccgatatgattggcacatcaacgagcctactgcataaaggtggtcacactgacaactgatccgagacactgtctgctaccaaagattaactgactactggaac

SEQ ID NO: 107416 - DNA, 808 bp, Zea mays
  Clone ID: MRT4577_29463C.1
agcgcccctcggccctcgctcccacaacaagctcaagccagccttctctctctgctccatggcgcgcttccagctcgcagccgtggccatggccatgctcttgccgcggcggcggcgcaggccccgaccgccaccccgacgccggctcccaaggcgtcccccccgccggcgacgccgccgccgacccccgcgccggtgtctccgcccgtgccgcccccgaccatgcctcctccggcgcccgcgcccgcccccaaggccccggccccggcgcccgaggcccccaccccggcgcccacggccgaggctcccactcccgacgtgagctccccgccgatgcccacggagggccccgctccgacgccctccgcggaggctcccccagcccccagcgccgccgtcgccggcgcctccccctccgccaagtggttcgccgccgccgcagccgtggccatggccatgctcttcgccgccttctactgagagagcgggagatctgcgccgtcccctgctgtaatttatcgctatccgtgctgagccgttgattcctttttttttgttgttcttccctttcatccatattccattcggcattcgattcagtaggactggcatatctgttcgtgttactacagtgtaggatcgtggcttggacagattggtttggctggctggctggttgggtgggcccggtggtgttgtggcttccgttcctccatctgtataataccctgttgattttccttcgtaaaaaaaaaaaaaaaaaaaaaaaaaaaaaaaaaaaaaaaaaaaaaaaaaaaaaaaactcgag

SEQ ID NO: 107417 - DNA, 306 bp, Zea mays
  Clone ID: MRT4577_29464C.1
atagcacagggaggctgggcgccaggcccacgagggacccatgctctgaatcaatgactgcggcttattggggagcgcggccaccatgaacatgtgctctaagggccacatggtgattatagcgaaacacgaccaagccaagctggctgtcttctgtatcaacagcgtcgggaacagcagctacgccagcatggcaccggttccagctggcaacgacacaacacacacttgtggccaagtccagtaggaaacactgaacatgcatgacgcccatgatgctgactaacccacataggatgtggcgca

SEQ ID NO: 107418 - DNA, 287 bp, Zea mays
  Clone ID: MRT4577_29465C.1
ccgcatcaaggagggaaggcagctagttaacattccctcggtcatggacaaggtccaagcagggaaacacattgacttatacctcaacaaccctttgggtggtggtcctgcccgaagggttaaaccgaagaaacagaaaaaaggcttatggggccgctaagcttaagaagacgaagagtataaggccaacttaggattctgcgaccggaaatggttgaaatgctaagtggaaactttaaatggtgtgcccgaatgagtatggtcattggaaagaattccaaaaatct

SEQ ID NO: 107419 - DNA, 415 bp, Zea mays
  Clone ID: MRT4577_29466C.1
tttttatttttttttgtattctgttttttttttttttgcaagatcaaaccaggatgctttggtctcctcccagagggtatgtgctgttgtttgccaaaattttccccatccaaacaaagacctaataactgtgaaaggccggtgtctttactttcattaacttacaaatcctgagggccaaaggggggttttttttatttacatacaaaaggtgggaggcttgtcatgcacaaactcaatgcccccgccctaattaccagggtggatttttttgatcgtgctaatccaaaccaagtgacacctgcttgcgtttgttaacgcaccataagaagctggcaacaaacaaaaacttaatgttctgtcctttagcagccaaaagcgtgtcctgctcgttttttggggacaaacccggttt

SEQ ID NO: 107420 - DNA, 537 bp, Zea mays
  Clone ID: MRT4577_29467C.1
atgggctgcctagtcctcatcaactttgtcttagatagccacctaaactacatcatgagcactgtccaactcctgaaaggcaccgtcaaagccattgaccaacgtagtcgtggcttcctctgggcgggcatgtggtgggagcagtacggcgactcagcaccgtcgctgcaacgcgccgccgtcagaataaccagccaggtgtgcagcacgctgacgttccagagggactggggcgtgatcctgcagaaccactacgagaagcgcaacaagctggacaaggaggccctggccgaccaggcctacgtgcactacaacctcacgctgcactccgagccgaaggcgaggaggaggccggacgcggacccgatcgcgctggacgcggtcgacatgacgtcggcgtgggtggaggactccgacggccccatcctcacccagtggctcgacaggttcccgtcggcgctggatggcggggacctgaacacgagacagttcggtggatccatcttcggcaccaacgacaacctgttcggcctctga

SEQ ID NO: 107421 - DNA, 772 bp, Zea mays
  Clone ID: MRT4577_29468C.1
gccggccggtccggatcttgcgaaagaagtctaaactgcgagccatatcgagttactgtgaagagatatcacagggacctcttcaggcttcaaggcagatccgcagcagatggaggggaagagcaggctgccggaggtgaccatcgtcccggcggcacggccgttggctggcgatggcacaggcgacgcggcgaaggcggcggcgggcaaggagcccgtaagcccgggcactccgtcctcggtggccgccggccgcagcagctgtgaggagaggcgcgcggtggacggcgtcaccctgcctgggtggaagctcgacgccctctgccaggagtcctgcccgtcgccggccatgagggcgcgcttcccctactacttctgaagctttcccgttgcagtcatgcgtgagttcttgagcggcgacatctggtgcatgctcttgacgactgatggtgttcttgggtgttttccttgctcagggtttcccttacgttcatgtatgtatgtatgtatgtattgtgggtttaaagatctgtgatctttgtgtataacgcaaacgatgaaccttcgggtaactgcgtgtatggttgtatctgtctatctgacataatttgagcacactgtatgtatcggtctaaaaaaaaaaaaaaaaaataggtcctataatagttgccaatatggcatagcacgcgtaatacagcgtaggaatttcagaacctggagcaaagcttgttggttctgtttaatataattaatacaaacattacacagctac

SEQ ID NO: 107422 - DNA, 2719 bp, Zea mays
  Clone ID: MRT4577_29469C.1
ctcaacaccgttggctgcctagtcctcatgaactctggcttagacagccacccgtgaagacatatcacagggacctcttcaggcttcaaggcagatccgcagcagatggaggcgaagagcaggctgccggaggtgaccatcgtcccggcggcacggccgttggctggcgacggcacagtcgacgcggcaaaggcggcggcaggcaaggagcccgtaagcccgggcactccgtcctcggtggccgccggccgcagcagctgtgaggagaggcgcgcggtggacggcgtcgccctgcctgggtggaagctcgacgccctctgccaggagtcctgcccgtcgccggccatgagggcgcgcttcccctactacttctgaagctttcctgttgcagtcctgcgtgagttcttgagcgggcgacatctggtgcatgctcttgacgactgatggcgttctcttggggggttttccttgctcaggattttccttacgtgcatgtgtgttttgtatgtatggtattggttgggtttaatcgaacggccatctttgtgtataacggctccacaggtacccgccggcgctggagggcggagacctgaacacgagacagttcggtggatccatcttcggcaccaacgacaacctgttcggcctctgatggcttccggctccagggggtggggggacatctgcctgttctcatttgttttgattaacacgagagccatgaagctgctgaaaatgtgctaagcatccatttcttctgcagtcatcattgctatcttcttcagtgtatttacctggtgccttggtgggtgcacatacatagctgacacatgggggccactctacaagaatgactcgggaagaggataacgtaggccaaccacaattatttaaaaacaacaggaggaggaagataatcatgatgcacctatcagtcatcactgtcagcactaactccggaaagaaatatccacccgctctgatcttatccgtttctctgtagcatagaaggagacaaacgccatcgccttttccatttgttgcggaagtaaatataaactgcgagctatcatatcaagttactgtgaagagtgaagagatatcacagggacctcttcaggcttcaaggcagatccgcagcagatggaggcgaagagcaggctgccggaggtgaccatcgtcccggcggcacggccgttggctggcgacggcacagtcgacgcggcaaaggcggcggcaggcaaggagcccgtaagcccgggcactccgtcctcggtggccgccggccgcagcagctgtgaggagaggcgcgcggtggacggcgtcgccctgcctgggtggaagctcgacgccctctgccaggagtcctgcccgtcgccggccatgagggcgcgcttcccctactacttctgaagcttcccgttgcagtcctgcgtgatcgagttcttgagcggcgacatctggtgcatgctcttgacgactgatggcgttcttgggtgttttccttgctcagggtttccctttcgtgcacgttcatgtatgtatgttagtatgtattgtgtgtataaagatctgcgagctttgtgtataacgcaaatgatgaaccttcgggcaactgcgtgtatggttgtatctgtctatctgacataatttgagcacactgtatgtatcgttctcatcgaaaaaaaaaaaaaaaacggcgcccagtacaacccggaaagtaagttcttccgcactatcaaggaggagttctaccaggtcctggataagggtcttacgacccctgaccagaggcatgatatcaccgcacaggtgcatgctttccgcaaggcacaagggctgtttggttcgaacattgctaaagaggcccgcaacaatacccctccaggcatgtggtgggagcatgtacggcgactcagcaccttcgctgcaacgcgccgccgtgcagaataaccagccaggtgtgcagcacgctgacgttccagagggactggggcgtgatcctgcagaaccactacgagaagcgcaacaagctggacaaggaggccctggccgaccaggcctacgtgcactacaacctcacgctgcactccgagccgaaggcgaggaggaggccggacgcggacccgatcgcgctggacgcggccgacatgacgccggcgtgggcggaggactccgacggccccatcctcacccagcggctcgacaggttcccgtcgtcgctggatggcggggagccgaacacgaaacagctcggtggatccatgttcgggtaagcccgggacctgtgccccatctgaccgcgagatatcacagggacctcttcaggcttcaaggcagatccgcagcagatggaggcgaagagcaggctgccggaggtgaccatcgtcccggcggcacggccatgagggcgcgcttcccctactacttctgaagcttcccgttgcagtcctgcgtgatcgagttcttgagcggcgacatctggtgcatgctcttgacgactgatggcgttcttgggtgttttccttgctcagggtttccctttcgtgcacgttcatgtatgtatgttagtatgtattgtgtgtataaagatctgcgagctttgtgtataacgcaaatgatgaaccttcgggcaactgcgtgtatggttgtatctgtctatctgacataatttgagcacactgtatgtatcgttctcaaaaaaaaaaaaaaaaaa

SEQ ID NO: 107423 - DNA, 812 bp, Zea mays
  Clone ID: MRT4577_2946C.1
cggacgcgtgggctggtgcaggtccagggccaggtggtcgtgtcgccgcctccgctcccgcccctcgccgcccggggctccgcgtgtcactcgccgcttctcttccattccaccccgcccccattctccctcctcgcgcgtcgcgatgaaagaggcgcaggcttgagcgagaggaccgcgctggacaccaccgcatgctagggaggcagggaggggagccgagccgaggacgatggcgctgggcgtgttgttccacggcgcgcagctagcgctggatctggcggtggccgggatgtcgctggcggtggcgctcgggttcttcgccctcatcactaccttgctctgctccgcggcgttcctccaccactccaagcccgccgcgtagtcatagcctccacagcgaccaacgcgtctcaacctctggggatcgtaatactgttgctggtataattcctccacatcaattgcagaggaggtgctttaatcaactgctttatagcacttacagatgcaaagagtagtcgattgcacacatcaggtgatagctataggctcttgtaccacgtgtatgtttctttatgctggtttgtaaacgagatgtttgtactttgtactatagtttttgtaatcagtctctctttcaagatttaaaaaaaaaaaaaaaaaaaaaaaaaaaaaaaaaaaaaaaaaaaaaaaaaaaaaaaaaaaaaaaaccaaaaaaaaaaaaaaaaggcggccgttttttttttttttttttggagttcacacccgcttttatagagcttctgtgtttaccggggaaaaaggaaatt

SEQ ID NO: 107424 - DNA, 704 bp, Zea mays
  Clone ID: MRT4577_29470C.1
ttcgggatttgttgcggaagtaaatataaactgcgagctatcatatcaagttactgtgaagagtgaagagatatcacagggacctcttcaggcttcaaggcagatccgcagcagatggaggcgaagagcaggctgccggaggtgaccatcgtcccgacggcacggccgttggctggcgatggcacaggcgacgcggcgaaggcggcggcgggcaaggagcccgtaagcccgggcactccgtcctcggtggccgccggccgcagcagctgtgaggagaggcgcgcggtggacggcgtcgccctgcctgggtggaagctcgacgccctctgccaggagttctgcccgtcgccggccatgagggcgcgcttcccctactacttctgaagctttcccgttgcagtcctgcgtgatcgagttcttgagcggcgacatctggtgcatgctcttgacgactgatggcgttcttgggtgttttccttgctcagggtttccctttcgtgcacgttcatgtatgtatgttagtatgtattgtgtgtataaagatctgcgagctttgtgtataacgcaaatgatgaaccttcgggcaactgcgtgtatggttgtatctgtctatctgacataatttgagcacactgtatgtatcgttctcatcgaaatagttcccgatatggcatagcacgcgtaatacagcgtaggaatttcag

SEQ ID NO: 107425 - DNA, 415 bp, Zea mays
  Clone ID: MRT4577_29471C.1
cttgctcctagaggtggtttctcccggcaaggcaggaggtcctcgaggctgtccgggcccatgttagttccaaatttcaactccctgtccttaccaggtgcccgggtaaagctgctggttgatgccatcctgaacaagttgcgccaaagatttcgtgccgagatctgtcttcagtaatgcaatgtcatcctgaacaagttgcagtgtattccttttgtgctcttcatttttttcctcatcagctagatacgacatgtagactttcttttagcctttttttttgtttttcatactgtgtattaccttactgatgtaaaagcgcccccgtacattgcaactgttaaagaggaaaagcaaaataccgtcatttaaaaaaaaaaaaaaaaaaaaaaaaaaaaaaaaggcccctagggcc

SEQ ID NO: 107426 - DNA, 988 bp, Zea mays
  Clone ID: MRT4577_29472C.1
aaaaaaaaaaaaaaaaaaaaggaaagaaatatccacccgctctgatcttatccgtttctctgtagcatagaaggagacaaaccccatcgccttttctatttgttgcggaagtaaatataaactgcgagctatcatatcaagttactgtgaagagtgaagagatatcacagggacctcttcaggcttcaaggcagatccgcagcagatggaggcgaagagcaggctgccggaggtgaccatcgtcccgacggcacggccgttggctggcgatggcacaggcgacgcggcgaaggcggcgacggcaaggagcccgtaagcccgggcactccgtcctcggtggccgccggccgcagcagtgaggagaggcgcgcgatggacggcgtcgccctgcctgggtggaagctcgacgccctctgccaggagtcctgcccgtcgccggccatgagggcgcgcttcccctactacttctgaagctttaccgttgcagtcctgcgtgagttctaaggtgctgcaggacggtccatggaagagcaggaagaacaaagagaagaacgagaggatgatccaggacaagtacttcctgcggggcgacgagtggggcgtcggggactgctccacggagggcatgtcagaccaggagagggaggacttcatttcggagctcaagaagagagctggagcagagtacttagctgaggacgtcattcagtttcaacagcataagtatgggcacaagttcttcactgtagcaatctggtgcatgctcttgacgcctgatggcgttcttgggtgttttccttgctcagggtttccctttcgtgcacgttcatgtatgtatgttagtatgtattgtgtgtataaagatctgcgagctttgtgtataacgcaaatgatgaacctctgggcaactgcgtgtatggttgtatctgtctatctgacataatttgagcacactgtatgtatcgttctcatcgaaatagttcccgat

SEQ ID NO: 107427 - DNA, 172 bp, Zea mays
  Clone ID: MRT4577_29473C.1
ccccatgatctcatccgacccctaaaataagcaaaacaacatcaagctctatgagcacagggcgtccatcatggacaactgcgaagagctttatccctgactggttagactccattaagggcatcgatgactctaaggaccttcccctcaatttctcacgagcgactcttca

SEQ ID NO: 107428 - DNA, 640 bp, Zea mays
  Clone ID: MRT4577_29474C.1
attcccgggagtaaatataaactgcgagctatcatatcaagttactgtgaagagtgaagacatatcacagggacctcttcaggcttcaaggcagatccgcagcagatggaggcgaagagcaggctgccggaggtgaccatcgtcccggcggcacggccgttggctggcgacggcacagtcgacgcggcaaaggcggcggcaggcaaggagcccgtaagcccgggcactccgtcctcggtggccgccggccgcagcagctgtgaggagaggcgcgcggtggacggcgtcgccctgcctgggtggaagctcgacgccctctgccaggagtcctgcccgtcgccggccatgagggcgcgcttcccctactacttctgaagctttcctgttgcagtcctgcgtgagttcttgagcggcgacatctggtgcatgctcttgacgactgatggcgttctcttgggtgttttccttgctcaggattttcctttcgtgcacgttcatgtatgtatgtatatgtatgtatttatgtattgtgggtataaagatctgtgagctttgtgtataacgcaaatgatgaaccttcgggtaactgcgtgtatggtcgtatctgtctatctgacataatttgagcaaaaaaacaaaa

SEQ ID NO: 107429 - DNA, 177 bp, Zea mays
  unsure (1)..(177): unsure at all n locations
  Clone ID: MRT4577_29475C.1
caccactccacagcactatcaagagtgtatagaacanagcatacagcaccgcccaccgtttgtttattttatgatgagtgaggtacaaacctacctattactatatatgcttccaaaagacacgtcttatcttcactgatatactaagtattattttataaattatattgacttcct

SEQ ID NO: 107430 - DNA, 726 bp, Zea mays
  Clone ID: MRT4577_29476C.1
ccggccggggtgccgcacattttcctctccttgtctctggcgccatggaagcagctgatgccttgccctgggcagcgcagtgtgcgggcatggccgtcctcgcctcctccctctgcttggtggcgctggccctggtgctcctgctcctccggcgctggccgtggtgcagctgccatgtctgccgggcgtacctgacggggtcatgggcgcgggacttcaccaacctcggcgactggtacgcgcacctcatccgggagtcggccaccggcaccgtccacgtccacgtgctgggctgcaccgtcaccgccaacccggccaacgtggagtacatgctcaagaccaacttcgacaacttccccaagggcgagaccttcgcagcgctccttggggacctcctcggccgcggcatcttcaacgtggacggccacgcgtggcgctaccagcgcaagatggccagcctggagctcggcagcgtggccgtgcggtcctacgccttcgggatcatcgccagggaggtggaggcccggctcatgccgctcctcgccggcgccgccgacgccggcgcggtggtcgacctgcaggacgtgttccgacgcttcgccttcgacaccatctgcaagatctccttcggcctcgacccgggctgcctcgagcggggggatgcccatgtccaagctcgccgacgccttcgacaccgccacgcgcctctgcgccatgcgcggcgcc

SEQ ID NO: 107431 - DNA, 109 bp, Zea mays
  Clone ID: MRT4577_29477C.1
gttaattgtagcagtgtgtatcttatatgattaacgttctcggttattacaggcacttgaacagcaaataaaggcgaagggaacattatttgctcttcaagtccctgta

SEQ ID NO: 107432 - DNA, 777 bp, Zea mays
  Clone ID: MRT4577_29478C.1
agagggcatgctttgagtgtatgggcatcttttctttctcttacgatgttccatatgtatggtgagtacttttttgttattccatgttttttaaatattcaaacaacttttgaacttacctacttattatcttcttatttgacttctaaactattgtagtgctgaagcgtagcctatttgctaacacactctaacagacaatccatttgtgagggtgatccgcgctgagaagagatggctaatgtcgccgcggcggcggcggcggcgctgtgcttcgcggccctgaaaatcgagactgtctgcaaggcgagaaagaacggcaggagctcaaatacctgcacagcttgtatgctggccaagagagcctgaccgataaacacgcgccaggacctctcctccctctaaccggaaggggctgtcgacacgggcttgggctggctagctcgacacacaacatcaaacctcagcacttataggcccgtcgatggatggaccacatgtgtaccagttttatctcgaagctgtagactgaaggttactcgacggaacgccttctgtcgcattcgattctttggagggcacactggcttcacggcccgctggatgagaagctccagtaggaggaacactgcaagaccgcgtctgcttatccaaggacagggcacaggtatatcgcccacgacgcgattattagctagggtgagaacgcggtaattgttcgcttgtgcctggcatgactgcctgatgaaagatagatgcatgagctgccccgagcac

SEQ ID NO: 107433 - DNA, 314 bp, Zea mays
  Clone ID: MRT4577_29479C.1
gttttgggactagaggctcagtggtgggagagatccctgcagaacccaccaaccagaacgtggtttgcctgaggctgtaactgagagatagattctggggctgtgttatgataatatagacattctcacataagcccagttcatcaccatctgctttattacctttcagtgcagtttcttttcacattaggctgttggttcaaacttttgggagcacggactgtcagttctctgggaagtggtcagcgcatcctgcagggctttactcctctgtcttttggagaacagggctcttctcagtggtctagggactg

SEQ ID NO: 107434 - DNA, 444 bp, Zea mays
  Clone ID: MRT4577_2947C.1
aaggggaacggaacagcaaacaaaggggcaaaccttgttttacaggttacaaggaagcccccacccgccccccaaaaaaaagggaaaaggcttatttccgggtcaaatccaacccggtccaataatggaccggtaccccccgaaccacttttagaagaacccgaaccgggtcccctggtttgggtcgttttttggggcgccggcgatgctcaccctggtgggggacaacttggccttgtacaaatccgagttcaggaccttggggctcacgtgggtggaaatctccctgatcacaatctcaaagggcggcctcactttgggggggtccaggggccacgtttccataaaaaaaaggccctcgggcttgggcagagccttgccttcctccaaggggacctggggggtgtcgcccaaggcgcacttgttggccaccaaaattttggc

SEQ ID NO: 107435 - DNA, 328 bp, Zea mays
  Clone ID: MRT4577_29480C.1
gcaagaattgcggggggtaaaataattgaaggggggtacaaaattcacaaaaaaagccataagattacaatggttaacaaaaacttgaaatggggaaccgcacaatgaactctataaactcaacattcacacctacagaatgctcaagtggctcaggatttaactccttacaccaacctaatggatgttgcatgaggtgacacccaagttcttatatttctttaaaaggatggacaacgttttcataggtggccgacagtgaattacttggcactaacgacttaaatcttttacacaagccctttgtactgaaacattccccaggctg

SEQ ID NO: 107436 - DNA, 258 bp, Zea mays
  Clone ID: MRT4577_29481C.1
acgcgtccgcggacgcgtgggttcctcctccaccgcgtcgcgccaaaaacctcggccgcaccaaaaacgtccatcgcggccgattcccaccgcctctgtagccggcatcagcggcccaaactcgcccggcctggaatcctgcaccgcgtcgcgccgaaaaccttatcggccggcaacaagccggacaagccttgggcttcgtcggcctaaccggaccctttcaatgaccgggcgctagccaaacccggcaatcttcct

SEQ ID NO: 107437 - DNA, 585 bp, Zea mays
  unsure (1)..(585): unsure at all n locations
  Clone ID: MRT4577_29482C.1
gaacaacccatggtcaacaactccttccagagctgcaatttcctgtcctgctgccaacgcatccttgattggcgtcttgaagtataaatcgacgatgtagtttgagttgtcagtaacatagggcttgtcgcgcttcaaaccttagctttgcctcgactccttcctccttaaacagttcctgcaatcttacaagggtgtacttccagcagaactgcacaacttccactggcatggctagaccactacctcctaacccatcaactagttttgtctcgtcaacaataacaataaacttgtccgatgctgcctcaaccatcttctcacgaagaagagcaccaccccgccctttcacaaggttgaggtcagggtcaacctcgtcggcaccgtcgagagaaaaaaaatgccccccccgtcgtcgagcgtggagagcggactgagatcgcggtggcggccatgggagcacgtgtgggtggcgggaggggaggtgctgcagttcggagaggtgaggtcaggagtgtggggagatgagggggaggcgatgggaagttcctcctcccccccacccggcgatggtgatcgncagag

SEQ ID NO: 107438 - DNA, 1392 bp, Zea mays
  Clone ID: MRT4577_29483C.1
gtgagaagatggttgaggcagcctcggccaagttttttgttattgttgccgagccaaaactagtttatgggttaggaggtagtggtctacccatcccagtggaagttgtgcagtttttctggaagtacacccttgtaagattgcaggaactgtttatcgacctcggcgcctcgttcgtcctgctccaccctgacgtcaccatcgccgctagcctccaccaccaacttcccatcgcctccccctcatctccccacactcctgacctcacctctccgaactgcagcacctcccctcccgccacccacacgtgctcccatggccgccaccgcgatctcagtccgcctccacccaaccgccgcgcgccatgtggcctccgcccgccgcgcccgcctcggggccgtccgcgcgcagtccgcgccggcggcggcggcggcggcgctgacgcaggacgacctcaagcggctggcggcggtgcgcgccgtcgagcaggtgaagagcgggatggtgctcgggctcgggacgggctccacggccgccttcgccgtcgccgagatcggcgcgctcctggccgcgggcaagctcgagaagatcgtcggcgtgcccacatccaagcgcaccttcgagcaggcgcagtcgctcggcatcccgctctccacgctcgacgacaacccgctcatcgacctcgccatcgacggtgccgacgaggttgaccctgacctcaaccttgtgaaagggcggggtggtgctcttcttcgtgagaagatggttgaggcagcatcggacaagtttattgttattgttgacgagacaaaactagttgatgggttaggaggtagtggtctagccatgccagtggaagttgtgcagttctgctggaagtacaaccttgtaagattgcaggaactgtttaaggaggaaggagtcgaggcaaagctaaggtttgaaggcgacaagccctatgttactgacaactcaaactacatcgtcgatttatacttcaagacgccaatcaaggatgcgttggcagcaggacaggaaattgcagctctggaaggagttgttgaccatgggttgttcttgaacatggcgagttcagtgatcattgctggaacggacggtgtcagtgtcaaaacgaagtgagtttttgagttgctttgttgtttgtgttgagttttacaatttaatgtacaagctattggtgtaaaagcagctgataagatgcttcaataaaggtgttcccccaatgtggggattgactatcacttattgtgggataaaaaagccattttaataggttgaaacttctgttgattcataaaaaaaaaaaaaaaaataccaaaaaaaaaaaaaaaaaaaaaaaaaaaaaaaaaaaaaaaaaaaaaaagggcggcc

SEQ ID NO: 107439 - DNA, 508 bp, Zea mays
  Clone ID: MRT4577_29484C.1
atatgtctgcaaaagtactttaacgagattaccttatacagattctttttcaagcgacatgcatgggtccatgtgtgtacatacctcagattttgtaaatggacacacgcacttgggcaggatctgtattggccaaaggcagtctctgacacggtctcttcatatatatggatccagcattcccttgcatgcgatctactaatgcattacttattgagaaaggcatatggcgaccacaaccctgcggggatattattattaaccaaaaactggaaggatcacatgtcttggctagatgctaagccaattggaacttttcatgcccatcctttctttataactggcgaggtaggactatctctaatggacatgactttacgtatgaccttgaggagaaccaacaagggattgaatcctctcactaattgaatctgttctgacggcttcctaggaaagtacctatccaatgattgtttgaagtctttgatattgcggataaccaccttgt

SEQ ID NO: 107440 - DNA, 645 bp, Zea mays
  Clone ID: MRT4577_29485C.1
aactttactgaaccttgattttcttttgtctctcctcctcctctatcctctttatttcttttcttcctcggatatatttacctctttcattttattgcttgcttggacattacttgcttccatttatttccttgacttctccgtccttggtatttgtcgatctagcagttattataaacagcgaggtggcatgaacaagtattggcctctcaaaaaaagtcagaagcaaggctacttctcttccaagcatcgcaagactttgtacagacggcgggtagacgtacgtacgtacgtacgagcaaaaaatgcaaatgcaagcaacaatgccttgctagcttatctctactctctctctctctctacctgtctctctctcatgtattattgctctttcgcatcaattggctggcatagcagctagcaatccgctggccagagaagagacatatatacatagcggtctgttaccggccaatccatgggctggccggacctgcaaatagatctcgcctgaggagcatgcacgtgggaagcaataaccggcaatgcatttaacgggaaacaggatctctcccagaatgattcaccacattgagacacgccataagtgctcagctgcaaaactccaagctggctgggcaggga

SEQ ID NO: 107441 - DNA, 3234 bp, Zea mays
  Clone ID: MRT4577_29486C.1
atgccgtcctcttcctcttctgctgccgctacgccgccggccggcgcctcgtccgaggagacgctgagcactgtggcggcggaggagttgcgcgccggcgacacggtggagttcggcgtgtcgcggatgtcgtcggtccgcgtgcaagacatgcagcggctggggtacttcggcggcggagtggctcgtgtcccggggacggaggaggtccccgagccggaaggcgagttggtcgtcttcgaggcgttcttcgccgccgctcgccgccggccgcccccgcgtcgatttatgggagaagttctgcgtagattcgacgtccaggtccaccagctgacgccgaatgccgtggtggccctagcaaaatatgtctgggcaacgacttcgtacggcgggcagccctcggtcaaagtcttcgcgaagcattattgtctgcattggcagaaaaggaaaatcggaaataagattgcacaatttggatcttgcacatttacgccgaagaccggcaagacttcgatggaagtcgttgagttggttccttgcgtccgcaataaatggggcaactggtgggaattttggttctactttgccgaaggcacagtcgaagaccatccgaggctccccgtggccgagatgtgttcacattattactcagcgtacctgcagtttgaggtagtggaggaggatgaaaatgaagaggcccttcggtgcgcggcccgcatgagtagcggacgcgatctggttgaggagtttgtcgggtatgggatgccttcccgcggtgggatgctagtgcggagtcctgccttcgcactggatttgcatggccgagatcccgccgcattcgtgcgtgaggcggaggatggggcggtgcagattgttggtcgctacatgctaaagacggaggcccagcagagttgggatatacgcggatccaacgaccgcctgaatagggtcttcgagttgaactgtttgccatatggcggttatcccgggcaagacgttgtcgaccgccgcgggaaaaaaccggcggctgagactgaagacgaccccgcgccggcggccgccccattcactaagaagaggaagctaggtactgcgatgggaggactgggggtctccgatagttttgctatggagttgatggggacatgcgcggcccccgggggaaggatgtcttcgcccgagctccgggagtctttggcgcggatgctggaggttaccgggggtcggtggcctaagaactttcctatcccccgcgcggccggcgaagacttttttacatctcgcatggctcgtgacctgagagtgtttccttacggacggaatattgctgctgttgtgtcggcagtgatgaacaaggatctccaggaagctgcgcagaagcgccgggcggtcatcaggcttcccgaggctaggctgaagagggcgcgggggactgcgaaggctaccgcccccggcggtagccagccgacgctggcggcgaagccggccgcccctgggtccaccaaggtgccggagggtgtgaaggcggccggcgccggtggaaccaagtctgcctcggccggagctgcgaaggtccgggaattgccttcgccggggaagcgtgttcccgacttcggcaccaatattagtgtggacgactatctcgttggatcgggcgaggggcaacttgctgttgttccacctgtggtggcgaccacggtgtctgccgcggtgcctggggcgaagggtagcgcgcttagcgctggtggtgagatttcggcggtcactgccgtcaaggacgaagcgggcactgtgtcccgacggctgagggaggcgtcgcagcggctgagtcaagcggccgacttcgccgaccgcgtggcgtcgggggcccttactgcagatgtgtctgccgaagtcgagagacttcgggtgcagcatgctgacaccgtccgggaaaagtcggccgcggacagcaagtgccgcaagctggcggagaaggtggccgccctggagggcgagaggatggacctctggtgccagctggtggaggagaggagggaggctaaccaggccatcgccaaggcgcaggcggcgcaggcggaggccaatttggcgcgggcccgcatggagagggtcgaggcctctacgtgctcggaagttgagcggacgcgcaaacagctcgtggactcataccgcgagctgggcacacggactactgacttcgaagtgcccgaccgggaggtgggccttcgcttcctcgagtggctgcaagaggaacttttggcgctcccgaccattgtggagggatttatgtcctttgcctccctcgtcacctgcgaaggggcgatgaacgtgctgtcccgcgaggggtgcagtcactatgaggtctttgaccgatgtgatgaagattttgggcgcgagattttcaaggtcaaagaccctctggtgaaggactccgcaggtgccctctttgaccggatgtggggcccccacggtcgggaggtggtgagggagcggtccgaccgggcgagggatcaggtcgtggaggacttcggacccctgaacagcgtgcggcccgaagcggaggccaacccggtggtggccgaggctgaggtcgacccggcaccgcccccagaaaccggtgaaggctccctcgctgctcctgtggctactgcgtccggtggaggctcgtcgccaaccgctgtgccgagggtggaggatcccccgaagacggcgacggagccggtagcggaggatcccacggcggcggctgggtcttcgcaggttcaagattttgggcctgcgcacgcaaccgctactgctaattttgtggcggcttcgaccgtggatgctgggaatgaatcagatgagtctgcttctaagttttctgattttggtgactctgggagttcggttgagtggacggaagagtcttcggatgaggacttggattactttgcggccttagatgtggcagcggcggaggcttctccgcgtgttgtggatgctgaagttgtgcctggtccgagtgctgggcgtaggcggcgaagggcggtggcgaagcgtagagtgagtgaggtggatggcggtcggcttcgtgtgggcagggctggcaagcaggaattgttgtcctcgccggctggggcgagtgtaggtgagggggagttgcgaagtctttttaagggtgaggagcttaggataatgctatttaactatagggagatgggaatcattccgaaggttgaaccgatgtaa

SEQ ID NO: 107442 - DNA, 478 bp, Zea mays
  Clone ID: MRT4577_29487C.1
aaaaaaaaaaaaaaaaaaaaaaaaaaaaaggaaaaaaaaaaaaaaaaaaaaaaaagagaagggggaaatagaaagaaccagcttgcatgccccgtaatggcaattctttggagttctttaggtccctggtggccttctttggcccgcggtttgcccgggaaagcctgggaattccctgggggtgcccccttttatccccttgccgtttcgccccctttcgtcctggggggcaggcgcggaccggcccccctcgcgcgcgcttccccaccctttttggcgcttggtgggcgctgggaaggggccttttacggggggtttttgcggcggtttcgcgcggtttcccccctggggtccccctccctttcccgtccctttgtgcccgtttctttcgtttttttcccctcctttttccccgctttcgccgtttttcctctgggcggcttctttttgggggctccttttggggttcctttcgggg

SEQ ID NO: 107443 - DNA, 160 bp, Zea mays
  Clone ID: MRT4577_29488C.1
gctatgcgtacggccaggaggaggatcaatggtggggctattaatggtgacgaattggactgtgtgaacacagatgttgagggtttgtccaaagaactgttgatggtggataatctggtgaagattgagatcaagtagaaccatgtagtaggaaatgatg

SEQ ID NO: 107444 - DNA, 1680 bp, Zea mays
  Clone ID: MRT4577_29489C.1
atgggaagactgggggtctccgatagttttgctatggagttgatggggacatgcacggcccccgggggaaggatgtcttcgcccgagctccgggagtcttcggcgcggatgctgaaggttaccaggggttggtggcctaagaacgttcctatccctcgtgcggccgacgaagacttttttacatctcgcatggttcgtgacttgagagtgtttccttatggacggaatattgctgctgttgtgtcggcagtgatggacaaggatcgtcaggaagctgcgcagaagcgccgggcggtcatcaggctgcccgaggctaggccgaagagggcgcgggggactgcgaaggctgtcgcccccggcggtggccagccgacgctggcggcgaagtcggccgcccctgggtccagcaaggtgccggaggtcgcgaaggcagccggcgccggcgcaaccaagtctgcctcggccggagccgcgaaggcccgagaattgccttcaccggggaaacgtgttgccgatttcggcaccaatattagtgtggacaattatctcgttggatcgggcgagggacaacttgttgttgttccgcttgcggtggcgaccatggtgtctgccgcggtgcctggggcgaagggtagcgctctcggcgctggcggtgagatttcggcgctcactgccgtcaaggacgaagcgggcactgtgtcccgccgactgagggaggcgtcgcagcggctaagtcaggcggctgacttcgctgaccgcgtggcgtcgagggcccttacggcagttgtgtctgccgaagtcgagagacttcgggcgcagcatgctgacgccgtccgggaaaagtcggccgctgatagcaagtgccgcaagctagcggagaaggtggccgccctggagggcgagaggactgacctccggcgccagctggtggaggagaggaggggggctaatcaggccctcgccaaggcgcagttggcgcaggcggaggccaatttggcgcgggtggagggtagtctcgccagccagcgcgccgagaaatgggagacgcggttcaacgctctgcaggcccgcatggagagggccgaggcttccacgcgctcggaagttgagcggacgcgcaaacagctgatggactcataccgcgagctgggcgcgcggaccgctgacttcgaagtgcccgaccgagagtcaggccttcgctgcctcgagtggctgcaagaggaattgttggcgctcccgaccattgttgagggatttatgtcctttgcctccctcgtcacctgcgaaggagcgatgaacgcgctgtcccgcgaagggtgcagtcactatgaggtcttcgaccgatctgatgaagatttcgagcgcgagatttacaaggtcaaggaccctgtggtgaaggactccgcgggagccctctttgaccggatatggggcccccacggtcgggaggtggcggcgcgtgccgagaacgtggaggacttcggacctttgaacagtgcgcggcccgaagcggaggcaaacccggtggcggccgaggccgaggtcgacccggcgccgccctcggaaaccggcgaaggctccctcgctgccctgcggctactgtgtccggtggtggctcgtcgccaaccgctgtgccgaggttcaagattttgggcctgcgcacgcaaccgctactgctaa

SEQ ID NO: 107445 - DNA, 714 bp, Zea mays
  Clone ID: MRT4577_2948C.1
atggggagcgcccgcgttgctttcgtcccgttgtgggaggagcgcaacctcatagagcattcaggggagagggcgctcatcgccctagcggagggggcagaatttgacaacgcgtggccgattggccgcaagcgtcgtcagctccagcacgcctggttcgctggctcagctggctttggcacagcttccggtgccacctcccaccgctgggcggagtgtgactatctgcccgccgtccgggcgactgttgcgccgcatgcaccggggcagctagggcggcgttcgtgttcttgggttgtcctgccctcgctccggcatgacgcctccgtgcggaggtcggtgctcgcccgtccgggaggacttgagtggggatctgccggtgggcaggtggccgccgtcgttggtgctgaggtggtggcagctggagaaggcctcgtcgccgacgagatcgttggcaccatctgcgcttcgggcctccggctctttggctttgatagcttgtcctcgccccttgagtggggacgtgggcaagggcattgttgcagcagcgtctgccctgaggtcatcgctgctgctgtttggccacccagagcggaggtcgttgtcgctgctgcagtggtcggcggcgagtcacccggagcttgtcgtcccgcaggccctccgatgtggaggttgttcatacccgcgggagtggaaccggagttccgtttgtaa

SEQ ID NO: 107446 - DNA, 372 bp, Zea mays
  Clone ID: MRT4577_29490C.1
atgatacacagcaagcgcgagcatatgatgattgccattagagagtagcgacattaacggtgttccccacttctttcccctcccgttcaatctcactggtctttgattgtattatatgtgagcatccatcattctgtgaaaaaaaaacaaaaaaaaaaatataaaaaaaaaaaaaaaaaagaaagccctataaatgatccaagacaaagtcatgcaagaatgcgacgacaaacacattctctggtgaaactgatttataacttagctctcgtactggagctatgacttgactgctaaatccctggggtcatccaacgtattcgatatacggcaaatacctcttgtaccagctcacgctgaccctaactgact

SEQ ID NO: 107447 - DNA, 333 bp, Zea mays
  unsure (1)..(333): unsure at all n locations
  Clone ID: MRT4577_29491C.1
tctagatcgcgagcggccgccccttttttttttttttttaggcatagaaagacctatggcatagaactaaatctcacgaagaatcagaataagattgaacttaccaaaccgacccttacaaacaccgatgccggcacaaacaaacagncccacgcacatactgggagacacaagcatgttgacacacacataccaccataatagatagggggcatacacaccaaaacggacacctgacataccgggaattaaaccaaggttaaaatgcttattttccacgagaccaaacacgagcaccggaaatggcaaggccagggagcgacaccaccaaaa

SEQ ID NO: 107448 - DNA, 274 bp, Zea mays
  unsure (1)..(274): unsure at all n locations
  Clone ID: MRT4577_29492C.1
acggcatcacatccccnnactgggtgctgagctttagtacagtacaattatttatcgcgcgacgcgtaagtttgctcgctctttctcttcccttcctccttgataaancccgcattctcttaggccttgggccatttcatcctcgatgaaaaatgcattgcttaaatctaatacaatcgacttttgaattactactctcaggacaagtccaggtgaggtggctcaccctgtaaaactccttcanctggctttataagcacaacacagtgctcaa

SEQ ID NO: 107449 - DNA, 305 bp, Zea mays
  Clone ID: MRT4577_29493C.1
gctcgacgggggtatcatttaggtcgccggaaccgacaaggagaccacgacccggggacacgatgaccttggcaagcgctgcgctaagtactacgaggccggtgcccgatttgccaagaggcgtgctgttctcaagattggccccaacgagcctacacagattgccattgacctgaatgctcagggcctggctcgcttcaccataatatgccaggagaacagactggtgcctattgtggaacctgaaatccttgtttatggcccttaggactttgatcgctgcgcttacgtaactgggacagggc

SEQ ID NO: 107450 - DNA, 858 bp, Zea mays
  Clone ID: MRT4577_29494C.1
cccccgaggtcggccgggaatgctataaccctcttcccacgcagatatccactttcccagatccagatcgtgtgagcctttggttaccaggtatgctcccttctcctctctcccttgtgctcctctctgtgctcaccacggcggcgtgcaacagttcatctcctcccggcagagccctctttcccatggaagtgtagccccgtccaagttttccctatgcagcgtgccgtgctcacagcccctccatggccgagcccctgcgcatcccgcccctttctagcacgcagtcgtggcggccaaatccatggacggcgagctccgtccacacccatggtagatgcgcgcgccgagcaggccctatgtcgcgcccctgcgcgccacgccctggatgccgagcgcctgcctccgcacagctgcgcagcgtgccctgcgagtcgtgccgccgctgagcgccgctttggcgagcctcgccagcgagcgcccaccgcgtcccctgcggccttctccctgctggcgcccatcaacccccacctgctatagatcgaagaagaagaagccctgctgtgcaattgggaacaaggagatgagaagaaaacggtcgtgtgcaagtgcattagagagaaggatctgcatgcggtattcagccaaaatgtagaactgtcgtagggtccacctgcatgttgctgatgtcctcatcttgcgtgatgggtgtgggaagagataggaaactggctaccccgcatgcgtggccacatggcatttttttattggcatgcgatgtctcctgtagcatgcagccataatgtggaaagtggccacacaacagttcccaggattttctgtggccaccacgtatga

SEQ ID NO: 107451 - DNA, 628 bp, Zea mays
  unsure (1)..(628): unsure at all n locations
  Clone ID: MRT4577_29495C.1
tggtcgcctgcagtaccgtccgnattcccggggccaatatttgcagatcgccgacaccaggaacgcctagtgctcgacggtgtcctccaaagttacgagctggtgaggggggatgccatccattgggaatggcttacttaatcgtgctcctgacaatctacttatgaatcccaattccttgcctgttctctaactctgtgaatatatatgacctaaagtacactcatctattaaatgactagcatatgtatcattgacaatcttgtgaaactgctttgagaaagatttgatgagaaagctagtgcaatcttaaaacccatatgatcgaaacgaaataaagggtaacaactttagttacggaataaaacaaggtttgaggatagagggacttgaaccctcacgacttataaaggccacggatttacacttttactaaaaattacatcgttggcagtactgacatgaataatgggactctctatttatcctcgtccgattaatccacttttaaaaatgaacagatctcgaaaacattgaatcgaaggatttgatctactcagatatttgattggaatacattcacaataattctaaaaaaaaaatatgaattgtctatttcataatcatt

SEQ ID NO: 107452 - DNA, 233 bp, Zea mays
  unsure (1)..(233): unsure at all n locations
  Clone ID: MRT4577_29496C.1
cttaccaccttctattcacaaatcaaatttcatcatcttgctctcccacctgtccttgccccctaacntctnaggccaagatggggatctatactgtccccctccatcctggtgtctcttctgcaaccactttcctgcgagaaatattaggagctttatcagcccctcatgggtcggcgatgatggatctctttgccttaggccttgtcagtcacactaggccagattaggac

SEQ ID NO: 107453 - DNA, 278 bp, Zea mays
  Clone ID: MRT4577_29497C.1
ggaaaaaaaaagccccagcccaaattcttgtagtaagcagtttaatgcagtttgaaagcccacattgtaggggtttgttttttttgaacacgggtcccggatgcttttgtttggttggggaaattggtgccattatttattaatgaaggggggcggggttgtgatcattaaaggccgggggggtgggagtttttccaaatggttttgggggggcggggcaaccgtttggcctcctttttgggggggttcattttggggacccccttgaccccggggcg

SEQ ID NO: 107454 - DNA, 361 bp, Zea mays
  Clone ID: MRT4577_29498C.1
ttgcactaccatgttgaccaaactcatgcccgccgtgttgctggtgctggtggcgctaaagctctccgcgggggcgcgctccgatgaatccccgtgtggcttcccggccatcttcaacctcggtgactccaactcggacacgggagccttcccggccctcttcccggcggtgcagccgccctacggccggaccttcttcggcatgcccgccgggcggcaaagcgacggccgcctcaccatcgacttcatggctgaaagcctggggctgcgttacctgagtgcgtatctggattcactagggagcaacttcacgcagggagccaacttcgcgagcgccgccggaaccatcagacgggtgaac

SEQ ID NO: 107455 - DNA, 256 bp, Zea mays
  Clone ID: MRT4577_29499C.1
gcgtctacctttacaacccctcatacgtaccaacttaggtttacaattatgctttcaacaaaaccttcagtgaattcttaaacccttttgcgtcatcacacttcactacacattgtcagcttcaatttatctcaattctttccgttactactacattgaaccattatataacttcttatactacgaacaccaacaatattatactatattttaaacttgtattcatatcaaattactcttcttcataattcttccc

SEQ ID NO: 107456 - DNA, 996 bp, Zea mays
  unsure (1)..(996): unsure at all n locations
  Clone ID: MRT4577_2949C.1
gtctcaacccgagcgtcgagcaactccacagcgagatggagatgaagactaggtctggcggccgcccctccccagatccccccgccgactcgccgtctcgacctctccccagatccccccgccgactcgccgtctcgacctctccccggctccccccgccgcctgttgctgagctcctagcctcccgcggtcccgctacgatccacatagataggggattggggaaccctcgcggatcgggagagaggaacgcacggggacaccgccgatcacgcgagaggaaacgcaccgggccgccgccgccgccgcctctgtctgggttcagcgatcagttctgcccatcgatacctgtcttgtaaccatgagaggcagcatcttatactcttcatttcggaggatttcccagggccacccacccaagtccagtggatttcacaggtcatctccactggctgctcagaggtttgggcggtccaaaagatggattgctacatccgatggtttacccggtgaaaagatgatgcttgtgaatgatttagtttgcccggtcaagtatttcacggaggaagttccactgcttgaacccttagacaacaatattctcttgaagaccgttggaggacccagaggaaagacactggttgcatggaaagcaaggaaaaccatcagaagtctgccagagctgattgcagcatatcaattgcgtggatgtacactgggcaaccatctccggttagagaacttaaagatttctcggtcttcagggaggtttgttcttatagacacttcagaaattggtccaactgagaagaagggaagcttcatacaggactggaacctgngtggagatgtccttgatacgattgctaggagagttctgggtgtgggtaccccttaccccaggaccttgagaaaacatcaacaatatgcggtcagcggaacctaagctttggcgtcttctctacaattcattgtttttatccccagaagcccgct

SEQ ID NO: 107457 - DNA, 518 bp, Zea mays
  Clone ID: MRT4577_294C.1
ggtgttttcgtactcgcctctctccgcgccctggtgcgccgttgttcgacgccgttcgtctccgccgccaccgacgccgccatgagggagtgcatctcgatccacatcgggcaggccggtatccaggtcgggaacgcgtgctgggagctctattgcctcgagcatggcatccagcctgatggacagatgcccggtgacaagaccgttgggggaggtgatgatgcttttaacaccttctttagtgagactggtgctgggaagcatgtcccccgtgctgtcttcgtcgatcttgagcctaccgtgattgatgaggtgaggactggtgactaccgtcagctcttccatcctgagcagctcatcagtggcaaggaggatgcagccaacaactttgcccgtggtcactacaccattggcaaggagattgttgatctgtgcctagaccgcatcaggaagcttgccgacacctgactgggctccaggcttccttgtgttaacgctgttgaggaggaacggcttcg

SEQ ID NO: 107458 - DNA, 234 bp, Zea mays
  Clone ID: MRT4577_29500C.1
cggggggggcgctctttttttttttttgtgtttatacacagcgcgaggaccgagtatgttgccaataaaacgcttcacaccggcacacattgttgtatcatggcgacaggataaccaacctacgatcagatggtcgagtggatttcgtggtgtcaagcccacattagtagacgatcgaatggaagatgtttataaaccgcccacgataagcaatgtaatgtttttaaggacatg

SEQ ID NO: 107459 - DNA, 273 bp, Zea mays
  Clone ID: MRT4577_29501C.1
gcgggggcggccacgcgtacgctctccccgcgtgctctacctctctctcgcgcgcgcggcgacgactcgggtagtcggctaccgccggcgccccctacgccagcttcccagctcttcgtcaggggcttctccgtcgacgagcagccatttcataagcgggggggcgccacacctcaacgatggcgggattaaaaagacttgcacccaagaccagaaacctggcggtgggtgggggcctgctggccgtcttgctgcggggggactactacaaca

SEQ ID NO: 107460 - DNA, 878 bp, Zea mays
  Clone ID: MRT4577_29502C.1
gctccagcccatagtgaatctcccggagtcgcccaaacaacagcgacaaccatggccgccgccgcctgctattcgccagcgcgcatcatcatctcctgctcagctaccaccacctcctcaccgtcgtcagcgcgcacgctgcgcgtcgccgtagtggggggtggccccgcgggcgcgtcggctgccgaggcgctggcctcggcgggggcccggacgttcctcctcgagcgcagccccgcgggcgccaagccctgcggcggcgccatcccactctgtatgctggacgagttcgccatcccgcgggacctcgttgaccgccgcgtcacccggatgcgcgtgctctccccctccaacctcgccgccgacttctcccgcgcgctgccccccggggcgcacatccccatgctccgccgcgaggtgctcgattccttcctccgccgccgcgccgttgaggccggggccgagctcgtcccgggcctcgtcacctcgctctcgctccccgcggggcccgccgacccctacctcgtccactacatctcgtcctccccggagggcgtgggagcgggacggagcgtgctggaggtggacgccatcgtcggcgcggacggcgccaacagccgcgtggcgcgcgaggtcggggccggggactacacgacggccatcgcgttccaggagcgcatctgcctccccgacgccggcatggcgtactacgacgaccttgccgagatgtacgtgggcggggacgtgtccccggacttctacggctgggtgttccccaagtgcgaccacgtggccgtcgggaccggcaccgtcgccgccaagccggagatcaagcgcctccagtccggcatccgggcgcgcgcgggccccaagatcgc

SEQ ID NO: 107461 - DNA, 225 bp, Zea mays
  Clone ID: MRT4577_29503C.1
caactcaacttttgcctttacgccgaaggtgccactatcatatcttcgttatacagtggcagagtctagcacccacaagggtaggatagcagatatgtccatcatatgaaaacataacctacatcattgcaggatcttcacaggtggacatatttaatgactgcatacttaatcctaataacactaccggtagttacgttagacaagactgaacatgcatcaatg

SEQ ID NO: 107462 - DNA, 1617 bp, Zea mays
  Clone ID: MRT4577_29504C.1
ggagacttgttctcaaatgcttcagcttggaaggaaatgaaagtacaggtgtgacgcaaaggcaaaatgcaaaatcagcgtgaacagtacgggggtactgttcacctatttatagacacgggacacggctcatacaaaattacattcatgcccattacatttggtaataattctatagtaatctgccgaggtctgaatagcctttttatctttaagtcggtttcattttctgctagcacgccgaagctttcccgctcacatctttggcgctgtatcaaccttcgtattattttaggcttctcctactgtgattccgactcgagcccgaaggtacctgttcacacattatgctccagaaatactgttaaatcctgtttttgaggaccttcgtaagccgaaggcccccaacaccaggtatgatcggaagtattgattgcatgcactgggagtgggaaaattgccccacgacctggcaaggtcagtacagaggttactacaagaaacctacattgattctagaggctgttgcaagccataacctttggatttggcatgcattttttggaatgcctggatcttgcaatgacattaacgtcctgcatcattcaccagtcttcgacaacttagccaatggagttggtccttcggttagttaccaactgaatggtcaacaataccatatggcttactaccttgctgacggcatttatctgtcgtggactactttgatttaacctatctcttgcccatttagcaataagcacaagtattttaccgccaaacatgatgagtaccaaaaggacgtggaacgagcatttggagtcttacaagacaaataccaaattataaagaatcatgctcgcaattggaaccccattgatctcaaattcattgttgattgtgttatcattctacacaatatgggcactgagtacgagcatggcatggaacctattcgaattgaagattatgaaggaggctctcgtccaaattcctcggcaacttctaactcttctgtagtgggtgagggggtgggttgtaattggtaataacttatgcacattgaatggcaaccatgtccaaccaatccgataagtctaggatcttgtcaataagctgctggagttcataagatgagttggtaggatgaccaaccgtctgcctaacctcgaccgagttcatctccatttcctttacaacccatttgagggtatccaaaggagtgtacgccatcttcgcacagatgtgggagtcgttgaggtggaatcgccggttcctggagattcggaccgccgattctgccggcggcgcttaccgtgatgagaacaccccctgctacccgaccggcaccgtttgcaggagggccccggaatctccagatcgatcgccgccgtgggcgaaatagggtggccagaggaagggaacggacgaaagggaaagtatgatcgttgtccagaatatgcgatcgagctgagagccgatgtgggtatgctgaatcagaataggcggacctgtaattatgtgatcccctatgccttcacccatgtagtgtggtcaggttcagtagctcctcgatacgtgaaatgcggatgcgagagcctatgagaatcctaatat

SEQ ID NO: 107463 - DNA, 497 bp, Zea mays
  Clone ID: MRT4577_29505C.1
ggaacaaaactgcaaccccaccacaagcagaaaaaagctaatctcagggcccatattagcgagcgggtctgtcacaaatgggggcggggggggaagcaaaagggcaaaacatgtccagactcagcatgaacctggcgacccaaaggccccccccatccacatttattctggggatacacaagcagcaaccatccatgagaagcagggggaaaaaacccctctactgggtcttgaacatgggggggatcagggcgaccacccggttgctgtacccccactcgttggcgccccacgagacgagcttgacaaagggggcgttcaaagcgaccccggccttggcgtcaaaaatgccccacccgctgtcaccaaggaaggggggggaaaccagatccccctccgcataacccatgatccccttggggggcccctcgggggcccccttaatagctttttgggtctccccaaggggggccccccttttgttttggggggggggg

SEQ ID NO: 107464 - DNA, 242 bp, Zea mays
  Clone ID: MRT4577_29506C.1
cactcccatacggttttacgattttgccacgctgcaccaattccactgtcactttgaccactttttctgcgtctcttcgtcttataccaacttcaccaacaccaccaccaccactctttctgcttccccatctcttttccccattcctcatcctatatccgtgtacagctccatctttaactcttactactgttctactcattgcattctctttaagtaccacttttctcacgctccgttct

SEQ ID NO: 107465 - DNA, 798 bp, Zea mays
  unsure (1)..(798): unsure at all n locations
  Clone ID: MRT4577_29507C.1
cggactttccctttcgtccgttcccttcctctggccaccctatttcgccacggcggcgatcgatctggagattccggggccctcctgcaacggtgccggtcgggtagcagggggtgttctcatcacggtaagcgccgccggcagaatcggcggtccgaatctccaggaaccggcgattccacctcaacgactcccacatctgtgcgaaggtatgcatctgaatcgacctgtgagatgtttcgatgcatcgttgtttggatcttgtatgtagcgtccgtcgtgtgagatttgtgtttaatgtcttcatttagcatcctgcagacctgcacatacacgtttagggtttaaacaaaaaattgctggaacacaaatacataccaatcaccaattggaattcaatttgttccatgtcggctagttgctttactgatttcatgtgtcacagatgttcggtgctactgcctgattgcatgtgtcctgcagatggcgtacactcctttggataccctcaaatgggttgtaaaggaaatggagatgaactcggtcgaggttaggcagacggttggtcatcctaccaactcatcttatgaactccagcagcttattgacaagatcctagacttatcggattggttggacatggttgccattcaatgtgcataagttattaccaattacaacccaccccctcacccactacagaagagttagaagttgccgaggaaatttggacgagagcctncttcataatcttcaattcgaaatagttccatgccatgctcgtactcagtgcccata

SEQ ID NO: 107466 - DNA, 536 bp, Zea mays
  Clone ID: MRT4577_29508C.1
tgttcacctatttatagacacgggacacagcccatacaaaattacattcatgccctttacatttggtaataattctatagtaatccaccgaggcctgaatagccttttcatctttaagtcggtttcaatttctgctagcacgccgaagctttcccgctcacatcttcggcgctgtatcaaccttcgtattgttttaggcttctcctactgtgattccgactcgagtccgaaggtacctgttcacacattatgctccagaaatactgttaaatcctgtttttgaggaccttcgtaagccgaaggcccccaacagtagccccttgcaatattaatttgttttaaaataataaatttagattgcgacatggacgaaggcttttaagccggaggtccgaaaaaacaccttcctcttgctagaatagcaacattcactgacaggcggggtctttcaatttccaacgcactgggcgtataaataagatcataccgcgagctcatttggcacgctctcttgccatctgctctcgctcactcaa

SEQ ID NO: 107467 - DNA, 235 bp, Zea mays
  Clone ID: MRT4577_29509C.1
aaaacaagaggccacactttcctttgatcccttctcatgcaaaagggggaatacttccaaccaacaaaaccctaatggggacaaaaaaaacagacccaagccccattaacaggaacaagagttggccaacaaggggccccactaacagctggcatgaaccccgagacttttaacccacatcaatccttggaagccggtcttatcaatttagggtcccaaaagcccatggaaaaca

SEQ ID NO: 107468 - DNA, 486 bp, Zea mays
  Clone ID: MRT4577_2950C.1
ggagaaaaccaaaagcccttacggaatatttcaagcgctttggaaacagaggggctacaggggatccagggggggttacttaaacaagcaccccccccccaaaataaaaaaaacaacattggggggggaaaacaaaaaaaaagggggattttaaattccggggcaggaaaacagttttgccatgccccatcgaccgaaagaaggaaatatttattcaccccggaaaagttattcccttggttgacaggcggaaaaggaaggccttaagggctgggcacagcccaaaaattgggggaacccatgggggaggtttttccggggcatcataaaaagggatcaaagccccaaccggacaaaaggacccccgcatttttccctcaaaaataatcggaaagggtttcttccaagccttcctgggaaaaacccccagaaagggcccaagcccaacaaagctgaattttgggaaaagttaacgggccctaagga

SEQ ID NO: 107469 - DNA, 280 bp, Zea mays
  Clone ID: MRT4577_29510C.1
ccgtgtgatgagaaaatgatattgatgagctgcaagaagcttgctgttgaactgaagccatgcattgtcatatcgtgtgctgatggtgccatgactcttactgtgctgcactgtgataaagaacatggcttgtttcgctcccgctgtaagaacactgttaagcttggcaagaggaagaatgtgcatgctccatgtcttgttgttgatctcccgacactaacagacattgccttggaggacatccttagatgtggtcctccagacaagagtgtcatgcctg

SEQ ID NO: 107470 - DNA, 654 bp, Zea mays
  Clone ID: MRT4577_29511C.1
atggccttgttatgaaggtatttgacacttctagacacatgatggatcaagggctcgaacctaattcactcacctatggtatagctattgctggtttttgtagaggaggcaacttgagcgaagcagaggtgctgtttaatatagtagaagaaagagggatagataatatcaatgtgctgtacggttctatggtttgtggttatttgcactcaggctggactgaccatgcttacatgctttttcttagagttgctaaacaaggaaatatggtggatcgtttgtcatgttcaaaattgataaacggactctgtagggatgaaaaggttggagaggcttcaactgtatgtaaaatgatgcttgaaaagaatgttgtccctgatgtaatttcatatagcaaacttatatcagcttattgtcagacaagagatatgcacaatgctcgcttatggttccatgatatggttgaacgaggactttctgatgttattgtatacactgtactgatgaatggttattgcaaggttggtcggttgcaagaagcatgtgaattatttgtccaaatgataaatttaggaatcaagcctgatgtagttgcatacacagtgctattggatggccacctaaaggagaccctacaacaagggtggcagggca

SEQ ID NO: 107471 - DNA, 354 bp, Zea mays
  unsure (1)..(354): unsure at all n locations
  Clone ID: MRT4577_29512C.1
cacaccgccgacggccccaagncccncgaggcgcaccccgccggcaaaaccnnagngncnggngaccccaaaagtggcnagcacggggaggncnncnccgcggngccgncgaagccagacacaaagaaaacaaangccgcccgcggggacgagaccgncncngcggcnggagccccaagaaacccnggnaaggcngnnggngnaaaacngccngcgggaacagcgccngcggcagcngcnccggcgggagaggcngaggacgaagaggacccngancnnnnnggggangaaaccgaggaggacaagaaggcagcngangagcgngccgccgnngccaaggccccnncnaaaaag

SEQ ID NO: 107472 - DNA, 349 bp, Zea mays
  Clone ID: MRT4577_29513C.1
aaaaaaaaaaaaaaaaaaaaaaaaaaaaaaaaaaaaaaaaaaaaaaaaaaaaaaaaaaaaaaaaaaaaaagaagaaaaaaataaaggaaaaaaaaatttaaaagaataaagaaactaaggagaattgtatggggtttcagtggtcgactttttggctcgtgggttttggcgttgcggtgggggaatcgcgtggcgtttccttacttttttccggtgttgtcttttgcggtttgatgggaagtgggctgggtcaggaggctactttcgcctgtggtggattctgtttcggctggggggttggtctttttgcggggccttaatgggggtagttgttctggtttgtggcatc

SEQ ID NO: 107473 - DNA, 777 bp, Zea mays
  unsure (1)..(777): unsure at all n locations
  Clone ID: MRT4577_29514C.1
ttgcncgggtgccggcgcacttcgcttctcactcgatctgctttgctcttctctcggtctcggctgcttgcctgcttcgagtcgtcgccggcgggagcggagaacccacccgcacggtgcgatgtcgttgaccgcggcccccgtggccttcatcggcctggacgagctcagcgttgagctagctgcctccttcctccgctccggcgcttgcgtccgctccttcacccccgaggcggaacggttgccatctgcggcgctcgcggagttgaatggcctcctccagtgcgcgagcccagtggaagccgcgcgagatgctgcgctggtcgtcgtgcaaagcgatgctggtggggttgacgagttgttcttcggggttgaggggatcgcaaaagggttatgcgcgggttctattgtattgattcattcgacattgctgcctagccagttggagaagctggagcaggagcttacagatcagaagaaggatatcttccttctggatggatacattttcactggtttatctgatgaattaaagcaacatattattattgttgcatctgggagacaggacatagcagaaagagctagcaaatttttccgtggtctatacaaaaccatttattttgctgaaggtgaattctgcactagcagaaaaattaggatggtgaatgatttgctggagggcattcattttgttgcgtctattgaagcaatgtatcttggtgttcgagctgggattcatccaacaattatttatgacataatatcgaatgctgc

SEQ ID NO: 107474 - DNA, 312 bp, Zea mays
  Clone ID: MRT4577_29515C.1
gggggtaaagatgaacaccaatatatttattcagcaagagcacaacccgaactacacggttacaatacaacttgggggggatgtgaacggaacaataatagaggcgaggcatgggccaaaagccccatgctatgaagagatctgtgactgaacatggggaaaccaatgggaagccatacaagcttatgcgcactggatcaattgttcactcataaaaacatgatcaggaccaactgaaacatcaaagccgggcctgacactaactgagactcctagggcaacctgaaaagggtcataaatgaagatgttgac

SEQ ID NO: 107475 - DNA, 355 bp, Zea mays
  Clone ID: MRT4577_29516C.1
caataagtgccatttttttttttaaatctatttcctgtatacaaagtatatactagtacctataatcctacgcaattacagaaaagagtcgtaccatttatttcaaacccactccttgggctccttcaaaacgtccaccagcctctgctcccggctcttgggctctggctcatacatgtacttccagcttgccgtcaacggcaggctcatgagaatgctctccacacgtgatccaggcgtgttcaaaccaaaagcagttcctcggtcatggaccaggttgaactcgacatacttgcccctgcgaatctgctgccacgccttctccttttcatcaaagggcatgtcctttcgcttc

SEQ ID NO: 107476 - DNA, 428 bp, Zea mays
  unsure (1)..(428): unsure at all n locations
  Clone ID: MRT4577_29517C.1
cgactttgcatttccattgttgttctacccagggaggattcctgttcaggtagcgatgctggttctgcaggaggaagcatctatgagccattccccatgcggttggaggccttgcaggtgttggctcatctggcaaggggctacttttcgatgacacaggtctacttgatggagcttggagaggtgatttgcaagtgcctgggggaggcagatccatctatccagcttcatggagcaaagcttctggaagaactgggtaccagcttaatacaccagtataaaccagattcttccgtagcacctgatcagagagttccagtccccttggtggtgacgttctggaccgcgatgctcaacggtcctttacccagagccctgcagaacgcagagcatccgacgctgcangccagcgcctgtgacgccctgtc

SEQ ID NO: 107477 - DNA, 1282 bp, Zea mays
  Clone ID: MRT4577_29518C.1
gtcgcatttgagactgcatgtatttgcttgtttgaaacctgattcagtttagtgattttgttgaaacacttgtttcctatatgccacccaaaaagccaggaatatgttactaaaaaaccctagggagctgttacttgcctttccatggaagatgtgggttactttcttctcagtgatgtgtgactgacatcctaaattaaagtaacaccagaaatggcctttttgcatccgacactagatataccaaacttcgctcctccctgccaacatttcactgaattgcacattttgctttattcatctacccctgccatcgaacacactcagtttcacctgcctgcctcaatcttcagggcctgtttggttttagttcagacagctttgcatggctctccttgcaatccaaggctttagattttctgttcctggggtggcaggctttgaaccaaacaggccccaagagcattgttgaactgacgttagctagctgaacacacatctgtacttgttcgattgcaatgctgttgcaacttgctacacatgggcaagtttatgtttaaacattgaagtcatttttttgaacgagaacattaagccaatttgaagtacgttggtgttttaagtataagctttctaacttaatcggttataaatatatactttggtgtgagtagctaatatccgaaactttgggtagctggaactttttttagtcgtattgatttatcacaatgacccaaaaaatgggttagtcatgatcttactgaactctttaacctgatgcatatgttataatgctttattgactaaatgagtattggtgattgaagtcccgataacgtacttgccaacatgctatgatggggaaactatatgccaacggttgaaccatgtgcatgaggctgcagtacgcaaagttttttttgcaggttcactgttcatttcatgtagatttagcaggttgtaagttccactgggcttgattcaagattgattcttcttcatgcccgtgagtcttgttaactaggaatgtgcaggaacatgcaaagggtaaaccatatgcaggtattgtttatggatgagaatggattagcctacggagttgcacaacattgttaaccttcgaaatgttgttagcggaatggttactattcgttcattgaatcttctgccaatctgttttatgtaaatgctgtatcggattttgatgagcaaattctattgcagtgcctggaacgattgtggttttggcatagtaagtttcataagatttgattctgag

SEQ ID NO: 107478 - DNA, 192 bp, Zea mays
  unsure (1)..(192): unsure at all n locations
  Clone ID: MRT4577_29519C.1
ccacgcgtccggctttttttatctcacagaattataaacatcttggggggagcctcacgactagtcctcctcgccgtcgtggcgctgctgggcggcggactactccagcaggcactggctaagggtnngggaagaaggggacacggtggcgccgccaacccgcatgtggccggcatgtgccctcgcaccccg

SEQ ID NO: 107479 - DNA, 229 bp, Zea mays
  unsure (1)..(229): unsure at all n locations
  Clone ID: MRT4577_2951C.1
ggctgcactcaaatcacgaccaggcacctgccgcagcccagggccagctcaaggcgtgacgccgncagcgcccccgtcaccgtagccgtcgaagggggtgccaccgccagcgaagccgacgaacgggataccgccgtcaccgtcgccgaggggcccgaacccgccgacgccgtccagcgggccgacgccttcgacgccgtccccgacgccgaccaaagggaccgtgacg

SEQ ID NO: 107480 - DNA, 696 bp, Zea mays
  unsure (1)..(696): unsure at all n locations
  Clone ID: MRT4577_29520C.1
ccggccgggatccatctcgattggattgcagacaaacttacataatcttttgtctgaagatacttcttctaccatggcttctgaaatcaaccccaagacagaagcctttgacgcccacgatggctcaccacgatatgacgagaagcatggcaccacagagcccattcagacacccaagggttcatgggcattgcgaaatggcctcaccattgagtctttcaaggctcatgatgattacgccaagggcaccgttgagctctcgcgagatatgaaaccccgccatctcaacatgattgctatcggtggcagtattggtgccggtttcttcgttggtagtggtggtgcacttcagactggaggtcctggctcgttgactattggctttttgatcatgggagtcatgatcttcaatgtcgtctacgcgcttggtgaacttgccgtcatgtacccagtctctggtggtttctatacttatgctaaccgattcgtggatccctcctggggtttcgccatgggttggaattatgtcatgcaatgggncttttgttcttcctctcgaactgacagtgtgtggtaccgtcatccagtattgggcaccagataccagtgtagccatctgggttagcgttttcctcgncgtcattattatcgtcaacatctttggaactcttggatatgccgaggaagaattctggg

SEQ ID NO: 107481 - DNA, 417 bp, Zea mays
  Clone ID: MRT4577_29521C.1
ctttattgactaaatgagtattggtgattgaagtcctgataacgtacttgccaacttgatatgatggggaaattatacgccaacggttgaacggtgtgcatgaggccgcagtatgcaaagttttttttttgcaggttcactgtttatttcatgtagatttagcaggttgtaagttctatcgggcttgattcaagattgatcttcttcatgcccgtgagtcttgttaaccaggaatgtgcaggaacatgcaaagggtaaccatatgcaggtattgtttatggatgagaatggattagactacggagttgcataacattgttaaccttgtcgtagtgttagttcataacgtcgaaatgttgttagcggaatggttactatttgttcatttaatcttctgccaagctgttttatgtaaat

SEQ ID NO: 107482 - DNA, 341 bp, Zea mays
  unsure (1)..(341): unsure at all n locations
  Clone ID: MRT4577_29522C.1
attggtgggttattgagggaagcgggctggtcccccctggatatgatgtntacttggcattgtaccaacagaagagagattcagttaagccctcccactcccaattacttggaaccgcccaagctaaatcctcaagctttttgaagcaatctccaacacgttttttgagaggccattggccgacacgatcatatccagttgggccttatcaagagcttgattggttttgtggaaccgccttcaccgagaaaaagctgaaaccatgcgggaggtcacctttgggcttatcttgggaagctgcaaaacggtcttacccaagaacttgtgcccagaaccctttt

SEQ ID NO: 107483 - DNA, 277 bp, Zea mays
  Clone ID: MRT4577_29523C.1
gtcgccgccgtctacttcaacgcgcagccgagaccgccgcccgccgacgctaaccgtacggctcaacgtacgaaagaagaccatcctacgacgcttgcaattagctgggcaagcaaagctttttttttatcctgagtcgatctttacgtatgtatgtttgtttaaataaaaaggtagctaatcagctgcttggctgtgaccccacgagctagcagctacaacctactggtacatgctgcacattttagctgatttatgaaggtgacaatatgattgg

SEQ ID NO: 107484 - DNA, 562 bp, Zea mays
  Clone ID: MRT4577_29524C.1
ggccaaacaaaaatggaaaaaaacatttttgtttggcaaaaggggaaaaaacaagaggctccataaacagaaaaacggccccccaatagtaaagctcaacagttcacaggggaaacagcacccccagaatacaaaatttatgggaaaggggaacatcccacctccgtttgggaaaagcaaaccctgaataaacaaaggggggaatattttttttttggaagaagccttggccaccttggccccgggggggtcctttttttccacacttttgaggaccccaaaagaaaccgtttgttttatgtcccggacagaaaacctacccagggggggatcctgggaaaatgtctcccccaccaggggctggggggaaaaaattttaaccataccaaaataaccgtttttaaaaaactggggctttttttaaagctccttgccaaaacgcctggcaattttggaaaggagcccaacaaacttgacagcaataggggagggggggaagcccaccacgggggcaaaaccgttaccgatctgcccaggggggttaatgataaaaacctgggag

SEQ ID NO: 107485 - DNA, 427 bp, Zea mays
  unsure (1)..(427): unsure at all n locations
  Clone ID: MRT4577_29525C.1
agaagagctanntgacgtcgcatcgcaccgnccgtacgtaannngcttgnngatcctcttttagagtcgnnnacccacgcccgtccgnnacctgcgttanntggttaccaanncgaaggaggtggcgannggatggaaggannngattattanntaacagagggggcgcgnnnggagagggggcggctttacgtnnggacgagagtgagtgagaagggcnngtgtgtggctttactacgnnngaggtgggacgggcgtgcgtaggcttaccgggttattgaaattatggcgtactgccnnncccagacggcngnnggtacctantngaangnnagcgaagacnngaatacctanntgatgnnagcccgaaggggaatatgctttcctttccccctgggggccgcggacccgtggcangaagtggaga

SEQ ID NO: 107486 - DNA, 403 bp, Zea mays
  Clone ID: MRT4577_29526C.1
agcgtccgcccagcgtccggaatagataagtgatatactattttaggatgctggtctgctatatgaatgggacactaacaccagggatcgaggggtaagaggatgacgttcgcctgggcaccaacacactgtaggagctccagcccattcggacgatggcgcacggacacatccaactaggactacaaggatcccacgaagagctcgatcttcagagcccgcgaagtttaagtaatggacattgtaccaggcatgaatcaccttagttaccgccatcttgctgttgctgtaaaacttactgctcaccagcctgggtgtgactaaatgaaactacaactgcggctcaccatacatccaaggaatcaggctgaggcttcagaaacctgtatcttaaacatggcta

SEQ ID NO: 107487 - DNA, 149 bp, Zea mays
  Clone ID: MRT4577_29527C.1
tcaaatataccaatatcatccacaacataccatttatttaacttatcctccttctcaatttaactaccattaaataaactccccagcataaacttccattacaccaacactcattaaatttaaaatcaacaatatttaccacaaaacat

SEQ ID NO: 107488 - DNA, 616 bp, Zea mays
  unsure (1)..(616): unsure at all n locations
  Clone ID: MRT4577_29528C.1
gttgtcacatgtggatatctgatgttttcatttgaacgatgatggcattttttcaacagaagtacgacagcatagctacaacgcttaggagttaggatgccatgactccatgagctttttttccccagacatctctcataaacgcaaaacaaattaacaccaatattacgggtacagaaatttatggtgggcccaccctatcctaatgaatcaccattcttatcaactgagatctccacaccgtagttctggtgaaaattctacagtttacaatggcaagagaggactgagtaaatttttacctccgcaagattctttttggtgacaatgccgatacagctcgagaggtactgacacagaatagctgatagattaaaaagcagcacgagcaggacaagatcatagccaaaccgagacccagcttccactgccaccaaccattttccgaagtcaagataccccattgaaaccaggagtgttggcccaagggttcggaaagactatgcggngcatcaccagcagctggggactccatgcatcgcacaccatccattgtgtgatgaattgatgatatgcaaaagctcagtatggaatggatcgactctagtgaaagcca

SEQ ID NO: 107489 - DNA, 413 bp, Zea mays
  unsure (1)..(413): unsure at all n locations
  Clone ID: MRT4577_29529C.1
ggtggggggcgagtccgtgccctcctcccgttgcttcgtgtngttgttcgccggctgcgtctcggtgaagccttttacggcgttggggctgccctcgcccttcctctgcttttgtccctttttctcgctcgtgantnggaccgtgcttgtgtgggggggggggtgcgcctctccccttctggnccgcgttttgtggaccttccggtgtgcctctcctcgctctgtgttctcgtgctttacgtgtttccttgngtgggttcctccgtgcgcggttttcgtctgcggggtgttcgtcctccggttgtctgtgtttgtgttctggttgttcccggccttgccggtttgccgcgtgcttcgcggtcgttgtcggcttgctcctgctgtcgcttgtgctgtgcttgtctgggccggtt

SEQ ID NO: 107490 - DNA, 512 bp, Zea mays
  Clone ID: MRT4577_2952C.1
aacaacaatcagccaagctacctccccttaggggaaaaaaacattttgaacaaccttaatacaaaaggaaaggcagttttgtcacgacaacataagcaataccccccatttagtacctaacaggcatcaccccccgaacctaaaaggggggagtactaacagggatacagggaatattatttttggcccaagccctggggaaaaagactaagggcttttcctttttttcctccccctcctggaactcctaatcctggggaggggggccctggaactggtgaaactcggccaccagggcgttcatgttactttttgcctgggggaactccattttatccataccctggcctgggaaccagggaaaaaaagccttcctcctgaacatggccggaaactgctcgttgacccgggggaacattttttggaggggggtggagttgccaaccaatgggggggacattttcaggccaattgggggaagggcacacaccctcgacttccggtgggggggg

SEQ ID NO: 107491 - DNA, 496 bp, Zea mays
  Clone ID: MRT4577_29530C.1
gccggccgggcctgcctccctcactaccgccgctttttctggtcacctcccctcctcccaccacaaggaatcacctggggaagagcatcaaaactaaatgaagcggaccctgacgccatgatgtccaacaggatgcacgtactctctgatggcaatccctgaaactatatggtgcgagaataactactcttctgtgagaaggatattcgatgacgtcactgtgagatattatatggacgatgatcataacatacatatgcatgacgactacacctgctagcgttggatctctccacactgaacacgatgaagtgatttatctccctgagcgtggtaagaagatacagattgatcagatacatcatcgtctgatcgattccagactccaatcatcatgacatgtgtgaaccaagaaactggattgcgtgaaccaagtctatgtcctatgctagaaaagtggcaaaggtgacatacaatgccagacattctgaacagc

SEQ ID NO: 107492 - DNA, 524 bp, Zea mays
  unsure (1)..(524): unsure at all n locations
  Clone ID: MRT4577_29531C.1
cacccaggttctcctctcctcacccccacggcccaccccaccaaacaatggngccggcggcgacttcccagcctctgcgccctcctccttccactccaccggtaggcataggggcagggtcggggcccggccatcgctcgtctctctccgcgtcagagcagccaatccccaacgttaccgccgatcccgccccggccctccagaccgtcacgacctttgggccagaaaccgttggcaaaatccccgccgggcttccaattcatccacaccccccgccccccacacccccccccccccccggcggccccccccccccgcccccccgcaccccccccccccccccccccccccatcctccaccccccccccacacccaccccccgccccccccaccccccccccacccacccgccccccctctttctaccccgccccctccccctttcctcgcccctcccccccccaccccactacctccgcacccccactccccctatcccccccccccccctcccccccccccc

SEQ ID NO: 107493 - DNA, 346 bp, Zea mays
  Clone ID: MRT4577_29532C.1
ctttgtgttggtcgaatgcggcacagaccctgtcagttcttattacaaagggaatgtgggctcaaccacacacactcatcatcatatcatatgaaatgaacgatacagcctaggttcaggacattgtaccaaatagctacttgcaataaaaacggcgggtgtggatcttagcgctagctggcatggagccgatccagactgctgagagatccaataacgtaggccctcaccctgagcaagcgacagcatgctctgtacctacactgggctgcccactgtctcagagccaccaactgaggatgccaggacaccacccaattccacacccatacgatgctactctaac

SEQ ID NO: 107494 - DNA, 359 bp, Zea mays
  Clone ID: MRT4577_29533C.1
cgttgtgtcaacgatagccattttcattacatgaacgtccaatcaacctgacaatagtcatcggtgattgcattgaaaatacggcaagatggttcttgcggacgatctcctcaaccctactgctcaatctgaggctcgcaagcacaagctcactacccttgtgcctgcttctcgctccttgttaacggacgtcaagtgcccacgctgcttcacaatcaccaccgtacttttcacacgcccagacacgtatcatttgcgccggctgctcgaccgttctctgccagcccaccggtggtaaggcccgtcttaccgagggctgctcttttcgacgcaagtcgatggtcagcgagcgaccaacg

SEQ ID NO: 107495 - DNA, 382 bp, Zea mays
  Clone ID: MRT4577_29534C.1
aagatgctcaatagaggtggatcccgaccactaagcccactgcttcacatatcacagactagctcatgtgtaacaacggacgcacacatacatcacacatgagggctttccagaggccggtcgcctgcgatgccagactcaggtacaggatgcgatggagactcaagcacggtcgctctcagcctgaatcaactcacacaacccctgagacggaccagcgacgggcatgtcacaccaaatgatgggacatagtgggggcccgctagagccttgccaacgtgcggtgcgggacggagacacaattcccgatccgaatcccggcgcgcgcgcacacacgatttaaggggactaggtattcatgcacaacaggcccacttgccct

SEQ ID NO: 107496 - DNA, 319 bp, Zea mays
  Clone ID: MRT4577_29535C.1
aattcccggctcgacccacgcgtacgctcacacgtccggtgctgctgcgcttattggacctgctcgagcggcacgcatagggggtggtgacgctgtatacgtgggacaaccgcatgatctggtcatgcctattggccgatgtccccatggtgtcttcgatgcgtgcggtactacaccggttgggctgactagatccactgcctgattgcaccagtcgacggcgcgcaccacgttcttgtgctgcactagccggtcggaattgtcttacagatcatcccctggatcttacatcttctaatgttcgactcgaaggtcattc

SEQ ID NO: 107497 - DNA, 241 bp, Zea mays
  Clone ID: MRT4577_29536C.1
accactcctatctctgaaagtacatctacttgattactaaatagtactttcaggattctagaatgtggatagttatattttttcttgattctatgctatggactttaaaattagtgaacctgtttagagaaccatctagaatgcctagcacgtagttggaggacttgagaaaattaggctcttcattgcgcaatgagacacaggtctggtacgacatacaattggtccatgtgtgatgact

SEQ ID NO: 107498 - DNA, 498 bp, Zea mays
  Clone ID: MRT4577_29537C.1
gaagttatatctgatccattcatctttctacaattactggcctctctacgcaccgatagattgccatacggggctaataaacgttcataagccatcagctttgagtgcggagcacctggaggggcactacatcagccaagtcacgccgggccatctacgagagcacacacgatcttgccactgggtacgccaagcacgaccacagcacgttcatgatctgatgtcgcagactcgatcagctcctcgctgaagtcccagagctgattcatcgactgctagctactagccaggtcgctcgggtactgcacggtgcattcatgagagtactgaaactgtcactcccttgagatgagggctcacatctacttaacaagatgtttgacatccgtgccgtgcattcttgcacagattacaagtgcatacctgggacaactagctgagaacaacaggacccctcatgaagtggcgcatgatcaaaggaagacgcccactgtggac

SEQ ID NO: 107499 - DNA, 382 bp, Zea mays
  unsure (1)..(382): unsure at all n locations
  Clone ID: MRT4577_29538C.1
ggggtcaaagaagcagcaatccatttaatttaatttaatttaatgtaataatggggaaacaagggttcactggatgagcaattcagcaaaaatttgcatgttgggcacatggaatgaaaccaaaaggtacatgcctacgaaaacaacaaagtnacaaacacacgtttaggcggtccctttcattctttttggcgcacgcctaggggacctgggcaggcctaattataattctngaaaaacccgggaggggggaggctgggggtgggggcgggaaaggggagggctatccccaaaggggcctggggaaagggttttcctttctgggggaacctgggggcctcccgagcaaaggaaaaacacccccgtgtttaactgggggggg

SEQ ID NO: 107500 - DNA, 1414 bp, Zea mays
  Clone ID: MRT4577_29539C.1
aggttccctagccccggccacccacttaaataagagaaacacaccaccaccaattccattgggtacctcgaggccggccgggactcacgaattccccattcccttccccatcgcatcgcatcgagagccaggccagccagccacctctgcttggtctccatggccgccgcgctcaggtccccggcctcggccaaggtctcgagccccgccgccgcctccaaggtgcgccaggcgtccagagtcgcggtgggcgggttccggcagcatccgcggagccgtggcggccccgtggccgtgcgggcgtcgctgttctcgcccaagcccgcggcggccaaggacgcgcggccgaccaaggtgcaggagctgtacgtgtacgagatgaacgagcgggaccgcgagagccccgcgtacctgcgcctcagcgccaagcagacggagaacgcgctgggcgacctggtccccttcacaaacaaggtttacaacggcagcctggacaagcggctgggcatcaccgccggcatctgcgtgctcatccagcacgtccccgaccgcaacggcgaccggtacgaggccatctacagcttctacttcggcgactacggccacatctcggtgcagggcgcgtacctgacctacgaggagtcgtacctggccgtcacgggcggctccggcgtcttcgagggcgcctacggccaggtcaagctccaccagatcgtcttccccttcaagatcttctacaccttctacctccggggcatcccggacctgcccagggacctgctctgcacgcccgtcccgccctcccccaccgtcgagcccacgcccgccgccagggccgccgagccgcacgcctgcgtcaacaactacaccaactgactgatcaactccagcccaggaaccatctctgcctgccatgcctgtccctcactcgatttgtatgtttgtatggcttaggtccttcgattcgtacgttcgtgcgtggtagcaccaataaacatgcgatcgattgagttgtgtgtgcttctccattcattcacttgctctttctgcagctcgtgatcgagttgtgtgtgctccattcccaaattatgtatgatcgattagtagcgttaggggttaaccagtagccgctgtgtacttgtgtcacccttggacaaacaatgagatatttctttgtcgtcgagtaaaaaaaaccttcctgacggtgatggtgatggacatgttgctgacacgacgggatttgggaatctttgagcgctgagctgtgatgcaactgcagcgaccgctgctggtgctcttaaagcgattgttgccttgttggagtcggctgtgtgtccagactccagagtctacacgttcactgtaataacagggaggcaaggcaagtgagaaacaggatctgttacacatgctc

SEQ ID NO: 107501 - DNA, 590 bp, Zea mays
  Clone ID: MRT4577_2953C.1
cccaaaactcatgatgctccggctgctccggctgctcagttccctcctccttgtggccgttgcctcaggctatggcccaccttcctctcgcccttccagccgcgttgtcaatggtgaggatgcggtcccctacagctggccctggcaggtttccctgcagtatgagaaaagtggaagcttctaccacacgtgtggcggcagccccgtcgcccccgtctggggcgggactgccggccactgcatctcgagcctactggatctaccaggtggtgttgggcgaggacgtgaaggagggccccgagcaggtgatccccatcaactctgaggagctgtttgtgcatccactctggaaccgctcgtgtgtggcctgtggcaatgacatcgccctcatcaagctctcacgcagcgcccagctgggagatgccgtccagctcgcctcactccctcccgctggtgacatccttcccaacaagacaccctgctacatcaccggctggggccgtctctataccaatgggccactcccagacaagctgcagcaggcccggctgcccgtggtggactataagcacggcgccaggtggaactgg

SEQ ID NO: 107502 - DNA, 1351 bp, Zea mays
  Clone ID: MRT4577_29540C.1
ggggtacctaccctcgaggccggccgggaaaccttgctaccatataaaccttttcactgctccagccgccgccgccgccgtttcttcgtcttcctcgcagcgccgccgctccatcttccgctgatccgctcgctcccgcctctcgccacgcaggcggcggcgctcaggcccgtgatttcagcgacggcgtcagcggcttcccctcccgtctcttcccagtcgcctcgcgccctcgcctccggtcctccgcacaccggccggtgaccctgcatccaccatgactggtgtcagcactggattgttgacgggcttgaggagggtcatggaacagcaaaggatttcaaccgctttctgcagacaatcacgagtttcgagctctactgtttctttctctgacctcgatgagaagggtgacatggaatatgatgataactctccaaattcaaagagggagttacgaccccaaggtgtagatcccaataagggctgggaattccgtggtgtgcacagggccatcatctgtggcaaagttggacaagtccctgtgcaaaaaattttaaggaatgggcatacagtaaccgtttttactgttggaactggtggcatgtttgaccagagggtaattgggcctaaggatttgccaaagccagctcagtggcaccgcatagctgtccataatgactacttaagtgcttatgctgttcagaagctggtgaagaattctgctgtctatgttgagggtgatattgaaaccagggtctacaatgacagtgttaatgatcaagtcaaaaacatacctgagatatgtgttcgacgtgatggcaagattcaattggttaaatctggggacagtgctgctaacatatcattagatgaactaagagaaggactgttctagctatagtgaaagatgtcaggagtatgcttctggcttgaggcaagtttgagtatgtttgtgcttcttagtctcagcactactagtattagagtgatgcttcatgcttgcgtacccctctggctgggttttcattcgtttgaactctagcttatattgccaaatttacttatctgcagaatatttgagccctcaatgaaacatctctctgtgtaatttactgctactgtcttttccatgcgatgcgcatctgtcatgaactcaaaaaaaaaagggcggccgccctttttttttttttttttttggcctcgcactcctttgttgatttgcgatcgcgccatatcctcgaagacaagatcgcatgcgggcatctcccggtggcgtggtgcgtactccggctgtggcggacaggagcctgtcgtcctaggagccctctccgggtaggactctgaaatt

SEQ ID NO: 107503 - DNA, 594 bp, Zea mays
  unsure (1)..(594): unsure at all n locations
  Clone ID: MRT4577_29541C.1
aattcggcacgnaggattttatactgctatgagctacctctggcacttccactttttcatgatatgatcaatcattttgttttctttgtttcatgattgcgtcccaccagaaaaacaccggctcatgtctatgcttcctcttccaggtgcctgtgatgtgtttttcctagtagctttggattttgttatttaggtgaccgatactatctatcactacaaagtagaaatcttggagttatacattttattagagagatgaagactatttatattagttttagatgcattcggtaccaccttgtttttcagtgtcatgaatcatggccacatgagagagaaatacaggcacatccgcacatgaaaaaatgatacatgtgtgagtggctagttcatctatgagcataactaaattgaaccctgatgatattaaccttanatggttatcaaaggatgacattggggatttggactgtcttcgcattggtgttgtttttacattttttcatcatgttanaatttaatgtttangaggatttatgggcggcgttttattaacaaaactgaaaatcttgngttgcaaggatgaactcctga

SEQ ID NO: 107504 - DNA, 951 bp, Zea mays
  Clone ID: MRT4577_29542C.1
acaatcttcgacaagtgaacctgcacagagaactgctgtagcggaatccgttgacgaagacgatgatgatctagaaaagataagagaaaggctcgccaaagtgaggtcgtaaaagagaatcgatgtgctgacatgcgtatgatagtccatttgatcagaccacagctgccgagttacttgacaagtactactggctactagtgcaagtatggctcgggtctctgccaatgcagttgcacttgttgcactcgtctccgttcttctcacgtatggctgctgcgcccagtcgccgctcaactacaccggctccttggccaaagcctccaaggctagctggtcatggctccctgccaaggccacatggtacggcgcgcctaccggcgccggtcccgatgacaacggtggtgcttgcggctacaagcacactaaccagtacccgttcatgtccatgacttcctgcggcaacgagcccctgttcaaggacggcatgggctgcggcgcctgctaccagatacgatgcgtcaataacaaggcctgctccggcaagccggagacggtcatgatcaccgacatgaactactaccctgtcgccaagtaccatttcgacctcagcggcacggcgttcggcgccatggcgaagcccggccagaacgacaagctccgccacgccggcattatcgacatccagttccaaagggtgccatgcaatcatccgggcttgaacgtgaacttccacgtcgagcggggctccaaccccaactacctcgccgtgctggtggagttcgcgaatcgggagggcaccgtggtgcagatggacatcatggagtcaaggaacggccgcccgacggggtactggacggcgatgcgccattcgtggggcgccatctggcggatggactccagccgccggctgcaggccccttctctctccgcatccgcagcgaatccggc

SEQ ID NO: 107505 - DNA, 245 bp, Zea mays
  Clone ID: MRT4577_29543C.1
aagtaaaaaggtaaaatggttttgggttattttctaaaatccaaaaaacgccaaacaaggccagaagcttggccggagcgtgaaaatcccagcaccccctattgagctttccggcaatgaacagatagcggattctcaagggaaagggtaaagggccttaaaattacgaaaataccagggttcctggattccgaaagaccaacttttaacctgcaaacggccaaataaccccaaaaaacaactgg

SEQ ID NO: 107506 - DNA, 286 bp, Zea mays
  unsure (1)..(286): unsure at all n locations
  Clone ID: MRT4577_29544C.1
ggggccccgcggcgagccaagaagcagggggagcccaagacacccacaggaaacgacagcacccccgagggggagcccccagacaccaccgacaacgacaaggccacgacccaggacaaggaaggcaaccccccgaaccagcacccgcggggggggggggggcaagcanccccgaggacggacgcacacagggccgaccacaacacccagaaggagagcacccaccaccaggggcaccggcgcaggggaggcangcagagccacgagaagaccccaaccggaaaga

SEQ ID NO: 107507 - DNA, 348 bp, Zea mays
  Clone ID: MRT4577_29545C.1
cggtgggacggcgagaggctccggtgttactaccgtttcgaatcaagccatcgcagggattcttcggttgtcagcgtgttaacctaatgagcaatataaagattcgtatcaatgtcctcggcgataaagaagggctccagcccagtggggatcaccagagggaccacatccaactggacggctggaacgacccctgaatcgttaacggtgacatgatctacctgaacaaaaattgacactatgttcggagacgtgtaaggatatagcacccaatctcgcggtgtcctagatcttaatctatgaggagaaggagtatcttgggcatagataccagttctattcggaagt

SEQ ID NO: 107508 - DNA, 281 bp, Zea mays
  Clone ID: MRT4577_29546C.1
ccggccggggatttcgtagtaagtcctcgaccatccctgcaaattaccgcgatggctcccaagatcctagtcatccttgtgttcctcgccgtggcctcaccggcggctctggacgccttcgatgtgatagagatgctggacgacaagcccacgtactcgacgttcctgaagctcctgcaggacaccaagggcacaagcgaggcgaatcagctccggtaggtaagactactgtgcgtacccgacatatttgacaagcctctggcgtccctgccggacgataa

SEQ ID NO: 107509 - DNA, 362 bp, Zea mays
  Clone ID: MRT4577_29547C.1
ctggggcaagacaacaaaaaatgagggggatgatgacctaaaagtagagggtgactgcgtccaccattacaacagatactaaccaaggctataaaatcctacatgcgcactggtactacatcacgaatacacaaaagtacaacagggtctcaagaaatgtacgacaacattgggggtacaaacgaaacaaactcgaggctgacaatgctgaattacctgaacaaagcacagacacgggatggctctaaaacatttacttgcgctaggacgtcaatcagctcctcagctattaatcattacgcgcttgacttactaactcaaaacaaggagtggcctggccataagacttgaggacacatttg

SEQ ID NO: 107510 - DNA, 316 bp, Zea mays
  Clone ID: MRT4577_29548C.1
catgctctcgcgtacgtgagctaattatgcgcctcgagctaggccagatagccaaacattgccatggaggtcctacagctaaagagaagaggagggtctcttcttcaggaaatacaatagccatgagtaacaatgattcaagtgaagcacaaacatcaaatgcaagtgcagctcctgaaggaagaggaagaggaaggggaagagggaggctagcaacattacttgggcttgaatgattatgagacttatatgctaggtgccttatatgttaggtgccttcttttggatgaacttgaacatgtgatgattatgggac

SEQ ID NO: 107511 - DNA, 2080 bp, Zea mays
  Clone ID: MRT4577_29549C.1
ggaacgcacattctcgagtggggaagggtccactccagtatcccctccccgacttgcaacctctcctgaatcccaccgatcacgcgagctccccgccgcgatgtccgatcaccgagcgaagcggccgtccgacggcgcagccactgtggcatcgccggcggcgaagcgcgcccgcgacccgcccgcgccggcgttacccacgaacaaggaagctcccgacatggcccccaagacccgcatattctgcgacatcctggcctcccgcgccgacgacgaggaactgaatgccgagctcgacaaggccgacatccgcgtaagcatcgctgacgtcgagcaggtgctccgcttctcctacgcgcacccgcgcgccgccgccgccttctttcgctgggcgggataccggtacctcggccacgagcactccccctactcgtggaacctcctcgtcgacatccttggtaagaatcgcctcttcgagcccatgtgggacacagtcaaatctatgcagtcgcagcagctgctctcgctcgccactttcgcctccatattctcctccctggcggcgacccccggcggttccccgctcaaggcgttcatggacatgccccgctacggcatgacccgcgacacgccggcgctcaactcgctcctctccgcgctgtgtcgtgccaaccgcctcgacgacgctcgcgccgcgatcccagtagcccgcgccgaggctggcacgcgcccggatgccgactcctacgccatcctcctcgagggcagcgaggccgccgccgacctgcgggttgcgcgcgaggtgttcgacgaaatggtgcaggccattggattttatcctgacaacgtgcctgcctatgactccttcctcactacgcttgtttcaagtgactcctccacggcgctaccggaagcaatggagtacctaaatgtcttgagcaggcacggctgttcgccaggagagaagttcttccgtgctgctcttgctgcacaccttgatgcacgacaattgcgcggagccatgaatctctgggatgactttgttgggcgtcgaggactcgtcccagatatggaaatgtacaacacaatgatcaagctgcagggcagtctcgggcatgctgagctgatagtgggttatctcgacgacatgatctccaatggagtcttccctgataccaacacatacaatgtggtcctccagcttttgttgaagggaaagaagcaccgagaggcagcggcaatatttagcgagatggtcaagaacgaatgttggccaaacgagggaaattgttcacttgcacttcgcatgtttttggatacacactattgggagactgggatcaaagtctggtgctgcatggtggagaatggcttgccacctttacaggagtgtgggaacatgcttgtagcaaagctgaaggatgacaggctacctgaggcatgcaaatatgcagaagacatgattgatcggggtatcaagttgagttcagcgacactgtccaagctgaagcagcgcctgcagaggattaagaaaggagagatccatgatcacctgcttgcaaaatggaaggcacattagtttgttgtgctccctcgtatgggtaacctggtgcgatctcagtgttgacaatgaggttgagccttttatcactctgcaacgtttcaaacaacagttggaagtccctttctagtttctacattgaaattatcatattaatcagctggagcatttgggtctcaaggagtgagctggaacatcttccaagaaattctaccgtctgtatcaaatggctaagcctttttcaagaaagagtttgcccaggttatccatagagcatagaagaaatatttccttgaagaatgactagagcgtcagttgtggtctttttttaatatcttttgtgtcctttttttgtttcatgaattttgttgcttgcagctgtctggctgcaatttaggtagctgttccttttatgtatttgcataattatcaatgcaacattctaggcgtaaaagtgcattctgacgtaccaggtgaaaattgtttggtatctccaaaaaaaaaaaaaaaaaagcggcc

SEQ ID NO: 107512 - DNA, 308 bp, Zea mays
  unsure (1)..(308): unsure at all n locations
  Clone ID: MRT4577_2954C.1
gaagaagccaagccagangagccngaagccgnggcnccagcgccaggaagcaacccaacggggaacncagccccngcnccngccgagcccgcngcngnnccngccccagcgcccgagaccgaancagnngccgagccngcngcngnacncgccccagcgccngaaaccaaaccagangccaagccngcngcngnnccngccccagcgccngaaaacaaaccagangccgagccngcngccgccgcngcnccagngccngacaccaaancagangcngagccngcngcngcnccagcgccngacaccaa

SEQ ID NO: 107513 - DNA, 526 bp, Zea mays
  Clone ID: MRT4577_29550C.1
gtgatttggctttcccgtgtctttcctggtgatgccttgtttggggttctgtgggtttgggtgggaagagggccatctgcctgaatgtaacctgctagctctccgaaggccctgcggcgctgccttgtgtgagcgtgtggacagtggtggccgcgctgtgcctgctcgtgttgcctacatgtccctggctgttgaggcgctgcttcagcctgcacccctcccttgtctcatagatgctccttttgaccttttcaaataaatatggatggcgagctcctaggcctctggcttcctggtagagggcggcatgccgaagggtctgctgggtgtggattggatgctggggtgtgggggttggaagctgtctgtggcccacttgggcacccacgcttctgtccacttctggttgccaggagacagcaagcaaagccagcaggacatgaagttgctattaaatggacttcgtgatttttgttttgcactaaagtttctgtgatttaacaataaaattctgttagccagaaaa

SEQ ID NO: 107514 - DNA, 714 bp, Zea mays
  unsure (1)..(714): unsure at all n locations
  Clone ID: MRT4577_29551C.1
cgatgattgctggtttttaaaaagggctgtttggtttgggatgtttgaatgccttttacaaatagtgtatttataaaactaattacacaactaaagactagacaantttattaagcatcatgtgagcgaatcatgaactaattaggtttaatatattcgtatttagtaattagttttgtaattcaatgcttctaactagcattcaaacatttgatgtgatagatactaaaatttagtcagtgaaagccaaacagggccttagccttcattgccccatgcttacttcagcagtgtgttcttaactggaacacaacaatgtttagtatactgatgatagaccctttgttagcagtaaaattttagtgctattgtagctatgactatccattgttttattctagaatttgaccatgttgaaagaaacaccttttcttataggaccgtgttgaattcactgttctgctgcttccttgcaggcttgctcatgcttcagttggttcaggaactgatgcttccttgcatggttgctgatgcttcagctggttcagcagctgataggtgccgttgaagatttggatgaaccagagccgatcgtatcattttcacatgagctgtagtcccatcgtgttctccctgttgtgatgttgtgtggtagcaggacgtgccagaacttgactttgagaagctgaggttcagtagtttgagctgtttttg

SEQ ID NO: 107515 - DNA, 362 bp, Zea mays
  Clone ID: MRT4577_29552C.1
gcttcggtgtggtttttttttttttttcggggctgaaaaaatacttaagcttttttgccttaactcatggtggtgcggattaatttccaccggggatgttccccacataaatgatgacctgcgcccatgggacctactctttttaaactgtaaaaaaaaatctgttttgttttaaaagggaataagactggtttaggtgaaagcctgaaactcatgtcgttgctaaagtttcccgacattttttatttaaaaaaaacttgaggtttcagatgttacctatgtatgaaacggggcccccatacaggcttaaggtttcagcattattacggtgggggccattggcatcaataagaagggctggg

SEQ ID NO: 107516 - DNA, 717 bp, Zea mays
  Clone ID: MRT4577_29553C.1
aagatagcctgaaaaaagcaccgatcaaagaacgatccctcccaaatcaatcgctcacccttccgcttcctaacaccagctaaatcgtcgattccttcgaccagcagctcgaatccccaccgacaatgtcgctgatccgtcgcaccaacgtgttggaccccttctccctcgacctctgggaccccttcgacggcttccccttcggctccggcggcagcggcagcctcgtcccgcgcacctcctctgacacggcggccttcgccagcgcgcggattgactggaaggagacgcccgaggcgcacgtgttcaaggcggacgtgccggggctgaagaaggaggaggtgaaggtggaggtggaggacggcaacatcctccagatcagcggcgagcggagcaaggagcaggaggagaagaccgacacgtggcaccgcgtggagcgcagcagcggcaagttcctgcgcaggttcaggctcccggagaacgccaaggcggagcaggtgaaggcgtccatggagaacggcgtgctcaccgtcaccgtgcccaaggaggaggccaagaagcccgaggtcaagtccatccagatctccggcgcgatgagatggactgcagtctgcagagcagtggtgtggagtttcgcccggtcgtcgcgatgaaataaaatcagtcaggctgtctagtgctctaatcttgtgtgcgaatggtccgatgttgcagtca

SEQ ID NO: 107517 - DNA, 322 bp, Zea mays
  unsure (1)..(322): unsure at all n locations
  Clone ID: MRT4577_29554C.1
cacttatcacattcacactgcttctccctaccatattcatctggtgtcttacgtgatctgttttctgcttgggatttgtatgactattcaccaatctcatcatcatctgtcaaacaacaatttgtgttttgaatggggttttatctnttcttttcatctttnccnctgagactgagaaataaatcattttgttttggtcgaccgtttgtgtaacatcgaacttaacttgctgtgggacatcttttgtttctgctgaaaaaattaaaaaagcgcccaagnaaaactaaagtggggggtggtaaaacccaaatatatgtttttt

SEQ ID NO: 107518 - DNA, 256 bp, Zea mays
  Clone ID: MRT4577_29555C.1
ccatttttgatgacttctcacactatgagaaacgccaagaggaagaagaaagtgttaaaaaggaacgtcaaggtcgtgggaaataaaaggcagttctacacagactgcagcaacggttgcatctgcatatcctaagaggaaaaaatgaccttcaagagaattaggacttttttcttaatttcactgacttcagagacgattgcagacttgcagtttaagtattggaatttcacaaaagacataggacttaactgga

SEQ ID NO: 107519 - DNA, 720 bp, Zea mays
  unsure (1)..(720): unsure at all n locations
  Clone ID: MRT4577_29556C.1
gacgcctgcaggttcggtccggaattcccgggtcgaccacgcgtccgctccaccatgagcagtctggccagtggagtccccaagacagacagtcacggccccctgcttagcctgtgggggcttgggcccggcctcttggcccactgcctggagttgtagcctcctgtagccaggccgccctcctgccatgaccattcctgtctctccctctctgcaggcaaatgaagcaaatggatatgaacttcatctgtgaaaatatttttttttctccatttttgttccatttgggggcttcttttattggtttctatatttgattggtttggcgagagagcagcggctgcctaggggctggggatccccttcatgccgaggcgctccctctctcactctgtgtgtctcatctttttcctttccaaaattgggatccttcatgttgagccagccttagaaaatagcaagaatttaacctctgccccgccccccaaaaaagtttaaaaattaaatcacaaagagcagaacaaaacctataaaatgatatatgtatagaaatatataaatctctattccccagcctccgagcccaccctctgagggaagcggntcactatctccctactgtctgnngccctattcttgnttttaataaactttttaaaaggaaagaaacagtcactattgctatctctttttttcttttttcctttttttttttctttt

SEQ ID NO: 107520 - DNA, 1035 bp, Zea mays
  Clone ID: MRT4577_29557C.1
aagccctagcccctcgcgccgccgccgccgccgccgccgccacaccaccaggctggagctcgccgctcggggctagaggtgctcgccgctcgcgaccatgaagttcaacatcgcgaacccgaccaccgggtgccagaagaagctcgagatcgatgacgatcagaagctgcgtgtcttttttgacaaaaggatctcccaggaggtcagtggtgatgcacttggtgaggaattcaagggctatgtctttaagatcatgggtgggtgtgacaagcaaggtttcccaatgaagcaaggagtgttgactcctggacgtgttcgccttctgcttcacaggggcactccgtgcttccgtgggtatggcaggcgcaatggtgagcgtaggaggaagtctgtccggggttgcattgtcagccaagacctgtctgtcattaacttggtcattgtcaagaagggtgagaatgaccttccaggtctgactgacactgagaagcccaggatgagggggcccaagagagcatccaagatcaggaagctcttcaacctttccaaggatgatgatgtacgcaagtatgtcaacacataccgcaggacattcacaaccaagagtggcaaaaaggtgagcaaggcccccaagatccagcgcctggtgaccccacaggtcctccagaggaagcgtgccaggatcgcagagaagaagaagaggattgcaaagaagcaggctgaggccgcagagtaccagaagctgctggcacagaggctcaaggagcaaagggaacgcaggagcgagagccttgccaagaggaggtcgaagctctctgccgctgccaaggcttcggctgccacatctgcctaaggaatggttgctttgagttgatttaagaaagcccccctacctacccaagacaatgttatagctgaagaaaagaaccccatgtgctatgtttgatatgttcggaacctctactttctagcttcatctgtgcaattttgcgtggacatgatgctggcttgtcgaaaattttttgagtacctgtg

SEQ ID NO: 107521 - DNA, 966 bp, Zea mays
  Clone ID: MRT4577_29558C.1
tgtcgaattccatgacgatttatttttctaatagtgtgcaaaagattttcccaagagataccaaaaatcaattgtctcaatccaattaattcctcggtctctcgctcgtccagacgtcggttcgctctgttctccgctctgaccgattcccctgctatttttttctctgagtgccatctccctgcagccatggtcgagctccttttcccctgccatggacgtgcccctccctgcacctcccctccatggtggcttccaacatccacgtcgccgagcttctccctggccgagggcaccctggagctcgtcgcgccccatgctcgggcttgctccctgtctgtacccatctctcaagctgctgccacatgcccctatgtttcccctcgcagttgtagcctcggcgtcatcgtcaagatttccttgttgtgccttgcaccgtcgacgttagttgggcgttcgataaaattcctaaaccaaccagcatgttttgaatagccccgtccgtggcgtcgtcgaccctcgctagctgtcgccatcacgtttggcgctttgcttgatcagtgaagtgtcgccgagtgggcaatgcgcgcaactagtctctgttcttccagggtaactacagtgatggtttactgtattttataaaaaattgattgatgtcgtgcgtatgtatgtgcgtacatgtatgtgtgtggtggtggttgtttccgcatttgaaaagcaggcgtagtgttgacatgagaattcggtttatagtgcaaatcatgtgaacaatgcatcagtaattatgtatgcaaatcatgtgaatgggggggggggtcaatggggacggttgatgtgtgtggggacggagtgccctgacatgtcgtgtatttaggtttaccttgcaaggttaaaactcgattcaaatcatctacttctcgcagctaatgagactgcttatccatggaataaaaaaaaaaaaaa

SEQ ID NO: 107522 - DNA, 308 bp, Zea mays
  Clone ID: MRT4577_29559C.1
ttcataatcacaccatttatttcacactatcaacgacctaacaacaagaagttttaatatattatcccttcttgcactactagccctttttgtgagctcaacaaatgcgttcattattccacaatgctcacttgctcctaattccattattccacaattcctaccaccaattactttaatgatcttaaaacacctaactgtacaagccaacattcatcatcaatcacttgcttatagcatattacaacaactatattaccaattgcaacaactattctttatcaatctaacaatacaatccatcacaa

SEQ ID NO: 107523 - DNA, 332 bp, Zea mays
  Clone ID: MRT4577_2955C.1
agaaatgaaagaggggaagtatttagaaaaatgaatagaagcatgggaggggacagggcgcattgttggaatcagcctgttggccacgcgggccccagccccgactccccgagcaccatcagcaatttcagcagtctaccagtcctccctccgcggccgtctgctacttctgtgatctctcctcctcccccgtctttcgtctccggttgcgtccccgacgtcctcgcctgcggtgggagggcggggcggaggagctggaggtggggggtagcggctgccgccggccatggagaagaggaagcggatcctggagcggcgggatcggttggacc

SEQ ID NO: 107524 - DNA, 436 bp, Zea mays
  Clone ID: MRT4577_29560C.1
gggcgcaagcctcccgctcccggctagctgaggacggtacacttgctcagaggtgcgacgtacgacgtcgacgacgcatgcgccacacaggggatcccagctctccgccgccgtgccccggatccacggcctccggggctacgccgcgcccagagtccgcggtgacagcgcttacgtccgtgagggtgggcaggaagaggtcgacgactcatggcatccgatgcacactgcatgtctaactgcagcaacctgatctggatgacgactaggacactatatatggtcagctatgagaagatgacttgcctatcgtcagaagagcatgtgcactaaaatcccggagcgtttgcaagtacagttgaacaaagtcatccggagacacaactactgtcactatcagatgatttaacgctagatgatcacgattcagagcgtg

SEQ ID NO: 107525 - DNA, 312 bp, Zea mays
  Clone ID: MRT4577_29561C.1
gcgatctttaaaagagcaatactggggcttgggctgctttattgtataagggaaaatatgtagctttaaacctcaccatgtaataagttaaaatagaaaatgaggataaggtgctgattccaaatcatttcctgatcctgtgtacatcactagtatatcaattcggtcaactgacaaggcatcaacttaatgcagccacggtgacaggaccaaccaatcatggtgttactaatatggaattgtccctgaattaaacctaagtaacctatctcctgggagtaggccatcaatcccacctagttcggaggtctt

SEQ ID NO: 107526 - DNA, 137 bp, Zea mays
  unsure (1)..(137): unsure at all n locations
  Clone ID: MRT4577_29562C.1
gggnggggggnntntttagaaccaaaagtggttaaagggacagactttaatttcaaatgccaatacttgagccgttcaacaaggggtggtgggagggaacacccaaacctttacagggcacaaacaaaggtttttta

SEQ ID NO: 107527 - DNA, 555 bp, Zea mays
  Clone ID: MRT4577_29563C.1
ctcgtaggtcatgattgggagcatattggcgtccctgttatggctcagcgccaggcatagttaatgcaaccggtcacttatgacaggttggtctcggaccgggtgagggatccactcgagtggatttccttcggctcatgagatcccctgtctagctccgtcaagcccgaccccaggctcggtgccgcggggctcatcctaggacgagtacttatagggcagacgctacctatctactctagctgacagatgggcccagatgccagaggcttttctctagcgcacttacttaccgatgggtctaggaaccggtgatcttatccccgataatacactatgtataaatgatgtgggtatgactggagctatgattttttttactttttccaataccaacagagtgagttgtccgtagaattttcactcgttgcttacttgcccttccctggttctctcaatcgcttccaattccagaggataggatttgttgtccgtttgtgcaagtttgttctccaagaattattcatctctttgttatctatttttttcaattgc

SEQ ID NO: 107528 - DNA, 1122 bp, Zea mays
  Clone ID: MRT4577_29564C.1
ccggccgggggcttttgctgactttcgtttgacggcggcgagtgaagaactacttcctccctcccttctgccttctcccctgccccctctctcatcactctcagatctctccctccccctccctccttcccttcctctctctgaattctgcacacctcgccgtccacgcattccgccgctcgccctcgcggatccggcagctctttcttcgccgtcgttcttgcctccgctgtcctgctctcctggaggctgctgttgggtcaccagtggctggactcgaccccgcggcctccggggggtgggttcgctggatggttatcgcctcctgatccatccggaccccggatcctctgcaaaggcaccgcctttgtgggttgggttctctgcgcccatgcagaagggtttggcgcgtcggcggtgaggcagggctctggtttagttcttgcgttggactagtccggagatgcttcgtggaacggggcacgggggcggcgatgcgcggaggcgggcactgcgctcgtcgcggcggcatctgccggggtggatctggtggcttctcgggatcttcctcctcgtcgggctcatgctcttcgtcctgcaccacaaccaaaaggagcagttccggccgcccgtcgtggataatggttcagcgatccaggaagtccctcgtgaaaaagtgaatttctcagaagaacttttgagcagcacatcatttgctcgccaattagtggatcagatgactctagcaaaggcatatgtcatccttgcaaaagagcatgataatcttcagcttgcatgggagcttagttcacagataaggaattgtcaaagattgctatctgaaggggcagttaatggaagagcaatcactaaagatgaagcccatcctataataagccggctagcactggtaatatacaaggctcaggactctcactatgatatcagcacaacaatacattgcatacctggtcttgtgtagctttcagattgctcaattcggcgagatcttccgaaagatccctgctttgctgttattgatgaagaattgtgagaaattaggtgtctctatttatggttctggcacctgcttctgctacgtggatctcgattagcactatg

SEQ ID NO: 107529 - DNA, 606 bp, Zea mays
  Clone ID: MRT4577_29565C.1
ggccaactagcaacatacgaagcacaaggtggtaccacacagtggcagacaaaatacacagcctgcttatgcattcacggacttttggaacgcactgatgccgccaccctgctcccgcactgcgtcccaagctgctataggtagcctctttctccagatcctgagaccaaagtactctaacggtgtgtgaaaacgcaattcatgaaacctacaggatccaacgagcaatgaagctgacatcttaccttatatcagccctgtgtatacctagcaaccaatacataacctcctattcacaaccactaacacttcaggttgcatgctattgctcactacaacatgagggaacaacaactacaacaacttgcactagcaaaccttgctgcctactatcagcaacagcacgttctagcattcaaccaactaggttaattgaaacctggttcttattggcaacaacatcaactaccattcaaccaggtacctgctgcgtacaccgaccaatacgctgcattgaaccaactaacaacatagcactcttctgcttattgacagtggcaacaactactaccattcagccagctagctacgatgagccctgctacc

SEQ ID NO: 107530 - DNA, 388 bp, Zea mays
  unsure (1)..(388): unsure at all n locations
  Clone ID: MRT4577_29566C.1
cccgaagcccccacggcgcaggcctanntgtaggcggggcggaccagggtggggccgccaaangcacnctacttggcggcggcgcaggggagatgtgcgaggggaggcggccggtggacgcgagccgggctgtgtgggcggcggcggcagatctactgcggatagaggcggcggcgcgggcgcgccttgctgaggcgcttgcggatctggagcgcacacgttcccacgccacctaactacaacagttcatcgaacagacatgcgggaggcgcctttttctactataggagacccacggcctgatccattagatccactcggcgcctcaccagtaccaggaccgcgatcaagggcaggttcttgagctcttcgtcatcggtgttttttt

SEQ ID NO: 107531 - DNA, 439 bp, Zea mays
  Clone ID: MRT4577_29567C.1
ggtacaattccccttcacttgctcgcttcctcaaaatctccccgatctgacgaccctgccgctggtttgcgcctctcgccgagatcgccgctcgcttctgcctactctattcctccctcggaagggggctcttggcctcgccggtcatcctagtcgagctcgtcaccttccactccgcggccggcggcggcagcgaaccctcgcgcgtgctcctcgcctctggcagcggagctctcctcctcgtcgccggattgctaggcgccgtcccgctgcgtcgtgtacgtctgtctttgtcgtggacggagggaacacaagccatccacctgtaactcgcggcaggtcttccggaaccctccccttttccccaccacacaacatgccgacgccgtctcatcgccattgccctaaccatccaaaggggggtcacggtgactgtgct

SEQ ID NO: 107532 - DNA, 225 bp, Zea mays
  Clone ID: MRT4577_29568C.1
ggaagtgaccctgccaccgagccatcgcggacccagagagcttcagcggagggagtcggagcgcacgctcagcaccatggcccagacgcccgcattcaacaagcccaaagtagagctgcacgtccacctggatggagccatcaagccagaaaccatcttgtactatggcaagaagagaggaatcgacctcccggcagatacagtggagggactacgcaacattat

SEQ ID NO: 107533 - DNA, 334 bp, Zea mays
  Clone ID: MRT4577_29569C.1
cttcaacgaccagcttcacattttttaccccagacaccccaccaagaccttttgtaactacaccatggttatcatccacaaccctgacaacggcacatcaagaattaatctgccctcttgctccaataatattgcccccattatcttccctaccattatttaatcacttattctatttaaagcaggactaacaatccgatactcaatgctagtaactcgcaccacaagtaccgcttgaaaagaaacatctcacccaaagttctttatacattcattaaccctttataatatccccactgtatgatgtaaccaccaacacatttttcacaccttt

SEQ ID NO: 107534 - DNA, 574 bp, Zea mays
  Clone ID: MRT4577_2956C.1
aaagggcccaagggggaccccttaaggggccccaaaaatttagggtttaacgggtttttttttttttaaaacccaaccctacagggggtgaaacggggggggcccccaaaaacgggggttaagggggaaaaaaattttaattttgggggcccttcaggggtcaaaaaaaatttttttttttggggggggaaaaaaacggggaaaaaattttaaccctcccaccctttttaaaaagggggggttttaatggcccctttttgggggccttttttaaaaaccttacccctttggggggcctccccttttaaaaccccttatggtttccaacggccaaaattttttaagggccaaagttaagggggttccaaagtttgaaagggggaaaaggccataaacaaacgggcccattttaaaacccagaaaggtttttggggggcccgggggggaaacaaaccgcaaaaatttttgggggtgccccttaaaggggggaaaaaaagtttttcgtggggaaaaaccaaaccttggggggggggccttcaaacccggtaataaaagggggccggccccccccggg

SEQ ID NO: 107535 - DNA, 674 bp, Zea mays
  Clone ID: MRT4577_29570C.1
ccggctccgtgcacgcccccgcggtgccgtccgtccttcacctcgtcaggcggcttggcgccaagcttgtcgtctccgtggaccgcagctgtgaccgcggcgagctgcccttcgccgcgcacttccagtcctgcgtgttcctgctcgagtccctggacgccgtcggcacgggccccgacatcaccgccaagatcgagcgcttcttgatccagccgaggatcgagaggtgcctggcggagaggtaccgcgccgcggcggcgggcgacaagacgccgccctggcgggcaatgctcgtgtcggccggcttcgtgccggtgcaggcaagcagcttggcggaggcgcaggcggaggcgttgctcaagaaggtgcccgtgcggggcttccgcgtcgagaagcgcgccggctcgctcgtcctgcattggcaacgcggggagctgctctccgtgtccgcctggagatgctagcaccttgctgctgctcaatctgccattgtttaaggatcctgatatatgtatcttagatagaatccacaagtctgctcgtgctttgtacaatcaaatgggggttatatggtgtatgaaatgttccctgcactcaggcattggatgcttgttttttctgtgaagttcatgatcatgagattcagaaccatgaatggaaattaagttcctctt

SEQ ID NO: 107536 - DNA, 531 bp, Zea mays
  Clone ID: MRT4577_29571C.1
gaagcagaaagctgggaattgtatcttttagttttcggtcccttttccctgctacaagacacgatacttatacgatactggactcctcaccacacacacggccaacaggccgggctcacttagcccactctgcaccagcccaatgagaattggggcgacaaacttcttctctgcatctcatggttctcaggcagttggagctcttccagcacagacagactggtaacatttcctaacattccccccttcttaagcttcggcttgcccccaagctgatacatggcatcaattccaccgagatcccaaatcatgacaaagaattgttctgcaccttggtctgctagcagcatcttgagcactttgatatgtccctcactacacagtctgaaggaaggccatggtattggccttaattgaacagaatcattgtgcaccagcgcagcagcacccatatcactaaatatggcataagcttgatcagtttgcactttgaggagctgattgtggaagctatcaacttcatttggaaat

SEQ ID NO: 107537 - DNA, 303 bp, Zea mays
  Clone ID: MRT4577_29572C.1
tcttcgtctgtgttcttgggcgtacgcggacacagccccgatccgaatcgtcgaacttgcgagcctcgccgatcccccactcccctcccctcgcttaaagatgcagatattctgtgaagaccctcaccggcaagactattaccctcgaggtggaggcttatgaaatcattgacaatgtcaaggctaaaatacaggacaaggagggaataaatcctgaacagaacagacttatcttcaccgtcagagaaaaatgaggaaggaagcacacttggtgaatacaacacacagaaggacccacccctt

SEQ ID NO: 107538 - DNA, 794 bp, Zea mays
  unsure (1)..(794): unsure at all n locations
  Clone ID: MRT4577_29573C.1
tgggtccctcgggccggccggcctagtcccttcgngaggccgtggctccctatgcttccctccgatgtcgcctccctccagatctgccgcttccctgcctctgctcatcgattcggctctactacccaccacgtcgtccctgtgtcggctcccacgcatcacctccatggtggcgtcgccaggaccgactcctccacgaccatgtgtcacccgtcttcgcctcctctggggttgcaccacctcccctttgcggtcgaggaagacacatgatggaggacaccgaggaagcggtcctcgtcgcaggggagcatgatagggcccggggcaaccgagaagccgtactcctctgcctgacgcggcagatccaggaacgtcgggtggctgaggtgcgtcaccagcaccgtgactcacctttgttgcatctgcacggggcaatccgactcccttcgctcatgttgtcacaacaaggccacaacctgcaacaaacaggtgcctccatttctgtggaatgagcacatttcccttcgaagagagcgacggacaacgagcgagcgagagacccgacaaccatggcatcatgttccaattctgtctgttgaccatcccagcaccccctatcccctcaccgtgtctccactaagggaccccttccctctcgtgacctgtcgtcgtctcttccctttggttgacttgacttgctgcgttgatggcaaggttgaacttgtattacttgggcactaggggggtgtctactgtccagaagtaaaatatctctgatgcataattttttgttc

SEQ ID NO: 107539 - DNA, 1326 bp, Zea mays
  Clone ID: MRT4577_29574C.1
cgttcctccgcaaataatttggagtcttgttatggaggacgagggctactgtcttggctaatcaaatcgaccgatctagtggctggtgcccaggagaagggacgcgggcagtgcggctcgtcgtggtcagcagcttgtggcgaccggtcgccagggaatcaatcaattcaatcagaaagttgcaattttgattgagctcgattcgtcatccacaagacattagggaatcgaaccaccacaaagcaagaaggcagtccagtgcatagagagagagagagagaccaagaagagaaagagaaagggaaagagaagcaaagcaatggatccaccgcatcaccgtgctgtgctgcggcggcctcgtattgctacctcgagccggtcgggattttatatcgctctcctccctcctcctcctcctcctcctccgtaggcaaggcaaggggggcaaggctctaacggagatcggatcgactggcctgtgcagtctccctccctccctccctccctccctccctccctcatgtccatatataccaaaaaatctccgccgcgccgccattagctagctctcgtcgtcttcgttcctccgcaaataatttgttactcaagccgaaggaggacgagggcgacgggattggctaatcaaatcgaccgatctagtggctggtgcccaggagaagggacgcgggcagtgcggctcgtcgtggtcagcagcttgtggcgaccggtcgccagggaatcaatcaattcaatcagaaagttgcaattttgattgagctcgattcgtcatccacaagacattagggaatcggaccaccacaaagcaagaaggcagtgcagtgcagagagagagagagaccaagaagagaaagagaaagggaaagagaagcaaagcaatggatgccgcctccgcttcgtcgtcttggcaagacctgcccccgcgcctgcaatcctacgacaacagggcgccgctcctcctgcccgtcaagatcatggacgccgccgccgacgacaagccggaaatctccgacgacacggcccaccagattagcgttgatccttggtatcaagttggcttcgtcctcacaaccggggtcaacagcgcatacgttctaggatactctggatcaatcatggtccctctaggctggatcggcggcacatgcggcctcctcctagctgccgccatatccatgtacgctaatgctcttcttgcacggcttcatgaagtcggtggcaaacgccatatcagatacagagaccttgctggacacatatatggaccggaaattacgggcttacatgggctctgcagtacattaacct

SEQ ID NO: 107540 - DNA, 2800 bp, Zea mays
  Clone ID: MRT4577_29575C.1
aatggaatgcgagaaatctgcgtcgctctcctcctcctcctcctcctccgtaggcaaggcaaggggggcaaggctctaacggagatcggatcgaactgcctgtgcagtctccctccctccctccctccctccctccctcatgtccatatataccaaaaaatctccgccgcgccgccattagctagctctcgtcgtcttcgttcctccgcaaataatttgttactcaagccgaaggaggacgagggcgacgggattggctaatcaaatcgaccgatctagtggctggtgcccaggagaagggacgcgggcagtgcggctcgtcgtggtcagcagcttgtggcgaccggtcgccagggaatcaatcaattcaatcagaaagttgcaattttgattgagctcgattcgtcatccacaagacattagggaatcgaaccaccacaaagcaagaaggcagtccagtgcagagagagagagagagagaccaagaagagaaagagaaagggaaagagaagcaaagcaatggatgtaagtcttccttcctgcccactttgcttgcctcctttttctctctctatcaattctattctatctcaccacttgctaccttcttttctttcttttttattctatctcgccacgcactacagccctctgctagctctgcatacaaacaccatgtggtggtatgtattagagatggtgctgattgcctgcccatgcccaggattgcgtgagccatcgtcactctgctctgcctgatcctgttgtgctaaacatgccagtcagcacacgtattcagatttctttttcctgtcttgtgctgtgttgctgcattactcctatcaggcatcttgtatgtatcacgaggaagaaagacacgtatgcagcagcaggcattcaattgcaatagatagattttcttctaattgattgatacatgcaaccctccatcagtattcaatggacatgttgccaccacttttaaataaataaataaatgaaaaatgatgcgagctacttttggtgttgggggaagccaccgcatcaccgtgctgtgctgcggcggcctcgtcctcctcctcctccctcctgccctttttataggccgcctccgcttcgtcgtcttggcaagacctgcccccgcgcctgcaatcctacgacaacagggcgccgctcctcctgcccgtcaagatcatggacgccgccgccgacgacaagccggaaatctccgacgatacggcccaccagattagcgttggtacgttcctctttcctcttgatatgcgcactcctggcttattccttctttccatcttctgctaaacataaattttcagatccttggtatcaagttggcttcgtcctcacaaccggggtcaacagcgcatacgttctaggatactctggatcaatcatggtccctctaggctggatcggcggcacatgcggcctcctcctagctgccgccatatccatgtacgctaatgctcttcttgcacggcttcatgaagtcggtggcaaacgccatatcagatacagagaccttgctggacacatatatggtcagtcagtaataagctctgcacttgcactccctacctatattatatagaatagtctcactagtttcttcttctttttatttgatttcattttacttcaggaccgaaaatttacgggcttacatgggctctgcagtacattaaccttttcatgatcaacactggctttatcatcttagctggacaagctctcaaggccacgtatggactgttcagtgatgatggagttctgaaactcccttactgcattgcgatatcaggattcgtctgtgctcttttcgccattggaatcccttatttatctgccctcaggatttggttggggttctccacgcttttcagcctcatgtatattgtgatagcagttgtgctgtcgtcgagagatgggataaccgcacctgcaagggattacagcatccccaaatcatcgcagtcaactcgagtcttcactacgataggttccatagcagaccttgtgtttgcttacaacaccggcatgctgccagaaattcaggcaaccatcaggcctcctgtggtgaagaacatggagaaagctctatggttccagttcaccattggctccttgcctctctatgctgtagtttttgtgggttactgggcttatgggtcctcaacatcaggctacctcctcaacagtgtcacaggcccagtctgggtgaaagcggttgcaaatctgtcggcattttttcagacagtcatagcgctgcacatctttgctagccccatgtatgaattcctggacacaaaatatggaagtgggcgtggtggcccttttgagatccacaacgtggcgttcagagtagcagtcagaggaggctacctgacggtgaacacgctggtggccgcggtgctcccattcctcggcgacttcatgagcctgacgggcgccctcagcaccttcccgctgacgtttgtgctcgcaaatcacatgtacctgatggtgaaggggcctaagctgggtgccatccagaaatcatggcactggctcaatgttcttgggttcactgcgctggctgttgcagcggcggtctccgcaataaggctcatcatgcgtgattccagcacctaccacttcttcgctgatctttgagatcgatcgttttcttttctttttgttggaatgctgagccagagctagtattttttcattttcagagaattattatccatgtatgtaaggatgacgcatatatatattgaatagatgatttaagatc

SEQ ID NO: 107541 - DNA, 1716 bp, Zea mays
  unsure (1)..(1716): unsure at all n locations
  Clone ID: MRT4577_29576C.1
ttctcaattcggcacgcgggcaatcctacgacaacagggcgccgctcctcctgcccgtcaagatcatggacgccgccgccgacgacaagccggaaatctccgacgatacggcccaccagattagcgttggtacgttcctctttcctcttgatatgcgcactcctggcttattccttctttccatcttctgctacataaacataaattttcagatccttggtatcaagttggcttcgtcctcacaaccggggtcaacagcgcatacgttctaggatactctggatcaatcatggtccctctaggctggatcggcggcacatgcggcctcctcctagctgccgccatatccatgtacgctaatgctcttcttgcacggcttcatgaagtcggtggcaaacgccatatcagatacagagaccttgctggacacatatatggaccgaaaatttacgggcttacatgggctctgcagtacattaaccttttcatgatcaacactggctttatcatcttagctggacaagctctcaaggccacgtatggactgttcagtgatgatggagttctgaaactcccttactgcattgcgatatcaggattcgtctgtgctcttttcgccattggaatcccttatttatctgccctcaggatttggttggggttctccacgcttttcagcctcatgtatattgtgatagcagttgtgctgtcgtcgagagatgggataaccgcacctgcaagggattacagcatcccccaatcatcgcagtcaactcgagtcttcactacgatagggtccatagcagaccttgtgtttgcttacaacaccggcatgctgccagaaattcaggtgagcattttctttttctggataacattttctattgttggccgagtatttgtgatatattattacaggcaaccatcaggcctcctgtggtgaagaacatggagaaagctctatggttccagttcaccattggctccttgcctctctatgctgtagtttttgtgggttactgggcttatgggtcctcaacatcaggctacctcctcaacagtgtcacaggcccagtctgggtgaaagcggttgcaaatctgtcggcattttttcagacagtcatagcgctgcacgtaagacaagacagacgccaccatctttgtttacttcttctttcaaacatgaaaaaaaattcatatattatccatcctaactcgcagatctttgctagccccatgtatgaattcctggacacaaaatatggaagtgggcgtggtggcccttttgagatccacaacgtggcgttcagagtagcagtcagaggaggctacctgacggtgaacacgctggtggccgcggtgctcccattcctcggcgacttcatgagcctgacgggcgccctcagcaccttcccgctgacgtttgtgctcgcaaatcacatgtacctgatggtgaaggggcctaagctgggtgccatccagaaatcatggcactggctcaatgttcttgggttcactgcgctggctgttgcagcggcggtctccgcaataaggctcatcatgcgtgattccagcacctaccacttcttcgctgatctttgagatcgatcgttntcttttctttntgttggaatgctgagccagagctagtattttttcattttcagagaattattatccatgtatgtaaggatgacgcatatatatattgaatag

SEQ ID NO: 107542 - DNA, 665 bp, Zea mays
  unsure (1)..(665): unsure at all n locations
  Clone ID: MRT4577_29577C.1
ctagnactaggatttcttagnactatnnaagtgaccagctctaggnaaatcctcttagcacgaacatggacttattccctttactaccaagtggcagcatgtattcacttcgcagtaacagctccagggctttcgttggtgctgatttatttgtttgtagataatagtagcgtgcctgttcatgaaattgcattgaagtgtttaaatcacaatgccataatgtgtttgcaaaatagcattgcattgtttaaaattacactatgataggctgtctttatatcctatcagatttatttatatgcataaaaaggtttatgtgtcgtctgtccatctagataatgaccttaagttccaggaagttattaatgcatatcgtgcagatctgtgtgtattcatctagcatgcctctgactgagtgttcctaggacatttcacgttatatggccagtaccacaaaatgtggttacaaccagttctatcgtgatgtttctcgtgtttttgacaaaattgttatatagttaatataaaatacttaagaatcacagttaatgataaaacaagggtgttatctttttttcttgaacatctctgtatttccttttctactatctggagtaaaactaatgtatgctactttgaggtactaattaattttccagttctta

SEQ ID NO: 107543 - DNA, 1831 bp, Zea mays
  Clone ID: MRT4577_29578C.1
tggacatgttgccaccacttttaaataaataaataaatgaaaaatgatgcgagctacttttggtgttgggggaaggcacgggatcaccgtgctgtgctgcggcggcctcgtcctcctcctcctcctcctccctcctgccctttttataggccgcctccgcttcgtcgtcttggcaagacctgcccccgcgcctgcaatcctacgacaacagggcgccgctcctcctgcccgtcaagatcatggacgccgccgccgacgacaagccggaaatctccgacgatacggcccaccagattagcgttgatccttggtatcaagttggcttcgtcctcacaaccggggtcaacagcgcatacgttctaggatactctggatcaatcatggtccctctaggctggatcggcggcacatgcggcctcctcctagctgccgccatatccatgtacgctaatgctcttcttgcacggcttcatgaagtcggtggcaaacgccatatcagatacagagaccttgctggacacatatatggaccgaaaatttacgggcttacatgggctctgcagtacattaaccttttcatgatcaacactggctttatcatcttagctggacaagctctcaaggccacgtatggactgttcagtgatgatggagttctgaaactcccttactgcattgcgatatcaggattcgtctgtgctcttttcgccattggaatcccttatttatctgccctcaggatttggttggggttctccacgcttttcagcctcatgtatattgtgatagcagttgtgctgtcgtcgagagatgggataaccgcacctgcaagggattacagcatccccaaatcatcgcagtcaactcgagtcttcactacgataggttccatagcagaccttgtgtttgcttacaacaccggcatgctgccagaaattcaggcaaccatcaggcctcctgtggtgaagaacatggagaaagctctatggttccagttcaccattggctccttgcctctctatgctgtagtttttgtgggttactgggcttatgggtcctcaacatcaggctacctcctcaacagtgtcacaggcccagtctgggtgaaagcggttgcaaatctgtcggcattttttcagacagtcatagcgctgcacatctttgctagccccatgtatgaattcctggacacaaaatatggaagtgggcgtggtggcccttttgagatccacaacgtggcgttcagagtagcagtcagaggaggctacctgacggtgaacacgctggtggccgcggtgctcccattcctcggcgacttcatgagcctgacgggcgccctcagcaccttcccgctgacgtttgtgctcgcaaatcacatgtacctgatggtgaaggggcctaagctgggtgccatccagaaatcatggcactggctcaatgttcttgggttcactgcgctggctgttgcagcggcggtctccgcaataaggctcatcatgcgtgattccagcacctaccacttcttcgctgatctttgagcttgaggccacgtacgatcagtgaaatattcaattctagcttgtttcctttatgtttttggaaagggagggcagatagcagggtgggtagctaccagcagcagtagttgatttgtgatggaaacggtaaatttgtatccgagcaataaaatcaaggccaaatgtgctgagccagagctagtattatttatacacatctagatctcttctctttggttgtcttgtatcttcaaattcatcagtatgattgtatatgctgagccagagctagtatattttccagagaattatat

SEQ ID NO: 107544 - DNA, 2397 bp, Zea mays
  Clone ID: MRT4577_29579C.1
atggaaggtgaagatcctctggccctaatactaagcacaaccaaatttagttcgaccaagtatgaacgacattcagcgggttccgagtacgcttcccctctctggtggttcgatggcgggtgcttcagacgtcgggctcgcaggcgccctagaagcacaagcgaagacgatggcgacgcaagccaagttgttgtagcagatctgcgaccgattggatgcacaagaccgccattgagaggcattggagagaacggtcgcgaccaacgcttgttccatagcatcgctgaagtcggcggcaaccttcctaaggttccatttccggggtttgatggtgataatcccaaactttggcaactgcgttgtcacgactatttcaccatgtattcagttgatcctcgtgtatggatcaaaattgctacgatgcacttcacaggagctgcagctcgttggcttcagtcagtggaataccaacttgcccgagtctcttggatagagtttggtcatatggaggaagttgccgacaagaagcgcgactacaggaaatttgatgtctcctactcctccaaaaatttgtccaagtcgccattgccattgcctctacctcctaaggctcctcaaatgtctaagccagatgactcaactactgttggtgctatcaaggttgtctccactgatgacaagttggcctctctgatggcttatcggaaagctaaaggtctatgttacaaatgtggtctgtcgtatacaaggggacaccgttgtgttgataatgtgcagctacatgtagtcgaggaattgtggcaaatgatacacggacagtcaacagagaatgatgattcttcagaagagcttaacgccatgtctttgtcccaagctactgctgaagggttctctgctcccaagaccatgcaatttgtaggacatattcaagggttggatttattaatattgttggactccggcagctcacactcattcctaagtactcaagtggttgctcatgagctactaggagcagtgtggtctctttcaggctatgaattcaaatccaacctaccggtgttgccattgcagacgtatgacttgatcataggcattatcaaatgcaggcaaagtgaattctcgtccctagtaattcttgtcaagaagaaggataacacataccgattttgtgtggattatcgacatctaaatgccctcactgttaagactcgttttctcgtgccaattattgatgaactgctcgacgaactacatggtgctgcttggttttctacgttggatttgcgagctgggttccatcaaataagaatggcaccacaagaccagcacaagacaacattccaaacacatcacagtcaatttgagttttgtgtcatgcccttcaaactcatcggagcgcgtgcaacgtttcaaggagccatgaacaagacacttgcttccttgttgagaacctgtgttctggtatttttcgatgacatccttgtttacagtcctacttgggcgctgcatctacaacacatggaaatggttttacagttgctgactcgtgattgttggcaagtcaaattgtctaaatgttcttttggccgacaacagattgcatatttgggtcacattatcagccaagctggggtatccactgacccttccaaggttgaaacagtggtatcttggcctgtgcctcaaacttccaaggagttgcgaggttttcttgggcttgctggatattactggaagtttgtaagaaactttggagtaattgccaagccactcactgagctgttaaaaaagaacacagtatttgtgtggacttctattcatgacacaacttttcaagcccttaagcaagcactcccttcagctccagtattggcatttccaaattttaacaaaccttttttggtggagactgacgcttcaggcaagggcattggtgctgttcttcagcaagataaccatcctttggcatttgtgagtaaagctttgggagccacaaatttgggattgtctacatacgaggagtacttagccatcctgttggcagatgtggttgatggttatcaggcagatgaagaagcacttaagctattggctgctttagcaatctctgaacacccacctttcagtttgcataatggagtgatcaaatatggtaaccgtgtttggttgggaactaatgtgccactacaaactaaggcctgcccgtccaaatggtcttcatggttgtcggtggaggaatattggtacaattcctgcttccatacttcattgggtcggtcaccatttgagatcctctatggtcgtaatcctagacactttggcctgacagttgatgattcggtgtctcatgctgacctcagttcgtggctttctaagagggatcttatgctctga

SEQ ID NO: 107545 - DNA, 514 bp, Zea mays
  Clone ID: MRT4577_2957C.1
atgcgctcgaacaggtccagatgaatgaagttcttctattcggagtcgacttatgcctaactcctattactttatcgggattattcgagactgcgtatttgcacacaggcgtggagagcagacggaactctgaatgagtaatatgacttttttgactgaccgactctctggacgggaggaggactaaccgtagttgcgattctactttgatttatatttaagatataccaaattcgacatcagatatatggattcacgctctgtatgattcgatcctactacatcgtgtataggagacacgcgctctaccatacagaactagaagcgctttcactacaaaataaaaagaaaatcccttactattactaacgtgtctaaccgtccgtatagtatccacattattcatagttatacccactgatagatcgatctccccactactgcccatgacgaatacagaattaatagctctggatgacaggatgagaaccagtgacctgttgtaccagccact

SEQ ID NO: 107546 - DNA, 481 bp, Zea mays
  Clone ID: MRT4577_29580C.1
gactaaatcaagcagaccaccttgatgacaaaagtgagataggcactagtaaatgttgccggaggcacaaagggcgtcgaccggcccacacaaattcagtgagagacatatgcgccacaacatgtacataaagcatgcagctgagtctccggctagctgaggacaacgcatgtcttatgatcatcaccaggatcagaaggctaaggattcatgctcaactgaataatttcttgcaagagtggcaggcacctccatccgtcaggcgatgtggagcataacggcatctcgaggcattgggccagtgtccattgtgcatcacagggaggacattgataatcttctgggggctcaccaatgcatcatttaccgactgtcccgcgacacccatgtaggccactttttggtttgctgtacccaagttaatactagcgctcatgcaagaaatgaggggatggatatacctacacaacacatcctgtgc

SEQ ID NO: 107547 - DNA, 279 bp, Zea mays
  Clone ID: MRT4577_29581C.1
ttttgtttgatataaacatgcactagcggcattgtaggaacaggcttacagcgatatggtgattcaaatgacttactcaaactaatgaatgcctcggatgcacaacgacaacttttttttggaggttcgacagtaataatgacatgacaaatgagtcataaaacgattatgaatcacgatcacattacattgagatgagtgaatgaacaataaggacaacaagtcgggacaccaacagttgaacagggggctggccttcagaactatacttgcatacca

SEQ ID NO: 107548 - DNA, 750 bp, Zea mays
  Clone ID: MRT4577_29582C.1
ccgttccccttccgccccctcccgacgatcgcccccgctcgtcccaccgcggtgggcgatcgctcctctcctccgtgcgcgcgattcctgaggcgaggcgaccgacaccagattccgccggccggcccacctcccccgcttcgccgatcggatcgcgtgctccatgaggtagaggtgacgataaagcatagttgttgacttagcttgcagtggttctttatcgaagctaaggcagataataattggcgttatggcatatcgaatggtatgcgctccccaagtcattgatcttgagtctgggcgagggcatcctcatgttcattctgaaagtttaattcacaatgggaatgatttgtccgaccaaggcggtcaatatactgtcagagttgtaggcaatgctatgaatgctggtctttctgatacacagggttactacaatatgagcatgaatcatccacatcagcctgttcatagttctctgccaaatttaggcgttgattcaggttttgtcttcccaccaaatatgtacaacccttgcatgtcaacatctatgaacagatatgtctctcatgctcagagctttggattgcctttaaaccaagttgtctcaggaagtatggatggaagtactagaaatgaaaatgtcagcgaaactgctagaggattcattaaaaggaaaaatgcagcagttgcaggaagttgtcattttgttaatggatctgcaagctcaagctcatcctctcatacatc

SEQ ID NO: 107549 - DNA, 269 bp, Zea mays
  Clone ID: MRT4577_29583C.1
cccttggctgagggctataagacgagtttcctcgttctcgatcctccctggggctggcggatccgattgatgtgatgcctcctcaccagcacgggcatggtgcacttactctcccacaactagatcgaggaggtctaagaacccttgagcttcgtacacaaatgcgttcattgctgcataacgaccaaggagctgggcaatgtcatgtgctcgctgcggtgaaacgcaacagacgctgaactctcttagatgatcaatgaaggatgtgc

SEQ ID NO: 107550 - DNA, 379 bp, Zea mays
  unsure (1)..(379): unsure at all n locations
  Clone ID: MRT4577_29584C.1
gggcaaagctacagccacgtgcaaggcacgccgcgtaggggttcttcttcctcggctcctcgcgccgcactacgccgcatcgcgtcctcgcttggtagatatagggaagggattcggcgggtggtggtggcggcggcggcgagtgcgaaccattggaggaggcacaagaccctcacgggttttctagtagtagatactagatagtgataaccgattttctcctctagaatcccactcccactcgcgcacaattacgcactcaaagcccggcctcccccaccactagtccaccaccgggaaactttcccccgatctgtcttctcgccgttccgtcggcatgcacgacattggcctctccgcccgcgcggncggcgcgacg

SEQ ID NO: 107551 - DNA, 532 bp, Zea mays
  unsure (1)..(532): unsure at all n locations
  Clone ID: MRT4577_29585C.1
acacataccacaatcattaagaacagaaaacagaggagataaaaaaaatataagctcaaatccaaaagaagagatggtgtggcagcttgttcgaggatgtcacagaacagatagaaatctgagcagcacggagaactacacttttgttgtagccaaccttcaatgcaaagatcatcacttatatggcgcctttgctctgcaaattggcttcaactctctttgaaaaccatttctattcaccaaaactgattgaaagcgaggactggaccgcagcccagttcgttcgttcgccaggtgtgcgacggagcatgggtccgatccctaggatcgacaccccatgcctcactcgggtttttcccggtatggtttacacatgtgtgtgcggtcagtggttctgcgtgtttgccacacactagatgactaggcctctcaatccctttcgaatgtgtgtattggacacatgtgtgcgtgtggtgtggtgtgtgtagtgggtgtaaatttntggtgtccttgnaccctatcaaaaaactga

SEQ ID NO: 107552 - DNA, 708 bp, Zea mays
  Clone ID: MRT4577_29586C.1
gccggccggttggggaccaagcctttgcgcggcagaagcttccgaagatggcctacgactactacgcgtccggcgccgaggatgagtggacgctgcaggagaacatggaggccttctccaggatcttgagcagcggttgatgagataagattgccaagaaacgaagtctgaggctggcttcttattcttcacctggcttcttaagtagtagcttcttattcttaagcacttgcaataagaagctactactttagaagattgccaagaagagaagtctgaggctgtcgagtaccaaaagcttcttcccataggctgaaggaatagagaccgccacaatgagagcttggccaagagaagatccaaccgccaaggcttcctctggcacctccgcttaagaatgttcagtgcttttgagatgttttcaagacctatcttgttactgcttaggtaccttatgctgctatagcagtgttgcaattgcccctgtacttgacagatttgcattagatgctcaagctatagagggtaggttcctaattgtgaccatgtactaaattatatatctgttgctaagttatagtacagacaaaataaatttagcctggccaacttgtataaaaatgtgttattgtaactaagaatatctgaattgctcctatgttactttctatattcaaaaaaaacaaaaaaaaaaaaaaaaaagcggcc

SEQ ID NO: 107553 - DNA, 311 bp, Zea mays
  Clone ID: MRT4577_29587C.1
ttttgttgatcaacatacttttagaaacgtacttataatttatagggacacgacaaacttgaaccaaaatgctatatgattgtaacatccatgaacaaaaacctaaaccaaggagccaccaaacaccaggggttggatataccatagatgcttggatacagaaagtggactagctggcacaatcatgcacacgcatagctaaccaactactgttggattcggagtccacgaacaacgcatgcatcatatgttgcaaaaagaagggcacatggagatcacacactcatatgctgaatacgcagaatccagtg

SEQ ID NO: 107554 - DNA, 566 bp, Zea mays
  unsure (1)..(566): unsure at all n locations
  Clone ID: MRT4577_29588C.1
aaattgtaaaagttgtgacaaccgtcagattgaagttaaaggaccaggatcgcatatgtgcataaggtacatccatgtgacaccatacactgccttgataccatatagcaataaaaaacaagtggcctaaagaagctagtgctctaggcttgcactattagagccaaactacaaattatattaaatttctgaaatttgatcttttacggacaattgttggtgtttggtagcattgaacatcaaccgctgtgggaagccaatttcaaataatatgaaaagaatagaaaaggacatatacactcgtttttctcctcgcgctagtgagcagtgagttggagccggggcagcagccgtgccgcgtgatcggttcatgacaaatccatgcgccatgagctcatgacagattctccccattgtgggagcaggtacctctgctcgctttgtaggcatgttatatgatgcgcagtgccaaaccatgttgattgttggcgcgcgccaggatcagcttggtcgacgaggtcagcagatcacgagcagtcgcgtgaagacgcttnccaaaaccttat

SEQ ID NO: 107555 - DNA, 308 bp, Zea mays
  Clone ID: MRT4577_29589C.1
gagataatcacaactcaccatccctttcaatatgcttagaatatagctttttataatttttcaccctacaatacaaaattgttctatgaaggccatggtacatcatcatatcctatattatcaaccaaggatttgtctatttcgattaataatggcattgagtcaaattttggttgtttcaaatgatagacttcgacatttgttatgatttatgagttgattcttgatagcattactaaaaaatgacctgcatctgaaccaattgactaacatgcatatattatatactaggtatacggacgcgtggg

SEQ ID NO: 107556 - DNA, 4974 bp, Zea mays
  Clone ID: MRT4577_2958C.1
atggatcctaaaggcaaggggatggtgatcaacgacaaggaaaaggagtccttcgtcaatgagcccaatgatgacaagcccaccgactcaggctcgggccgcaaaagaaaagacgggagaaagaagaaggcaaggcgcatcaaggaaattgtctactacgacagcgacgaatcttcctcctcccaaaaggacgacgacgactacgatagacgaaagacggttaactcaaacttttctttcgattattcgcgcatcccgcatagttcaaatgctcaattacttcccattcgacttggcaagccccctcactttgatggagaggattacggattttggagccacaaaatgcgtactcacctgttttctctccatccaagcatttgggagattgtggaaagtggaatgaaatttgatagctcggatagccctatgtttattaatgaacagattcataaaaatgcacaagctactactgtattgctagcctctttgtgcagggacgagtatcacaaggtgagcggcttggacaatgccaagcagatctgggacaccctcaagatctctcatgagggaaacgatgtcaccttgctcaccaaaatggagttggtggaaggcgaacttggacggttcgcaatgataaggggcgaggagccaactcaaacatacaaccggctcaagacccttatcaacaaaataaggagctacggaagcacgcgatggacggatcacgacgtcgtccgcctaatgctaaggtcctttactgttcttgatcctcatttggtgaacaatattcgtgaaaatcctaggtacaccaagatgtcgcccgaagaagtacttgggaaattcgttagcgggcgaatgatgatcaaggaggcaagatacgtggacgacgccttgaatggttcgatcaacgagccgcaaccccttgctctcaaggcaacgaggagcaaggaggcgctaccgagcaaggtggcgcaagttgaggcggccgggctaaataatgaggagatggccctcatcattaagcgcttcaagacggcgcttaaaggacgcaagggacagccaagcaagaccaaagccaaggggaagcgctcgtgcttcaaatgcggtaagattggtcattttattgctaactgtcccgacaatgatagtgaccaggaacacgggagcaagagagaaaagaagaagcattacaagaaggccaagggcgaggcacatatcggaaaggagtgggattcggattgctcctcctccgactccgacaatgaaggactcgccgccactgccttcaacaagtcatccctcttccccaacgagtgtcacacatgccttatggcaagggagaagaaggtaagtaatcaaaacaatgtcacttatgattcttctagtgatgatgagtctagtgatgaagaaatagattactctagtttgttcaagggaatggatagaactaaagtagataagattaatgaattgattgatgccttgaatgaaaaggatagactcttagaaaaacaagaggatcttctatatgaagagcatgacaaatttgtagaggctcaaaaatcttatgctttagaagttaaaagaaatgaagtgctttctagtgaattatcttcttgtcatgaaaccattgctactttaaaaggtgttaataatgatttaaatgctaaactagaagtggctagtaaatctaactcttgtgtagaacatgttatggtttgcactaggtgtaaagattttaatgttgatgcttgtagtgaacacctagtttcaatttctaaattgaatgatgaagtggctagtcttaatgcccaacttaagactagcaaaagcgaatttgataaattaaaatttgcaagggatgcctatacgattggtagacatccctcaattaaggatggacttggctacaaaagggaagccaagaacttgacaagccataaggctcccatctccgccaaggagaaagggaaggcctctatggctagtagtgtgcaaaagaaccatgcctttatgtactatgatagaagacaacctagaaatgcttataggagttgtaatgcatataatgcctttgattctcatgccatgtttgcttctagctcttcttatgtgcatgatagaaatgttggtaggagaaatgttgttcataatatgcctaggagaaatgttgttaatgttcctaggaaagtaaatgaaccttctacaatatatcatgctttgaatgcttcctttgcaatttgtagaaaggatagaaaggtgattgctaggaaattaggggcaaaatgcaagggtgataaaacttgcatttgggtccctaagacaattgtgactaaccttgtaggacccaacaagagttgggtttatgcatccgggggttcaagctggattatcgacagcggatgcacaaaccatatgacgggggagaagaagatgttcacctcctacgtcaagaataaggattcccaagattcaattatattcggtgatgggaatcaaggcaaggtaaaagggctagatgtgtctgtctttagaagaagtgatgattcactagcttttaagggtgtattagacgacaagctctacttagttgattttgcaaaagaagaggccggtctagatgcatgcttaattgctaagactagcatgggctggctgtggcatcgccgcttagcacatgtggggatgaagaaccttcacaagcttctaaagggagaacacgtgataggtttgactaacgtacaattcgaaaagatagaccttgtgcagcttgtcaagcaggataagtctgaaacccaagggaccctcaagcgcttcctaaggagagctcaaaatgagtttgagctcaaggtgaagaagataaggagcgacaacgggtccgagttcaagaatcttcaagtggaggagttccttgaggaggaagggatcaagcacgagttctccgctccctacacaccacagcaaaatggtgtggtagagaggaagaacaggacgctaatcgatatggcgagaacgatgcttggagaattcaagacccccgaggtctaccttcatcgcctcctcaagaagacttcgtatgagcttctaaccggtaacaaacccaatgtatcttactttcgtgtatttgggagcaagtgctacattctagtaaagaagggtagaaattctaagtttgctcccaaagctgtagaagggtttttgttaggttatgactcaaatataaaggcgtatagagtcttcaacaaatcatcgggtttggttgaagtctctagcaacgttgtatttgatgagactaatggctctccaagagagcaagttgttgattgtgatgatgtagatgaagaagatgttccgacggccgctatacgaaccatggcgattggagtagtgcgaccacaggaacaagatgaacgagatcaaccttcttcctcaacaacggtgcatcccccaactcaagacgatgaacaggttcatcaaaaggaggcgtgtgatcaagggggagcacaagatgatcaagtaatggaggaagaagcgcaaccggcacctccaacccaagttcgaacggaggaactcaacaacttcaagcgcaatgaagtttggacactggtgcctcgtcccaagcaaaatgttgtgggaaccaagtgggtgtttcgcaacaaacaggatgagcacggggtggtgacgaggaacaaggctcgacttgtggcaaaaggttatgcccaagtcgcaggtttggactttgaggagacgttgtaccaaatggatgtgaagagcgctttcctcaacgggccaatcaaggaggaggtgtacgtagagcaaccccctggcttcgaggatgaacggtaccccgaccacgtgtgtaagctctctaaggcgctctatggacttaagcaagccccaagagcatggtatgaatgccttagagactttctaattgttaatgctttcaaggttgggaaagccgatccaactctttttactaagacatgtgatggtgatttgtttgtgtgccaaatttatgtcgatgacataatatttggttctactaaccaaaagtcttgtgaagagtttagcagggtgatgacgcagaaattcgagatgtcgatgatgggcgagttgaactacttccttgggttccaagtgaagcaactcaaggacggcatcttcatctcccaaacgaagtacacgcaagatctgctaaagcggtttgggatgaaggacgccaagcccgcaaagactccgatggggaccgacggacacaccgacctcaacaaaggaggtaagtccgttgatcaaaaggtataccggtcaatgatagggtccttactttatttatgtgctagtagaccggatattatgcttagcgtatgcatgtgtgctagatttcaatccgatcctaaggagtgtcacttagtggcggtgaagcgaattcttagatatttggttgctacgccctgcttcgggctctggtatccaaaggggtctacctttgacttggttggatactcagattccgactatgctggatgtaaggtcgataggaagagtacatcggggacgtgccaattcttaggaaggtccctggtgtcgtggaactctaagaaacaaacctccgttgccctatccaccgctgaggccgagtatgttgccgcaggacagtgttgcgcgcaactactttggatgaggcaaaccctcagggactttggctacaatctgagcaaagtcccactcctatgtgacaatgagagtgctatccgcatggcggaaaatcctgttgaacacagccgcacaaagcacattgacatccggcatcactttttgagagatcaccagcaaaagggagatatcaaagtgtttcatgttagcaccgagaaccagctagccgatatctttaccaagcctctagatgaaaagaccttttgcaggctgcgtagtgagctcaatatcctagattcgcggaacttggattga

SEQ ID NO: 107557 - DNA, 226 bp, Zea mays
  Clone ID: MRT4577_29590C.1
tttgggttttttttttttttggaaaatgcttttccttcgatctgaaacaatcaaacaacggctgttgaggcttacattgtttatactatcaccaaagaacatgttcgaccattgaccagataggtgcatgttcctgttgcgcaacaactgattacactcacaagaggtacaattggaacagctcgactgtgcactatgtcttttcttccatttgctcgagccaaat

SEQ ID NO: 107558 - DNA, 354 bp, Zea mays
  unsure (1)..(354): unsure at all n locations
  Clone ID: MRT4577_29591C.1
aaccctacccgactccgccgacgctccgatgtccgcccgacacaacggggagccggggggagagcgcacacgcaaaccagcttccggagcagggggactacttctagacgttcaagaagaatccttngctcctcgccgaccccaacctctccttcttccgggattacctccagagttggggtgccaaaattcccgccgccgccccctctttcgaaagtcccaagaaatcttccatggacactggggggggggggggagatgacgacgacgattcggatatgagggatcccactcctgagcgagacgagctcgacgaagagactgttgagcctgatcttgagctctaaggagaaa

SEQ ID NO: 107559 - DNA, 246 bp, Zea mays
  Clone ID: MRT4577_29592C.1
ggtaccctcgggtctgtccgggccaccacaccatagcagaacagggagccgccagtcttgccgaccgagcgatggctacatggcgaggtaggtgccgagaggctctgctgctgcacctccgctcttcttatgctctgctgattgctactgccaggcgccctctacgaggagcgctgttacgagttcggtgttcaggggacgccagcgaagaggctgcgcaagacccacgagatcataacggagaac

SEQ ID NO: 107560 - DNA, 351 bp, Zea mays
  Clone ID: MRT4577_29593C.1
agctatgacttcgcatgcgcgcgcacgcgtgcgctcggatcggctctagggcgcacccacactaatgttttttcactaaatgctagctttgctgttcacgagcatgatttggtaatggggacggatgtagctctaggaacgtcagtagatttaggccatcctgtcacatttgctactactttagaacaggtgtaccgcacagacatttttgccaacgcagggattttcctctgtgcttgtcatggcatgccggaagctgtttatacgacatacacatgacaaggaacggacgaggactccgcatataacaatactggacagagcatgactggatttatatcgacaactatt

SEQ ID NO: 107561 - DNA, 412 bp, Zea mays
  unsure (1)..(412): unsure at all n locations
  Clone ID: MRT4577_29594C.1
nnnnnnnnnnannnnnntnnnnnnttttttccgttttctgttcttttttttgtttttttttttttttttttatttttccccccaatcggccaaatttttggtttttaaggcccaaaaaaaccgcaatttttcctttgagtcacaaaacccccccaggggaatgccaacacccccttttaaacataaaaaagtgttttttacgattttcccaaacatgattggccccccacaggaaagggggttattggggttaaacagaataagcttaatttccttttgcaaaggggcaaaccccctttttagcatccccaagttgggttccataaaaaataagtttttcacaccatataaaacctggtttcaaaaaatttggggaaaaggttttcccgcccccaattttttaccggcccct

SEQ ID NO: 107562 - DNA, 376 bp, Zea mays
  unsure (1)..(376): unsure at all n locations
  Clone ID: MRT4577_29595C.1
tttcctttgcggcggccgggcgggcgggctcgcggggcttctcgtgcttcctgtggtgctctttgtggctctggcgtgcctttctccctactctgggcggcggcgttttcttccgttcgtccttctgtctgctctgtgccctgctgcttgtttgctgctgcggctcttgccattggggcggcgtgcttctgtcttctgtcttgctcccgtctgttcgtcctttggccggttgggcgcgctgtgccccgctgcttctttgctgcggctnttgcttctgccgtttggcccgcttgctgctgtctgccgtgcttccttcttgtctccgcgtccggtgctgcctttggtcccgctggttgcgggtgtccccggtgccctt

SEQ ID NO: 107563 - DNA, 345 bp, Zea mays
  Clone ID: MRT4577_29596C.1
gggggatgatgcactcgagcaggcagacaccatgatggttactttgccggaaaaccaacaaaactatgtgcggtactggcttatggagacaactgtgccgatgaccctgattggcatatggcgctatcctagaaaaactttaggctgagaaaataatctgttgtacctggcgaagtcatcagtgcaacaatttgtgctgagaacggcgtttttgcactgctctaagatgctgaacatcttgcttggaaccatcgtggtccgtgctggctaggccggtccctaaacgtcataggtgatgagcatacaatcatatttggaaggcacgcacatgcacaaacagtgcta

SEQ ID NO: 107564 - DNA, 425 bp, Zea mays
  Clone ID: MRT4577_29597C.1
tcggtccggattcccgggtcgatcacgcgtccggccacacattcgtgcagaaaatgcagtacttatcacaatggatataaaatcggatcgtgatgctgagcatgctaaaggcaatgttaatgttgacatagatctctacgaaggcatctgcactgacatcttaactttaataatatggaaactgtatgtcacaaaattatactctctaaaatactctggcaatgctgtttgcactgagctgatgattgtcgagatcattatggcaaatccaacaagagatccatgatcagatgccgagactgacgacgatatggacgatgattattgtgatcatagtattatgctttagatgacttatatcaggtatcatagcatatatcatactttatctttgctgaaggttctgtataatgtatgttagcctt

SEQ ID NO: 107565 - DNA, 682 bp, Zea mays
  Clone ID: MRT4577_29598C.1
gaaatacaccactttactcaggatgatcttatgacagaggatgtttttgttattgattgtcactcagacatatttgtttgggttggccaggaggtggatgccaaagtgaaatcacaagctatggatattggagagaaatttattgttcatgattttcttatggaaaaactatcacgagaaacaccaatattcattgtgtcagaaggcagcgagccacaattttttactagattcttcaattgggactctgcaaaatctcatatgcatggcagttcataccagaggaagcttgctatcctaaagggtggattacctccatcactagaaaaaccaaagcgacgaacaccagcatttacgggaagaggttttggacaagataaatctcagcgttcaagaagcatgtccactagtccggatcgtccacgtgttcggggaaggtctccagccttcaatatgttaacttctgcctttgagaacacaagcaataccaggaacctttccacccctcccattgttgtgagaaagcctttctcaaaatctggatgtcctgaacactcaagggtgtcacccaaaaaatcagctatcagttccctcaccaggtcttttgaaggtcacatgaaaagtacaataccaaattcagtaaaagtgagccctgagctaaagaaggcgacacaggaagaag

SEQ ID NO: 107566 - DNA, 339 bp, Zea mays
  Clone ID: MRT4577_29599C.1
atggcgacctccggcttgatggtgggggaaagcgagccgggctgcggcctctgcccctccctcagcctcaaggattttcatcaccagggctggggaggggagtgtgccgagttgagttttggcatgggcgggggcctcctggcagcagcatccgccctgaggtcagtgctgctgctgttcgaccccccggagcagaagtcaccgtcgtcgccgctgctggagcaggtgacggcgcgccgttcgtcggtcttccgttgctccgcaggccttcccccatggagtggggttgttcgtacctgcggagggggaaccggagttccgtttgtaatggcactttga

SEQ ID NO: 107567 - DNA, 219 bp, Zea mays
  Clone ID: MRT4577_2959C.1
aagggcacgaatataattttacacgggttgtgtcccgtgcctataaatagatgaatagtacccccgtactgttcacgctgacttgtaatcactcgtgcgtcacgcttgtacttatgccttctgtcaagccgaaggtacttttgtaattcaatattgttcctgtctttccataattatataaaatgaatcaataatgatatgttaaaaaaaaaaaaataa

SEQ ID NO: 107568 - DNA, 332 bp, Zea mays
  Clone ID: MRT4577_295C.1
ggggctgggctgtgttcggacgaagggtatgatcagtgctcaccacaaagctgcggagatagaggaggggagagtacgtcagcgtggaggtgaacggaccggggcacaggggtgtgcagaagaagtgctatcacatgagtgctgtgtgagggtgggacgtgattatgtgctccatcgggggagggatcaacaagcaggtgagagggggcttgatcaggaagggtatgcatttacgtggggagcatgtacagacctcccgttggatagaggagttgctttcggggcatgtcaagtacgatgaggttaaggtggttgccttggaccgtggcgag

SEQ ID NO: 107569 - DNA, 978 bp, Zea mays
  unsure (1)..(978): unsure at all n locations
  Clone ID: MRT4577_29600C.1
cagcaaaaacactggcatgtgccatcacaaacggaactccggttccccctccgcatgtacgaacaaccccactccgagggggaaggcctgcggagcaacggaaggccgacgaacggcgcgccgtcacctgctccagcagtggcgacgacggcgacttctgctccggggggccgaacagcggcaacgctgacctcagggtggatgccgctgccaggaggcccccgcccatgccaaaactcgtgaggcaaggacgggcagaaggccgtagaagttggaggtcagcccgtggccggtcccggccgccgcgccggcggaagaacctcttccggctgccgtggcaacnnccccgacgccgcaagtggcccccgaagccactcgcggnctgaagaccaggcacgctgcagctgccggacgccacgggcaatgcccgcttctccccccatcactgagtgaaggagcgggccaccgcccacgcaggggccgaccccaactcggcactctcccctccccagccttggtgatgaaaatccttgaggctgaggaaggggcagaagcccgcagcccggctcgctttcccccaccatcaagctggaggtcgccatctcgggtgaccgccggtgaagggggtgcgaccgggctgcatgatgaaaatccttgaagccgaatggtggtggaaggatgccaacccccattgggttgcacccctccaacggtggcaggaagaagacaagatcggcgacaccaccacgagcgcacgctctccgacagtgaagtcgccggaagagacgaccttgacacggatccctccagagaacaccggcgcaccccatctgggggcccggaaggcgaaagggcgcggtggtcgtaagaggagcgaggcatgtctactgcccgggggatcaacccctttttaaaggcagatcccccccccacacgagcccctgaagcgtcacaggtgaagtctcccctggtatgcat

SEQ ID NO: 107570 - DNA, 587 bp, Zea mays
  unsure (1)..(587): unsure at all n locations
  Clone ID: MRT4577_29601C.1
ccggtcggtacctattattgcgaatcttgagtaatctccgtgatgcgacgtgctgcgcgcggctgtggttgaggactataagatggtgcccagagagacatccgcgctagggaggacatgtagctcaacatccttaacgtgacaggcctagaaagacgagttgaatgagatcactttatgcctatcgtagttgacagtatgctaggattctgaatgtggcggtcctgcttacacaaaagctgcgagggcccgaatgtgcagcgatgagcgaaagtacagctcttactagtgctttaagtggatcgctagactttgataaatacagcattggaccgcgagtacaatatgcaaaatctgagtccactgtattgcagaagaagatggttcttatgcacctaaggagaaaagtaagaagcatgaggagaaagctgttgttaaaaaacgacgaacagaagaggcacaacaagctggcctcaatgctgctgctgcccaaagcaatggaactggctatcaagcgtctcgtatgggcaaggcattacaggagccacctgcacttccgaacacatcctnttaatccagaatctgcc

SEQ ID NO: 107571 - DNA, 205 bp, Zea mays
  Clone ID: MRT4577_29602C.1
ccccgccggcggcaccacaaatgggtggcagtggcgacgggagggccaacgaatcccaagggcgaccacggggaccgacacaacaacagcgaggccaggagcgctaagcctagccagcactgcagaccgagagcgccccgccgagcgcagggacgacaactggcagccgaagccgggggaccacacaaaacaggcagcgggccaa

SEQ ID NO: 107572 - DNA, 300 bp, Zea mays
  Clone ID: MRT4577_29603C.1
cggactgctcaagatcttcagggtgaacggcaagagctgcgtcgcggggtacgactccaagactagccacatcatgcccttctgattgtagcagcagtcggagtcggacgaacggaaccgactcacattcttcctgtctgtttcactcttgcagtttgcatctctttggttttgattcggtggaagtacattgagctgggaaaagaaaagagaagtatgagaatggcttctcttggaccaaacacaaacatgtacatggatagagattttttttggtaggaaaaaattaattgacgagac

SEQ ID NO: 107573 - DNA, 397 bp, Zea mays
  Clone ID: MRT4577_29604C.1
gccccccaatgattcattagtcttggatatccgcttgaaaaccaggagccagatatctaccttggcaacggtgccaacgcctcctgctgtcatccatgctcggctgtgcgcatggtctggtggcggccgtgtgtcatcctattcttttgccgctcgtcgttgcactacctcgccatgtctgcaacgctatggaatcgccgtgcaagccgctcaagtgaggatacgtgttatcagaagagcaagttggtacctggaatctcaagtcccaggtcaagaacaggtaccgaaggatgaggcgcttggaggatgctttgatgtgttcgtgagaggtctaggacgtcgtctcccagtcaacttcgggttgctggacccgtgcttcttataaagaaatatttac

SEQ ID NO: 107574 - DNA, 258 bp, Zea mays
  unsure (1)..(258): unsure at all n locations
  Clone ID: MRT4577_29605C.1
acagttttaacgagagtcgatcgctcngagagacgacgacatactgctgacacacttgatgctctcatgacacagacacaagcatctgaacctcacctgtctgatcnatagacgcagatgntatgactctgctgtagctgtggacacttgtaatatgcganatgatagagagatgagtgaactgagaatcactgacaaagttatgtggagacagagaatggttcactctcngcnnacacagagtctatatagctactg

SEQ ID NO: 107575 - DNA, 364 bp, Zea mays
  Clone ID: MRT4577_29606C.1
accggaagcaatggcgtgtgggggcttatctgaggagggtgaggttcacatcatttcacgcagcgcactattggattgatatgcagacttgacaatgcgcgcgtgcgcgcacacatgcacgcgtacacatacacattaccgggttggtctcggtgctttttagaagaggtgatgagctttcttcacaagggaaaccaggggcttatcagtctttggcacctgataatgattatcgacctcaaataatacgagggagttatcgagatctgacaacgtcttcaaagactccaagagtacatccatgaaattgtgctctgtgaaatctttgatgcacatgggcttgagctgtgccattgaaacgacc

SEQ ID NO: 107576 - DNA, 406 bp, Zea mays
  Clone ID: MRT4577_29607C.1
ggttatgtctatatatggtctgttctatctgccacctgttcggggacggaaacaacaaacccctacaaaatttctagggcggaggcgcccccccactaatcaaggaaagaacaaaaacgggggggggaacccaccccggacagggggggaaagaacaggggcgcacacacatgccccgcacgaggcaacacagccgaagcaccgccccaaaagactccggctccgtctaactaaccccgcggggccagacgggcccaatgccccctctcccacgaaaaccagctggaggggtatattataaccccccagcaaggcaacagggggggctcccccgactcaagcccacaccgcgcgggtgcattgcattgcgctgcccaagacggggggaccaaccaaaccaaccgca

SEQ ID NO: 107577 - DNA, 163 bp, Zea mays
  Clone ID: MRT4577_29608C.1
agagaacagtttgtacacactaatgttgacaagtcaataacaccagaacacacacagggtcaggttcgagagcgttgagatacacacatcactatatgaacggcaatgcctaatgcccgggaactagactagcactgtgaactatggctaaaactggatatct

SEQ ID NO: 107578 - DNA, 251 bp, Zea mays
  Clone ID: MRT4577_29609C.1
attcggctcgtgggatcggcaaaggataatacttcgccgcaatcaataaataaataaataaaatttattaaagaaaggtggcgtagaggatcggaggagaaccaaggttgcgtctcgaaggctcttgcctcgttggcaagggattgcctcccacctctcttcactaggctgctatctccctttctcccaccctccctctcttccttctcctccctctcttcattccccccctcccttctccccataccccc

SEQ ID NO: 107579 - DNA, 372 bp, Zea mays
  Clone ID: MRT4577_2960C.1
cgaaccgaaccaatacccaggcccgccagcaccactcagtactaggccgcccctcccttttttttttctttcattctttacaaaccgggctcgccatacttatttttttgttcccttaaacaacccttggaacaacaacaaccaacaacaaccttactgctccacccaaaagaaacccaacacctagcctcccacagatcccgcctaacaacaatgcccactcccccaaataacaccccaaaacccccaccacaaacattaaactaaacccgccccggccacatgatccaccttcccaaaaaaaacaaacccccaataacactttctctaaaaaaacaacacccccagccatttgtctacttaaaacaaaaa

SEQ ID NO: 107580 - DNA, 371 bp, Zea mays
  Clone ID: MRT4577_29610C.1
acccagcattaccaaatagggttttttcaaacatgttctgataaaaaagcaagccatccttgttcgagggggccttgtaatacaagggtcgacacgacgggaacaagctttccccccggggggggcctttttgtttaataggaggaacgcgccgggggggttctaggcctgtttgcagtacacagccagatagatttgctccacctcagattttttttttaataagaagccctgcatgcagggttggtttgatatggacccgggggttgctcaaaaaccatgaattttggtgggctcctttttaacaatgccggcctggacgaggaaatttgagacgttttttctttgatcaccctggagctgaatgacct

SEQ ID NO: 107581 - DNA, 376 bp, Zea mays
  Clone ID: MRT4577_29611C.1
aaccaaatagggtttattcaaacatgttctgataaaaaagcaagccatttttttttgatggggcctcgtagtacaagggttgacacgacggtaacaagcattcacgcgggggggggcctttttttgtaattgggggaacgcgcagggggggttctaggcctgtttgcagtacacagccagatagatttgctccaccttagattttttttttaataagatgccctgcatgcagggttggtttgatttggacccgggggttgctcaaaaaccatgaattttgatgggctcctttttaacaaagccggcctggacgaggaaattagagacgttctttctttgatcaccctggagcttaatgaccctgtccaagttttgg

SEQ ID NO: 107582 - DNA, 551 bp, Zea mays
  Clone ID: MRT4577_29612C.1
gccagccagatcatttgctttgcttggtcgttccttcgttctctgacagcaagcggaggtgcctgtgcaaagagcaagcagcgagctaagctaagttcttcagatacaagagctagcaagttagcagagatgaagcaccagcaaagcacgcgtcttcttctccctcaagctgctgcggctccagcagatcacccctctcccgcctgctgcaaccggcggtcggcgacggaggagatcgcccggggccagtccctggtgacgcagctgcgggcgatcgtgctccccgcgctgcaggccgaccagcgcgccgagctcgtcgcccacatgttccagagcgtattggattgctccagcaaggccatggccgagctgcagctccatcatcatcatcgtcggtccccaaccccaagtgctcgacgacctcgtgacgatgatggtgatgggctgcaggtggatgacaagaagagggtcaagaggatttcctctgttctccgctgcaaggaggaagaagaggagggtgttgctggtgctgctgctgctgctaaaaaccc

SEQ ID NO: 107583 - DNA, 338 bp, Zea mays
  Clone ID: MRT4577_29613C.1
gcataatagacagtgtgatggatagaggacgcacaaagggaccaaagcatgcatgcacaatcggacactatatggagcaataatcagaagccatgctgccctgcgacacaaatactggtacagcttctgcagttcagatacgaagacggatgcatacggaacacccagacaagaaagtatatgcaataggtgactggccagggacgaaattggtagcgtaggagcaggcggtggagtagacagggtaaattaggtggaaggcgagggtatcaacgggacccttgccggagacgaaggcctgtaccaagaatgcgaacaaggataacatggagaggagg

SEQ ID NO: 107584 - DNA, 193 bp, Zea mays
  Clone ID: MRT4577_29614C.1
gaaaacaaattttttaacttatgaaaataaagccaagactgccaccagggacccaagctgccctgccccacccatcaaacccctgccccatacttcacgggctttaaacaaaaccccgagggcgaagggactaaccaacccaaagacggactttgtggaattttaaacacaacaaccgagcccggaaccccct

SEQ ID NO: 107585 - DNA, 481 bp, Zea mays
  unsure (1)..(481): unsure at all n locations
  Clone ID: MRT4577_29615C.1
gtgccaactccctaggggaccctagcagtttgcctgctggtggcatgcttattaaaacgatgttaaaacgacatttaaacgtcgtttaaactataaaacactgacagaaagtgaaacgataaaacgttttacgattcatcgtaaaacgtcgtttaacgttgtttaaacgtcgcgttttgacgtttaaacgcggtatagagtgaaacgccgcgtttcgggcgtttaatgtgtctgctgctagaaattggcccagcccaattaggaactcccgcccaggtagggttggcgctctcaccaggccgccgctccaggccgcactccagggctccaggccaccgctgccgctgcttcaggccgccgccttctcccccgtgcagccttatccctcccccgtgctcagccgctcagcgtcgtcccccgtgctcagccgctcagcgttgtnctccctcctgcaccgaccgtccggcgccgccagtcccgc

SEQ ID NO: 107586 - DNA, 303 bp, Zea mays
  Clone ID: MRT4577_29616C.1
tcgaccacgcgtcctagctcggacaaggcacaacgccatccttcggtttccttgctggcgtcccgatcgctcgctcggtcgaaaagaaagaatctcgctttgaacatggcgtctctggcgttcggcagcaccgaaactgcagccgtggcggtgaccttcgtgaggacgcggtcggcgcgccagtccatgcttgtcgtgcctcccgctgacatcatgggcagcccatcgccggccaccgacgacaatgtccttggcgagaccatcttcggcttcatcttcaagaaagaccaacttgttgagacg

SEQ ID NO: 107587 - DNA, 366 bp, Zea mays
  Clone ID: MRT4577_29617C.1
gcattgctcatgtaggagaatggtgaacagtagaaggttatggagtcctaaagatgagcaagcctgggttcatgacagatttgatgagatggacctgcatgattttcatggtgacaatccaaaaagaaagcagggaggtgtctttagaggacgtggtggtggacaaggtggtagaactcgtggtattagccgtggtaacttcagaggcagcagaactcgaacatactatcatgatggtagcaagaactacagctatgttccaaaggaatctcatgcataccgtgataacaccaagaatgcccatcattcttcacacattaatgggaaaaatagagttccaaaaccatctcgtgatcactatgatga

SEQ ID NO: 107588 - DNA, 339 bp, Zea mays
  Clone ID: MRT4577_29618C.1
gtggttttcagcgttcacggagacgatggaatgaagtagcaatcgttggttggcttggctggttgctcgtcgctttccctgcctcccaaggcccaggggcaccttgcccaacttgcgaaagtatagatagatcgccatggaagcagccacggccatccaggtcgctagctagctagggcggcaagccaaaaatactgttatctttgccactatgtatttatgatttgtgaaatatcccagcgcgggccggccggttcttgtttaagcgggattaggagcatgattactcgtgtaaggaagaaggattaactaaccaatcaggaaccatgattacactgc

SEQ ID NO: 107589 - DNA, 506 bp, Zea mays
  Clone ID: MRT4577_29619C.1
ccggccgggaatcctctcgccgcgtatacgtcttcccctccctccttcctcggtcccatgctccgacgctgatccgtaggcccgacttaagcttattatggccgacgactccgtcatgaccgacgactacgaggttgtgcttccccaaagctttgtatctaaccgagtcggcgtggcagcaggacccaggcgtggacacctcattccactcgacctctccttgtgtcgcttcccatcgcacgaatcactcacataagcccccgcgctgatgcaacgcgtcgaagttgaagaactcgtactctgatgactacttcagattgacatgccgaataggaggtgcccgaggggcctgaggctgtgtcttatgagaaagaaccgacgtcgtcgagcaagccgagaggtgaagttcggcgaaataattggaattgtgaataagcagttcattggaggacagatgagaaggtgaagactgaatcgaatatgagggctggcgataccttgacctt
